United States Patent Application Publication US 2024/0271122 A1 - sequence listing, part 2

SEQ ID NO: 1812 - DNA, 2706 bp, Artificial Sequence
  Description of Artificial Sequence: Synthetic polynucleotide
atggaccagccaaggacccattctggacccacgacggccagcaatcctgcccccagctccaccaactcttcttctgctcccagcgcgactaattctaagcaggaaagatcctcttcttctttatccaaaccttcttctgtggttccttctaaggattctccagatggtgacgctattgctaagactcaagcagccgctttaaaaaacgacatgaaatctggtgataccagtacattagatgggagttctcaaaatataattccaaacagagcctctatgcaaaaatatattgaccagtcttctgatttattatctaggagctccggcgtaataacgccctccatgtctttgaatgcaagcactaacgccactaacaacgatagcagtggcaattctgctaatagtagtgatttgaagatccctatagacagggacaatactatattcaagacgttcgacaccaagactggtcaattcttgaaaaacgatgataatgaagaagaaataaggaggaacaataaagttgattctatacccccaaagaatatttatactaatatcaacaatccatctccctccccaccaccgtcttccaagcaaccaccgtctgcatccgcgccgcaattgccaccagcaacggaaccacacaaagaacaagcagcacaacaacagccaccaggaaatgcttctaactttttaaggatcttttctaataaaaaaatgaggagccattccgtacccactattttgcattcttctttaagaaaattatcttcccacaatcaatactatcgtaatcaaaatattcttttaaatcatccaactccttccggcatatccaagaaaaaattttctagaaaccatcatcaaccatatttgcattctaataatcctctcagtagtaaccctctttctttaaagcgcgcaatttttttaaatcaacaaatatctggtaacgcaagcactaacgctaataatgacaacattaataattccactgccacttctatgacaaatcaaagcttcttatccagcagtaactttgacttaactttggaagatagaataaactacataaaggctactccaacgcctgttccatttcctcctataaatttgcagggcttaaaagagattgacttacaggaaattttgaaaaacccacaattgagacatgatataatattcgacccgttgttgcaattcaggccaaatcttgatggcgaaagagggaataaaaaaagacaattggcgaatatctattggaatgatgttcaaaatgaaatttatgtttactctaagaggcctgaaatattccaatataacaggagcagattggtcccactttttgacactttaagggatgtattgttaacgatagtcccacaaaaagagtctccgatgataaataatgtattggacacagaattgaacattcaagaattattgaaaggttctttgataatgtctaacttgagcggctggttggctgatttatttaaacatcattgtgcccccatgagggacccatgggtggataaaatgagcaacaaatttaaagaagctgaaagagactcttctttaacaaggttaatagaaggtttaaggttggtttttcaaattttggaaacaatgaaattggatattgccaatcatcaaataagaatattaaggccagctttattaagtaatgctgtagaatttgagaaacagtatttcaacactcttatagcctctaaaagggtgaatttaaatacttccttactttggtttgataaaaaattcaacgaaaatgttaccgctggccttgttagaaatccaagttctatcactatccctgatgtctacaatatttgcattagaagtataattaaccttttgagttgtaggaagatggtgagagagtacccaactccgctttcttttgatcatgcaagattgatccttttgcgtgccgatatacgtcaaattgtttgtattttagtttgccgtttacttttccaacaattggtggccaacgatccttctatggataaagctacaaaggaatatgttattcatacatactccactaaaaggttaaagaatgaaattatcagcattataacagatgaacacggcaattgtaggtggactaaaaacacaatgtctattgctgttcatctttgcaaagttattgacgatcttcacagggagtacgacaacaatggtagttgtgaacaagccagaaggcctcaattgccttctttagacaactccaaaataacctttgctaaatcttggttatctaagcaaactcaacccctcagtgaagtttatggtgtcttggaaaatagagtattcaaatctttggaggacgctatcttcaacaggtccgagtgcacaattgatggacgcgttaaacaagactttgtgtacctctacaacacaaacaatggcaacgtaggtagcactaacactttgagtactactacagatactgctagcgttaaaatcagcccgtctttgatgtctccttctaaaacctccaccaccacacctactggcaatgcgattgcatccagaggtttattcgcagcaacagagttagaggaattcgagaatgtttatcgccacttatatgcattaatcaaccttcattggtccgtattcggtcctcattatatcgaaatgttaggagataaagttaataaaaaaggaatatga

SEQ ID NO: 1813 - DNA, 675 bp, Saccharomyces cerevisiae
atgtctgttattaatttcacaggtagttctggtccattggtgaaagtttgcggcttgcagagcacagaggccgcagaatgtgctctagattccgatgctgacttgctgggtattatatgtgtgcccaatagaaagagaacaattgacccggttattgcaaggaaaatttcaagtcttgtaaaagcatataaaaatagttcaggcactccgaaatacttggttggcgtgtttcgtaatcaacctaaggaggatgttttggctctggtcaatgattacggcattgatatcgtccaactgcatggagatgagtcgtggcaagaataccaagagttcctcggtttgccagttattaaaagactcgtatttccaaaagactgcaacatactactcagtgcagcttcacagaaacctcattcgtttattcccttgtttgattcagaagcaggtgggacaggtgaacttttggattggaactcgatttctgactgggttggaaggcaagagagccccgaaagcttacattttatgttagctggtggactgacgccagaaaatgttggtgatgcgcttagattaaatggcgttattggtgttgatgtaagcggaggtgtggagacaaatggtgtaaaagactctaacaaaatagcaaatttcgtcaaaaatgctaagaaatag

SEQ ID NO: 1814 - DNA, 675 bp, Artificial Sequence
  Description of Artificial Sequence: Synthetic polynucleotide
atgtctgttattaatttcacaggtagttctggtccattggtgaaagtttgcggcttgcagagcacagaggccgcagaatgtgctttagattccgatgctgacttgttgggtattatatgtgtgcccaatagaaagagaacaattgacccggttattgcaaggaaaatttccagtcttgtaaaagcatataaaaatagttctggcactccgaaatacttggttggcgtgtttcgtaatcaacctaaggaggatgttttggctttggtcaatgattacggcattgatatcgtccaattgcatggagatgagagttggcaagaataccaagagttcctcggtttgccagttattaaaagactcgtatttccaaaagactgcaacatattactcagtgcagcttctcagaaacctcattcttttattcccttgtttgattctgaagcaggtgggacaggtgaacttttggattggaactctatttctgactgggttggaaggcaagagagccccgaaagcttacattttatgttagctggtggattaacgccagaaaatgttggtgatgcgcttagattaaatggcgttattggtgttgatgtaagcggaggtgtggagacaaatggtgtaaaagactctaacaaaatagcaaatttcgtcaaaaatgctaagaaatga

SEQ ID NO: 1815 - DNA, 1563 bp, Saccharomyces cerevisiae
atgaatacaaacgttccaatattcagttctccggtcagagatttaccaaggtctttcgaacaaaaacatttagcggttgtagatgcatttttccaaacataccatgtcaaacctgattttatcgctaggtctcctggcagagtaaatctgattggtgagcatatagattattgcgatttttcagttttgccattagccattgatgtggatatgctttgcgcagttaaaattttagacgaaaaaaatccatccattaccttaacaaatgcggaccctaaatttgctcagcgaaagtttgatctgcctttagatggttcctacatggccatagatccgtctgtgtcggaatggtcgaattactttaaatgcggactacatgtggcacattcatacttgaaaaaaattgctccggaaagatttaataatacacccttagtaggtgcgcagatcttttgccagagcgatattcctactggtggtggactctcatctgcatttacttgcgcggcagcactagccacaattagagccaatatgggaaaaaattttgatatttccaaaaaagacttgacccgcatcacagcggttgctgagcactatgttggagtcaataatggtggtatggatcaagcaacgtctgtttatggggaagaagatcatgctctatacgtagagtttaggccaaaactaaaggccacacctttcaagtttcctcaattgaaaaatcatgaaatcagtttcgtcatcgccaatactcttgtaaagtctaataaattcgaaactgctcctacaaattacaatttaagagtaatagaggtaacagttgctgccaacgccttggcgaccagatacagcgtggccttaccatctcacaaggacaattctaactcagaaagagggaatctaagagattttatggatgcttactacgccagatacgaaaaccaagcccaaccatggaatggagatatcggaactggtattgaacgtttactcaagatgctacaattggtagaagaatctttctcgaggaaaaagagcggattcactgtacatgaagcctctacggcgctaaactgttcacgtgaggagttcactagagattacctgacaacttttcccgtccgcttccaagtcttgaaactatatcaaagagctaaacacgtttactccgaatccttaagggtgcttaaggctttaaaaatgatgacaagtgccacttttcacacggacgaagatttctttacagattttggccgactaatgaatgagtcccaggcctcttgtgataaactttatgaatgttcgtgcatagaaaccaatcaaatatgctcgattgccctagcaaatggttctttcggctcccgtctcactggcgctggttggggcggttgcactatccaccttgttcctagtggcgctaatgggaacgtggaacaggtacgaaaagcactaatcgaaaaattctacaatgtaagatatccggatctcacagatgaagaactaaaagacgcaattatagtttcgaagcctgccttgggtacttgtttgtacgaacaataa

SEQ ID NO: 1816 - DNA, 1563 bp, Artificial Sequence
  Description of Artificial Sequence: Synthetic polynucleotide
atgaatacaaacgttccaatattcagttctccggtcagagatttaccaaggtctttcgaacaaaaacatttagcggttgtagatgcatttttccaaacataccatgtcaaacctgattttatcgctaggtctcctggcagagtaaatttaattggtgagcatatagattattgcgatttttctgttttgccattagccattgatgtggatatgctttgcgcagttaaaattttagacgaaaaaaatccatccattaccttaacaaatgcggaccctaaatttgctcagagaaagtttgatttacctttagatggttcctacatggccatagatccgtctgtgtctgaatggtctaattactttaaatgcggattgcatgtggcacattcttacttgaaaaaaattgctccggaaagatttaataatacacccttagtaggtgcgcagatcttttgccagagcgatattcctactggtggtggactctcttctgcatttacttgcgcggcagcattggccacaattagagccaatatgggaaaaaattttgatatttccaaaaaagacttgacccgcatcacagcggttgctgagcactatgttggagtcaataatggtggtatggatcaagcaacgtctgtttatggggaagaagatcatgctttgtacgtagagtttaggccaaaattgaaggccacacctttcaagtttcctcaattgaaaaatcatgaaatcagtttcgtcatcgccaatactcttgtaaagtctaataaattcgaaactgctcctacaaattacaatttaagagtaatagaggtaacagttgctgccaacgccttggcgaccagatacagcgtggccttaccatctcacaaggacaattctaactctgaaagagggaatttaagagattttatggatgcttactacgccagatacgaaaaccaagcccaaccatggaatggagatatcggaactggtattgaacgtttactcaagatgttacaattggtagaagaatctttctctaggaaaaagagcggattcactgtacatgaagcctctacggcgttgaactgttctcgtgaggagttcactagagattacttgacaacttttcccgtccgcttccaagtcttgaaactttatcaaagagctaaacacgtttactccgaatccttaagggtgcttaaggctttaaaaatgatgacaagtgccacttttcacacggacgaagatttctttacagattttggcagattaatgaatgagtcccaggcctcttgtgataaactttatgaatgtagttgcatagaaaccaatcaaatatgctccattgccttggcaaatggttctttcggctcccgtctcactggcgctggttggggcggttgcactatccaccttgttcctagtggcgctaatgggaacgtggaacaggtaagaaaagcattaatcgaaaaattctacaatgtaagatatccggatctcacagatgaagaattgaaagacgcaattatagtttccaagcctgccttgggtacttgtttgtacgaacaatga

SEQ ID NO: 1817 - DNA, 333 bp, Saccharomyces cerevisiae
atgtgcgcggaaccagacgactgggaaaggatcgaaaggcatccgcggaaacttaaaatagctccgcggatgctagatttctacgagtcatacatagtctggcgtgaaggtaatttttttttatgtctccgttcttttccaaatggggtgatccgtggagggcggtgcttctttcgcgccacttccttgccgtggaaaaatgtgtacggttaccatggtcacataacctctgtgtgcggagccactctgactcgcatcaaccgggctatggttgcatcggatgctggaatgggttctattggactcaccaacttgtttctttatagagtgtaa

SEQ ID NO: 1818 - DNA, 333 bp, Artificial Sequence
  Description of Artificial Sequence: Synthetic polynucleotide
atgtgcgcggaaccagacgactgggaaaggatcgaaaggcatccgcgtaaacttaaaatagctccgaggatgcttgatttctacgagagttacatagtctggcgtgaaggtaatttttttttatgtctccgttcttttccaaatggggtgatccgtggagggcgttgcttctttcgcgccacttccttgccgtggaaaaatgtgtacggttaccatggtcacataacctctgtgtgcggagccactttaactcgcatcaacagagctatggttgcatctgatgctggaatgggttctattggactcaccaacttgtttctttatagagtgtga

SEQ ID NO: 1819 - DNA, 4506 bp, Saccharomyces cerevisiae
atgagcaatatcaaaagcacgcaagatagctctcataatgctgtcgctagaagctcaagcgcttcttttgcagcttcagaagaatcatttacgggcataacccatgacaaagatgagcagagcgataccccggcggataaactaacaaaaatgctgacaggacctgcaagagacactgcgagccagattagtgccactgtgtctgaaatggcgccagatgtcgtatctaaagtggagtcatttgcagatgcactatcccgtcatacaacgagaagcggtgcctttaatatggattcagatagtgacgatgggttcgatgcccatgccatctttgaaagttttgtaagagacgctgatgagcaaggcatccatatccgcaaggctggtgttaccatagaggacgtaagcgctaaaggtgtggatgcgagtgccctagaaggtgctacctttggtaacattctttgtttaccgttgaccatctttaaaggtattaaggctaagaggcatcaaaagatgagacagatcataagcaatgtcaatgccctggcagaagcgggtgaaatgattttggttcttggaaggcctggtgctggttgttcctcctttttaaaagtaacagctggtgaaatagatcagtttgccggtggtgtttccggtgaagtagcatatgatggtattccccaagaagaaatgatgaaacgatataaagcagatgttatttacaatggtgagttggatgttcatttcccttatttaacagttaagcaaactttggatttcgctattgcctgcaaaacgcctgctctcagagtcaataacgtttccaaaaaggaatacattgcatccagaagagatttatatgcaaccattttcggtctaaggcatacctataataccaaagttggtaacgatttcgttagaggtgtatctggtggtgaacgtaagcgtgtttccattgccgaggctttggcagccaaaggttccatttactgttgggataatgccactagaggtttggatgcgtctacggccttagaatacgcaaaagccatccgtattatgacaaacttattgaaatcaaccgcttttgttacaatttatcaggcaagtgaaaacatttacgaaacatttgataaagtcactgtcctttattctggtaagcaaatttattttggtttgatccacgaggcaaaaccttatttcgcaaaaatgggttatttgtgtcctccaaggcaagcaacagctgaatttttaaccgcgttgactgatccaaatggattccatctgatcaagccaggttatgaaaataaagtaccaagaaccgctgaggaattcgaaacatattggttaaattctccagagtttgctcaaatgaaaaaagatatcgctgcttataaagagaaggtcaataccgaaaagactaaagaagtttatgacgaatcgatggctcaagagaaatccaaatatacgagaaagaagtcttattatacagtgtcatattgggaacaagttaaactgtgtacccaacgtgggttccaaagaatttacggtaacaagagttatacagtcatcaatgtctgctctgcaataattcaatcttttattactggatcattattttacaataccccttcatccacttccggtgctttttcaagaggtggtgtgttgtattttgcgctactatattattctttgatgggactggcgaatatttcttttgaacataggccaatcttacaaaagcacaagggctattctttgtatcatccttcagctgaggcaattggctccactctggcatctttccccttcagaatgattggtttgacctgtttctttatcattttattcttcctatctgggttgcacagaacagcgggatcattttttaccatctatttgttcttaaccatgtgttcagaggcgatcaatggtttatttgagatggtttcttcagtatgtgacactctttctcaagctaactctatctcgggtattctgatgatgtctatctcaatgtactctacctatatgatccaattgccttcgatgcatccatggtttaaatggatatcgtacgtactacctatcaggtacgccttcgagtcgatgttaaatgccgaatttcacggtaggcatatggattgtgctaacactctagtacccagtggaggagactatgataatttatccgatgactacaaagtatgtgcttttgttggttcgaaaccaggtcagtcttatgtgcttggtgatgactaccttaaaaatcaatttcagtacgtttataagcacacgtggagaaactttggtatcttgtggtgctttttactgggttatgttgttttgaaagtgatattcacagaatataagaggcctgtgaaaggtggtggtgatgctcttatcttcaagaaaggatcaaaaagatttatcgcacatgcagatgaagaatctccagacaatgtcaatgatatagatgccaaagagcaattctccagtgaaagtagcggcgcaaatgatgaagtatttgatgatttagaagccaaaggtgttttcatttggaaggacgtatgctttactattccatatgaaggcggtaagagaatgcttttggataatgtttcaggttattgtattccaggtaccatgacggccttgatgggagagtcaggtgctggtaaaacaactttgttaaatactcttgctcaaagaaatgtcggtatcattactggtgatatgcttgtcaatggacgtcccattgatgcgagtttcgaaaggcgtacaggttatgtacaacaacaggatatacatatcgcagagttaactgttagggaatcgttgcagttttctgctcgtatgcgtcgccctcagcatttgcctgattctgaaaaaatggattatgtggaaaaaatcatcagagttttgggaatggaagagtatgcggaagcccttgttggtgaggttggttgtggtttaaacgttgaacagagaaagaagctgtctattggtgttgaactagtcgccaaaccagacttattattattcctcgatgaacctacatcaggtttggattctcaatcttcatgggccattattcaattattaagaaagttatcaaaagctggccaatccattctttgtacgatccatcaaccttcagctactctgttcgaagagtttgatagattactacttttgaggaagggtggacaaactgtttatttcggagatattggtaagaactctgccaccattttgaactactttgaaaggaatggggcaagaaaatgtgattctagtgaaaatcctgctgaatatattttagaggctattggtgccggtgccacagcatccgtcaaagaagactggcacgaaaaatggttgaactctgtcgagtttgaacaaacaaaagaaaaagtacaggatttaataaatgatttatcgaaacaagaaactaaatccgaagttggagacaaaccttccaaatatgctacttcttatgcttaccagttcagatatgttttaatcagaacctctacttcattttggagaagtctgaattacatcatgtcaaagatgatgctaatgctggttggtggtctgtatattggtttcacatttttcaatgttggtaaaagttatgtcggcttacaaaatgcgatgttcgcggcatttatctctattatcttgtctgctcctgcaatgaaccaaatccaaggacgtgctattgcctccagagaactttttgaagttagggaatcccaatctaacatgtttcactggtcgctggtgttgatcactcagtacttgagcgaacttccctatcatttatttttttcgacaattttctttgtctcatcgtattttccattaagaatcttcttcgaagcgtcaagatctgcggtgtactttttgaattactgcattatgttccagttatactatgttggtcttggcttaatgatcctatatatgtcaccgaaccttccatccgctaatgttatcttaggtttgtgtctgtcatttatgctttctttctgtggtgttacacaacctgtctcattgatgcctggcttctggacattcatgtggaaggcttccccatacacatattttgttcagaatctggtcggaattatgctgcacaaaaaaccagtcgtatgcaaaaagaaagaactaaactacttcaacccaccaaacggctcaacgtgtggagagtacatgaaaccctttttggaaaaagctactggttacatcgaaaatcctgatgctacgtcagattgtgcatactgtatttacgaagttggagataattatttgacacatatcagctctaagtatagctacttgtggagaaattttggaatattttggatttacattttcttcaatatcattgctatggtttgtgtgtattacctcttccatgtaagacaatcttccttcctaagccccgtatctatactcaataaaattaaaaacataaggaaaaagaagcagtaa

SEQ ID NO: 1820 - DNA, 4506 bp, Artificial Sequence
  Description of Artificial Sequence: Synthetic polynucleotide
atgagcaatatcaaaagcacgcaagatagctctcataatgctgtcgctagaagcagcagcgcttcttttgcagcttctgaagaaagttttacgggcataacccatgacaaagatgagcagagcgataccccggcggataaattaacaaaaatgttaacaggacctgcaagagacactgcgagccagattagtgccactgtgtctgaaatggcgccagatgtcgtatctaaagtggagtcttttgcagatgcattgtcccgtcatacaacgagaagcggtgcctttaatatggattctgatagtgacgatgggttcgatgcccatgccatctttgaaagttttgtaagagacgctgatgagcaaggcatccatatccgcaaggctggtgttaccatagaggacgtaagcgctaaaggtgtggatgcgagtgccttggaaggtgctacctttggtaacattctttgtttaccgttgaccatctttaaaggtattaaggctaagaggcatcaaaagatgagacagatcataagcaatgtcaatgccttggcagaagcgggtgaaatgattttggttcttggaaggcctggtgctggttgttcctcctttttaaaagtaacagctggtgaaatagatcagtttgccggtggtgtttccggtgaagtagcatatgatggtattccccaagaagaaatgatgaaaagatataaagcagatgttatttacaatggtgagttggatgttcatttcccttatttaacagttaagcaaactttggatttcgctattgcctgcaaaacgcctgctctcagagtcaataacgtttccaaaaaggaatacattgcatccagaagagatttatatgcaaccattttcggtttgaggcatacctataataccaaagttggtaacgatttcgttagaggtgtatctggtggtgaacgtaagcgtgtttccattgccgaggctttggcagccaaaggttccatttactgttgggataatgccactagaggtttggatgcgtctacggccttagaatacgcaaaagccatccgtattatgacaaacttattgaaatctaccgcttttgttacaatttatcaggcaagtgaaaacatttacgaaacatttgataaagtcactgtcctttattctggtaagcaaatttattttggtttgatccacgaggcaaaaccttatttcgcaaaaatgggttatttgtgtcctccaaggcaagcaacagctgaatttttaaccgcgttgactgatccaaatggattccatttgatcaagccaggttatgaaaataaagtaccaagaaccgctgaggaattcgaaacatattggttaaattctccagagtttgctcaaatgaaaaaagatatcgctgcttataaagagaaggtcaataccgaaaagactaaagaagtttatgacgaaagtatggctcaagagaaatccaaatatacgagaaagaagtcttattatacagtgtcttattgggaacaagttaaattatgtacccaacgtgggttccaaagaatttacggtaacaagagttatacagtcatcaatgtctgctctgcaataattcaatcttttattactggatctttattttacaataccccttcttccacttccggtgctttttccagaggtggtgtgttgtattttgcgttattatattattctttgatgggattagcgaatatttcttttgaacataggccaatcttacaaaagcacaagggctattctttgtatcatccttctgctgaggcaattggctccactttggcatctttccccttcagaatgattggtttgacctgtttctttatcattttattcttcttatctgggttgcacagaacagcgggaagtttttttaccatctatttgttcttaaccatgtgttctgaggcgatcaatggtttatttgagatggtttcttctgtatgtgacactctttctcaagctaactctatcagtggtattttgatgatgtctatctctatgtactctacctatatgatccaattgccttctatgcatccatggtttaaatggatatcttacgtattacctatcaggtacgccttcgagtccatgttaaatgccgaatttcacggtaggcatatggattgtgctaacactttggtacccagtggaggagactatgataatttatccgatgactacaaagtatgtgcttttgttggttccaaaccaggtcagtcttatgtgcttggtgatgactaccttaaaaatcaatttcagtacgtttataagcacacgtggagaaactttggtatcttgtggtgctttttattgggttatgttgttttgaaagtgatattcacagaatataagaggcctgtgaaaggtggtggtgatgctcttatcttcaagaaaggatctaaaagatttatcgcacatgcagatgaagaatctccagacaatgtcaatgatatagatgccaaagagcaattctccagtgaaagtagcggcgcaaatgatgaagtatttgatgatttagaagccaaaggtgttttcatttggaaggacgtatgctttactattccatatgaaggcggtaagagaatgcttttggataatgtttctggttattgtattccaggtaccatgacggccttgatgggagagtctggtgctggtaaaacaactttgttaaatactcttgctcaaagaaatgtcggtatcattactggtgatatgcttgtcaatggacgtcccattgatgcgagtttcgaaaggcgtacaggttatgtacaacaacaggatatacatatcgcagagttaactgttagggaatctttgcagttttctgctcgtatgcgtcgccctcagcatttgcctgattctgaaaaaatggattatgtggaaaaaatcatcagagttttgggaatggaagagtatgcggaagcccttgttggtgaggttggttgtggtttaaacgttgaacagagaaagaagttatctattggtgttgaattggtcgccaaaccagacttattattattcctcgatgaacctacatctggtttggattctcaatcttcttgggccattattcaattattaagaaagttatccaaagctggccaatccattctttgtacgatccatcaaccttctgctactttattcgaagagtttgatagattattacttttgaggaagggtggacaaactgtttatttcggagatattggtaagaactctgccaccattttgaactactttgaaaggaatggggcaagaaaatgtgattctagtgaaaatcctgctgaatatattttagaggctattggtgccggtgccacagcatccgtcaaagaagactggcacgaaaaatggttgaactctgtcgagtttgaacaaacaaaagaaaaagtacaggatttaataaatgatttatccaaacaagaaactaaatccgaagttggagacaaaccttccaaatatgctacttcttatgcttaccagttcagatatgttttaatcagaacctctacttctttttggagaagtttgaattacatcatgtccaagatgatgttaatgcttgttggtggtttatatattggtttcacatttttcaatgttggtaaaagttatgtcggcttacaaaatgcgatgttcgcggcatttatctctattatcttgtctgctcctgcaatgaaccaaatccaaggacgtgctattgcctccagagaactttttgaagttagggaatcccaatctaacatgtttcactggtctttggtgttgatcactcagtacttgagcgaacttccctatcatttatttttttctacaattttctttgtctcttcttattttccattaagaatcttcttcgaagcgtccagatctgcggtgtactttttgaattactgcattatgttccagttatactatgttggtcttggcttaatgatcttatatatgtctccgaaccttccatccgctaatgttatcttaggtttgtgtttatcttttatgctttctttctgtggtgttacacaacctgtctctttgatgcctggcttctggacattcatgtggaaggcttccccatacacatattttgttcagaatttggtcggaattatgttgcacaaaaaaccagtcgtatgcaaaaagaaagaattgaactacttcaacccaccaaacggctctacgtgtggagagtacatgaaaccctttttggaaaaagctactggttacatcgaaaatcctgatgctacgtctgattgtgcatactgtatttacgaagttggagataattatttgacacatatcagctctaagtatagctacttgtggagaaattttggaatattttggatttacattttcttcaatatcattgctatggtttgtgtgtattacctcttccatgtaagacaatcttccttcttgagccccgtatctatactcaataaaattaaaaacataaggaaaaagaagcagtga

SEQ ID NO: 1821 - DNA, 1089 bp, Saccharomyces cerevisiae
atgtcccgtccacaagttactgttcactctttgactggtgaagctactgccaatgccttgccattgccagctgtcttctccgctcctatccgtcctgacattgtccacactgttttcacctctgtgaacaagaacaagagacaagcttacgctgtttctgaaaaggctggtcaccaaacctccgctgaatcctggggtaccggtcgtgccgtcgctcgtattccaagagttggtggtggtggtaccggtagatccggtcaaggtgccttcggtaacatgtgtcgtggtggtcgtatgtttgctccaactaagacctggagaaagtggaacgttaaggttaaccacaacgaaaagcgttacgccactgcttctgctattgctgctactgctgttgcttctttggtcttggccagaggtcacagagtcgaaaagattccagaaatcccattggttgtctccactgacttggaatctattcaaaagaccaaggaagctgttgctgctttgaaggctgttggtgctcactccgacttgttgaaggtcttgaagtccaagaaattgagagccggtaagggtaagtacagaaacagaagatggactcaaagaagaggtccattagttgtctacgctgaagacaacggtatcgtcaaggccttgagaaacgttccaggtgttgaaactgccaacgttgcttctttgaacttgttgcaattggctccaggtgctcacttgggtagattcgttatctggaccgaagctgctttcaccaagttggaccaagtctggggttccgaaaccgttgcctcctccaaggtcggttacactttgccatcccacatcatctccacttctgatgtcaccagaattatcaactcttctgaaatccaatctgctatcagaccagctggccaagctactcaaaagcgtactcacgttttgaagaagaacccattgaagaacaagcaagttttgttgagattgaacccttacgccaaggtctttgctgctgaaaagctaggttccaagaaggctgaaaagactggtaccaagccagctgctgttttcgccgaaaccttgaagcatgactag

SEQ ID NO: 1822 - DNA, 1089 bp, Artificial Sequence
  Description of Artificial Sequence: Synthetic polynucleotide
atgtcccgtccacaagttactgttcactctttgactggtgaagctactgccaatgccttgccattgccagctgtcttctccgctcctatccgtcctgacattgtccacactgttttcacctctgtgaacaagaacaagagacaagcttacgctgtttctgaaaaggctggtcaccaaacctccgctgaatcctggggtaccggtcgtgccgtcgctcgtattccaagagttggtggtggtggtaccggtagatccggtcaaggtgccttcggtaacatgtgtcgtggtggtcgtatgtttgctccaactaagacctggagaaagtggaacgttaaggttaaccacaacgaaaagcgttacgccactgcttctgctattgctgctactgctgttgcttctttggtcttggccagaggtcacagagtcgaaaagattccagaaatcccattggttgtctccactgacttggaatctattcaaaagaccaaggaagctgttgctgctttgaaggctgttggtgctcactccgacttgttgaaggtcttgaagtccaagaaattgagagccggtaagggtaagtacagaaacagaagatggactcaaagaagaggtccattagttgtctacgctgaagacaacggtatcgtcaaggccttgagaaacgttccaggtgttgaaactgccaacgttgcttctttgaacttgttgcaattggctccaggtgctcacttgggtagattcgttatctggaccgaagctgctttcaccaagttggaccaagtctggggttccgaaaccgttgcctcctccaaggtcggttacactttgccatcccacatcatctccacttctgatgtcaccagaattatcaactcttctgaaatccaatctgctatcagaccagctggccaagctactcaaaagcgtactcacgttttgaagaagaacccattgaagaacaagcaagttttgttgagattgaacccttacgccaaggtctttgctgctgaaaagttgggttccaagaaggctgaaaagactggtaccaagccagctgctgttttcgccgaaaccttgaagcatgactga

SEQ ID NO: 1823 - DNA, 627 bp, Saccharomyces cerevisiae
atgtatggagatttaggtaataaattagtattagaagctaaaagaacaaaacagctgtacgcaagaagtaatcaagatgttaatttacccatgtatcatgaagatataatacgaaatattctgaaagaagtttcaaatttacgtaaaaatacggaatatcttaaagaacagcagcaactaggaatgctagatgataaggtggctaaatgccagtatttcgttaccttgttatgtatggaaaggaacaagagatgtctcttagcataccaaaggttgagaacagacatactagattctatggcttggaataataatggtctggacttgatgagtagcattacgtttagccaacaagacacaaataacctttctcatcaagagcaggaatatttgaaagaatactgcgatttaattactgatttaaaaagtggtgacttggtcgatattgatttatccggctctttagtgcctccgagcgatgtatttattgatgttagagtgctcaaagatgctggtgagattcaaactgaatacggcgtgtttaaccttattaaagactcccagtttttcgtaaggcagtctgatgtagagcgtttgattcaacaaggttatttgcagaagatatga

SEQ ID NO: 1824 - DNA, 627 bp, Artificial Sequence
  Description of Artificial Sequence: Synthetic polynucleotide
atgtatggagatttaggtaataaattagtattagaagctaaaagaacaaaacagttatacgcaagaagtaatcaagatgttaatttacccatgtatcatgaagatataataagaaatattttgaaagaagtttctaatttacgtaaaaatacggaatatcttaaagaacagcagcaattaggaatgcttgatgataaggtggctaaatgccagtatttcgttaccttgttatgtatggaaaggaacaagagatgtctcttagcataccaaaggttgagaacagacatattggattctatggcttggaataataatggtttggacttgatgagtagcattacgtttagccaacaagacacaaataacctttctcatcaagagcaggaatatttgaaagaatactgcgatttaattactgatttaaaaagtggtgacttggtcgatattgatttatccggctctttagtgcctccgagcgatgtatttattgatgttagagtgctcaaagatgctggtgagattcaaactgaatacggcgtgtttaaccttattaaagactcccagtttttcgtaaggcagtctgatgtagagcgtttgattcaacaaggttatttgcagaagatatga

SEQ ID NO: 1825 - DNA, 1944 bp, Saccharomyces cerevisiae
atgagagcatatggaaagaggggcccagttctcagaactccttttagatctaataaaggcttgccatcttcttccgatgttgaatttagtgatgacgatgtaaactccgtgattcctgatgtaagttctaccatttcgagcagtattgcagaccacccgatagagggattattggacgagcctagaaaggctcaggacagctcgtcgtcatttgatggtgcaaatgagaagccctcttcacaactggactcaaaaaggaatgaccaaaacgtcaaaattatcactagcagtgatacctcaatggcatttatgaaagatgaaaagttaagtgcctttaatttccttgatggttcaaaggcatctaagagaaaaagaagaagaacttaccaaaagcatgatgcgaacataacgtcttcaattgaaccagacgtacaagatgaagacagcattacaatgcacaatgaatttgaatcaataaggaaaatatacaatgacatcaatgaattcatattgaagctaccgagagctgacgatgatatactgaataaaatgcttgaaaatgagatgaagatggacgactctatagagaataatagcatacgcacatccaaagacaaaaaatatggcaaatttagaacaatattaataaacaaaaataaagaaaatgaaataatgggagaagaggtagatcagaaagctaacaccttgtccctaaataacgctgacaacagtaatgctgaaaaagaaggattaacttcaacaaatcactacaacgaattaaaaaatatgggagatacaataaaataccaggatgatattgagtttcttctgtccaattctaaaagtaatgacaatactacggtaccaatcaatgaatactttaaaaaacttttaaatttatccctaatgattattaatgacgaagaattttttcaatatgcgaaaagatatttcaaaaaggaaataattaagcttagttttgcgcaatttagatcggattttcctgaattaatcttattacagggttatttactacataaagttagtgaatcacaatccgatttcccgccaagctttgacaatttctctatcgaattaagtaaagatgatggtaaaatacggacaaaaaagaataagcatattaaaaaactctcacacctaaatttcgaagactttcttcggaagactcaattcaaaacgggactttattattcattatcactctgggaaatgcatggtaatttatcgttagatataatcaagagaatctccatccttgcttcaaataaggacttattcagtcggcacgttaagacttttattcctcttttagaaaaattaataaccgcttccgaattttgccacatgtatattgaacaacctgaaatgttcgattcactgataagcaacttgaataatcagtttaaggatatgcttgatgatgactcgttgattaaaatcctaatcttgttaacaaacatggaagtacataactatacgctatggaaagaggcagatatgatatttcaaagttcaatgaacacaattttggaaagcatacatccattgacagacgcgaaagttgataacatactcttgcatttagggctctgcctcaatatttgcagtagagaaaatagtcgtttaaaacttgacggcaaattatggtatgatatgaaaactatatttgttaaaatgatccgtgacggttctgacactgaaaataggttagtacagggcctgttttacttaaatttttcatttttaattaaacaacggaaagaaaatagtaatttagacccaggggagctcaatttgttactagtagagctggaagcatttaaatcggaaacatctcaatttaatgaaggtatttcaaataaaatcgaaatagcgttaaattacctaaaatcaatatacacgagtgaaagaattacaatataa

SEQ ID NO: 1826 - DNA, 1944 bp, Artificial Sequence
  Description of Artificial Sequence: Synthetic polynucleotide
atgagagcatatggaaagaggggcccagttctcagaactccttttagatctaataaaggcttgccatcttcttccgatgttgaatttagtgatgacgatgtaaactccgtgattcctgatgtaagttctaccatttctagcagtattgcagaccacccgatagagggattattggacgagcctagaaaggctcaggacagctcctcttcttttgatggtgcaaatgagaagccctcttctcaattggactctaaaaggaatgaccaaaacgtcaaaattatcactagcagtgatacctccatggcatttatgaaagatgaaaagttaagtgcctttaatttccttgatggttccaaggcatctaagagaaaaagaagaagaacttaccaaaagcatgatgcgaacataacgtcttccattgaaccagacgtacaagatgaagacagcattacaatgcacaatgaatttgaaagtataaggaaaatatacaatgacatcaatgaattcatattgaagttaccgagagctgacgatgatatattgaataaaatgcttgaaaatgagatgaagatggacgactctatagagaataatagcatacgcacatccaaagacaaaaaatatggcaaatttagaacaatattaataaacaaaaataaagaaaatgaaataatgggagaagaggtagatcagaaagctaacaccttgtccttgaataacgctgacaacagtaatgctgaaaaagaaggattaacttctacaaatcactacaacgaattaaaaaatatgggagatacaataaaataccaggatgatattgagtttcttctttccaattctaaaagtaatgacaatactacggtaccaatcaatgaatactttaaaaaacttttaaatttatccttgatgattattaatgacgaagaattttttcaatatgcgaaaagatatttcaaaaaggaaataattaagcttagttttgcgcaatttagaagtgattttcctgaattaatcttattacagggttatttattacataaagttagtgaatctcaatccgatttcccgccaagctttgacaatttctctatcgaattaagtaaagatgatggtaaaataagaacaaaaaagaataagcatattaaaaaactcagtcacttgaatttcgaagactttcttagaaagactcaattcaaaacgggactttattattctttatctctctgggaaatgcatggtaatttatctttagatataatcaagagaatctccatccttgcttctaataaggacttattcagtagacacgttaagacttttattcctcttttagaaaaattaataaccgcttccgaattttgccacatgtatattgaacaacctgaaatgttcgattctttgataagcaacttgaataatcagtttaaggatatgcttgatgatgactctttgattaaaatcttaatcttgttaacaaacatggaagtacataactatacgttgtggaaagaggcagatatgatatttcaaagttctatgaacacaattttggaaagcatacatccattgacagacgcgaaagttgataacatactcttgcatttagggctctgcctcaatatttgcagtagagaaaatagtcgtttaaaacttgacggcaaattatggtatgatatgaaaactatatttgttaaaatgatccgtgacggttctgacactgaaaataggttagtacagggcttattttacttaaatttttcttttttaattaaacaaagaaaagaaaatagtaatttagacccaggggagctcaatttgttattggtagagttagaagcatttaaaagtgaaacatctcaatttaatgaaggtatttctaataaaatcgaaatagcgttaaattacttgaaatctatatacacgagtgaaagaattacaatatga

SEQ ID NO: 1827 - DNA, 489 bp, Saccharomyces cerevisiae
atgcaacaaagatcaaataggagaagctgctcctatataccactcggggtacataataatgccgaaaagagcttgtgcaccgaagttgctccagcaagaaagaacaaaaggtctattacgacttctcccatagtcaacatcaacgttgtagaaagaagactgtttaatttggaattggaaaaacaacaacttcgtgccaaaaatctgtctgagaacacaggtggcggaagccccaatgggggtgcttatctggacgccaaaaaaggagtaagagaacaagatcaataccaaggaggtccctcgaaagagcttgacaggctacaaccaccaccttcaatgaagaaaagccctccaaggaagaagaagagcctaaaggacttgatatatgaaacgaacaagacattctatcaggtggattctaacaaggttaaatataaggtaggtctatccaagaaacagctattaccatccaaaacggtagacaactaa

SEQ ID NO: 1828 - DNA, 489 bp, Artificial Sequence
  Description of Artificial Sequence: Synthetic polynucleotide
atgcaacaaagatctaataggagaagctgctcctatataccactcggggtacataataatgccgaaaagagcttgtgcaccgaagttgctccagcaagaaagaacaaaaggtctattacgacttctcccatagtcaacatcaacgttgtagaaagaagattatttaatttggaattggaaaaacaacaacttcgtgccaaaaatttatctgagaacacaggtggcggaagccccaatgggggtgcttatttggacgccaaaaaaggagtaagagaacaagatcaataccaaggaggtccctctaaagagcttgacaggttacaaccaccaccttctatgaagaaaagccctccaaggaagaagaagagcttgaaggacttgatatatgaaacgaacaagacattctatcaggtggattctaacaaggttaaatataaggtaggtttatccaagaaacagcttttaccatccaaaacggtagacaactga

SEQ ID NO: 1829 - DNA, 285 bp, Saccharomyces cerevisiae
atgatggctagtacatccaatgatgaagaaaagttgatatcaaccactgacaaatacttcatcgagcagaggaatatagtattgcaggagatcaatgagactatgaattcaatcttgaatggtctgaatggtctcaatatatcattggagagctcgatagctgtgggaagagaattccagtcagtttctgatttgtggaaaacactttatgatgggttggaaagtttatcagacgaagcgcccatcgacgagcaacctactttatctcaatcgaaaacgaagtaa

SEQ ID NO: 1830 - DNA, 285 bp, Artificial Sequence
  Description of Artificial Sequence: Synthetic polynucleotide
atgatggctagtacatccaatgatgaagaaaagttgatatctaccactgacaaatacttcatcgagcagaggaatatagtattgcaggagatcaatgagactatgaattccatcttgaatggtttgaatggtctcaatatatctttggagagcagtatagctgtgggaagagaattccagtctgtttctgatttgtggaaaacactttatgatgggttggaaagtttaagtgacgaagcgcccatcgacgagcaacctactttatctcaaagtaaaacgaagtga

SEQ ID NO: 1831 - DNA, 3153 bp, Saccharomyces cerevisiae
atggatacctctcacgaaattcatgataaaatacccgatacattaagagagcagcagcagcatttgcgccaaaaagagtcggaagggtgcataacaacattgaaagatcttaatgtacctgagacgaagaaactttcctccgtcttacatggcagaaaggcgagtacatatttaagaatttttagagatgatgaatgtttagccgataacaacaatggtgtagatagcaataatggcgggtccgtgacatgcgcggacaaaataacaaggtcagaagcaactcccaaatcggtaccagaaggactacaagtttctgaaaaaaagaataacccagatactttgtcctcttcattgtcaagtttcattttatctaaccacgaggagccggcaattaagcccaataaacacgtggcgcatagaaataatattactgagacaggtcaaggctctggtgaggatatcgcaaaacaacaatcacaccaaccacaggtgttacaccaccagacttctttaaagccaattcagaatgttgatgagggatgtatttcgcctaagtccacttatcaggagagcttacatggaatatcggaggacttaacgttaaagcctgtttcttctgcaacatactatcctcacaaaagtaaagcagattctggttatgaagaaaaggataaaatggaaaatgatattgatactattcagcctgccaccataaattgtgcctctggtatagcgacacttcctagttcatataaccgacatactttcaaagttaagacatattcaactttatcacaatccctaaggcaagaaaacgtcaacaatcgtagtaacgaaaaaaaacctcaacagtttgtgccacatagcgaatcaattaaagaaaaacccaatacgtttgaacaagataaagaaggcgagcaagcggacgaagaagaggatgaaggtgataatgaacatagggaatatcccctagcagttgaactaaaaccatttacgaatagagttggaggtcacactgcaatattcagattttcgaagagagcggtttgtaaggctctagtgaatagagaaaacaggtggtatgagaatatagagctgtgccataaagaattattgcaattcatgccacgttatattggtgtcctgaatgttaggcaacattttcagtcaaaagatgactttttaagcgatttggatcaagaaaacaacggtaaaaatgataccagtaatgaaaacaaagacatagaagtcaatcataacaataacgacgatattgcgcttaatacagaacccacggggacccccttaacacacatacattccttccccttggaacattcgtcgagacaagtacttgaaaaagagcatcctgaaattgagtctgtccatccacacgtgaaaagatcactgtcaagttccaaccaaccttccttgttgcccgaggttgtattaaatgataacaggcatattataccggaatctctgtggtacaaatattccgattctccaaactcggcaccgaatgattcgtacttttcgtcctcctcttctcataactcatgttcgttcggtgagcgtggcaatacaaataaattaaaaagacgcgattctgggtccaccatgatcaatactgaattgaagaacctagtcataagggaagtatttgcaccgaaatgttttagaaggaaaagaaactctaatacgactacaatgggaaaccataatgcgcgtttgggttccagtccatcttttttaacacaaaaatcaagagcctcgtcccatgatgcatcgaatacgtctatgaagactcttggtgattcatcgtcacaagcgagtttacagatggatgactcgaaagtcaatccgaatttgcaggatcctttcttgaaaaaatcgcttcatgaaaaaatatctaatgctttagatggctcgcattcagtaatggatttgaagcaattccacaaaaacgaacaaataaaacataaaaactctttctgcaactctttatcacccattctcactgcaaccaattctagagatgatggcgaatttgccacctccccgaattatatcagcaacgcacaagatggtgtttttgatatggatgaagatacgggaaacgaaactataaatatggataaccacggctgccatcttgactctggtaaaaacatgattataaagtcattggcgtataatgtttcaaatgactatagtcatcatgatattgaatcaattacgtttgaggagacgtcccacaccattgtttcaaaatttatcttattggaagatttgacaagaaacatgaacaagccttgtgcactggatctaaagatggggacaagacaatatggcgtagacgccaaaagagccaagcaactgtcacagcgtgcaaagtgtttaaagaccacttctaggcgtttaggcgttagaatctgcggattaaaggtttggaacaaagattattatatcacaagagataaatactttggtagaagggttaaggttggttggcaatttgctagggtacttgcacgttttttgtatgatggtaagaccattgaaagtttaatcaggcaaattccaaggttgatcaagcaactagatactttgtattctgaaatttttaatttgaaaggttacaggctatatggcgcgtctttattactaatgtacgatggagatgctaataaatcaaattctaaaaggaaaaaagctgctaatgttaaagtcaacttgatcgattttgcacgttgtgttactaaagaagatgcaatggaatgtatggataaatttcgtatacccccaaaatcgccaaatatagaagataaagggttcttacgaggtgtgaagagcttgaggttttatctgttattaatctggaattatctgacttctgatatgccgttaattttcgatgaagtagagatgaatgatatgattagcgaagaagcagattcgaatagtttcacctccgccaccggttcgaaaatcaacttcaacagtaagtgggattggttagatgaatttgacaaagaagacgaagaaatgtataatgatccaaatagtaaactaagacaaaaatggagaaaatacgagcttattttcgacgctgaaccaagatacaatgacgatgctcaagttagtgattga

SEQ ID NO: 1832 - DNA, 3153 bp, Artificial Sequence
  Description of Artificial Sequence: Synthetic polynucleotide
atggatacctctcacgaaattcatgataaaatacccgatacattaagagagcagcagcagcatttgcgccaaaaagagagtgaagggtgcataacaacattgaaagatcttaatgtacctgagacgaagaaactttcctccgtcttacatggcagaaaggcgagtacatatttaagaatttttagagatgatgaatgtttagccgataacaacaatggtgtagatagcaataatggcgggtccgtgacatgcgcggacaaaataacaaggtctgaagcaactcccaaatctgtaccagaaggattacaagtttctgaaaaaaagaataacccagatactttgtcctcttctttgagcagtttcattttatctaaccacgaggagccggcaattaagcccaataaacacgtggcgcatagaaataatattactgagacaggtcaaggctctggtgaggatatcgcaaaacaacaatctcaccaaccacaggtgttacaccaccagacttctttaaagccaattcagaatgttgatgagggatgtatttctcctaagtccacttatcaggagagcttacatggaatatctgaggacttaacgttaaagcctgtttcttctgcaacatactatcctcacaaaagtaaagcagattctggttatgaagaaaaggataaaatggaaaatgatattgatactattcagcctgccaccataaattgtgcctctggtatagcgacacttcctagttcttataacagacatactttcaaagttaagacatattctactttatctcaatccttaaggcaagaaaacgtcaacaatcgtagtaacgaaaaaaaacctcaacagtttgtgccacatagcgaaagtattaaagaaaaacccaatacgtttgaacaagataaagaaggcgagcaagcggacgaagaagaggatgaaggtgataatgaacatagggaatatcccttggcagttgaattgaaaccatttacgaatagagttggaggtcacactgcaatattcagattttccaagagagcggtttgtaaggctttggtgaatagagaaaacaggtggtatgagaatatagagctctgccataaagaattattgcaattcatgccacgttatattggtgtcttgaatgttaggcaacattttcagtccaaagatgactttttaagcgatttggatcaagaaaacaacggtaaaaatgataccagtaatgaaaacaaagacatagaagtcaatcataacaataacgacgatattgcgcttaatacagaacccacggggacccccttaacacacatacattccttccccttggaacattcttctagacaagtacttgaaaaagagcatcctgaaattgagtctgtccatccacacgtgaaaagatctttatccagttccaaccaaccttccttgttgcccgaggttgtattaaatgataacaggcatattataccggaatctctttggtacaaatattccgattctccaaactctgcaccgaatgattcttacttttcttcctcctcttctcataactcttgttctttcggtgagcgtggcaatacaaataaattaaaaagacgcgattctgggtccaccatgatcaatactgaattgaagaacttggtcataagggaagtatttgcaccgaaatgttttagaaggaaaagaaactctaatacgactacaatgggaaaccataatgcgcgtttgggttccagtccatcttttttaacacaaaaatctagagcctcttcccatgatgcatctaatacgtctatgaagactcttggtgattcttcttctcaagcgagtttacagatggatgactctaaagtcaatccgaatttgcaggatcctttcttgaaaaaatctcttcatgaaaaaatatctaatgctttagatggctctcattctgtaatggatttgaagcaattccacaaaaacgaacaaataaaacataaaaactctttctgcaactctttatctcccattctcactgcaaccaattctagagatgatggcgaatttgccacctccccgaattatatcagcaacgcacaagatggtgtttttgatatggatgaagatacgggaaacgaaactataaatatggataaccacggctgccatcttgactctggtaaaaacatgattataaagtctttggcgtataatgtttctaatgactatagtcatcatgatattgaaagtattacgtttgaggagacgtcccacaccattgtttccaaatttatcttattggaagatttgacaagaaacatgaacaagccttgtgcattggatttgaagatggggacaagacaatatggcgtagacgccaaaagagccaagcaattatctcagcgtgcaaagtgtttaaagaccacttctaggcgtttaggcgttagaatctgcggattaaaggtttggaacaaagattattatatcacaagagataaatactttggtagaagggttaaggttggttggcaatttgctagggtacttgcacgttttttgtatgatggtaagaccattgaaagtttaatcaggcaaattccaaggttgatcaagcaattggatactttgtattctgaaatttttaatttgaaaggttacaggttatatggcgcgtctttattattgatgtacgatggagatgctaataaatctaattctaaaaggaaaaaagctgctaatgttaaagtcaacttgatcgattttgcacgttgtgttactaaagaagatgcaatggaatgtatggataaatttcgtatacccccaaaatctccaaatatagaagataaagggttcttaagaggtgtgaagagcttgaggttttatcttttattaatctggaattatttgacttctgatatgccgttaattttcgatgaagtagagatgaatgatatgattagcgaagaagcagattctaatagtttcacctccgccaccggttccaaaatcaacttcaacagtaagtgggattggttagatgaatttgacaaagaagacgaagaaatgtataatgatccaaatagtaaattgagacaaaaatggagaaaatacgagcttattttcgacgctgaaccaagatacaatgacgatgctcaagttagtgattga

SEQ ID NO: 1833 - DNA, 1191 bp, Saccharomyces cerevisiae
atgaagcattcccaaaaataccgtaggtatggaatttatgaaaagactggtaatccctttataaaagggttgcaaaggctgcttatcgcttgcttgttcatttcaggctcgctgagtattgtcgtttttcagatctgtctacaggtgcttctcccttggagcaagattagatttcaaaatggtataaatcaaagtaagaaggcttttatcgttttattatgcatgatcttgaacatggtggctccctcttctttgaatgtcacttttgaaacatcgcggccattgaagaactcttctaacgccaagccatgctttagatttaaagacagggctataataattgcaaatcatcaaatgtatgcagactggatttatctctggtggctttcctttgtttcaaatttgggtggtaacgtttatatcatcctgaagaaagctctgcagtacataccattactgggatttggcatgcgaaattttaagtttatatttttaagtaggaactggcaaaaggatgagaaagctttaacaaatagtttggtttctatggacttaaacgcgaggtgcaaggggccccttacaaattataagagttgttattccaagacaaatgaatccattgccgcttataatttaatcatgttccctgagggtacaaatctaagcctcaagacaagagaaaaaagcgaggcattctgtcaaagagcacatttggaccatgtccaattaagacatttgttattaccgcactctaaaggcttgaagtttgcagtagaaaaactagctcctagtttagatgctatctacgatgtcactattggatattctcccgccttgagaacggaatacgtcggcaccaaattcaccttgaagaaaatattcttaatgggtgtctatccggagaaagtagatttttatattagggaatttagagttaatgagatccctttgcaagatgacgaagtttttttcaattggttactgggcgtgtggaaagaaaaagatcaactgctagaagactactacaacacaggccaatttaaaagtaatgctaaaaatgacaaccaatccatcgttgttacgacacaaacgactggatttcagcacgaaacattgacaccccgtatcctttcatattacgggttcttcgcttttcttattcttgtatttgtgatgaaaaaaaatcattga

SEQ ID NO: 1834 - DNA, 1191 bp, Artificial Sequence
  Description of Artificial Sequence: Synthetic polynucleotide
atgaagcattcccaaaaataccgtaggtatggaatttatgaaaagactggtaatccctttataaaagggttgcaaaggttacttatcgcttgcttgttcatttctggctctttgagtattgtcgtttttcagatctgtttacaggtgcttctcccttggagcaagattagatttcaaaatggtataaatcaaagtaagaaggcttttatcgttttattatgcatgatcttgaacatggtggctccctcttctttgaatgtcacttttgaaacatctagaccattgaagaactcttctaacgccaagccatgctttagatttaaagacagggctataataattgcaaatcatcaaatgtatgcagactggatttatctctggtggctttcctttgtttctaatttgggtggtaacgtttatatcatcttgaagaaagctttacagtacataccattattaggatttggcatgagaaattttaagtttatatttttaagtaggaactggcaaaaggatgagaaagctttaacaaatagtttggtttctatggacttaaacgcgaggtgcaaggggccccttacaaattataagagttgttattccaagacaaatgaatccattgccgcttataatttaatcatgttccctgagggtacaaatttgagcctcaagacaagagaaaaaagcgaggcattctgtcaaagagcacatttggaccatgtccaattaagacatttgttattaccgcactctaaaggcttgaagtttgcagtagaaaaattggctcctagtttagatgctatctacgatgtcactattggatattctcccgccttgagaacggaatacgtcggcaccaaattcaccttgaagaaaatattcttaatgggtgtctatccggagaaagtagatttttatattagggaatttagagttaatgagatccctttgcaagatgacgaagtttttttcaattggttattaggcgtgtggaaagaaaaagatcaattattggaagactactacaacacaggccaatttaaaagtaatgctaaaaatgacaaccaatccatcgttgttacgacacaaacgactggatttcagcacgaaacattgacaccccgtatcctttcctattacgggttcttcgcttttcttattcttgtatttgtgatgaaaaaaaatcattga

SEQ ID NO: 1835 - DNA, 1203 bp, Saccharomyces cerevisiae
atgtctataatcaaaaaaattgtgtttaagagattcaactcaactttgaaaaaaactgctcttcatgaccttcatgtgtcattaggcggtacaatggtaccatacgcaggatattccatgcccgtactatacaagggacagactcatattgaatcacataattggaccaggacaaacgctggtttatttgatgtttctcatatgttacaaagtaagttatctggtcctcattctgttaagtttctgcaacgtgtaacgcccacagatttcaatgccttgcctgttgggtcagggaccttaagtgttctattaaatccacagggaggcgtggtagacgataccatcatcactaaagaaaacgatgacaatgagttctatattgtgaccaatgctggctgtgcggaaagagacaccgagttctttcacgatgagctacaaaatggttctactttagattgtcaatggaaaatcattgaaggtagatcactattggcattgcagggtcctaaagcaaaagatgtgttggaaccacttttatcaaaaacagctcctggaaaggatctaaaagagttattttttggacaaagacatgaatttgcgttaaaggacggttctttggttcaaattgctagaggcgggtacactggtgaagatggatttgagataagcattgcaaatgagaaagcggttgagtttgcggagcaactcttggccaatccagtaatgaagcctatcggactggctgctagagacagtttaaggttggaagctggtatgtgtttgtatggtcatgaattggacgaaagtatcacaccagtagaagctgcgttaaactgggtgatttcaaagtcaagaagggacctagtagatcaaaagtactggttcaatggctatgccaagataatggaccagctaaacaataaaacgtatagcaaggtacgagtcggattcaaatacttgaaaaaggggccagctgccagaaatggtgtcaagatcttcttgcccgatgccgaaacagaggtcggccttgttacatcaggtagtgcatctccaactttaaacaacatcaatattggacaagcttatgtacagaaaggttaccacaagaagggaacgaagttgcttgttcaagtaaggaacaagttctacccgattgaacttgctaaaatgcctcttgtgcccacacattactacaagcagtaa

SEQ ID NO: 1836 - DNA, 1203 bp, Artificial Sequence
  Description of Artificial Sequence: Synthetic polynucleotide
atgtctataatcaaaaaaattgtgtttaagagattcaactctactttgaaaaaaactgctcttcatgaccttcatgtgtctttaggcggtacaatggtaccatacgcaggatattccatgcccgtattgtacaagggacagactcatattgaaagtcataattggaccaggacaaacgctggtttatttgatgtttctcatatgttacaaagtaagttatctggtcctcattctgttaagtttttgcaacgtgtaacgcccacagatttcaatgccttgcctgttgggtctgggaccttaagtgttttattaaatccacagggaggcgtggtagacgataccatcatcactaaagaaaacgatgacaatgagttctatattgtgaccaatgctggctgtgcggaaagagacaccgagttctttcacgatgagttacaaaatggttctactttagattgtcaatggaaaatcattgaaggtagatccttattggcattgcagggtcctaaagcaaaagatgtgttggaaccacttttatccaaaacagctcctggaaaggatttgaaagagttattttttggacaaagacatgaatttgcgttaaaggacggttctttggttcaaattgctagaggcgggtacactggtgaagatggatttgagataagcattgcaaatgagaaagcggttgagtttgcggagcaactcttggccaatccagtaatgaagcctatcggattggctgctagagacagtttaaggttggaagctggtatgtgtttgtatggtcatgaattggacgaaagtatcacaccagtagaagctgcgttaaactgggtgatttccaagtctagaagggacttggtagatcaaaagtactggttcaatggctatgccaagataatggaccagttgaacaataaaacgtatagcaaggtaagagtcggattcaaatacttgaaaaaggggccagctgccagaaatggtgtcaagatcttcttgcccgatgccgaaacagaggtcggccttgttacatctggtagtgcatctccaactttaaacaacatcaatattggacaagcttatgtacagaaaggttaccacaagaagggaacgaagttgcttgttcaagtaaggaacaagttctacccgattgaacttgctaaaatgcctcttgtgcccacacattactacaagcagtga

SEQ ID NO: 1837 - DNA, 699 bp, Saccharomyces cerevisiae
atggacagaaaagctgtcgaagaaaaaagaattgttatttctatcggtggagggcatgctactggtgttggagcaattgcactggatttacaaaatactttcaaaagcctatataactctatcaatataagggtaataaacctagataatatgatagaagggaacatcaagagctacaataataacgactatgattttgataatatccttaatttggtatatgaaaagcacgctgtaacttctcaaaatgacatgattcaacatgattacgaggacccgatagatttgataatagtatgtggctgttatgcgctatacgataaacgcatcaacgaaatatctcaattaaaagtattcttggatagtgatgcagataaaagattaattagtctaatcaagaagaagaacgtagggagcaatgaacaactagcccagttgatcactgagtatatggaccatctgcgcccggagatgcaacaatatatagagcccactagaacttttgcagatttgatcattccttctacaaatgaaaatctagggcgcgcagtcctcgtggacggtatagttaaagcaatcgaagataccaaaagccaaatagaaggcaacaatacgaacaacaaaatacgcccacgtttatgggatttcgaagctgaaacaatggacttggagaaagatagatattacgatctgtcatga

SEQ ID NO: 1838 - DNA, 699 bp, Artificial Sequence
  Description of Artificial Sequence: Synthetic polynucleotide
atggacagaaaagctgtcgaagaaaaaagaattgttatttctatcggtggagggcatgctactggtgttggagcaattgcattggatttacaaaatactttcaaaagcttgtataactctatcaatataagggtaataaaccttgataatatgatagaagggaacatcaagagctacaataataacgactatgattttgataatatccttaatttggtatatgaaaagcacgctgtaacttctcaaaatgacatgattcaacatgattacgaggacccgatagatttgataatagtatgtggctgttatgcgttgtacgataaacgcatcaacgaaatatctcaattaaaagtattcttggatagtgatgcagataaaagattaattagtttaatcaagaagaagaacgtagggagcaatgaacaattggcccagttgatcactgagtatatggaccatttacgcccggagatgcaacaatatatagagcccactagaacttttgcagatttgatcattccttctacaaatgaaaatttggggcgcgcagtcctcgtggacggtatagttaaagcaatcgaagataccaaaagccaaatagaaggcaacaatacgaacaacaaaatacgcccacgtttatgggatttcgaagctgaaacaatggacttggagaaagatagatattacgatttatcctga

SEQ ID NO: 1839 - DNA, 1200 bp, Saccharomyces cerevisiae
atgtcgtttgacagagaagaagaccaaaaattgaagtttaaaacatcgaaaaaattaaaggtgtcttctacttttgaaagcatgaatctaaaagatgacttacttcgaggaatatactcatacggttttgaagcaccatcctctatccaatcaagggctattacacagattatttcgggcaaggacgttatagcacaagcacaatcaggtacaggtaagacagcaacttttacaatcggccttttacaagctattgatttaaggaagaaagatttacaagctctaatactatctccaacacgtgaattagcaagccaaattgggcaagtagtaaaaaatctaggggattatatgaatgtcaatgcatttgccattacaggtggtaaaactttgaaagacgacctgaagaaaatgcaaaagcatggttgccaggccgttagcggaacaccaggaagagtattagacatgattaagaaacaaatgttgcaaacaagaaatgttcaaatgttagttttagatgaggctgatgaattattgagtgagacactaggtttcaagcaacaaatatacgatatttttgcaaaattgcctaaaaattgccaagttgttgttgtcagcgcaacaatgaataaggacattttagaagtaaccagaaaatttatgaatgatccagttaaaatcctagtgaagagggatgaaatatcacttgaaggtatcaaacaatatgtcgttaatgttgacaaagaagagtggaaattcgatactctgtgtgatatatacgattctttgaccattacacaatgtgtgatattctgtaacaccaagaaaaaagtagattggttatctcagcggctaatccaatcaaactttgctgtagtctccatgcatggtgatatgaaacaagaagaaagagataaagtaatgaatgattttagaacaggtcattctcgtgtactgatatcgacggatgtttgggcgcgcggtattgatgtccaacaagtttctttagtcattaactatgacctaccagaaataatagaaaattacatccatcgtatcggtagaagtggtcgatttggtagaaagggtgtggctataaacttcattaccaaagctgatttagcaaaacttagagaaattgaaaaattctattctatcaaaataaatccgatgccagcaaattttgcagaattatcataa

SEQ ID NO: 1840 - DNA, 1200 bp, Artificial Sequence
  Description of Artificial Sequence: Synthetic polynucleotide
atgagttttgacagagaagaagaccaaaaattgaagtttaaaacaagtaaaaaattaaaggtgtcttctacttttgaaagcatgaatttgaaagatgacttacttagaggaatatactcctacggttttgaagcaccatcctctatccaatccagggctattacacagattatttctggcaaggacgttatagcacaagcacaatctggtacaggtaagacagcaacttttacaatcggccttttacaagctattgatttaaggaagaaagatttacaagctttaatattatctccaacacgtgaattagcaagccaaattgggcaagtagtaaaaaatttgggggattatatgaatgtcaatgcatttgccattacaggtggtaaaactttgaaagacgacttgaagaaaatgcaaaagcatggttgccaggccgttagcggaacaccaggaagagtattagacatgattaagaaacaaatgttgcaaacaagaaatgttcaaatgttagttttagatgaggctgatgaattattgagtgagacattaggtttcaagcaacaaatatacgatatttttgcaaaattgcctaaaaattgccaagttgttgttgtcagcgcaacaatgaataaggacattttagaagtaaccagaaaatttatgaatgatccagttaaaatcttagtgaagagggatgaaatatctcttgaaggtatcaaacaatatgtcgttaatgttgacaaagaagagtggaaattcgatactttgtgtgatatatacgattctttgaccattacacaatgtgtgatattctgtaacaccaagaaaaaagtagattggttatctcagaggttgatccaaagtaactttgctgtagtctccatgcatggtgatatgaaacaagaagaaagagataaagtaatgaatgattttagaacaggtcattctcgtgtattaatatctacggatgtttgggcgcgcggtattgatgtccaacaagtttctttagtcattaactatgacttaccagaaataatagaaaattacatccatcgtatcggtagaagtggtagatttggtagaaagggtgtggctataaacttcattaccaaagctgatttagcaaaacttagagaaattgaaaaattctattctatcaaaataaatccgatgccagcaaattttgcagaattatcttga

SEQ ID NO: 1841 - DNA, 591 bp, Saccharomyces cerevisiae
atgaatgttacagttactgtttatgataaaaatgtcaagtacagattagaagagaatatcaaaaataacaagggtcccagcaacgatgatcaaccagcatacaataatgaatcaaagagcacggacggaagtgattatgcaatgtttcccactaacattaagtacatatttgaggacaacaatgatgaactagtagattcaagtgatgctgctttgacagcaggaatagataaggtcggagatgaacttgaaaatgtcataattgtccaattggatgaatcgggatctcttgaggatatcacactaatcagcgaccaatatgagcttttgtcacataggacaaatagtctcagcttggaggaaaaccaaatgagaacattatcatcacatggtgatgataaatctaatgatgaagaggaagaacttagcgttgacagtgatagattcagagtggactcggacattgagctcgatgtaatttcacaattttgcgatctgtctccttttcttcgcgatttgagtttgaatgacttaattaaactctacgtcacacaaaatgaacaattacaaatgctctccaattccgtatga

SEQ ID NO: 1842 - DNA, 591 bp, Artificial Sequence
  Description of Artificial Sequence: Synthetic polynucleotide
atgaatgttacagttactgtttatgataaaaatgtcaagtacagattagaagagaatatcaaaaataacaagggtcccagcaacgatgatcaaccagcatacaataatgaatccaagagcacggacggaagtgattatgcaatgtttcccactaacattaagtacatatttgaggacaacaatgatgaattggtagattctagtgatgctgctttgacagcaggaatagataaggtcggagatgaacttgaaaatgtcataattgtccaattggatgaatctggatctcttgaggatatcacattgatcagcgaccaatatgagcttttgtctcataggacaaatagtctcagcttggaggaaaaccaaatgagaacattatcttctcatggtgatgataaatctaatgatgaagaggaagaacttagcgttgacagtgatagattcagagtggacagtgacattgagctcgatgtaatttctcaattttgcgatttatctccttttcttcgcgatttgagtttgaatgacttaattaaactctacgtcacacaaaatgaacaattacaaatgctctccaattccgtatga

SEQ ID NO: 1843 - DNA, 1389 bp, Saccharomyces cerevisiae
atgttggacatcaaccaatttatcgaagataagggtggtaacccagagctaatcagacaatctcagaaagcaagaaatgccagtgttgaaatcgtcgatgaaattatttccgactacaaagattgggtcaaaacaagattcgaattagatgaattgaacaagaaattcaacaagcttcaaaaggatattggtttgaagtttaaaaacaaggaagacgcttccggattattagccgaaaaagagaagttaacccaacaaaagaaggaattgactgaaaaggagcaacaggaagataaggacttgaagaaaaaagtttttcaagtaggaaatatcgttcatccatctgttgttgtttccaacgatgaagaaaacaatgaattggtccgtacttggaaaccagaggatttagaagcggttggccccattgcttctgtgactggtaaaccagctagtttatcccatcatgaaatcttgctaagattagatggatatgatccagaccgtggtgtaaagatttgtggtcatagaggttatttcttcagaaattatggtgttttcttgaaccaagctttgattaactatggtttacagttcttagctgccaagggttatattcctttacaagctccagtcatgatgaataaagaacttatgtcaaaaactgctcaactatctgaattcgatgaagagttatacaaagttatcgatggtgaagatgaaaaatacctaattgctacctcagaacaacctatctccgcttaccacagcggtgaatggtttgaaaagccacaagagcaattgccaattcactatgtcggttactcctcttgtttccgtagagaagccggttctcacggtaaggatgcttggggtgtcttcagagttcatgctttcgaaaaaattgaacaattcgtcatcactgaacctgaaaaatcttgggaggagtttgaaaagatgatctcttactctgaggaattttataagtctttgaaattaccataccgtatcgttggtatcgtttccggtgaattaaacaatgctgccgctaaaaagtacgatttagaagcctggttcccataccaaaaggagtacaaagaactcgtctcttgctccaattgtactgattatcagtcaagaaacttagaaattagatgcggtataaagaaaatgggcgacagagaaaagaaatacgtacactgtttgaattccactttggctgctacccaaagagctttgtgctgtatcttggagaactaccaaacggaagatggtttggttgtaccagaagttttgaggaaatacattccaggtgaaccagaatttttaccattcgttaatgaattaccaaagaattccacctctagtaaagacaagaaaaagaagaattaa

SEQ ID NO: 1844 - DNA, 1389 bp, Artificial Sequence
  Description of Artificial Sequence: Synthetic polynucleotide
atgttggacatcaaccaatttatcgaagataagggtggtaacccagagttgatcagacaatctcagaaagcaagaaatgccagtgttgaaatcgtcgatgaaattatttccgactacaaagattgggtcaaaacaagattcgaattagatgaattgaacaagaaattcaacaagcttcaaaaggatattggtttgaagtttaaaaacaaggaagacgcttccggattattagccgaaaaagagaagttaacccaacaaaagaaggaattgactgaaaaggagcaacaggaagataaggacttgaagaaaaaagtttttcaagtaggaaatatcgttcatccatctgttgttgtttccaacgatgaagaaaacaatgaattggtccgtacttggaaaccagaggatttagaagcggttggccccattgcttctgtgactggtaaaccagctagtttatcccatcatgaaatcttgttaagattagatggatatgatccagaccgtggtgtaaagatttgtggtcatagaggttatttcttcagaaattatggtgttttcttgaaccaagctttgattaactatggtttacagttcttagctgccaagggttatattcctttacaagctccagtcatgatgaataaagaacttatgtccaaaactgctcaattatctgaattcgatgaagagttatacaaagttatcgatggtgaagatgaaaaatacttgattgctaccagtgaacaacctatctccgcttaccacagcggtgaatggtttgaaaagccacaagagcaattgccaattcactatgtcggttactcctcttgtttccgtagagaagccggttctcacggtaaggatgcttggggtgtcttcagagttcatgctttcgaaaaaattgaacaattcgtcatcactgaacctgaaaaatcttgggaggagtttgaaaagatgatctcttactctgaggaattttataagtctttgaaattaccataccgtatcgttggtatcgtttccggtgaattaaacaatgctgccgctaaaaagtacgatttagaagcctggttcccataccaaaaggagtacaaagaactcgtctcttgctccaattgtactgattatcagtctagaaacttagaaattagatgcggtataaagaaaatgggcgacagagaaaagaaatacgtacactgtttgaattccactttggctgctacccaaagagctttgtgctgtatcttggagaactaccaaacggaagatggtttggttgtaccagaagttttgaggaaatacattccaggtgaaccagaatttttaccattcgttaatgaattaccaaagaattccacctctagtaaagacaagaaaaagaagaattga

SEQ ID NO: 1845 - DNA, 471 bp, Saccharomyces cerevisiae
atgtccactgaattaaccgttcaatccgagagagctttccaaaagcaaccacacatcttcaacaacccaaaggttaagacttccaagagaaccaagagatggtacaagaatgccggtttgggattcaagaccccaaaaaccgctattgaaggttcctacattgacaagaaatgtccattcactggtttagtttccatccgtggtaagatcttgaccggtaccgtcgtctccaccaagatgcaccgtaccattgtcatcagaagggcttacttgcattacattccaaagtacaacagatacgaaaagagacacaagaacgttccagttcacgtttccccagctttccgtgtccaagttggtgacatcgttaccgtcggccaatgtagaccaatctccaagactgttagattcaacgttgtcaaggtctctgctgctgctggtaaggctaacaaacaatttgctaaattttaa

SEQ ID NO: 1846 - DNA, 471 bp, Artificial Sequence
  Description of Artificial Sequence: Synthetic polynucleotide
atgtccactgaattaaccgttcaatccgagagagctttccaaaagcaaccacacatcttcaacaacccaaaggttaagacttccaagagaaccaagagatggtacaagaatgccggtttgggattcaagaccccaaaaaccgctattgaaggttcctacattgacaagaaatgtccattcactggtttagtttccatccgtggtaagatcttgaccggtaccgtcgtctccaccaagatgcaccgtaccattgtcatcagaagggcttacttgcattacattccaaagtacaacagatacgaaaagagacacaagaacgttccagttcacgtttccccagctttccgtgtccaagttggtgacatcgttaccgtcggccaatgtagaccaatctccaagactgttagattcaacgttgtcaaggtctctgctgctgctggtaaggctaacaaacaatttgctaaattttga

SEQ ID NO: 1847 - DNA, 1713 bp, Saccharomyces cerevisiae
atggacagcgtgtcaaaccttaagagcacaaattttcagaacaataatgacccaaaagaatctgtagaagaagcagtgctaaggtatgtgggagtcgacttgaagaatcatattaaaaagacaaagaagaaattgaagaaacagaagaagagaaagcatggttcaaaaatgtctcatgaagatgaagacactgatatggattggtatttgaaaacatcgggttcaaaagatttacgtaaagtggatgatatcgaaccaaattctgttgctgtagcagctgttgctgccgcatacaacagctcaatgagagaaaaagataagaggagctgtcataaaaaatcttctaatagtagatcagagaggaagaagcaccgtaaaagaaaaagctctaaagaaagaaaagccaaaataaaaatggtcctagatccgcagctgactacactggacgatggcataacgacaacagcatttttacctgatgatctcattgctgaaacagcttttgataagtatgttgatactgaaaaggcatacctagctaaacatccaagtaaatcgttagaagttaatgaggatgataaagaaaacaactttaataacaatagcagcacgctggttagaatttataccgatttagaggggataccaaatgacggcagctacataaagcgcactccaaagataccagaaaaggatgtgaaatcagacgacttgatattggcaccagaagaaaacaatggagataccgcattactgcgatccgatattgtgaaagcgtcagtaattgacggtgctatcacaaaatccatcggtaagaagttcactcccagcgaggaaaatgctttggaccaattcatcgaagaatacatgaaaataagaggcttggatagacgccaaatgtgcgagagaatttggtctacagacggagtcattagagatgggttttgggcaaatatcagcaaagttttaccttatagaacaaggtcctcaatatataaacatataagaagaaaatatcatattttcgaacagcgtgggaagtggacgccagaggaagatcaagaattggcaagattatgtttagaaaaagagggtcattggaccgaagtaggcaaattgttaggcagaatgcctgaagattgtagggaccgttggagaaactatatgaagtgtggttcaaagcgaggttctaaaagatggtcgaaagaagaagaagaattgttgactactgtagtaaatgaaatgattgaagaggcacaccaatatcaaaggatgaaggcattggaggctgccaacaaaaatgatagatacaatcaaatgtattctaggggtccaaagggaaagagaattagcgataatcctaccttcaaagatatgatcaattggactgtcgtcagtgaacgcatgagcggaactagatcccgtatacagtgccgctataagtggaataaattagtaacagatgaagcagccagaagtatgttgagcattcctgtttctgaaaggaagtggctgctagaacgattgaaacagctacctaaaacgtcctattcaaatatcgactggaacagtatagctacctacaagcccggatatcctcgaactggtcttgaactgagattatgttacgagcagatgagagaaaagattcatgactttaaaggaaggtcaacagctgaaataattgattcattgttggaacaaatcaattaa

SEQ ID NO: 1848 - DNA, 1713 bp, Artificial Sequence
  Description of Artificial Sequence: Synthetic polynucleotide
atggacagcgtgtctaaccttaagagcacaaattttcagaacaataatgacccaaaagaatctgtagaagaagcagtgttaaggtatgtgggagtcgacttgaagaatcatattaaaaagacaaagaagaaattgaagaaacagaagaagagaaagcatggttccaaaatgtctcatgaagatgaagacactgatatggattggtatttgaaaacatctggttccaaagatttacgtaaagtggatgatatcgaaccaaattctgttgctgtagcagctgttgctgccgcatacaacagcagtatgagagaaaaagataagaggagctgtcataaaaaatcttctaatagtagaagtgagaggaagaagcaccgtaaaagaaaaagctctaaagaaagaaaagccaaaataaaaatggtcttggatccgcagttgactacattagacgatggcataacgacaacagcatttttacctgatgatctcattgctgaaacagcttttgataagtatgttgatactgaaaaggcatacttggctaaacatccaagtaaatctttagaagttaatgaggatgataaagaaaacaactttaataacaatagcagcacgttagttagaatttataccgatttagaggggataccaaatgacggcagctacataaagcgcactccaaagataccagaaaaggatgtgaaaagtgacgacttgatattggcaccagaagaaaacaatggagataccgcattacttcgttccgatattgtgaaagcgagtgtaattgacggtgctatcacaaaatccatcggtaagaagttcactcccagcgaggaaaatgctttggaccaattcatcgaagaatacatgaaaataagaggcttggatagacgccaaatgtgcgagagaatttggtctacagacggagtcattagagatgggttttgggcaaatatcagcaaagttttaccttatagaacaaggtcctccatatataaacatataagaagaaaatatcatattttcgaacagcgtgggaagtggacgccagaggaagatcaagaattggcaagattatgtttagaaaaagagggtcattggaccgaagtaggcaaattgttaggcagaatgcctgaagattgtagggaccgttggagaaactatatgaagtgtggttccaagagaggttctaaaagatggtccaaagaagaagaagaattgttgactactgtagtaaatgaaatgattgaagaggcacaccaatatcaaaggatgaaggcattggaggctgccaacaaaaatgatagatacaatcaaatgtattctaggggtccaaagggaaagagaattagcgataatcctaccttcaaagatatgatcaattggactgtcgtcagtgaacgcatgagcggaactagatcccgtatacagtgccgctataagtggaataaattagtaacagatgaagcagccagaagtatgttgagcattcctgtttctgaaaggaagtggttgttggaaagattgaaacagttgcctaaaacgtcctattctaatatcgactggaacagtatagctacctacaagcccggatatcctcgtactggtcttgaattgagattatgttacgagcagatgagagaaaagattcatgactttaaaggaaggtctacagctgaaataattgattctttgttggaacaaatcaattga

SEQ ID NO: 1849 - DNA, 2670 bp, Saccharomyces cerevisiae
atgtcaataagcgaaacacctcataataaaagccagggactgcaaaaagcggctggtcgtcctaaaattgttgttcctgagggatcgccttctcgtaatagtgatagtggctcttttactatagagggtgatacttcccttaatgacgacttgttaagtatatctggcagtgtcacaccaagagcgagaagatcttcgagattaagtctggattcaataacgccgcgaagaagttttgattctaggacactatctgttgcaaatagtagatcattcggttttgaaaatgaaacacatagtgggtccatggacttttcgccattgggaaataactccatctatgaaattgtgatgaacacaaggaggaaaaactggctcaattaccccactgttgctgatattccacaagttagcctaagcaaaaatgatctggatgaccattggaaaactcatgttatcgaatacgtcaaaaacattaaaagtgattaccaaatatttcaaagcacaaataatataagaaacatgaatcagatggaacagttaaaagaactgcgagaaggggaaaatatgcatgaggagtcgtttgaagcaaatctgaggcaaggggatgccgagctaataaatagtatacctgacttttacttttcagacaaatttcaattagataaccctcgaacttttcataaagtgttggacgctatcgatttatttttaacgaaactagacatgaagagacaagcggaaagggatgaggctttttctgagttgagggacaggctaaacgattttttggatatcgtagaaacattactggttacagagatatccaaatcctcacacaaattttttcatgcgctaagtgaagttgacaatattcagaaaagagccttggacacaatgagcgagcttaaggagctagcacagaatatcaagaccattgacgcagagaatataagaaaaaaaatttcacatttagaaatgatttttaagaggaagaatgtagagaaactagaacagggattattacaggcgaagttagtgctgaacaaaacagatgagtgtaagtcaatgtatgaggagaacaagttggataactgcttagagctgataaaatccatcgattatctgattaagggggatgattcaataaacgaagatgttcagagttggactaggtgttggccctataaattaagcaatttgaggacgatacctgctttgtcagcaacgagagagtttttaaccaatatgaagattgaaataggaggaaagttcagcctacaattatcgattttactaatagatgatttaagatccttttgcaaatcaatcaaaccaaaggaaacactacataggatacaaacgggatctaatgataaaaagcaaactatatttactgataatttttcttcaaagataaccgaattaatagtcagattgaatagatgcgaagaattaacgagtgcctttgacctatacagggaaaaatctatcactgagcttaaatctatcataaaaatttatttgccaacagagaatgcacacgctgacaataaccacgatgaaaaacatcttaacaatggctctactagtgggtctaaactttcaagattaataaaggagcaaactcctgcagaatttcagtccatgctagtaaacatattcacgcacgcgctcgaagctcttcgaagactttatgggcatcaaaagttgcttctagatatctctcttaacgagctagcatctgttaaaagtccaaacgaaaaccagcacaacatgattacgcaattggatatacgtactggcatcaacgaaataatcagaattattcagttacgtacaggcaagatcattgccgtaagaagagaattgaacttatctctacggtatgattatttcttgaaattttatgctatatgcgttatttttattcaagaatgtgaagtattaagtggtgaatttttaacgaaatatttaagtaatgttttagcatctcagatcaagcattatgcaaacgcacaaagttcaaaaaattaccgcaacataaagaaaaagattgatgctgaagaatggattccatatattgtggactcctctattcagagcgatgttaacgacattgtgtcaagtatagacatagacccattgagttggacaactattttagacatggtagggggttctcatgattgcgaaaatggcagaagcgaggacaaggaaaaagatgaaggaaatgaaacatatcaaggtcataggaaatcggttgttgttggcgataaaacttttgtggccagtagttctctgctcgctaccattgaggttattaaggagctaatggttctttccataaaccttccctcgatatacttatcaaatttcgagaagttgtgctatgacgcactacaatactacaacagtagcgccatggcatctgtcacacaacctggaaactcacttttaaaaacgggtagaaacttatctatcatgggagagtcattggactgtctcgcagaatttgtgattattgttcagagattttatcaaaggctttccaactctaacagggattttgagccattcgatgcgagtcattatacaaccctgttggggcaattccaggcctcatcgaataaaatatacatggccaatgccccacctccgcctgtataa

SEQ ID NO: 1850 - DNA, 2670 bp, Artificial Sequence
  Description of Artificial Sequence: Synthetic polynucleotide
atgagtataagcgaaacacctcataataaaagccagggattacaaaaagcggctggtcgtcctaaaattgttgttcctgagggatctccttctcgtaatagtgatagtggctcttttactatagagggtgatacttcccttaatgacgacttgttaagtatatctggcagtgtcacaccaagagcgagaagatcttctagattaagtttggattctataacgccgaggagaagttttgattctaggacattatctgttgcaaatagtagatctttcggttttgaaaatgaaacacatagtgggtccatggacttttctccattgggaaataactccatctatgaaattgtgatgaacacaaggaggaaaaactggctcaattaccccactgttgctgatattccacaagttagcttgagcaaaaatgatttggatgaccattggaaaactcatgttatcgaatacgtcaaaaacattaaaagtgattaccaaatatttcaaagcacaaataatataagaaacatgaatcagatggaacagttaaaagaattaagagaaggggaaaatatgcatgaggagtcttttgaagcaaatttaaggcaaggggatgccgagttgataaatagtatacctgacttttacttttctgacaaatttcaattagataaccctcgtacttttcataaagtgttggacgctatcgatttatttttaacgaaattagacatgaagagacaagcggaaagggatgaggctttttctgagttgagggacaggttaaacgattttttggatatcgtagaaacattattggttacagagatatccaaatcctcccacaaattttttcatgcgttaagtgaagttgacaatattcagaaaagagccttggacacaatgagcgagcttaaggagttggcacagaatatcaagaccattgacgcagagaatataagaaaaaaaatttctcatttagaaatgatttttaagaggaagaatgtagagaaattagaacagggattattacaggcgaagttagtgttgaacaaaacagatgagtgtaagtctatgtatgaggagaacaagttggataactgcttagagttgataaaatccatcgattatttgattaagggggatgattctataaacgaagatgttcagagttggactaggtgttggccctataaattaagcaatttgaggacgatacctgctttgagtgcaacgagagagtttttaaccaatatgaagattgaaataggaggaaagttcagcttacaattatccattttattgatagatgatttaagatccttttgcaaatctatcaaaccaaaggaaacattgcataggatacaaacgggatctaatgataaaaagcaaactatatttactgataatttttcttccaagataaccgaattaatagtcagattgaatagatgcgaagaattaacgagtgcctttgacttgtacagggaaaaatctatcactgagcttaaatctatcataaaaatttatttgccaacagagaatgcacacgctgacaataaccacgatgaaaaacatcttaacaatggctctactagtgggtctaaactttctagattaataaaggagcaaactcctgcagaatttcagtccatgttggtaaacatattcacgcacgcgctcgaagctcttagaagactttatgggcatcaaaagttgcttttagatatctctcttaacgagttggcatctgttaaaagtccaaacgaaaaccagcacaacatgattacgcaattggatatacgtactggcatcaacgaaataatcagaattattcagttacgtacaggcaagatcattgccgtaagaagagaattgaacttatctttaagatatgattatttcttgaaattttatgctatatgcgttatttttattcaagaatgtgaagtattaagtggtgaatttttaacgaaatatttaagtaatgttttagcatctcagatcaagcattatgcaaacgcacaaagttctaaaaattaccgcaacataaagaaaaagattgatgctgaagaatggattccatatattgtggactcctctattcagagcgatgttaacgacattgtgtccagtatagacatagacccattgagttggacaactattttagacatggtagggggttctcatgattgcgaaaatggcagaagcgaggacaaggaaaaagatgaaggaaatgaaacatatcaaggtcataggaaatctgttgttgttggcgataaaacttttgtggccagtagttctttactcgctaccattgaggttattaaggagttgatggttctttccataaaccttccctccatatacttatccaatttcgagaagttgtgctatgacgcattacaatactacaacagtagcgccatggcatctgtcacacaacctggaaactctcttttaaaaacgggtagaaacttatctatcatgggagagtctttggactgtctcgcagaatttgtgattattgttcagagattttatcaaaggctttccaactctaacagggattttgagccattcgatgcgagtcattatacaacccttttggggcaattccaggcctcttccaataaaatatacatggccaatgccccacctccgcctgtatga

SEQ ID NO: 1851 - DNA, 3045 bp, Saccharomyces cerevisiae
atgtcaacaaatctagcaaattacttcgccggtaagaaagatattgaaaacgagcatgtaaatagaaatgcgagccatgaaagtaatagcaaaagtgatgtcaaaattagtggtaacgataacgacaacgacgaagatatggggccttcagtatcgatggctgttcaagcgaaaaatgatgatgatttccataaatcaactttcaaccttaaaagaacaagatcaatgggccttcttgatgaatatattgaccctaccaagaaattgctaggaaggtcagacgacttatatgataacgacaatgaatattatgacaactcatctaataattcttcaagcaattcttcagatgatgattatgatgacggctatcaggaacactcaacctccgtttctccaccgccggcggataatgatagctacttaattccacaagatgataatgacgtagtggtagagccagaaagacatgttgactatctgtcacatgaatggaaagaatcagaaatttctaattcttggaaatatatcatcctaaagaaaaagaaaagagatgttgatctagtaaatgctgctaggttagaaaatgcctcatggagaacatgggcaaaagcaagaaacaacttgaaaacagtgtcacctgaagtggttaattggtcaaaagattctgatgtgacttggctatatggccctattgtaagagattctgaaggtaatgcccaaagtgaagaagaacatgatctagaaagaggatatggttcggatgatgaaaattccaagagaatttcaatgcccactaaaaattcaaagtcgatcgcagctgctccgaaaccaattttgaagaagagaaccgtcacagaaattatagaggacaacgctttatggaaactgaatgaggcaagaaaacacatgacagaaatgaaacatgcttcggtaataatggatcccaatggcaacaaaaacgtccatgacgatttcgatgctctggccgctcaagttaacgcccagtactaccattatcccaaagaatcgaacagtagcgttagtttgaagagtcaacactctgacaaaaaagataattctaccataccgaatcctgtaggagaaaattcaaatggtggcggtgacaagggagaagaagacctgcatttaaagtcagcgcttcatgttcaaaacaataggtcaacggcacaatcaaacaaaagcatactagaaaatagtaccaatgatcgtaaggctaacttggatcaaaacctaaattctcctgataataataggttcccctcctcaacatcttcctccaatagagataatgaaaacaattccatgggattatcatcaatattaacctcaaacccaagtgaaaaatctaacaaacctactaaaaatagacatatacattttaatgacagggtggaacaatgtatggcactacgatatccagcttcacaatcggaggatgatgaaagcgatgatgaaaataaacaatatgttgatgttaataacaatgcgaacgttacaacaataaacaacaataggactccattgctagccattcagcataaatctattcctatcaactccgcaactgaacatttgaacaaaaatactagcgacgatgatacatcctcacaatcatcatcttcatcacattctgatgatgaagaacacggcggcctttacataaatgcaagattttccaggaggtctgactctggagttcattcaccaataacagataattcctctgtggcttcatctactacttccagagctcatgtacgtcccataataaagttgcttcctgataccactttgaattatggatcagacgaagaatctgataatggcgaatttaatgggtatggtaatgctgtgtcacataacgtcaatacctccagaggctatgattacatatacgattataactcggtctacactggtgatacttccagttttttaccagtagattcatgtgacattgtagatgttcctgaaggaatggacttacaaacagccattgcagatgataatgcatcaaactatgaatttaacaatgcggtagaatccaaggaaaaacatgttccacaactacacaaagcttcagcaaataatacaacacgtcaacatggatcgcatatgttattatatgacgacgacaattacagctcttcatcagatagcgaacagcaatttattgaagactcacaatacaatagtagcgacgacgaagaggaagaagatgacgatgaccaagaagtagacgataaccacgatgaaggactttcactgaggagaacattgtcacttgggaaatcaggatctaccaattctttgtacgatctagcacaaccatcactctcttcggcaactcctcaacaaaaaaatcctactaattttacagggggtaaaactgatgtagacaaagatgcacaactggctgtcaggccgtatccgttgaagcgcaattcctcttcagggaacttcatattcaattcagatagtgaagaagagagtagcagcgaggaggaacaaagaccattacccgctaacagtcagctggttaatcgaagcgtattgaaaggcagtgtgacaccagcaaacatatcatctcagaagaaaaaagcccttccaaagcagccaaaagcgtccgatagttcacaaagctttagaattgtaaataatactccttcaccagccgaagtgggggcgagtgatgttgccatagagggttatttctctcctagaaatgaatctatcaagtctgttgtttccgggggaaatatgatggaccatcaagatcactcagaaatggacactttggcaaaaggatttgaaaactgccatataaataatgctagtaagctaaaggacaagaaagttgatagcgtgcaaaccactagaaaagaagcgtctttgacggattcgagtaatgaaagcttacacaaagtggtgcagaatgcaagaggtatggcaagcaagtacttgcactcttggaaaaagagtgacgtcaagccacaagaaaatggaaatgacagcagttag

SEQ ID NO: 1852 - DNA, 3045 bp, Artificial Sequence
  Description of Artificial Sequence: Synthetic polynucleotide
atgtctacaaatttggcaaattacttcgccggtaagaaagatattgaaaacgagcatgtaaatagaaatgcgagccatgaaagtaatagcaaaagtgatgtcaaaattagtggtaacgataacgacaacgacgaagatatggggccttctgtatctatggctgttcaagcgaaaaatgatgatgatttccataaatctactttcaaccttaaaagaacaagaagtatgggccttcttgatgaatatattgaccctaccaagaaattgttgggaaggagtgacgacttatatgataacgacaatgaatattatgacaactcttctaataattcttctagcaattcttctgatgatgattatgatgacggctatcaggaacacagcacctccgtttctccaccgccggcggataatgatagctacttaattccacaagatgataatgacgtagtggtagagccagaaagacatgttgactatttatctcatgaatggaaagaaagtgaaatttctaattcttggaaatatatcatcttgaagaaaaagaaaagagatgttgatttagtaaatgctgctaggttagaaaatgccagttggagaacatgggcaaaagcaagaaacaacttgaaaacagtgtctcctgaagtggttaattggtccaaagattctgatgtgacttggttatatggccctattgtaagagattctgaaggtaatgcccaaagtgaagaagaacatgatttggaaagaggatatggttctgatgatgaaaattccaagagaatttccatgcccactaaaaattctaagtctatcgcagctgctccgaaaccaattttgaagaagagaaccgtcacagaaattatagaggacaacgctttatggaaattgaatgaggcaagaaaacacatgacagaaatgaaacatgcttctgtaataatggatcccaatggcaacaaaaacgtccatgacgatttcgatgctttggccgctcaagttaacgcccagtactaccattatcccaaagaatctaacagtagcgttagtttgaagagtcaacactctgacaaaaaagataattctaccataccgaatcctgtaggagaaaatagtaatggtggcggtgacaagggagaagaagacttgcatttaaagtctgcgcttcatgttcaaaacaataggtctacggcacaaagtaacaaaagcatattggaaaatagtaccaatgatcgtaaggctaacttggatcaaaacttgaattctcctgataataataggttcccctcctctacatcttcctccaatagagataatgaaaacaattccatgggattatcttctatattaaccagtaacccaagtgaaaaatctaacaaacctactaaaaatagacatatacattttaatgacagggtggaacaatgtatggcattaagatatccagcttctcaaagtgaggatgatgaaagcgatgatgaaaataaacaatatgttgatgttaataacaatgcgaacgttacaacaataaacaacaataggactccattgttagccattcagcataaatctattcctatcaactccgcaactgaacatttgaacaaaaatactagcgacgatgatacatcctctcaatcttcttcttcttctcattctgatgatgaagaacacggcggcctttacataaatgcaagattttccaggaggtctgactctggagttcattctccaataacagataattcctctgtggcttcttctactacttccagagctcatgtacgtcccataataaagttgcttcctgataccactttgaattatggatctgacgaagaatctgataatggcgaatttaatgggtatggtaatgctgtgtctcataacgtcaatacctccagaggctatgattacatatacgattataactctgtctacactggtgatacttccagttttttaccagtagattcttgtgacattgtagatgttcctgaaggaatggacttacaaacagccattgcagatgataatgcatctaactatgaatttaacaatgcggtagaatccaaggaaaaacatgttccacaattacacaaagcttctgcaaataatacaacacgtcaacatggatctcatatgttattatatgacgacgacaattacagctcttcttctgatagcgaacagcaatttattgaagactctcaatacaatagtagcgacgacgaagaggaagaagatgacgatgaccaagaagtagacgataaccacgatgaaggactttctttgaggagaacattgtctcttgggaaaagtggatctaccaattctttgtacgatttggcacaaccatctctctcttctgcaactcctcaacaaaaaaatcctactaattttacagggggtaaaactgatgtagacaaagatgcacaattggctgtcaggccgtatccgttgaagcgcaattcctcttctgggaacttcatattcaattctgatagtgaagaagagagtagcagcgaggaggaacaaagaccattacccgctaacagtcagttggttaatagaagcgtattgaaaggcagtgtgacaccagcaaacatatcttctcagaagaaaaaagcccttccaaagcagccaaaagcgtccgatagttctcaaagctttagaattgtaaataatactccttctccagccgaagtgggggcgagtgatgttgccatagagggttatttctctcctagaaatgaatctatcaagtctgttgtttccgggggaaatatgatggaccatcaagatcacagtgaaatggacactttggcaaaaggatttgaaaactgccatataaataatgctagtaagttgaaggacaagaaagttgatagcgtgcaaaccactagaaaagaagcgtctttgacggattctagtaatgaaagcttacacaaagtggtgcagaatgcaagaggtatggcaagcaagtacttgcactcttggaaaaagagtgacgtcaagccacaagaaaatggaaatgacagcagttga

SEQ ID NO: 1853 - DNA, 315 bp, Saccharomyces cerevisiae
atgagcaaatattatatcttgatagagctgatgaacgataaaaagaatactaactctagttgtgatattttctctttctatttaaatttcagcgataaccctttctcaagctttcgtttgaaatcgcgtctcctatatggtatattctcctgttttctccttttttattccttaaaagacctgataggggtattcaaacaaaagtatttatatttgtctattcttcttttatggcttcttgttctcctgttctgtcttgcaaaaggcttgtcacacaatctcagggctgattccttccttcaatatccactgtga

SEQ ID NO: 1854 - DNA, 315 bp, Artificial Sequence
  Description of Artificial Sequence: Synthetic polynucleotide
atgagcaaatattatatcttgatagagttgatgaacgataaaaagaatactaactctagttgtgatattttctctttctatttaaatttcagcgataaccctttcagtagctttcgtttgaaatctcgtctcttatatggtatattctcctgttttctccttttttattccttaaaagacttgataggggtattcaaacaaaagtatttatatttgtctattcttcttttatggcttcttgttctcttgttctgtcttgcaaaaggcttgtctcacaatctcagggctgattccttccttcaatatccattgtga

SEQ ID NO: 1855 - DNA, 1521 bp, Saccharomyces cerevisiae
atggatccatttttagagttcagagtaggcaatatctcattaaatgaattttatagaagaactattcaaagcgaatttgagaggatccttgaagatcccctatcaaatatgaaaaactacagatttagtaaacaatcaaactatagtacaaaagaaaaaacaccgttaagtataggtgttaactgtcttgatattgatgatactggtcaagtgttattaggaggtggagatgatgggtcactttccatttggggtttagatgaatcattgcaccgcaatgatgaaggtgaacaggaattgatcaataaaaggctaaactatatcaagcgacagcctcaccaatcagatgatgagcctgctcaaataatgggttataaaaataaaagaacacgaataaacgacaacaacactatgagactggtgcacagttttcaaacacagagaaacaaatatcgaatgtatagacagtctagtgctgcagttccagttcaaagatcacacatatcaaataaaacggattctcctatcgggtttagtgagacactatctgaaacagattcagaagcttccatatctcaccataaatatggtataacaactttgaagtggtataaggctgataatgggatgttttttactggctcaaatgataaaactgtaaaaatatgggacacaaacaggtttgaagcggttcaagatataaacctggggtataaaataaatcaaattgataataacgttgtcgacgacagttctttgcttgtagtggcaagtgaagactactatccaagattaattgacctgagaaccatgaattcaggggtaactgcgcttggaatgggaaatcaaacacgaatgcaatcagaaattttatgctgcaaatttaaccccgtcagggaacagattattgcttgtggtgacatggagggtggggtaaaattatgggatctaagaatgaggaacagactgtattcagaattgaaaagaaataaaaataggttcaagactataaataacgatgataatgacgatcaaagcgatgtctatttcagctctaaccaatcaaaagcccatctgagatgttgcagtgacattgtttggaatagtgagggttcagagctatgttcagtcggcatggatggaaaactgaatgtttggaggccatttacggaaattctgcaaccagaaggtctagctagttattcccagttgggaacacaagacctgagccgtatcaaatacaaaaaaagagtatctcgaaggttgctttggtttgacaagtttttactgtgtattactgacaatggtgaagtagaaatatacaatacggaggaaaaaaaactttggaacaagctcgaatacccaatggttaatcaggtaaaaaaaaatcaggcttcgcattgtcagtttagttccatgattgtgcaaacaaatataatgaattcagttggcctcaaattgttctttggaactaacaacaacaccgttagcgacggcggatccatctttgaatgttcataa

SEQ ID NO: 1856 - DNA, 1521 bp, Artificial Sequence
  Description of Artificial Sequence: Synthetic polynucleotide
atggatccatttttagagttcagagtaggcaatatctctttaaatgaattttatagaagaactattcaaagcgaatttgagaggatccttgaagatcccttatccaatatgaaaaactacagatttagtaaacaaagtaactatagtacaaaagaaaaaacaccgttaagtataggtgttaactgtcttgatattgatgatactggtcaagtgttattaggaggtggagatgatgggtctctttccatttggggtttagatgaatctttgcaccgcaatgatgaaggtgaacaggaattgatcaataaaaggttaaactatatcaagagacagcctcaccaatctgatgatgagcctgctcaaataatgggttataaaaataaaagaacaagaataaacgacaacaacactatgagattagtgcacagttttcaaacacagagaaacaaatatagaatgtatagacagtctagtgctgcagttccagttcaaagaagtcacatatccaataaaacggattctcctatcgggtttagtgagacattatctgaaacagattctgaagcttccatatctcaccataaatatggtataacaactttgaagtggtataaggctgataatgggatgttttttactggcagtaatgataaaactgtaaaaatatgggacacaaacaggtttgaagcggttcaagatataaacttggggtataaaataaatcaaattgataataacgttgtcgacgacagttctttgcttgtagtggcaagtgaagactactatccaagattaattgacttgagaaccatgaatagtggggtaactgcgcttggaatgggaaatcaaacaagaatgcaaagtgaaattttatgctgcaaatttaaccccgtcagggaacagattattgcttgtggtgacatggagggtggggtaaaattatgggatttgagaatgaggaacagattatattctgaattgaaaagaaataaaaataggttcaagactataaataacgatgataatgacgatcaaagcgatgtctatttcagctctaaccaaagtaaagcccatttaagatgttgcagtgacattgtttggaatagtgagggttctgagctctgttctgtcggcatggatggaaaattgaatgtttggaggccatttacggaaattttacaaccagaaggtttagctagttattcccagttgggaacacaagacttgagccgtatcaaatacaaaaaaagagtatctagaaggttgctttggtttgacaagtttttattatgtattactgacaatggtgaagtagaaatatacaatacggaggaaaaaaaactttggaacaagctcgaatacccaatggttaatcaggtaaaaaaaaatcaggcttctcattgtcagtttagttccatgattgtgcaaacaaatataatgaattctgttggcctcaaattgttctttggaactaacaacaacaccgttagcgacggcggatccatctttgaatgttcttga

SEQ ID NO: 1857 - DNA, 366 bp, Saccharomyces cerevisiae
atgtctgatattttggatgagattgtcatagaagatgttgtggcaaattgcccccaggagtttctgcaatatcataaatgcataagagataatgaggaaaatcctgggaagtgtaaagatggaagaatgatattatctacatgcattagagaaaaagtgcccagtgtgaaaagtatcatgagcgaatgtagtgagccaatgaagaaatatgaccaatgcattcgtgataatatgggtacaagaactattaacgaaaactgtctaggattcttacaggacttaaggaaatgtgcggaattgcaggttaaaaataaaaatattaagccttcaattaatggagtaaacttggaattaatcaaggactga

SEQ ID NO: 1858 - DNA, 366 bp, Artificial Sequence
  Description of Artificial Sequence: Synthetic polynucleotide
atgtctgatattttggatgagattgtcatagaagatgttgtggcaaattgcccccaggagtttttgcaatatcataaatgcataagagataatgaggaaaatcctgggaagtgtaaagatggaagaatgatattatctacatgcattagagaaaaagtgcccagtgtgaaaagtatcatgagcgaatgtagtgagccaatgaagaaatatgaccaatgcattcgtgataatatgggtacaagaactattaacgaaaactgtttaggattcttacaggacttaaggaaatgtgcggaattgcaggttaaaaataaaaatattaagccttctattaatggagtaaacttggaattaatcaaggactga

SEQ ID NO: 1859 - DNA, 597 bp, Saccharomyces cerevisiae
atgccaagagtagctatcatcatttacacactatatggtcacgttgctgccaccgcagaggcagaaaagaagggaattgaagccgctggaggctctgcagacatttatcaagtcgaggaaacgttgtctccagaagttgttaaggcgcttggcggtgctccaaagccagattacccaattgccactcaagatacgttgacagaatatgatgcctttttgtttggtattccaactagatttggtaacttccctgctcaatggaaggctttctgggaccgtaccggtgggttgtgggctaagggtgctttgcatggtaaggtcgctggttgtttcgtctccaccggaactggtggtggtaatgaagccacaattatgaactctttgtctactttggctcatcacggtatcatttttgtcccattgggttacaagaatgttttcgctgaattgaccaatatggatgaagttcacggtggttcaccatggggtgcgggtaccattgcaggcagtgacggttcaagatctccttccgccttggaattacaagtacacgaaattcaaggcaagactttctacgaaaccgttgcaaagttttga

SEQ ID NO: 1860 - DNA, 597 bp, Artificial Sequence
  Description of Artificial Sequence: Synthetic polynucleotide
atgccaagagtagctatcatcatttacacattatatggtcacgttgctgccaccgcagaggcagaaaagaagggaattgaagccgctggaggctctgcagacatttatcaagtcgaggaaacgttgtctccagaagttgttaaggcgcttggcggtgctccaaagccagattacccaattgccactcaagatacgttgacagaatatgatgcctttttgtttggtattccaactagatttggtaacttccctgctcaatggaaggctttctgggaccgtaccggtgggttgtgggctaagggtgctttgcatggtaaggtcgctggttgtttcgtctccaccggaactggtggtggtaatgaagccacaattatgaactctttgtctactttggctcatcacggtatcatttttgtcccattgggttacaagaatgttttcgctgaattgaccaatatggatgaagttcacggtggttctccatggggtgcgggtaccattgcaggcagtgacggttccagatctccttccgccttggaattacaagtacacgaaattcaaggcaagactttctacgaaaccgttgcaaagttttga

SEQ ID NO: 1861 - DNA, 963 bp, Saccharomyces cerevisiae
atgtctacctttgaaactttaattaaaagaggtggtaacgaagccatcaaaattaaccctccaaccggtgcggatttccacatcactagtcgtggttccgattggttctggacatgtttctgttgttacctattatttggtttaattttaacattcttaatgttcagaaaaccagtcaatgacagattcttttaccttaccggtattgctccaaactttttcatgtgtatcgcttatttcaccatggcttctaacttaggttggattccagtcaaggctaagtacaaccatgtccaaacttctactcaaaaagaacatccaggttacagacaaatcttctactctagattcgttggttggttcttagctttgccatggccaattattcaaatctgtatgctagctggtaccccattctggcaaatggctttcaatgtttgtattactgaattcttcactgtttgttggttgatcgctgcctgtgttcactccacttacaaatggggttactacaccatcggtctaggtgctgctattgtcgttagtatcagtgttatgaccaccagttacaacttggtgaaacaaagagataacgatatcaggttgacattccttgttttcttcagcattattatgttcttgtggattattgcttacccaacttgtttcggtattaccgatggtggtaacgttttgcagccagactctgccggtattttctatggtatcattgatcttattttgatgtgtttcattccaactttattggttccaattgctaaccacttcggtgctgacaaattgggctaccatttcggacctagtgatgccgaagcagtgatggctccaaaagctccagttgctagtccaagacctgctgctacaccaaacttgagtaaggacaagaaaaagaagtctaagaagagcaagaaatctaagaagtctaagaagtctgaagaataa

SEQ ID NO: 1862 - DNA, 963 bp, Artificial Sequence
  Description of Artificial Sequence: Synthetic polynucleotide
atgtctacctttgaaactttaattaaaagaggtggtaacgaagccatcaaaattaaccctccaaccggtgcggatttccacatcactagtcgtggttccgattggttctggacatgtttctgttgttacttattatttggtttaattttaacattcttaatgttcagaaaaccagtcaatgacagattcttttaccttaccggtattgctccaaactttttcatgtgtatcgcttatttcaccatggcttctaacttaggttggattccagtcaaggctaagtacaaccatgtccaaacttctactcaaaaagaacatccaggttacagacaaatcttctactctagattcgttggttggttcttagctttgccatggccaattattcaaatctgtatgttggctggtaccccattctggcaaatggctttcaatgtttgtattactgaattcttcactgtttgttggttgatcgctgcctgtgttcactccacttacaaatggggttactacaccatcggtttaggtgctgctattgtcgttagtatcagtgttatgaccaccagttacaacttggtgaaacaaagagataacgatatcaggttgacattccttgttttcttcagcattattatgttcttgtggattattgcttacccaacttgtttcggtattaccgatggtggtaacgttttgcagccagactctgccggtattttctatggtatcattgatcttattttgatgtgtttcattccaactttattggttccaattgctaaccacttcggtgctgacaaattgggctaccatttcggacctagtgatgccgaagcagtgatggctccaaaagctccagttgctagtccaagacctgctgctacaccaaacttgagtaaggacaagaaaaagaagtctaagaagagcaagaaatctaagaagtctaagaagtctgaagaatga

SEQ ID NO: 1863 - DNA, 2373 bp, Saccharomyces cerevisiae
atgttcgaatctgtcaatttggatgaaaattctccagaggatagagaactggctaaggttttgtccccaccgggtagttatctttctccagcttcactagacagtggttcatcgttcacaaatagtgggacttcaactagttgctttgaaccaaaaaacaatctaccctccttatcgtttttaaatgctagagcgggatctttaggtggcatttttaatcataaacagatgacctcgccgtcaaattcgaatataggaggcgaaaatgtagaatcgaccacaagtagtaatgacggcagtaatgaaaatgcaggtcatcccactacttcagagcaagatcaaaatgcagatcaccccactatttcacaggcagatgataatggacactcatcgttgacccctaatcctgctgtaacttcaactgttacggataagaagggaaatacagtaaaacggaagtactccagaaatgggtgctccgagtgtaagagacgaagaatgaaatgtgatgaaactaaaccgacttgttggcagtgcgcaagattgaatcgtcagtgcgtttacgttttaaacccaaaaaataagaaaagaagaacctcaaatgctcaaagagtaaaagaatttaggaagcacagtactagcctcgataatgatcataataatgctcgcaagcgtcagcattcgtcatgcaaggctgagaagaagaaaaaagtacgacaaaatttaagtgaagacaccacggaccctaaaccgattacagataacggcaagaatgtacctttggatgaaatagaatccctagagattccaaatttggaccttaccaccacaatgaatggatatgacgttaatttactaatgcagaacttgaatgatatggttaatatgaaacttcatgactcttacttattgaatgaagaactgaaaggattagatttgcccgatttggacatacctgaacttttgcccgcttcgaatgtgaacagtagcgtaccaatatcctttctggtgaataatgtaataactttcaacacaaaactaagctcgttcaaactaggtggaatccacgataagtatctaaagatattttactacgattgcttagattctattgcgccctttttccaaaatcaagggaacccgttaagagatatcttactttcatttgcgaaaaacgaggcctatcttttatcttccatattagctacgggagcatctatagcatatagaaagtctaataacttggaagatgaacgaaactattgtgcttatttgtcacattgcctgagcctgttgggtgaacaattcaagaatgagtcaaacgttttaaataggatagagcctatcatcctgacggtcatcatgcttgcatgggattgtatttattcaatgaattctcaatggaggtctcacttaaaaggtgtaactgacctttttaaaaaaatcaatgccgggaattcctccaaagtacttaacgttgcaaaatgttggtttaaagttatggaaacattcgccagtataagtacggtatttggcggatctttaattgataataatgaccttgatgcaatttttgatccatatgattaccaatatgttgactcgttaaaatttttaaatattatgactccactaaatgagtttaatcttttaagaggacataaagaagatttcgatcttgttattaaagaagttttcaaatcactcaatacaattaggtcaactgaaaaaaattacttttctaaagaagaaggtttgttcactaagaaattagactatctgcttttatcatcccaaacttcgtccgaaaagtccaaagaccagatatcatatttcaatacgcagaaaattctagtggaaattgacaagcaattagattacgaatttattgacaaatctggaattataccctcagacaatcagtcacaccctagaattagtaatattcatgataatgccatcgatatggtgacattaaagaacggtgaagaagttgccatcagctggtatgatatttctcatcagacacaagttttatctttcttattaattgtattattaaaacttttaggtatgccaaaagagtcaagtaccattcaacaagtggtcaagaaaatcatgtctttcttcaaattcttagacagtgactcgccgccacaaaattcaaggacttgttatagtaattttgctgtattgattgcaggtttgaatgcaatggacgaggaaacaagagcgattgttaaaagatattataaaatcaatggtggaaaatttcaaaagctcacagaacataatcttaacagactggaaaaggtctggtatggtaaaaatcaaaattacaggttagaagaacaagacgttttaacatggtag

SEQ ID NO: 1864 - DNA, 2373 bp, Artificial Sequence
  Description of Artificial Sequence: Synthetic polynucleotide
atgttcgaatctgtcaatttggatgaaaattctccagaggatagagaattggctaaggttttgtccccaccgggtagttatctttctccagcttctttggacagtggttcttctttcacaaatagtgggacttctactagttgctttgaaccaaaaaacaatttgccctccttatcttttttaaatgctagagcgggatctttaggtggcatttttaatcataaacagatgacctctccgtccaatagtaatataggaggcgaaaatgtagaaagtaccacaagtagtaatgacggcagtaatgaaaatgcaggtcatcccactacttccgagcaagatcaaaatgcagatcaccccactatttctcaggcagatgataatggacactcttctttgacccctaatcctgctgtaacttctactgttacggataagaagggaaatacagtaaaaagaaagtactccagaaatgggtgctccgagtgtaagagaagaagaatgaaatgtgatgaaactaaaccgacttgttggcagtgcgcaagattgaatcgtcagtgcgtttacgttttaaacccaaaaaataagaaaagaagaacctctaatgctcaaagagtaaaagaatttaggaagcacagtactagcctcgataatgatcataataatgctcgcaagcgtcagcattctagttgcaaggctgagaagaagaaaaaagtaaggcaaaatttaagtgaagacaccacggaccctaaaccgattacagataacggcaagaatgtacctttggatgaaatagaatccttggagattccaaatttggaccttaccaccacaatgaatggatatgacgttaatttattgatgcagaacttgaatgatatggttaatatgaaacttcatgactcttacttattgaatgaagaattgaaaggattagatttgcccgatttggacatacctgaacttttgcccgcttctaatgtgaacagtagcgtaccaatatcctttttagtgaataatgtaataactttcaacacaaaattaagctctttcaaattgggtggaatccacgataagtatttgaagatattttactacgattgcttagattctattgcgccctttttccaaaatcaagggaacccgttaagagatatcttactttcttttgcgaaaaacgaggcctatcttttatcttccatattagctacgggagcatctatagcatatagaaagtctaataacttggaagatgaaagaaactattgtgcttatttgtctcattgcttaagccttttgggtgaacaattcaagaatgagagcaacgttttaaataggatagagcctatcatcttaacggtcatcatgcttgcatgggattgtatttattccatgaattctcaatggaggtctcacttaaaaggtgtaactgacctttttaaaaaaatcaatgccgggaattcctccaaagtacttaacgttgcaaaatgttggtttaaagttatggaaacattcgccagtataagtacggtatttggcggatctttaattgataataatgaccttgatgcaatttttgatccatatgattaccaatatgttgactctttaaaatttttaaatattatgactccattgaatgagtttaatcttttaagaggacataaagaagatttcgatcttgttattaaagaagttttcaaatctctcaatacaattaggtctactgaaaaaaattacttttctaaagaagaaggtttgttcactaagaaattagactatttacttttatcttcccaaacttcttccgaaaagtccaaagaccagatatcttatttcaatacgcagaaaattttggtggaaattgacaagcaattagattacgaatttattgacaaatctggaattataccctctgacaatcagtctcaccctagaattagtaatattcatgataatgccatcgatatggtgacattaaagaacggtgaagaagttgccatcagctggtatgatatttctcatcagacacaagttttatctttcttattaattgtattattaaaacttttaggtatgccaaaagagagcagtaccattcaacaagtggtcaagaaaatcatgtctttcttcaaattcttagacagtgactctccgccacaaaattctaggacttgttatagtaattttgctgtattgattgcaggtttgaatgcaatggacgaggaaacaagagcgattgttaaaagatattataaaatcaatggtggaaaatttcaaaagctcacagaacataatcttaacagattagaaaaggtctggtatggtaaaaatcaaaattacaggttagaagaacaagacgttttaacatggtga

SEQ ID NO: 1865 - DNA, 177 bp, Saccharomyces cerevisiae
atggaatctatatttctacatgctaatattacgatcattcctcattcagttttatatgtttcattatcctattacattatcaatccttgcgtttcagtttccactaatttagatgactatttctcatcatttgtgtcatcttctaacaccgtatatgataatatactagtaacataa

SEQ ID NO: 1866 - DNA, 177 bp, Artificial Sequence
  Description of Artificial Sequence: Synthetic polynucleotide
atggaatctatatttttacatgctaatattacgatcattcctcattctgttttatatgtttctttatcctattacattatcaatccttgcgtttctgtttccactaatttagatgactatttctcttcttttgtgtcttcttctaacaccgtatatgataatatattagtaacatga

SEQ ID NO: 1867 - DNA, 156 bp, Saccharomyces cerevisiae
atgaggcatcatcaaaatatgcattatgccccacaacaacaaccagtctatgtccaacagcctcctcctcggagagaatccggtggttgctgtagaacctgttgtcacttcctatgttgtctatgtttaattaacctatgttgtgacgttttttaa

SEQ ID NO: 1868 - DNA, 156 bp, Artificial Sequence
  Description of Artificial Sequence: Synthetic polynucleotide
atgaggcatcatcaaaatatgcattatgccccacaacaacaaccagtctatgtccaacagcctcctcctagaagagaatccggtggttgctgtagaacctgttgtcacttcttgtgttgtttatgtttaattaacttgtgttgtgacgttttttga

SEQ ID NO: 1869 - DNA, 1113 bp, Saccharomyces cerevisiae
atgttcattaaaaacgatcacgccggtgacaggaaacgcttggaagactggagaatcaaaggttatgatccattaacccctccagatctgcttcaacatgaatttccaatttcagccaaaggtgaggaaaacattatcaaggcaagagactccgtctgtgatattttgaatggtaaagatgatcgtttagttatcgtgatcgggccatgttccctacatgaccccaaagccgcttacgattacgctgacagattggctaaaatttcagaaaagttgtcaaaagacttattgattattatgagagcgtatttagaaaaaccaaggactactgttggctggaaagggttgattaacgaccctgatatgaataactcttttcaaatcaataaaggtctacggatttcgagagaaatgttcataaaactggttgaaaaattacccattgctggtgagatgttggataccatttctccgcagtttttgagtgattgtttctccttgggtgccatcggcgccagaactactgaatcccaactgcacagagaattagcatccggtctatctttccctattggatttaagaacggtactgatggtggtttgcaagtcgccatcgacgctatgagagccgctgcacatgaacattacttcctttctgtcacaaagccaggtgtcactgctatcgtgggcactgaaggtaacaaggataccttcctgatcttgagaggtggtaagaacggtactaactttgacaaagaaagtgttcaaaatactaagaaacagttagaaaaggccggtttgactgatgattcccagaaaagaattatgatcgattgttcccacggcaacagtaataaagatttcaagaaccaaccaaaggttgccaaatgtatttatgaccagctgacggagggtgagaatagtctctgtggtgttatgattgagtccaacataaatgaaggtagacaagatattcccaaagaaggtggcagagagggattgaagtatggttgttctgttacggatgcttgtattggctgggagtccaccgaacaggtattggagctattggcagaaggtgttagaaacagaagaaaggccttgaaaaaatag

SEQ ID NO: 1870 - DNA, 1113 bp, Artificial Sequence
  Description of Artificial Sequence: Synthetic polynucleotide
atgttcattaaaaacgatcacgccggtgacaggaaacgcttggaagactggagaatcaaaggttatgatccattaacccctccagatttacttcaacatgaatttccaatttctgccaaaggtgaggaaaacattatcaaggcaagagactccgtctgtgatattttgaatggtaaagatgatcgtttagttatcgtgatcgggccatgttccttgcatgaccccaaagccgcttacgattacgctgacagattggctaaaatttctgaaaagttgagtaaagacttattgattattatgagagcgtatttagaaaaaccaaggactactgttggctggaaagggttgattaacgaccctgatatgaataactcttttcaaatcaataaaggtttgagaatttctagagaaatgttcataaaattggttgaaaaattacccattgctggtgagatgttggataccatttctccgcagtttttgagtgattgtttctccttgggtgccatcggcgccagaactactgaatcccaattacacagagaattagcatccggtctttctttccctattggatttaagaacggtactgatggtggtttgcaagtcgccatcgacgctatgagagccgctgcacatgaacattacttcctttctgtcacaaagccaggtgtcactgctatcgtgggcactgaaggtaacaaggataccttcttgatcttgagaggtggtaagaacggtactaactttgacaaagaaagtgttcaaaatactaagaaacagttagaaaaggccggtttgactgatgattcccagaaaagaattatgatcgattgttcccacggcaacagtaataaagatttcaagaaccaaccaaaggttgccaaatgtatttatgaccagttaacggagggtgagaatagtctctgtggtgttatgattgagtccaacataaatgaaggtagacaagatattcccaaagaaggtggcagagagggattgaagtatggttgttctgttacggatgcttgtattggctgggagtccaccgaacaggtattggagttattggcagaaggtgttagaaacagaagaaaggccttgaaaaaatga

SEQ ID NO: 1871 - DNA, 1503 bp, Saccharomyces cerevisiae
atgctcagaaatacgctaaaatgtgcccaattgtcgtctaaatacggatttaaaactaccacacgtacattcatgactactcaaccccagctaaatgtcaccgacgcaccacctgtgctatttaccgttcaagatacagctagagttatcacgctaaataggcccaaaaagctcaatgctttgaacgccgaaatgtcagaatccatgttcaagactttgaacgagtatgcaaagagcgatactacaaacttagtcattttaaagtcatccaaccgaccacgttcgttctgtgctggtggtgatgtagctactgtggcaatattcaattttaacaaagaatttgccaagtccatcaaattttttactgatgaatattctttgaattttcaaatagcaacttacttgaaaccaattgttaccttcatggacggtatcaccatgggtggcggcgttggtctatccattcacacgccctttagaattgctacagaaaacaccaaatgggccatgcccgagatggacattggtttttttccagatgtaggctcaacttttgctctccctagaatcgtgacattggctaactcaaactcacaaatggccctgtatctatgtcttacaggagaagtagtcacaggagcagacgcttatatgctcggcttagcgtctcattacgtcagtagtgaaaatttagatgctttgcagaaaagattaggtgaaattagccccccttttaataacgatccacaatctgcatacttcttcgggatggttaacgaatccatcgacgaattcgtatcaccattaccaaaagattatgttttcaagtattctaacgagaaattaaacgttattgaagcctgttttaacttgtctaaaaatggtactattgaagacataatgaataacttacgtcaatatgaaggttctgcggaaggtaaggctttcgcacaagaaatcaaaacgaaattgttaaccaagtcaccatcctctcttcaaatcgccttgagattggtgcaagagaattccagagatcacatagaatctgctatcaaaagagacttatacacagcagctaacatgtgcatgaaccaggactctttggtggaattctctgaagccacaaagcataaacttattgataaacaaagggtcccgtatccatggacaaagaaggaacagttatttgtatctcagttgacatctatcacatctcctaaaccatcgctaccaatgtcattactaagaaatacctcgaatgttacttggactcaatatccctaccattctaaataccaattgcctacagaacaggaaatcgctgcgtatattgaaaagagaacgaatgatgacactggcgccaaagttaccgaaagagaagtactaaatcactttgccaatgtgattccttctagaagagggaaactgggtatccaatcgctatgtaaaattgtttgtgaaagaaaatgtgaagaagttaacgatggcttaagatggaaataa

SEQ ID NO: 1872 - DNA, 1503 bp, Artificial Sequence
  Description of Artificial Sequence: Synthetic polynucleotide
atgctcagaaatacgttgaaatgtgcccaattgtcttctaaatacggatttaaaactaccacacgtacattcatgactactcaaccccagttgaatgtcaccgacgcaccacctgtgctttttaccgttcaagatacagctagagttatcacgttgaataggcccaaaaagctcaatgctttgaacgccgaaatgtctgaatccatgttcaagactttgaacgagtatgcaaagagcgatactacaaacttagtcattttaaagtcttccaacagaccacgttctttctgtgctggtggtgatgtagctactgtggcaatattcaattttaacaaagaatttgccaagtccatcaaattttttactgatgaatattctttgaattttcaaatagcaacttacttgaaaccaattgttaccttcatggacggtatcaccatgggtggcggcgttggtttatccattcacacgccctttagaattgctacagaaaacaccaaatgggccatgcccgagatggacattggtttttttccagatgtaggctccacttttgctctccctagaatcgtgacattggctaactccaactctcaaatggccttatatttatgtcttacaggagaagtagtcacaggagcagacgcttatatgctcggcttagcgtctcattacgtcagtagtgaaaatttagatgctttgcagaaaagattaggtgaaattagccccccttttaataacgatccacaatctgcatacttcttcgggatggttaacgaatccatcgacgaattcgtatctccattaccaaaagattatgttttcaagtattctaacgagaaattaaacgttattgaagcctgttttaacttgtctaaaaatggtactattgaagacataatgaataacttacgtcaatatgaaggttctgcggaaggtaaggctttcgcacaagaaatcaaaacgaaattgttaaccaagtctccatcctctcttcaaatcgccttgagattggtgcaagagaattccagagatcacatagaatctgctatcaaaagagacttatacacagcagctaacatgtgcatgaaccaggactctttggtggaattctctgaagccacaaagcataaacttattgataaacaaagggtcccgtatccatggacaaagaaggaacagttatttgtatctcagttgacatctatcacatctcctaaaccatctttaccaatgtctttattaagaaatacctctaatgttacttggactcaatatccctaccattctaaataccaattgcctacagaacaggaaatcgctgcgtatattgaaaagagaacgaatgatgacactggcgccaaagttaccgaaagagaagtattgaatcactttgccaatgtgattccttctagaagagggaaattgggtatccaatctttatgtaaaattgtttgtgaaagaaaatgtgaagaagttaacgatggcttaagatggaaatga

SEQ ID NO: 1873 - DNA, 1776 bp, Saccharomyces cerevisiae
atgtctcaacaagataatgtcaaagccgccgctgaaggtgttgctaacctacatctcgacgaagctaccggggaaatggtctccaagtctgaattgaagaagcgtatcaagcaaagacaagtcgaagctaaaaaggccgccaaaaaggctgccgctcaaccaaaaccggcttccaaaaaaaaaacagatttgttcgctgacctggatccatcgcaatatttcgaaacaagatctcgccaaattcaagaattgagaaagactcacgaaccaaatccatacccacacaagtttcacgtttctatatccaatcctgagttcttggccaaatatgcgcatttgaaaaaaggtgaaaccttacctgaagagaaggtttcaattgctggtagaattcatgccaaaagagaatctggctccaaattgaaattctatgttcttcacggtgatggtgttgaagttcaattgatgtcccaattgcaggactactgcgacccagactcttacgaaaaggatcacgaccttttgaaaaggggtgatatcgttggtgtcgagggttacgtcggaagaactcaaccaaagaaaggtggtgaaggtgaagtttccgtcttcgttagcagagtgcaattattgacaccatgtttgcacatgttacctgccgaccactttggtttcaaagaccaggaaaccagatacagaaagcgttatttggatttgatcatgaacaaagacgccagaaaccgttttattacccgttctgaaattatccgttacatcagaagatttttggaccaaagaaagtttattgaagtagaaactccaatgatgaacgttattgctggtggtgctaccgctaagccatttattacccaccataatgaccttgatatggacatgtacatgagaattgctccagaattgttcttgaaacaattggttgtcggtggtttggatcgtgtttacgaaattggtagacaattcagaaatgaaggtatcgatatgacacataatccagaattcaccacttgtgagttttatcaagcctacgctgatgtttatgatttgatggatatgactgaattgatgttttcagaaatggtcaaggagatcactggttcttatattatcaaataccatccggaccctgctgatccagccaaagaactagaattgaacttttctagaccatggaagagaatcaacatgattgaagaattagaaaaggtattcaacgttaagttcccatctggtgatcaattacatacagctgagactggtgaatttttgaaaaagattcttgtcgacaacaaattagaatgtccacctccactaactaatgctcgtatgttagataagcttgtcggtgaattagaagatacatgtatcaacccaactttcatttttggccaccctcaaatgatgtctccattagccaagtactcaagagatcaaccgggtctatgtgagcgtttcgaggtctttgtagctacaaaggaaatttgtaatgcctacactgaattgaacgatccatttgaccaaagggcacgtttcgaagaacaagctagacaaaaggatcaaggtgatgacgaagctcaattagtcgatgaaaccttctgtaatgctctagaatacggtttaccaccaactggtggttggggttgtggtattgatagactggccatgttcttgaccgactccaacaccattagagaagtcttattgttcccaactttgaagcctgatgttttgagagaggaagtcaaaaaggaagaagaaaattaa

SEQ ID NO: 1874 - DNA, 1776 bp, Artificial Sequence
  Description of Artificial Sequence: Synthetic polynucleotide
atgtctcaacaagataatgtcaaagccgccgctgaaggtgttgctaacttacatctcgacgaagctaccggggaaatggtctccaagtctgaattgaagaagcgtatcaagcaaagacaagtcgaagctaaaaaggccgccaaaaaggctgccgctcaaccaaaaccggcttccaaaaaaaaaacagatttgttcgctgacttggatccatctcaatatttcgaaacaagatctcgccaaattcaagaattgagaaagactcacgaaccaaatccatacccacacaagtttcacgtttctatatccaatcctgagttcttggccaaatatgcgcatttgaaaaaaggtgaaaccttacctgaagagaaggtttctattgctggtagaattcatgccaaaagagaatctggctccaaattgaaattctatgttcttcacggtgatggtgttgaagttcaattgatgtcccaattgcaggactactgcgacccagactcttacgaaaaggatcacgaccttttgaaaaggggtgatatcgttggtgtcgagggttacgtcggaagaactcaaccaaagaaaggtggtgaaggtgaagtttccgtcttcgttagcagagtgcaattattgacaccatgtttgcacatgttacctgccgaccactttggtttcaaagaccaggaaaccagatacagaaagcgttatttggatttgatcatgaacaaagacgccagaaaccgttttattacccgttctgaaattatccgttacatcagaagatttttggaccaaagaaagtttattgaagtagaaactccaatgatgaacgttattgctggtggtgctaccgctaagccatttattacccaccataatgaccttgatatggacatgtacatgagaattgctccagaattgttcttgaaacaattggttgtcggtggtttggatcgtgtttacgaaattggtagacaattcagaaatgaaggtatcgatatgacacataatccagaattcaccacttgtgagttttatcaagcctacgctgatgtttatgatttgatggatatgactgaattgatgttttctgaaatggtcaaggagatcactggttcttatattatcaaataccatccggaccctgctgatccagccaaagaattggaattgaacttttctagaccatggaagagaatcaacatgattgaagaattagaaaaggtattcaacgttaagttcccatctggtgatcaattacatacagctgagactggtgaatttttgaaaaagattcttgtcgacaacaaattagaatgtccacctccattgactaatgctcgtatgttagataagcttgtcggtgaattagaagatacatgtatcaacccaactttcatttttggccaccctcaaatgatgtctccattagccaagtactctagagatcaaccgggtttgtgtgagcgtttcgaggtctttgtagctacaaaggaaatttgtaatgcctacactgaattgaacgatccatttgaccaaagggcacgtttcgaagaacaagctagacaaaaggatcaaggtgatgacgaagctcaattagtcgatgaaaccttctgtaatgctttggaatacggtttaccaccaactggtggttggggttgtggtattgatagattggccatgttcttgaccgactccaacaccattagagaagtcttattgttcccaactttgaagcctgatgttttgagagaggaagtcaaaaaggaagaagaaaattga

SEQ ID NO: 1875 - DNA, 3276 bp, Saccharomyces cerevisiae
atgagcgagggaactgtcaaagaaaacaataatgaagaattcaatgcttatcacacattgactacagaagaagccgctgaatttataggcacaagtctgactgaaggtcttactcaagatgagtccctccgcagactgaaagcagtgggagagaacacattgggtgatgataccaaaattgactataaagcaatggtcctccatcaggtatgtaatgcaatgattatggtcttggtaatatccatggcgatctctttcgctgtgcgcgactggattactggtggcgttatttcttttgttatcgcggtcaatgtgctcattggcctagttcaagaatataaggctaccaagacaatgaactctttgaaaaacttgagctctcccaatgctcatgttattaggaacgggaaaagtgagactataaactcaaaagatgtggttccaggtgatatttgtctggtgaaggtcggtgatactattcctgctgatttgcgtttaattgaaactaagaattttgatactgatgaatcactactgaccggtgaatctttgcctgtctccaaagacgccaacttagtgtttggaaaagaagaagaaacctccgtgggtgatcgtttgaatttagcattttcttcatccgccgttgtcaagggaagagccaagggtattgtcatcaagacagctttgaatagtgaaattggtaaaattgcaaaatctctacaaggtgattcaggtctcatttcccgcgatcctagtaagtcgtggttacagaatacatggatatctacaaagaaagttactggtgcatttttaggtacaaatgtcggtacgcccctgcacaggaaactgtctaagttggcggtattgcttttctggattgccgtactttttgctatcatcgtcatggcctctcaaaagtttgacgtagataaaagggtagctatctatgccatttgtgtggccctatccatgattccctcttcattagtcgttgtcttgaccatcaccatgtctgttggggctgctgttatggtttctagaaacgttattgtaagaaaattagattctctggaagctttaggtgccgttaacgatatctgttctgacaagaccggtactcttacacagggtaaaatgttagcgaggcaaatttggatccctcgctttggtaccataactatctcgaattctgatgacccctttaatcccaatgagggcaacgtgagtttgattccaaggttttcaccttacgaatattctcataatgaggatggtgacgttggtattctccagaatttcaaggatcgcctatacgaaaaagatttaccagaagatattgacatggatctatttcaaaaatggctcgaaaccgccactttggctaacattgctactgttttcaaagatgacgcaactgactgttggaaagctcatggtgacccaacagaaattgcgattcaagtgtttgctactaagatggacttgcctcacaatgcccttaccggtgagaaatcgactaatcaaagtaatgagaatgaccaatcctctctttcacaacacaatgagaagcctggcagtgcacaattcgaacatattgctgaattcccattcgactcaactgtgaagcgaatgtcatctgtctactacaacaatcacaacgaaacatataatatttatggcaagggtgctttcgaaagcatcatcagttgttgcagttcttggtatggtaaggatggtgtaaaaatcacaccattgaccgattgtgatgtcgaaacgataaggaaaaatgtttacagtctatcaaatgagggtttaagagtcttgggttttgcctccaaatctttcactaaagatcaagtgaatgacgatcaattgaaaaacattacttcaaacagggccaccgcagaaagtgatttagttttcctagggttgattggtatttacgatccacccagaaatgagactgccggtgcagtcaagaagtttcaccaagctggtattaacgttcatatgttaactggggactttgtgggtacagcaaaggctatcgctcaggaggttggcatcttacccaccaatttgtaccattactcccaagagattgttgacagtatggtcatgaccggatctcagtttgacggactaagtgaggaggaagtggacgatttgcccgtcttacctttagttattgcacgttgctctccgcagactaaggtgagaatgatcgaagctttacaccgtaggaagaagttctgcgcaatgacaggtgacggtgttaacgattctccatctctaaaaatggccaatgttggtattgcaatgggtattaatggttcagatgtttccaaagaagcgtctgatattgttctaagcgatgacaattttgcttctattttgaatgctgtcgaagaaggtcgtaggatgacggataacattcagaagtttgtcctacaattattggcagaaaatgttgctcaggctttgtatttgatcattggtttagtattcagagatgagaacggaaaatcagtatttcccttatcaccagtggaagtattgtggattattgtcgtcacctcttgttttcctgctatggggctaggtctagaaaaggctgctccagatttgatggatagacctcctaatgattcagaggttggtattttcacatgggaggttattatagatacatttgcatatgggattataatgacagggtcctgtatggcttcatttactggatcactgtatggaataaatagtggtagattggggcacgattgtgatggcacctataacagcagttgtcgtgatgtttatagatcacgttctgcggctttcgcaactatgacgtggtgcgctttgattctggcttgggaagtggttgacatgagaagatcttttttcagaatgcatccagacactgacagcccagtcaaggaatttttcagaagtatttggggaaaccagtttttgttctggtcaatcatttttggatttgtgtcagccttccccgtcgtctatattccggttattaatgataaagtgtttttgcataaaccaattggtgctgaatggggtctcgccattgcattcacaattgcattctggataggtgctgaactttacaagtgtggaaagaggcgctatttcaaaactcagagagctcacaattcggaaaacgatttggagcgaagcagtaaacacgatccatttgaagcgtatagcacatccacaacccttcaaagcgaaattaatatcagtgtcaagcattaa

SEQ ID NO: 1876 - DNA, 3276 bp, Artificial Sequence
  Description of Artificial Sequence: Synthetic polynucleotide
atgagcgagggaactgtcaaagaaaacaataatgaagaattcaatgcttatcacacattgactacagaagaagccgctgaatttataggcacaagtttgactgaaggtcttactcaagatgagtccctccgcagattgaaagcagtgggagagaacacattgggtgatgataccaaaattgactataaagcaatggtcctccatcaggtatgtaatgcaatgattatggtcttggtaatatccatggcgatctctttcgctgtgcgcgactggattactggtggcgttatttcttttgttatcgcggtcaatgtgctcattggccttgttcaagaatataaggctaccaagacaatgaactctttgaaaaacttgagctctcccaatgctcatgttattaggaacgggaaaagtgagactataaactccaaagatgtggttccaggtgatatttgtttggtgaaggtcggtgatactattcctgctgatttgcgtttaattgaaactaagaattttgatactgatgaatctttattaaccggtgaatctttgcctgtctccaaagacgccaacttagtgtttggaaaagaagaagaaacctccgtgggtgatcgtttgaatttagcattttcttcttccgccgttgtcaagggaagagccaagggtattgtcatcaagacagctttgaatagtgaaattggtaaaattgcaaaatctttacaaggtgattctggtctcatttcccgcgatcctagtaagtcttggttacagaatacatggatatctacaaagaaagttactggtgcatttttaggtacaaatgtcggtacgcccttgcacaggaaattatctaagttggcggtattgcttttctggattgccgtactttttgctatcatcgtcatggcctctcaaaagtttgacgtagataaaagggtagctatctatgccatttgtgtggccctttccatgattccctcttctttagtcgttgtcttgaccatcaccatgtctgttggggctgctgttatggtttctagaaacgttattgtaagaaaattagattctttggaagctttaggtgccgttaacgatatctgttctgacaagaccggtactcttacacagggtaaaatgttagcgaggcaaatttggatccctcgctttggtaccataactatctctaattctgatgacccctttaatcccaatgagggcaacgtgagtttgattccaaggttttctccttacgaatattctcataatgaggatggtgacgttggtattctccagaatttcaaggatcgcctttacgaaaaagatttaccagaagatattgacatggatttatttcaaaaatggctcgaaaccgccactttggctaacattgctactgttttcaaagatgacgcaactgactgttggaaagctcatggtgacccaacagaaattgcgattcaagtgtttgctactaagatggacttgcctcacaatgcccttaccggtgagaaatctactaatcaaagtaatgagaatgaccaatcctctctttctcaacacaatgagaagcctggcagtgcacaattcgaacatattgctgaattcccattcgactctactgtgaagagaatgtcttctgtctactacaacaatcacaacgaaacatataatatttatggcaagggtgctttcgaaagcatcatcagttgttgcagttcttggtatggtaaggatggtgtaaaaatcacaccattgaccgattgtgatgtcgaaacgataaggaaaaatgtttacagtttatccaatgagggtttaagagtcttgggttttgcctccaaatctttcactaaagatcaagtgaatgacgatcaattgaaaaacattacttctaacagggccaccgcagaaagtgatttagttttcttggggttgattggtatttacgatccacccagaaatgagactgccggtgcagtcaagaagtttcaccaagctggtattaacgttcatatgttaactggggactttgtgggtacagcaaaggctatcgctcaggaggttggcatcttacccaccaatttgtaccattactcccaagagattgttgacagtatggtcatgaccggatctcagtttgacggattgagtgaggaggaagtggacgatttgcccgtcttacctttagttattgcacgttgctctccgcagactaaggtgagaatgatcgaagctttacaccgtaggaagaagttctgcgcaatgacaggtgacggtgttaacgattctccatctttgaaaatggccaatgttggtattgcaatgggtattaatggttctgatgtttccaaagaagcgtctgatattgttttaagcgatgacaattttgcttctattttgaatgctgtcgaagaaggtcgtaggatgacggataacattcagaagtttgtcttacaattattggcagaaaatgttgctcaggctttgtatttgatcattggtttagtattcagagatgagaacggaaaatctgtatttcccttatctccagtggaagtattgtggattattgtcgtcacctcttgttttcctgctatggggttaggtttggaaaaggctgctccagatttgatggatagacctcctaatgattctgaggttggtattttcacatgggaggttattatagatacatttgcatatgggattataatgacagggtcctgtatggcttcttttactggatctttgtatggaataaatagtggtagattggggcacgattgtgatggcacctataacagcagttgtcgtgatgtttatagatctcgttctgcggctttcgcaactatgacgtggtgcgctttgattttggcttgggaagtggttgacatgagaagatcttttttcagaatgcatccagacactgacagcccagtcaaggaatttttcagaagtatttggggaaaccagtttttgttctggtctatcatttttggatttgtgtctgccttccccgtcgtctatattccggttattaatgataaagtgtttttgcataaaccaattggtgctgaatggggtctcgccattgcattcacaattgcattctggataggtgctgaactttacaagtgtggaaagaggcgctatttcaaaactcagagagctcacaattctgaaaacgatttggagagaagcagtaaacacgatccatttgaagcgtatagcacatccacaacccttcaaagcgaaattaatatcagtgtcaagcattga

SEQ ID NO: 1877 - DNA, 3276 bp, Saccharomyces cerevisiae
atgagcgagggaactgtcaaagaaaacaataatgaagaattcaatgcttatcacacattgactacagaagaagccgctgaatttataggcacaagtctgactgaaggtcttactcaagatgagtccctccgcagactgaaagcagtgggagagaacacattgggtgatgataccaaaattgactataaagcaatggtcctccatcaggtatgtaatgcaatgattatggtcttggtaatatccatggcgatctctttcgctgtgcgcgactggattactggtggcgttatttcttttgttatcgcggtcaatgtgctcattggcctagttcaagaatataaggctaccaagacaatgaactctttgaaaaacttgagctctcccaatgctcatgttattaggaacgggaaaagtgagactataaactcaaaagatgtggttccaggtgatatttgtctggtgaaggtcggtgatactattcctgctgatttgcgtttaattgaaactaagaattttgatactgatgaatcactactgaccggtgaatctttgcctgtctccaaagacgccaacttagtgtttggaaaagaagaagaaacctccgtgggtgatcgtttgaatttagcattttcttcatccgccgttgtcaagggaagagccaagggtattgtcatcaagacagctttgaatagtgaaattggtaaaattgcaaaatctctacaaggtgattcaggtctcatttcccgcgatcctagtaagtcgtggttacagaatacatggatatctacaaagaaagttactggtgcatttttaggtacaaatgtcggtacgcccctgcacaggaaactgtctaagttggcggtattgcttttctggattgccgtactttttgctatcatcgtcatggcctctcaaaagtttgacgtagataaaagggtagctatctatgccatttgtgtggccctatccatgattccctcttcattagtcgttgtcttgaccatcaccatgtctgttggggctgctgttatggtttctagaaacgttattgtaagaaaattagattctctggaagctttaggtgccgttaacgatatctgttctgacaagaccggtactcttacacagggtaaaatgttagcgaggcaaatttggatccctcgctttggtaccataactatctcgaattctgatgacccctttaatcccaatgagggcaacgtgagtttgattccaaggttttcaccttacgaatattctcataatgaggatggtgacgttggtattctccagaatttcaaggatcgcctatacgaaaaagatttaccagaagatattgacatggatctatttcaaaaatggctcgaaaccgccactttggctaacattgctactgttttcaaagatgacgcaactgactgttggaaagctcatggtgacccaacagaaattgcgattcaagtgtttgctactaagatggacttgcctcacaatgcccttaccggtgagaaatcgactaatcaaagtaatgagaatgaccaatcctctctttcacaacacaatgagaagcctggcagtgcacaattcgaacatattgctgaattcccattcgactcaactgtgaagcgaatgtcatctgtctactacaacaatcacaacgaaacatataatatttatggcaagggtgctttcgaaagcatcatcagttgttgcagttcttggtatggtaaggatggtgtaaaaatcacaccattgaccgattgtgatgtcgaaacgataaggaaaaatgtttacagtctatcaaatgagggtttaagagtcttgggttttgcctccaaatctttcactaaagatcaagtgaatgacgatcaattgaaaaacattacttcaaacagggccaccgcagaaagtgatttagttttcctagggttgattggtatttacgatccacccagaaatgagactgccggtgcagtcaagaagtttcaccaagctggtattaacgttcatatgttaactggggactttgtgggtacagcaaaggctatcgctcaggaggttggcatcttacccaccaatttgtaccattactcccaagagattgttgacagtatggtcatgaccggatctcagtttgacggactaagtgaggaggaagtggacgatttgcccgtcttacctttagttattgcacgttgctctccgcagactaaggtgagaatgatcgaagctttacaccgtaggaagaagttctgcgcaatgacaggtgacggtgttaacgattctccatctctaaaaatggccaatgttggtattgcaatgggtattaatggttcagatgtttccaaagaagcgtctgatattgttctaagcgatgacaattttgcttctattttgaatgctgtcgaagaaggtcgtaggatgacggataacattcagaagtttgtcctacaattattggcagaaaatgttgctcaggctttgtatttgatcattggtttagtattcagagatgagaacggaaaatcagtatttcccttatcaccagtggaagtattgtggattattgtcgtcacctcttgttttcctgctatggggctaggtctagaaaaggctgctccagatttgatggatagacctcctcatgattcagaggttggtattttcacgtgggaggttattatagatacatttgcatatgggattataatgacagggtcctgtatggcttcatttactggatcactgtatggaataaatagtggtagattggggcacgattgtgatggcacctataacagcagttgtcgtgatgtttatagatcacgttctgcggctttcgcaaccatgacgtggtgcgctttgattctggcttgggaagtggttgacatgagaagatcctttttcagaatgcatccagacactgacagcccagtcaaggaatttttcagaagtatttggggaaaccagtttttgttctggtcaatcatttttggatttgtgtcagccttccccgtcgtctatattccggttattaatgataaagtgtttttgcataaaccaattggtgctgaatggggtctcgccattgcattcacaattgcattctggataggtgctgaactttacaagtgtggaaagaggcgctatttcaaaactcagagagcgcacaacccggagaatgatttggagagtaacaataagcgcgatccattcgaagcgtatagtacttctactacaatccatacagaagttaatattggtattaaacaatga

SEQ ID NO: 1878 - DNA, 3276 bp, Artificial Sequence
  Description of Artificial Sequence: Synthetic polynucleotide
atgagcgagggaactgtcaaagaaaacaataatgaagaattcaatgcttatcacacattgactacagaagaagccgctgaatttataggcacaagtttgactgaaggtcttactcaagatgagtccctccgcagattgaaagcagtgggagagaacacattgggtgatgataccaaaattgactataaagcaatggtcctccatcaggtatgtaatgcaatgattatggtcttggtaatatccatggcgatctctttcgctgtgcgcgactggattactggtggcgttatttcttttgttatcgcggtcaatgtgctcattggccttgttcaagaatataaggctaccaagacaatgaactctttgaaaaacttgagctctcccaatgctcatgttattaggaacgggaaaagtgagactataaactccaaagatgtggttccaggtgatatttgtttggtgaaggtcggtgatactattcctgctgatttgcgtttaattgaaactaagaattttgatactgatgaatctttattaaccggtgaatctttgcctgtctccaaagacgccaacttagtgtttggaaaagaagaagaaacctccgtgggtgatcgtttgaatttagcattttcttcttccgccgttgtcaagggaagagccaagggtattgtcatcaagacagctttgaatagtgaaattggtaaaattgcaaaatctttacaaggtgattctggtctcatttcccgcgatcctagtaagtcttggttacagaatacatggatatctacaaagaaagttactggtgcatttttaggtacaaatgtcggtacgcccttgcacaggaaattatctaagttggcggtattgcttttctggattgccgtactttttgctatcatcgtcatggcctctcaaaagtttgacgtagataaaagggtagctatctatgccatttgtgtggccctttccatgattccctcttctttagtcgttgtcttgaccatcaccatgtctgttggggctgctgttatggtttctagaaacgttattgtaagaaaattagattctttggaagctttaggtgccgttaacgatatctgttctgacaagaccggtactcttacacagggtaaaatgttagcgaggcaaatttggatccctcgctttggtaccataactatctctaattctgatgacccctttaatcccaatgagggcaacgtgagtttgattccaaggttttctccttacgaatattctcataatgaggatggtgacgttggtattctccagaatttcaaggatcgcctttacgaaaaagatttaccagaagatattgacatggatttatttcaaaaatggctcgaaaccgccactttggctaacattgctactgttttcaaagatgacgcaactgactgttggaaagctcatggtgacccaacagaaattgcgattcaagtgtttgctactaagatggacttgcctcacaatgcccttaccggtgagaaatctactaatcaaagtaatgagaatgaccaatcctctctttctcaacacaatgagaagcctggcagtgcacaattcgaacatattgctgaattcccattcgactctactgtgaagagaatgtcttctgtctactacaacaatcacaacgaaacatataatatttatggcaagggtgctttcgaaagcatcatcagttgttgcagttcttggtatggtaaggatggtgtaaaaatcacaccattgaccgattgtgatgtcgaaacgataaggaaaaatgtttacagtttatccaatgagggtttaagagtcttgggttttgcctccaaatctttcactaaagatcaagtgaatgacgatcaattgaaaaacattacttctaacagggccaccgcagaaagtgatttagttttcttggggttgattggtatttacgatccacccagaaatgagactgccggtgcagtcaagaagtttcaccaagctggtattaacgttcatatgttaactggggactttgtgggtacagcaaaggctatcgctcaggaggttggcatcttacccaccaatttgtaccattactcccaagagattgttgacagtatggtcatgaccggatctcagtttgacggattgagtgaggaggaagtggacgatttgcccgtcttacctttagttattgcacgttgctctccgcagactaaggtgagaatgatcgaagctttacaccgtaggaagaagttctgcgcaatgacaggtgacggtgttaacgattctccatctttgaaaatggccaatgttggtattgcaatgggtattaatggttctgatgtttccaaagaagcgtctgatattgttttaagcgatgacaattttgcttctattttgaatgctgtcgaagaaggtcgtaggatgacggataacattcagaagtttgtcttacaattattggcagaaaatgttgctcaggctttgtatttgatcattggtttagtattcagagatgagaacggaaaatctgtatttcccttatctccagtggaagtattgtggattattgtcgtcacctcttgttttcctgctatggggttaggtttggaaaaggctgctccagatttgatggatagacctcctcatgattctgaggttggtattttcacgtgggaggttattatagatacatttgcatatgggattataatgacagggtcctgtatggcttcttttactggatctttgtatggaataaatagtggtagattggggcacgattgtgatggcacctataacagcagttgtcgtgatgtttatagatctcgttctgcggctttcgcaaccatgacgtggtgcgctttgattttggcttgggaagtggttgacatgagaagatcctttttcagaatgcatccagacactgacagcccagtcaaggaatttttcagaagtatttggggaaaccagtttttgttctggtctatcatttttggatttgtgtctgccttccccgtcgtctatattccggttattaatgataaagtgtttttgcataaaccaattggtgctgaatggggtctcgccattgcattcacaattgcattctggataggtgctgaactttacaagtgtggaaagaggcgctatttcaaaactcagagagcgcacaacccggagaatgatttggagagtaacaataagcgcgatccattcgaagcgtatagtacttctactacaatccatacagaagttaatattggtattaaacaatga

SEQ ID NO: 1879 - DNA, 3276 bp, Saccharomyces cerevisiae
atgggcgaaggaactactaaggaaaacaataatgcagaattcaatgcttatcacacgctgactgcagaagaagccgctgaattcataggcacaagtctaactgaaggtttgacccaagatgagttcgtccacagattgaaaacagtgggtgagaacacattgggtgatgacactaaaattgattacaaggcaatggtcctccatcaggtatgtaatgccatgatcatggtccttctaatatccatgataatctcgtttgccatgcatgattggattactggtggcgttatttcttttgttatcgcggtcaatgtgctcattggcctagttcaagaatataaggctaccaagacaatgaactctttgaaaaacttgagctctcccaatgctcatgttattaggaacgggaaaagtgagactataaactcaaaagatgtggttccaggtgatatttgtctggtgaaggtcggtgatactattcctgctgatttgcgtttaattgaaactaagaattttgatactgatgaatcactactgaccggtgaatctttgcctgtctccaaagacgccaacttagtgtttggaaaagaagaagaaacctccgtgggtgatcgtttgaatttagcattttcttcatccgccgttgtcaagggaagagccaagggtattgtcatcaagacagctttgaatagtgaaattggtaaaattgcaaaatctctacaaggtgattcaggtctcatttcccgcgatcctagtaagtcgtggttacagaatacatggatatctacaaagaaagttactggtgcatttttaggtacaaatgtcggtacgcccctgcacaggaaactgtctaagttggcggtattgcttttctggattgccgtactttttgctatcatcgtcatggcctctcaaaagtttgacgtagataaaagggtagctatctatgccatttgtgtggccctatccatgattccctcttcattagtcgttgtcttgaccatcaccatgtctgttggggctgctgttatggtttctagaaacgttattgtaagaaaattagattctctggaagctttaggtgccgttaacgatatctgttctgacaagaccggtactcttacacagggtaaaatgttagcgaggcaaatttggatccctcgctttggtaccataactatctcgaattctgatgacccctttaatcccaatgagggcaacgtgagtttgattccaaggttttcaccttacgaatattctcataatgaggatggtgacgttggtattctccagaatttcaaggatcgcctatacgaaaaagatttaccagaagatattgacatggatctatttcaaaaatggctcgaaaccgccactttggctaacattgctactgttttcaaagatgacgcaactgactgttggaaagctcatggtgacccaacagaaattgcgattcaagtgtttgctactaagatggacttgcctcacaatgcccttaccggtgagaaatcgactaatcaaagtaatgagaatgaccaatcctctctttcacaacacaatgagaagcctggcagtgcacaattcgaacatattgctgaattcccattcgactcaactgtgaagcgaatgtcatctgtctactacaacaatcacaacgaaacatataatatttatggcaagggtgctttcgaaagcatcatcagttgttgcagttcttggtatggtaaggatggtgtaaaaatcacaccattgaccgattgtgatgtcgaaacgataaggaaaaatgtttacagtctatcaaatgagggtttaagagtcttgggttttgcctccaaatctttcactaaagatcaagtgaatgacgatcaattgaaaaacattacttcaaacagggccaccgcagaaagtgatttagttttcctagggttgattggtatttacgatccacccagaaatgagactgccggtgcagtcaagaagtttcaccaagctggtattaacgttcatatgttaactggggactttgtgggtacagcaaaggctatcgctcaggaggttggcatcttacccaccaatttgtaccattactcccaagagattgttgacagtatggtcatgaccggatctcagtttgacggactaagtgaggaggaagtggacgatttgcccgtcttacctttagttattgcacgttgctctccgcagactaaggtgagaatgatcgaagctttacaccgtaggaagaagttctgcacaatgacaggtgacggtgttaacgattctccatctctaaaaatggccaatgttggtattgcaatgggtattaatggttcagatgtttccaaagaagcgtctgatattgttctaagcgatgacaattttgcttctattttgaatgctgtcgaagaaggtcgtaggatgacggataacattcagaagtttgtcctacaattattggcagaaaatgttgctcaggctttgtatttgatcattggtttagtattcagagatgagaacggaaaatcagtatttcccttatcaccagtggaagtattgtggattattgtcgtcacctcttgttttcctgctatggggctaggtctagaaaaggctgctccagatttgatggatagacctcctcatgattcagaggttggtattttcacgtgggaggttattatagatacatttgcatatgggattataatgacagggtcctgtatggcttcatttactggatcactgtatggaataaatagtggtagattggggcacgattgtgatggcacctataacagcagttgtcgtgatgtttatagatcacgttctgcggctttcgcaaccatgacgtggtgcgctttgattctggcttgggaagtggttgacatgagaagatcctttttcagaatgcatccagacactgacagcccagtcaaggaatttttcagaagcatttggggaaaccagtttttgttctggtcaatcatttttggatttgtgtcagccttccccgtcgtctatattccggttattaatgataaagtgtttttgcataaaccaattggtgctgaatggggtctcgccattgcattcacaattgcattctggataggtgctgaactttacaagtgtggaaagaggcgctatttcaaaactcagagagcgcacaacccggagaatgatttggagagtaacaataagcgcgatccattcgaagcgtatagtacttctactacaatccatacagaagttaatattggtattaaacaatga

SEQ ID NO: 1880 - DNA, 3276 bp, Artificial Sequence
  Description of Artificial Sequence: Synthetic polynucleotide
atgggcgaaggaactactaaggaaaacaataatgcagaattcaatgcttatcacacgttgactgcagaagaagccgctgaattcataggcacaagtttgactgaaggtttgacccaagatgagttcgtccacagattgaaaacagtgggtgagaacacattgggtgatgacactaaaattgattacaaggcaatggtcctccatcaggtatgtaatgccatgatcatggtccttttgatatccatgataatctcttttgccatgcatgattggattactggtggcgttatttcttttgttatcgcggtcaatgtgctcattggccttgttcaagaatataaggctaccaagacaatgaactctttgaaaaacttgagctctcccaatgctcatgttattaggaacgggaaaagtgagactataaactccaaagatgtggttccaggtgatatttgtttggtgaaggtcggtgatactattcctgctgatttgcgtttaattgaaactaagaattttgatactgatgaatctttattaaccggtgaatctttgcctgtctccaaagacgccaacttagtgtttggaaaagaagaagaaacctccgtgggtgatcgtttgaatttagcattttcttcttccgccgttgtcaagggaagagccaagggtattgtcatcaagacagctttgaatagtgaaattggtaaaattgcaaaatctttacaaggtgattctggtctcatttcccgcgatcctagtaagtcttggttacagaatacatggatatctacaaagaaagttactggtgcatttttaggtacaaatgtcggtacgcccttgcacaggaaattatctaagttggcggtattgcttttctggattgccgtactttttgctatcatcgtcatggcctctcaaaagtttgacgtagataaaagggtagctatctatgccatttgtgtggccctttccatgattccctcttctttagtcgttgtcttgaccatcaccatgtctgttggggctgctgttatggtttctagaaacgttattgtaagaaaattagattctttggaagctttaggtgccgttaacgatatctgttctgacaagaccggtactcttacacagggtaaaatgttagcgaggcaaatttggatccctcgctttggtaccataactatctctaattctgatgacccctttaatcccaatgagggcaacgtgagtttgattccaaggttttctccttacgaatattctcataatgaggatggtgacgttggtattctccagaatttcaaggatcgcctttacgaaaaagatttaccagaagatattgacatggatttatttcaaaaatggctcgaaaccgccactttggctaacattgctactgttttcaaagatgacgcaactgactgttggaaagctcatggtgacccaacagaaattgcgattcaagtgtttgctactaagatggacttgcctcacaatgcccttaccggtgagaaatctactaatcaaagtaatgagaatgaccaatcctctctttctcaacacaatgagaagcctggcagtgcacaattcgaacatattgctgaattcccattcgactctactgtgaagagaatgtcttctgtctactacaacaatcacaacgaaacatataatatttatggcaagggtgctttcgaaagcatcatcagttgttgcagttcttggtatggtaaggatggtgtaaaaatcacaccattgaccgattgtgatgtcgaaacgataaggaaaaatgtttacagtttatccaatgagggtttaagagtcttgggttttgcctccaaatctttcactaaagatcaagtgaatgacgatcaattgaaaaacattacttctaacagggccaccgcagaaagtgatttagttttcttggggttgattggtatttacgatccacccagaaatgagactgccggtgcagtcaagaagtttcaccaagctggtattaacgttcatatgttaactggggactttgtgggtacagcaaaggctatcgctcaggaggttggcatcttacccaccaatttgtaccattactcccaagagattgttgacagtatggtcatgaccggatctcagtttgacggattgagtgaggaggaagtggacgatttgcccgtcttacctttagttattgcacgttgctctccgcagactaaggtgagaatgatcgaagctttacaccgtaggaagaagttctgcacaatgacaggtgacggtgttaacgattctccatctttgaaaatggccaatgttggtattgcaatgggtattaatggttctgatgtttccaaagaagcgtctgatattgttttaagcgatgacaattttgcttctattttgaatgctgtcgaagaaggtcgtaggatgacggataacattcagaagtttgtcttacaattattggcagaaaatgttgctcaggctttgtatttgatcattggtttagtattcagagatgagaacggaaaatctgtatttcccttatctccagtggaagtattgtggattattgtcgtcacctcttgttttcctgctatggggttaggtttggaaaaggctgctccagatttgatggatagacctcctcatgattctgaggttggtattttcacgtgggaggttattatagatacatttgcatatgggattataatgacagggtcctgtatggcttcttttactggatctttgtatggaataaatagtggtagattggggcacgattgtgatggcacctataacagcagttgtcgtgatgtttatagatctcgttctgcggctttcgcaaccatgacgtggtgcgctttgattttggcttgggaagtggttgacatgagaagatcctttttcagaatgcatccagacactgacagcccagtcaaggaatttttcagaagcatttggggaaaccagtttttgttctggtctatcatttttggatttgtgtctgccttccccgtcgtctatattccggttattaatgataaagtgtttttgcataaaccaattggtgctgaatggggtctcgccattgcattcacaattgcattctggataggtgctgaactttacaagtgtggaaagaggcgctatttcaaaactcagagagcgcacaacccggagaatgatttggagagtaacaataagcgcgatccattcgaagcgtatagtacttctactacaatccatacagaagttaatattggtattaaacaatga

SEQ ID NO: 1881 - DNA, 612 bp, Saccharomyces cerevisiae
atgcttagaaataccattgcattaagatcatttatcagaacacagtcgacgcgcccatatcctgtaaatgtagaggcagtctactatgctcctttaaagttacctatcaaatatggtgatttagttgcagacattcagttaagatcgtatgacaatgaaaacctcgatttttattcagacttcatacttagaacaggttactatttgggtatcccattgacaggtcctaaacctttgcccacgagaagagaaaggtggactgtaataaaatcacctttcgtgcacgctaaatccaaagagaattttgaaagacatacacataagaggctcattagggcctgggatacgaaccccgaagtgctacagatgttgatagcttacattacgaagcactctatggcaggcgtcggaatgaaatgtaacttctttcaaaggtccgaaatatcgctggacttgggttcggacgccaatggcctcgaaaaatcactaagcaatatcgatgaattgtattctctgagaaacgatgataaagctcaaactagtgctgtcggacaaaaagtattggaactattggatagccccgattttaaaaaacatttggaaaagaagtaa

SEQ ID NO: 1882 - DNA, 612 bp, Artificial Sequence
  Description of Artificial Sequence: Synthetic polynucleotide
atgcttagaaataccattgcattaagatcttttatcagaacacagagcacgcgcccatatcctgtaaatgtagaggcagtctactatgctcctttaaagttacctatcaaatatggtgatttagttgcagacattcagttaagatcttatgacaatgaaaacctcgatttttattctgacttcatacttagaacaggttactatttgggtatcccattgacaggtcctaaacctttgcccacgagaagagaaaggtggactgtaataaaatctcctttcgtgcacgctaaatccaaagagaattttgaaagacatacacataagaggctcattagggcctgggatacgaaccccgaagtgttacagatgttgatagcttacattacgaagcactctatggcaggcgtcggaatgaaatgtaacttctttcaaaggtccgaaatatctttggacttgggttctgacgccaatggcctcgaaaaatctttaagcaatatcgatgaattgtattctttgagaaacgatgataaagctcaaactagtgctgtcggacaaaaagtattggaattattggatagccccgattttaaaaaacatttggaaaagaagtga

SEQ ID NO: 1883 - DNA, 603 bp, Saccharomyces cerevisiae
atggagcaaatattatataatcaaagccttaaaatttctaccctttctacttttcaaggtttaaagtttctaaaggtcctcattttttctattttccaacaactattttataacccagttatacaattattcggaacgaaagcctcaataatggaatctgattccactactctgctcgaaagtagttggagtactgagcgaaactttctcaatatgaattcagattccatatctgctaccaagaatgtttttatattattttttaccattttcagattagcggagtatattgtatacaaactctctgaccagaagtatcggttacacacatccctgaatgtccaacatttcaggtggaattcgaagaagaatacaaacagaaaaaggacactttcctttagcaaagcttacttaccaagaacaaatatactaccgatttttgtagccgatggactaaaaaatagattctcaggcccgctacctggtaagtccttggaaagcttccagaaactaaatttattgagcgataacaatattaagcggtatgcagtaccaggaaacaaagcagtgaacacacttttatggcaagagcaatactcataa

SEQ ID NO: 1884 - DNA, 603 bp, Artificial Sequence
  Description of Artificial Sequence: Synthetic polynucleotide
atggagcaaatattatataatcaaagccttaaaatttctaccctttctacttttcaaggtttaaagtttttgaaggtcctcattttttctattttccaacaattattttataacccagttatacaattattcggaacgaaagcctctataatggaatctgattccactactttactcgaaagtagttggagtactgagagaaactttctcaatatgaattctgattccatatctgctaccaagaatgtttttatattattttttaccattttcagattagcggagtatattgtatacaaactctctgaccagaagtatagattacacacatccttgaatgtccaacatttcaggtggaattctaagaagaatacaaacagaaaaaggacactttcctttagcaaagcttacttaccaagaacaaatatattaccgatttttgtagccgatggattgaaaaatagattcagtggcccgttgcctggtaagtccttggaaagcttccagaaattgaatttattgagcgataacaatattaagagatatgcagtaccaggaaacaaagcagtgaacacacttttatggcaagagcaatactcctga

SEQ ID NO: 1885 - DNA, 696 bp, Saccharomyces cerevisiae
atgttttacccatataactatagtaacctcaatgtttctactatgcccgcactgccgggaatctccgcatttgatggaatgcaagatgaagaaaacgttgaaataagcccggaaagaaaatatcagacgctactaccagttctaactaattctcatgtggtagagaatgaactaaaacacaaattaaataagactgcttttgatttccgataccaaaccaaatcagaaaatggctctgaaaagtgggagccaaaatacttaataacgcctaatttacaaacaagaagcgtctcttttgacaattcatcggtacaatataattcagattcatccgaaaaaagctcgctatcacaactaacttgtaattcatcaataatacaacagcctgagaacggaatagtttctaatgatgcatataataagatggcaaatagtagatactctctgaaaacgcggaagcaaagaacagatccaagaaatacgttatcagatgaggaagaccttgaacaaaggcgcaaatacatttgcaaaatttgcgcaagaggattcactacatcgggtcatttagcaaggcataatagaattcatacgggcgaaaaaaatcattgttgtccgtataagggatgcacgcagcgattcagtcgacatgataattgcttgcaacactatagaacacatttgaaaaagggacaataa

SEQ ID NO: 1886 - DNA, 696 bp, Artificial Sequence
  Description of Artificial Sequence: Synthetic polynucleotide
atgttttacccatataactatagtaacctcaatgtttctactatgcccgcattaccgggaatctccgcatttgatggaatgcaagatgaagaaaacgttgaaataagcccggaaagaaaatatcagacgttattaccagttttaactaattctcatgtggtagagaatgaattgaaacacaaattaaataagactgcttttgatttcaggtaccaaaccaaaagtgaaaatggctctgaaaagtgggagccaaaatacttaataacgcctaatttacaaacaagaagcgtctcttttgacaattcttctgtacaatataattctgattcttccgaaaaaagctctttatctcaattgacttgtaattcttctataatacaacagcctgagaacggaatagtttctaatgatgcatataataagatggcaaatagtagatactctttgaaaacgagaaagcaaagaacagatccaagaaatacgttaagtgatgaggaagaccttgaacaaaggcgcaaatacatttgcaaaatttgcgcaagaggattcactacatctggtcatttagcaaggcataatagaattcatacgggcgaaaaaaatcattgttgtccgtataagggatgcacgcagagattcagtagacatgataattgcttgcaacactatagaacacatttgaaaaagggacaatga

SEQ ID NO: 1887 - DNA, 987 bp, Saccharomyces cerevisiae
atgcctgcccctcaagatccaaggaatcttccaattagacaacaaatggaagctcttatccgtcgcaaacaagctgaaatcacgcaaggtttggaatccatcgatactgttaagttccacgctgatacttggacccgtggtaacgatggtggtggtggtacctctatggttatccaagacggtacaactttcgaaaaaggtggtgttaatgtctccgttgtttatggtcaattgagcccagcggccgtttcagccatgaaagctgatcataagaatctgcgtctaccagaagatccaaagactggtttgccagttaccgacggtgtcaagttcttcgcttgtggtttaagtatggtcattcatcccgttaacccacacgctccaaccacgcacttaaactaccgttacttcgaaacttggaaccaagatgggaccccacaaacttggtggtttggtggtggtgctgatttgacaccttcttacttatacgaagaagacggtcaattattccaccaactgcacaaggatgccttggacaagcacgacactgctttgtacccacgtttcaagaaatggtgtgatgagtacttctacattacccaccgtaaggaaacacgtggtattggtggtatattctttgacgattatgatgaacgtgacccacaagaaatattgaagatggttgaagactgtttcgatgctttcttgccatcctacttgactatcgtcaagagaagaaaagatatgccatatacaaaggaagaacaacaatggcaggccattagacgtggtagatacgttgaattcaacttaatctacgatagaggtacccaattcggtttgagaaccccaggctctagagttgagtcaattttgatgagtttgcctgaacatgcttcatggttatacaaccaccaccctgctcctggttccagagaagctaaattactagaagttaccaccaaaccaagagagtgggttaaataa

SEQ ID NO: 1888 - DNA, 987 bp, Artificial Sequence
  Description of Artificial Sequence: Synthetic polynucleotide
atgcctgcccctcaagatccaaggaatcttccaattagacaacaaatggaagctcttatccgtcgcaaacaagctgaaatcacgcaaggtttggaatccatcgatactgttaagttccacgctgatacttggacccgtggtaacgatggtggtggtggtacctctatggttatccaagacggtacaactttcgaaaaaggtggtgttaatgtctccgttgtttatggtcaattgagcccagcggccgtttctgccatgaaagctgatcataagaatttacgtttgccagaagatccaaagactggtttgccagttaccgacggtgtcaagttcttcgcttgtggtttaagtatggtcattcatcccgttaacccacacgctccaaccacgcacttaaactaccgttacttcgaaacttggaaccaagatgggaccccacaaacttggtggtttggtggtggtgctgatttgacaccttcttacttatacgaagaagacggtcaattattccaccaattacacaaggatgccttggacaagcacgacactgctttgtacccacgtttcaagaaatggtgtgatgagtacttctacattacccaccgtaaggaaacacgtggtattggtggtatattctttgacgattatgatgaacgtgacccacaagaaatattgaagatggttgaagactgtttcgatgctttcttgccatcctacttgactatcgtcaagagaagaaaagatatgccatatacaaaggaagaacaacaatggcaggccattagacgtggtagatacgttgaattcaacttaatctacgatagaggtacccaattcggtttgagaaccccaggctctagagttgagtctattttgatgagtttgcctgaacatgcttcttggttatacaaccaccaccctgctcctggttccagagaagctaaattattggaagttaccaccaaaccaagagagtgggttaaatga

SEQ ID NO: 1889 - DNA, 333 bp, Saccharomyces cerevisiae
atgctttcgttttgtccttcgtgtaacaatatgctactgataacgagtggcgatagtggtgtatatacattagcatgccgttcatgtccatatgagtttcctatagagggtatagaaatctatgataggaagaaacttccaagaaaggaagttgatgatgttcttggtggtggttgggacaatgtggatcaaaccaaaacccaatgtcccaattatgatacttgtggtggtgagagtgcttactttttccaactacaaattaggtcagctgatgagccgatgactaccttttataagtgtgtaaactgtggtcatagatggaaggaaaattaa

SEQ ID NO: 1890 - DNA, 333 bp, Artificial Sequence
  Description of Artificial Sequence: Synthetic polynucleotide
atgctttctttttgtccttcttgtaacaatatgttattgataacgagtggcgatagtggtgtatatacattagcatgccgttcctgtccatatgagtttcctatagagggtatagaaatctatgataggaagaaacttccaagaaaggaagttgatgatgttcttggtggtggttgggacaatgtggatcaaaccaaaacccaatgtcccaattatgatacttgtggtggtgagagtgcttactttttccaattacaaattaggtctgctgatgagccgatgactaccttttataagtgtgtaaactgtggtcatagatggaaggaaaattga

SEQ ID NO: 1891 - DNA, 1815 bp, Saccharomyces cerevisiae
atgtcagatcctatagtaacgtcttccaaaatggaaaaaagtgcagagtttgaagtaacagactctgctttatataataacttcaatacatcaacaacagcttcactaactccggagattaaggaacattctgaggaatctcgcaatgggttagttcacagattcgtcgactcattcagaagagccgaaagccaacgtttagaagaagacaatgacttggaggatggtaccaaatcgatgaaatctaataaccacttaaaaaagtcaatgaaatctagacatgttgtaatgatgtctttaggtacagggataggaacaggtcttctagttgccaacgccaaaggtttgagtcttgcaggcccggggtctttagtcatcggttacgttatggtgtccttcgtcacgtattttatggtccaagcggctggtgagatgggtgtcacttatccgacgcttccaggtaacttcaatgcatacaattcaatctttatttcaaagtcgtttgggttcgcgaccacttggttattttgcattcagtggttaactgtgctaccgttggaattgattacttcttccatgaccgtcaagtactggaatgacacaattaatgctgatgtattcattgtcattttctatgtgtttttattgtttatccacttttttggtgttaaggcatacggtgaaacggaatttatcttcaattcctgtaagatattgatggttgcaggattcattattttatcagtcgtcatcaattgtgggggagccggtgtggacggctatattggcggcaaatattggcgcgaccctggttcatttgcagaaggcagcggtgccactcgtttcaaagggatatgttatattctagtatctgcatatttctccttcggtggtattgaattatttgttctttccatcaatgagcagtctaaccctagaaaatccactcctgtagccgcgaagagaagtgtatatcgtattttgatcatttatttgctgacaatgattctaattgggttcaatgttcctcacaataacgatcaattgatgggttccggtggctccgcaacgcacgcttcaccatatgtcttggcagcctctattcacaaggttagggtcatcccccatatcattaatgctgttattttgatatcagtcatctctgttgcgaactctgccctttatgccgcaccgagattaatgtgttccttggctcaacagggctatgctccaaaatttttgaactatattgatagggagggaagacctttaagggccttggtagtgtgctctcttgttggtgtcgttggcttcgtcgcctgttctccacaggaagagcaagcatttacatggttggcagccattgcaggtttgagtgaacttttcacatggtcaggcattatgctttcacacattcgattcagaaaagcgatgaaagtccaaggaagatcacttgatgaagtcggctataaggccaataccggtatatggggttcatactatggggtttttttcaatatgcttgtctttatggcccaattttgggtcgcactgtctccaataggaaatggcggaaagtgtgatgctcaggcattcttcgagagttatctggctgccccgctatggatattcatgtatgttggatacatggtttacaaaagagattttacctttttaaacccactggacaagatcgacttggactttcatagaagagtttacgaccctgaaataatgaggcaggaggacgaagaaaataaagaaaggttaaagaactcttcaatattcgtcagagtctacaaattttggtgttag

SEQ ID NO: 1892 - DNA, 1815 bp, Artificial Sequence
  Description of Artificial Sequence: Synthetic polynucleotide
atgagtgatcctatagtaacgtcttccaaaatggaaaaaagtgcagagtttgaagtaacagactctgctttatataataacttcaatacatctacaacagcttctttgactccggagattaaggaacattctgaggaatctcgcaatgggttagttcacagattcgtcgactctttcagaagagccgaaagccaacgtttagaagaagacaatgacttggaggatggtaccaaatctatgaaatctaataaccacttaaaaaagtctatgaaatctagacatgttgtaatgatgtctttaggtacagggataggaacaggtcttttggttgccaacgccaaaggtttgagtcttgcaggcccggggtctttagtcatcggttacgttatggtgtccttcgtcacgtattttatggtccaagcggctggtgagatgggtgtcacttatccgacgcttccaggtaacttcaatgcatacaattccatctttatttccaagagctttgggttcgcgaccacttggttattttgcattcagtggttaactgtgttgccgttggaattgattacttcttccatgaccgtcaagtactggaatgacacaattaatgctgatgtattcattgtcattttctatgtgtttttattgtttatccacttttttggtgttaaggcatacggtgaaacggaatttatcttcaattcctgtaagatattgatggttgcaggattcattattttaagtgtcgtcatcaattgtgggggagccggtgtggacggctatattggcggcaaatattggcgcgaccctggttcttttgcagaaggcagcggtgccactcgtttcaaagggatatgttatattttagtatctgcatatttctccttcggtggtattgaattatttgttctttccatcaatgagcagtctaaccctagaaaatccactcctgtagccgcgaagagaagtgtatatcgtattttgatcatttatttgttgacaatgattttaattgggttcaatgttcctcacaataacgatcaattgatgggttccggtggctccgcaacgcacgcttctccatatgtcttggcagcctctattcacaaggttagggtcatcccccatatcattaatgctgttattttgatatctgtcatctctgttgcgaactctgccctttatgccgcaccgagattaatgtgttccttggctcaacagggctatgctccaaaatttttgaactatattgatagggagggaagacctttaagggccttggtagtgtgctctcttgttggtgtcgttggcttcgtcgcctgttctccacaggaagagcaagcatttacatggttggcagccattgcaggtttgagtgaacttttcacatggtctggcattatgctttctcacattagattcagaaaagcgatgaaagtccaaggaagatctcttgatgaagtcggctataaggccaataccggtatatggggttcttactatggggtttttttcaatatgcttgtctttatggcccaattttgggtcgcattatctccaataggaaatggcggaaagtgtgatgctcaggcattcttcgagagttatttggctgccccgttatggatattcatgtatgttggatacatggtttacaaaagagattttacctttttaaacccattggacaagatcgacttggactttcatagaagagtttacgaccctgaaataatgaggcaggaggacgaagaaaataaagaaaggttaaagaactcttctatattcgtcagagtctacaaattttggtgttga

SEQ ID NO: 1893 - DNA, 1089 bp, Saccharomyces cerevisiae
atgggtaactttccagctccaaaaaacgatttgatattgagagccgcaaagggtgaaaaagtcgagagaccgccatgctggataatgcgccaggcaggtcgttacctgccggaatatcacgaggtgaaaaacaatcgtgatttctttcaaacttgcagggatgcggaaattgcttctgagattactatccagccggtaagacgctatagaggcctcattgatgctgctattatttttagtgatatcttagttattccgcaagccatgggtatgagggtcgagatgctcgaaggtaaaggtccacatttcccagaacctttaagaaatccggaagacctccaaacggtattagactacaaggttgatgttttgaaagagttagattgggctttcaaggcaatcaccatgacaaggatcaagttggatggtgaggttcccttatttggcttttgcgggggaccttggactctaatggtttatatgacggaaggcggtggatcccgtcttttcagatttgccaaacaatggattaacatgtatccagagctttctcacaaattattacaaaaaatcactgatgtggccgtggagtttctgagtcagcaagtcgtggcgggtgctcaaatactacaagtttttgaaagttggggtggtgagctttcgtctgtagattttgatgagttttccctaccatatttaagacaaattgccgaaagagtgcctaaaagattgcaagaattaggtatcatggaacagattcctatgatcgtttttgcgaaagggtcgtggtatgctttggacaagctatgctgttcaggatttgacgttgtttcgttggactggtcctgggacccaagagaagcggtaaaaataaacaagaaccgtgtcaccttgcagggcaacctggatcctggcgtcatgtatggttctaaagaggtaataacaaagaaagttaaacagatgattgaggcttttggaggtgggaagtcccgctacattgttaatttcggtcacggtacccaccctttcatggatccagacgtcatcaagtttttcttggaggagtgccacagaattggttcgaagtaa

SEQ ID NO: 1894 - DNA, 1089 bp, Artificial Sequence
  Description of Artificial Sequence: Synthetic polynucleotide
atgggtaactttccagctccaaaaaacgatttgatattgagagccgcaaagggtgaaaaagtcgagagaccgccatgctggataatgcgccaggcaggtcgttacttgccggaatatcacgaggtgaaaaacaatcgtgatttctttcaaacttgcagggatgcggaaattgcttctgagattactatccagccggtaagacgctatagaggcctcattgatgctgctattatttttagtgatatcttagttattccgcaagccatgggtatgagggtcgagatgctcgaaggtaaaggtccacatttcccagaacctttaagaaatccggaagacctccaaacggtattagactacaaggttgatgttttgaaagagttagattgggctttcaaggcaatcaccatgacaaggatcaagttggatggtgaggttcccttatttggcttttgcgggggaccttggactttaatggtttatatgacggaaggcggtggatcccgtcttttcagatttgccaaacaatggattaacatgtatccagagctttctcacaaattattacaaaaaatcactgatgtggccgtggagtttttgagtcagcaagtcgtggcgggtgctcaaatattgcaagtttttgaaagttggggtggtgagctttcttctgtagattttgatgagttttccttgccatatttaagacaaattgccgaaagagtgcctaaaagattgcaagaattaggtatcatggaacagattcctatgatcgtttttgcgaaagggtcctggtatgctttggacaagttgtgctgttctggatttgacgttgtttctttggactggtcctgggacccaagagaagcggtaaaaataaacaagaaccgtgtcaccttgcagggcaaccttgatcctggcgtcatgtatggttctaaagaggtaataacaaagaaagttaaacagatgattgaggcttttggaggtgggaagtcccgctacattgttaatttcggtcacggtacccaccctttcatggatccagacgtcatcaagtttttcttggaggagtgccacagaattggttccaagtga

SEQ ID NO: 1895 - DNA, 1899 bp, Saccharomyces cerevisiae
atgaattcacaaaaggcgagtaaaatgactggctcactaaaaaagaatgatctttatatttttgatttgtctgagcaacttctgaattcattgaaattgatgagctttgactccacactgcgagaagttgaagtagagaagacatctgataatgatagaaacaaggagtctggagatctccaaatagcaagaaagaaggtcacatcaaatgttatgcgttgtagtgtttgtcaaatgagctttgattccagaaatgaacaaaaggcccactaccagactgattatcatttgatgaatgttaagcgtaaccttagggggctggatatcctatccgttgaggaattcgatgcgctgatttctaaggagcatggtatcaagtctgaagacgaaaattctggcggcgagcaaacttcaagcgatcacgaagaaagtgaggaagccagcgatcgggacccggacctacaaactaataattatatggaaactataatcgaaaatgatttgcagaaattagggttccaaaaagacgagtcggatgctattagccatattaatacccaatcgccctacatttatttcaaatcgaagtatcttcaaaagaatgaggtcttggcgatttataagtctctatttaataaaaggagtctttccaaccccaatgaagctttgactttttggaattcgcaagagaacccaatggccatttcagctctgtttatggtgggaggtggacattttgcgggagcaattgtttctcatcaaagactcaatgtcaaggggaacgcgcacaagaaggacgaaaccttaattgagcaagcggtcaatttcttagagcacaagacgtttcacaggtatactaccagaaggaagcaaggtggttctcagtcagcaatggacaatgcaaagggaaaagctaactctgccggttcagcacttcgtaggtacaatgaaagcgctttaaaaacagatatacagggtgtgttgaaggactgggaaccttatctgtcaaagtgtgataatatttttattcgagctcgcaatgtcagtgataaaaaaatttttactgataataccgttctgaacaagggtgatgaaaggataaagagcttcccttttaccacgaacaggcccactgtattagaattgaagaaggcatggtgcgaactttcctacctgaaaatattacctaagcctgaaccattggcagtgaaagaaacagtacaaaagttagaagtgtcgaacaaaaaggacgaatttaaagaaaaacaagaaccgttactggaagaaatccaaacagaagaaataatttctctgctgaagaaaggaagggcaccgttattgatatccttcttaaaaaagaataagcttgatggaaactttcggttaaagcctgagagtaaatattccttaacccctaccatgttacattatgcatcgcagcaagggatgaaacagatggcactgattttgctctcaaatattaaatgcgatccaacgatcaagaacagactaggaaggactgcgtgggatttgaatagaaacgacgacgtgagacacgcgtttcaaattgcaagatacaatcttggagagtctttcactaattgggacgaaactcatatcggtcagccattgagcagagaacaagttgatgaaatcaatgaaaagaaaaaagcaatagagaatgaaaaggcagaaaaactgattaaattggaattagaagccgccaaggaaaaacaaagatttgctaaagatgcagagaggggtccaggcaaaaagttaaccaatattccttcaattcagcaacaaaatttgaattctttgaccgatgaacagagacgcagattgatgagagaacaaagggctagagccgcagaagaaaggatgaaaaagaaatactga

SEQ ID NO: 1896 - DNA, 1899 bp, Artificial Sequence
  Description of Artificial Sequence: Synthetic polynucleotide
atgaattctcaaaaggcgagtaaaatgactggctccttgaaaaagaatgatctttatatttttgatttgtctgagcaacttttgaattctttgaaattgatgagctttgactccacattgagagaagttgaagtagagaagacatctgataatgatagaaacaaggagtctggagatctccaaatagcaagaaagaaggtcacaagtaatgttatgcgttgtagtgtttgtcaaatgagctttgattccagaaatgaacaaaaggcccactaccagactgattatcatttgatgaatgttaagcgtaaccttagggggttagatatcttgtccgttgaggaattcgatgcgttaatttctaaggagcatggtatcaagtctgaagacgaaaattctggcggcgagcaaacttccagcgatcacgaagaaagtgaggaagccagcgatagagacccggacttgcaaactaataattatatggaaactataatcgaaaatgatttgcagaaattagggttccaaaaagacgagtctgatgctattagccatattaatacccaatctccctacatttatttcaaatccaagtatcttcaaaagaatgaggtcttggcgatttataagtctttatttaataaaaggagtctttccaaccccaatgaagctttgactttttggaattctcaagagaacccaatggccatttctgctttgtttatggtgggaggtggacattttgcgggagcaattgtttctcatcaaagactcaatgtcaaggggaacgcgcacaagaaggacgaaaccttaattgagcaagcggtcaatttcttagagcacaagacgtttcacaggtatactaccagaaggaagcaaggtggttctcagtctgcaatggacaatgcaaagggaaaagctaactctgccggttctgcacttcgtaggtacaatgaaagcgctttaaaaacagatatacagggtgtgttgaaggactgggaaccttatttatccaagtgtgataatatttttattagagctcgcaatgtcagtgataaaaaaatttttactgataataccgttttgaacaagggtgatgaaaggataaagagcttcccttttaccacgaacaggcccactgtattagaattgaagaaggcatggtgcgaactttcctacttgaaaatattacctaagcctgaaccattggcagtgaaagaaacagtacaaaagttagaagtgtctaacaaaaaggacgaatttaaagaaaaacaagaaccgttattggaagaaatccaaacagaagaaataatttctttattgaagaaaggaagggcaccgttattgatatccttcttaaaaaagaataagcttgatggaaactttagattaaagcctgagagtaaatattccttaacccctaccatgttacattatgcatcccagcaagggatgaaacagatggcattgattttgctctctaatattaaatgcgatccaacgatcaagaacagattaggaaggactgcgtgggatttgaatagaaacgacgacgtgagacacgcgtttcaaattgcaagatacaatcttggagagtctttcactaattgggacgaaactcatatcggtcagccattgagcagagaacaagttgatgaaatcaatgaaaagaaaaaagcaatagagaatgaaaaggcagaaaaattgattaaattggaattagaagccgccaaggaaaaacaaagatttgctaaagatgcagagaggggtccaggcaaaaagttaaccaatattccttctattcagcaacaaaatttgaattctttgaccgatgaacagagacgcagattgatgagagaacaaagggctagagccgcagaagaaaggatgaaaaagaaatactga

SEQ ID NO: 1897 - DNA, 747 bp, Saccharomyces cerevisiae
atggctagaactttctttgtcggtggtaactttaaattaaacggttccaaacaatccattaaggaaattgttgaaagattgaacactgcttctatcccagaaaatgtcgaagttgttatctgtcctccagctacctacttagactactctgtctctttggttaagaagccacaagtcactgtcggtgctcaaaacgcctacttgaaggcttctggtgctttcaccggtgaaaactccgttgaccaaatcaaggatgttggtgctaagtgggttattttgggtcactccgaaagaagatcttacttccacgaagatgacaagttcattgctgacaagaccaagttcgctttaggtcaaggtgtcggtgtcatcttgtgtatcggtgaaactttggaagaaaagaaggccggtaagactttggatgttgttgaaagacaattgaacgctgtcttggaagaagttaaggactggactaacgtcgttgtcgcttacgaaccagtctgggccattggtaccggtttggctgctactccagaagatgctcaagatattcacgcttccatcagaaagttcttggcttccaagttgggtgacaaggctgccagcgaattgagaatcttatacggtggttccgctaacggtagcaacgccgttaccttcaaggacaaggctgatgtcgatggtttcttggtcggtggtgcttctttgaagccagaatttgttgatatcatcaactctagaaactaa

SEQ ID NO: 1898 - DNA, 747 bp, Artificial Sequence
  Description of Artificial Sequence: Synthetic polynucleotide
atggctagaactttctttgtcggtggtaactttaaattaaacggttccaaacaatccattaaggaaattgttgaaagattgaacactgcttctatcccagaaaatgtcgaagttgttatctgtcctccagctacctacttagactactctgtctctttggttaagaagccacaagtcactgtcggtgctcaaaacgcctacttgaaggcttctggtgctttcaccggtgaaaactccgttgaccaaatcaaggatgttggtgctaagtgggttattttgggtcactccgaaagaagatcttacttccacgaagatgacaagttcattgctgacaagaccaagttcgctttaggtcaaggtgtcggtgtcatcttgtgtatcggtgaaactttggaagaaaagaaggccggtaagactttggatgttgttgaaagacaattgaacgctgtcttggaagaagttaaggactggactaacgtcgttgtcgcttacgaaccagtctgggccattggtaccggtttggctgctactccagaagatgctcaagatattcacgcttccatcagaaagttcttggcttccaagttgggtgacaaggctgccagcgaattgagaatcttatacggtggttccgctaacggtagcaacgccgttaccttcaaggacaaggctgatgtcgatggtttcttggtcggtggtgcttctttgaagccagaatttgttgatatcatcaactctagaaactga

SEQ ID NO: 1899 - DNA, 1005 bp, Saccharomyces cerevisiae
atgtgtgaagagaatgttcatgttagtgaagatgttgctggcagtcacggttcttttacgaatgccagacctaggttaattgtactaataaggcatggggaaagcgaatcaaataaaaacaaggaggtcaatggttatattcctaaccatctgatttctttaacgaaaacaggtcaaatccaagctagacaagctggtattgacttattacgtgttttaaacgtagacgatcacaacttggtggaggatttggctaagaagtatattaaagatgaaagtagcaggagaactttaccgctgaaggactataccaggctgagtagagaaaaagacacaaacatagttttttatacatcaccctatagaagagcaagggaaacattgaaaggtattttggacgtcatcgatgaatataatgaattaaacagtggtgttcgtatatgtgaagatatgagatatgatccacatggtaaacagaaacatgcattttggccgagaggacttaataatactggtggtgtttacgaaaataatgaagataatatttgtgaagggaagcctggaaaatgttatctgcaatatcgggttaaggatgagccaagaataagggaacaagattttggtaatttccaaaaaatcaatagcatgcaggacgttatgaagaagagatctacgtatggtcatttcttcttcagattccctcatggagaaagtgcggcagatgtatatgacagagtcgccagtttccaagagactttattcaggcacttccatgataggcaagagagaagacccagagatgttgttgtcctagttacacatggtatttattccagagtattcctgatgaaatggtttagatggacatacgaagagtttgaatcgtttaccaatgttcctaacgggagcgtaatggtgatggaactggacgaatccatcaatagatacgtcctgaggaccgtgctacccaaatggactgattgtgagggagacctaactacatag

SEQ ID NO: 1900 - DNA, 1005 bp, Artificial Sequence
  Description of Artificial Sequence: Synthetic polynucleotide
atgtgtgaagagaatgttcatgttagtgaagatgttgctggcagtcacggttcttttacgaatgccagacctaggttaattgtattaataaggcatggggaaagcgaaagtaataaaaacaaggaggtcaatggttatattcctaaccatttgatttctttaacgaaaacaggtcaaatccaagctagacaagctggtattgacttattacgtgttttaaacgtagacgatcacaacttggtggaggatttggctaagaagtatattaaagatgaaagtagcaggagaactttaccgttgaaggactataccaggttgagtagagaaaaagacacaaacatagttttttatacatctccctatagaagagcaagggaaacattgaaaggtattttggacgtcatcgatgaatataatgaattaaacagtggtgttcgtatatgtgaagatatgagatatgatccacatggtaaacagaaacatgcattttggccgagaggacttaataatactggtggtgtttacgaaaataatgaagataatatttgtgaagggaagcctggaaaatgttatttacaatatagagttaaggatgagccaagaataagggaacaagattttggtaatttccaaaaaatcaatagcatgcaggacgttatgaagaagagatctacgtatggtcatttcttcttcagattccctcatggagaaagtgcggcagatgtatatgacagagtcgccagtttccaagagactttattcaggcacttccatgataggcaagagagaagacccagagatgttgttgtcttggttacacatggtatttattccagagtattcttaatgaaatggtttagatggacatacgaagagtttgaaagttttaccaatgttcctaacgggagcgtaatggtgatggaattagacgaatccatcaatagatacgtcttgaggaccgtgttacccaaatggactgattgtgagggagacttgactacatga

SEQ ID NO: 1901 - DNA, 2115 bp, Saccharomyces cerevisiae
atggtttctccaacgaaaatgataataaggtctccgttaaaggaaacagataccaacttgaaacataataatggaattgccgcatcaacaacagcagcgggccacttgaatgtgttttctaacgacaataattgcaacaataacaataccactgaatcctttccgaagaaaagatctcttgagcgcctcgagctccaacagcagcagcatttgcatgaaaagaaaagggccagaatagaaagggccaggtctattgaaggcgctgtccaagtcagcaaaggtacgggtctgaaaaatgtcgagccaagggttacgcctaaggaattgctggaatggcaaacaaattggaaaaagataatgaaaagagattctcgcatttactttgacattactgatgatgtagagatgaatacatataataagtccaagatggacaaacgcagagatttattgaaaagagggtttcttacattgggtgcgcaaataactcaattttttgacactactgtcacaatagttatcacaagaaggtctgttgagaacatatatttactaaaagataccgacattttatcgagagctaaaaaaaactacatgaaagtttggagttacgaaaaggctgccagatttctgaaaaatcttgatgttgatttggatcatttgagcaagactaaatctgcttctttagctgcgcccacattgtccaatcttctacacaatgaaaaattatatggaccaacggatagagaccccagaactaaaagagacgatattcactactttaaatatcctcatgtatacctttatgacctatggcaaacttgggcccccataataactttggaatggaaacctcaagaactaacaaacttagacgaactaccttacccaatattgaaaataggttcattcggaagatgcccttttataggggataggaattatgacgaaagttcttataagcgcgtagtaaagagatactcgagagacaaagcaaacaaaaaatatgcactgcaacttcgtgctctatttcaatatcatgccgacaccttactgaatacgtcatcagttaatgatcaaacgaaaaacctaatattcatacctcacacatgcaacgattctaccaagagcttcaaaaaatggatgcaagaaaaggcaaaaaattttgagaagaccgagttaaagaagacggatgatagcgcagttcaagatgttcgtaatgaacatgctgaccaaaccgatgaaaaaaatagtatattattaaatgaaactgaaaccaaagagcctccgttgaaagaagaaaaagaaaataaacaatctatagcagaagaatcgaataagtacccacagcgaaaagagctggctgccacaccaaaactaaaccatccagtattagctacttttgcaaggcaagaaactgaagaagtgccggatgatttgtgcactttgaaaacaaagtcacgtcaggcatttgaaatcaaagcaagtggtgcacatcaatctaatgatgtggcaacctcttttggcaatggtttgggcccaacaagagcaagcgtcatgagtaagaacatgaagtcattaagtagactaatggttgatagaaagctgggagtaaagcagacaaatggaaataacaaaaattatacagccactatagcaactactgctgaaacatcaaaggaaaatagacacagattagattttaatgctttgaaaaaagacgaagccccttcgaaagagacgggcaaagatagtgctgtacacttagaaactaatagaaagccccagaatttccctaaggtagctaccaaatcagtctccgcagactccaaagttcataatgacatcaagataacaaccacagaatctccaacagcatcgaagaaatcaacttccacaaacgtcaccttacattttaacgcacagacagcacagacagcacagccggtgaagaaagaaacggtaaaaaattccggatactgtgaaaattgtcgtgtaaaatacgaatctttagaacaacacatagtttctgagaagcatttgtctttcgctgaaaacgatttaaattttgaggctattgactcgttaattgaaaatctcagatttcaaatatag

SEQ ID NO: 1902 - DNA, 2115 bp, Artificial Sequence
  Description of Artificial Sequence: Synthetic polynucleotide
atggtttctccaacgaaaatgataataaggtctccgttaaaggaaacagataccaacttgaaacataataatggaattgccgcaagcacaacagcagcgggccacttgaatgtgttttctaacgacaataattgcaacaataacaataccactgaatcctttccgaagaaaagatctcttgagcgcctcgagctccaacagcagcagcatttgcatgaaaagaaaagggccagaatagaaagggccaggtctattgaaggcgctgtccaagtcagcaaaggtacgggtttgaaaaatgtcgagccaagggttacgcctaaggaattgttggaatggcaaacaaattggaaaaagataatgaaaagagattctcgcatttactttgacattactgatgatgtagagatgaatacatataataagtccaagatggacaaacgcagagatttattgaaaagagggtttcttacattgggtgcgcaaataactcaattttttgacactactgtcacaatagttatcacaagaaggtctgttgagaacatatatttattgaaagataccgacattttatctagagctaaaaaaaactacatgaaagtttggagttacgaaaaggctgccagatttttgaaaaatcttgatgttgatttggatcatttgagcaagactaaatctgcttctttagctgcgcccacattgtccaatcttttacacaatgaaaaattatatggaccaacggatagagaccccagaactaaaagagacgatattcactactttaaatatcctcatgtatacctttatgacttatggcaaacttgggcccccataataactttggaatggaaacctcaagaattaacaaacttagacgaattaccttacccaatattgaaaataggttctttcggaagatgcccttttataggggataggaattatgacgaaagttcttataagcgcgtagtaaagagatactctagagacaaagcaaacaaaaaatatgcattacaacttcgtgctttgtttcaatatcatgccgacaccttattgaatacgtcttctgttaatgatcaaacgaaaaacttgatattcatacctcacacatgcaacgattctaccaagagcttcaaaaaatggatgcaagaaaaggcaaaaaattttgagaagaccgagttaaagaagacggatgatagcgcagttcaagatgttcgtaatgaacatgctgaccaaaccgatgaaaaaaatagtatattattaaatgaaactgaaaccaaagagcctccgttgaaagaagaaaaagaaaataaacaatctatagcagaagaaagtaataagtacccacagagaaaagagttggctgccacaccaaaattgaaccatccagtattagctacttttgcaaggcaagaaactgaagaagtgccggatgatttgtgcactttgaaaacaaagtctcgtcaggcatttgaaatcaaagcaagtggtgcacatcaatctaatgatgtggcaacctcttttggcaatggtttgggcccaacaagagcaagcgtcatgagtaagaacatgaagtctttaagtagattaatggttgatagaaagttgggagtaaagcagacaaatggaaataacaaaaattatacagccactatagcaactactgctgaaacatccaaggaaaatagacacagattagattttaatgctttgaaaaaagacgaagccccttccaaagagacgggcaaagatagtgctgtacacttagaaactaatagaaagccccagaatttccctaaggtagctaccaaatctgtctccgcagactccaaagttcataatgacatcaagataacaaccacagaatctccaacagcatccaagaaatctacttccacaaacgtcaccttacattttaacgcacagacagcacagacagcacagccggtgaagaaagaaacggtaaaaaattccggatactgtgaaaattgtcgtgtaaaatacgaatctttagaacaacacatagtttctgagaagcatttgtctttcgctgaaaacgatttaaattttgaggctattgactctttaattgaaaatctcagatttcaaatatga

SEQ ID NO: 1903 - DNA, 888 bp, Saccharomyces cerevisiae
atgagtagtcgcaaaagcaccgcttctagcttactgttacggcaatatagagaacttactgatcctaagaaagctattccctcatttcatatagaactagaggatgattcaaatattttcacttggaacataggtgttatggtgctaaatgaggattccatttatcatggagggtttttcaaagctcaaatgagatttccggaagactttcccttttctccaccacagtttcgatttacgccggctatctaccatccaaacgtttacagggatggcaggctttgtatttctattttacatcaaagtggggatcctatgaccgacgaacctgatgctgaaacgtggtcccccgtgcagaccgtggaaagtgtgttgatctctatagtatctctattagaggaccccaatatcaactcgccagcaaatgtcgatgccgctgttgattacagaaagaaccctgaacaatacaagcaaagagtcaaaatggaagtggaaagatcgaaacaagatatccctaaaggtttcataatgcccacttctgaatcggcgtacatatctcaaagtaaactagatgaaccagaatcgaataaggatatggcggataatttttggtatgatagtgatttggacgacgatgagaacgggtccgtcattttacaagacgacgactacgacgatggaaacaaccatatcccctttgaagatgatgacgtttacaactataacgacaacgacgacgatgacgaaagaatcgaattcgaagatgatgacgatgatgacgacgatagtatagataacgacagcgtcatggataggaaacaaccccacaaggctgaagatgaaagtgaagatgtggaggatgtagaaagagtttcaaagaaaatataa

SEQ ID NO: 1904 - DNA, 888 bp, Artificial Sequence
  Description of Artificial Sequence: Synthetic polynucleotide
atgagtagtcgcaaaagcaccgcttctagcttattattaagacaatatagagaacttactgatcctaagaaagctattcccagttttcatatagaattagaggatgattctaatattttcacttggaacataggtgttatggtgttgaatgaggattccatttatcatggagggtttttcaaagctcaaatgagatttccggaagactttcccttttctccaccacagtttagatttacgccggctatctaccatccaaacgtttacagggatggcaggctttgtatttctattttacatcaaagtggggatcctatgaccgacgaacctgatgctgaaacgtggtcccccgtgcagaccgtggaaagtgtgttgatctctatagtatctttattagaggaccccaatatcaactctccagcaaatgtcgatgccgctgttgattacagaaagaaccctgaacaatacaagcaaagagtcaaaatggaagtggaaagaagtaaacaagatatccctaaaggtttcataatgcccacttctgaaagtgcgtacatatctcaaagtaaattggatgaaccagaaagtaataaggatatggcggataatttttggtatgatagtgatttggacgacgatgagaacgggtccgtcattttacaagacgacgactacgacgatggaaacaaccatatcccctttgaagatgatgacgtttacaactataacgacaacgacgacgatgacgaaagaatcgaattcgaagatgatgacgatgatgacgacgatagtatagataacgacagcgtcatggataggaaacaaccccacaaggctgaagatgaaagtgaagatgtggaggatgtagaaagagtttccaagaaaatatga

SEQ ID NO: 1905 - DNA, 1335 bp, Saccharomyces cerevisiae
atgcaattacattcacttatcgcttcaactgcgctcttaataacgtcagctttggctgctacttcctcttcttccagcataccctcttcctgtaccataagctcacatgccacggccacagctcagagtgacttagataaatatagccgctgtgatacgttagtcgggaacttaactattggtggtggtttgaagactggtgctttggctaatgttaaagaaatcaacgggtctctaactatatttaacgctacaaatctaacctcattcgctgctgattccttggagtccatcacagattctttgaacctacagagtttgacaatcttgacttctgcttcatttgggtctttacagagcgttgatagtataaaactgattactctacccgccatctccagttttacttcaaatatcaaatctgctaacaacatttatatttccgacacttcgttacaatctgtcgatggattctcagccttgaaaaaagttaacgtgttcaacgtcaataacaataagaaattaacctcgatcaaatctccagttgaaacagtcagcgattctttacaattttcgttcaacggtaaccagactaaaatcaccttcgatgacttggtttgggcaaacaatatcagtttgaccgatgtccactctgtttccttcgctaacttgcaaaagattaactcttcattgggtttcatcaacaactccatctcaagtttgaatttcactaagctaaacaccattggccaaaccttcagtatcgtttccaatgactacttgaagaacttgtcgttctctaatttgtcaaccataggtggtgctcttgtcgttgctaacaacactggtttacaaaaaattggtggtctcgacaacctaacaaccattggcggtactttggaagttgttggtaacttcacctccttgaacctagactctttgaagtctgtcaagggtggcgcagatgtcgaatcaaagtcaagcaatttctcctgtaatgctttgaaagctttgcaaaagaaagggggtatcaagggtgaatcttttgtctgcaaaaatggtgcatcatccacatctgttaaactatcgtccacttccaaatctcaatcaagccaaactactgccaaggtttccaagtcatcttctaaggccgaggaaaagaagttcacttctggcgatatcaaggctgctgcttctgcctctagtgtttctagttctggcgcttccagctctagctctaagagttccaaaggcaatgccgctatcatggcaccaattggccaaacaacccctttggtcggtcttttgacggcaatcatcatgtctataatgtaa

SEQ ID NO: 1906 - DNA, 1335 bp, Artificial Sequence
  Description of Artificial Sequence: Synthetic polynucleotide
atgcaattacattctcttatcgcttccactgcgctcttaataacgagcgctttggctgctacttcctcttcttccagcataccctcttcctgtaccataagctctcatgccacggccacagctcagagtgacttagataaatatagccgctgtgatacgttagtcgggaacttaactattggtggtggtttgaagactggtgctttggctaatgttaaagaaatcaacgggtctttgactatatttaacgctacaaatttgaccagtttcgctgctgattccttggagtccatcacagattctttgaacttacagagtttgacaatcttgacttctgcttcttttgggtctttacagagcgttgatagtataaaattgattactttacccgccatctccagttttacttccaatatcaaatctgctaacaacatttatatttccgacacttctttacaatctgtcgatggattctctgccttgaaaaaagttaacgtgttcaacgtcaataacaataagaaattaacctctatcaaatctccagttgaaacagtcagcgattctttacaattttctttcaacggtaaccagactaaaatcaccttcgatgacttggtttgggcaaacaatatcagtttgaccgatgtccactctgtttccttcgctaacttgcaaaagattaactcttctttgggtttcatcaacaactccatctccagtttgaatttcactaagttgaacaccattggccaaaccttcagtatcgtttccaatgactacttgaagaacttgagtttctctaatttgtccaccataggtggtgctcttgtcgttgctaacaacactggtttacaaaaaattggtggtctcgacaacttaacaaccattggcggtactttggaagttgttggtaacttcacctccttgaacttggactctttgaagtctgtcaagggtggcgcagatgtcgaatccaagagcagcaatttctcctgtaatgctttgaaagctttgcaaaagaaagggggtatcaagggtgaatcttttgtctgcaaaaatggtgcatcttccacatctgttaaattatcttccacttccaaatctcaaagcagccaaactactgccaaggtttccaagtcttcttctaaggccgaggaaaagaagttcacttctggcgatatcaaggctgctgcttctgcctctagtgtttctagttctggcgcttccagctctagctctaagagttccaaaggcaatgccgctatcatggcaccaattggccaaacaacccctttggtcggtcttttgacggcaatcatcatgtctataatgtga

SEQ ID NO: 1907 - DNA, 618 bp, Saccharomyces cerevisiae
atgcttgtgcggctgttgcgtgtgattttattggccagcatggttttctgtgctgatattttacaattaagctattcagatgatgcgaaagacgctatacccctaggaacatttgagattgatagtacatccgatgggaatgttacagtaacaaccgttaatatacaggatgttgaagtttctggagaatactgtttgaatgcccagattgaaggtaagctggatatgccatgttttagctacatgaagctgaggacaccactaaaatacgatttaattgtggatgtagatgaagataatgaggtcaaacaagtgtcgttatcatatgacgagactaacgatgctattactgctacagtcagatatccagaagcgggacctactgcaccagtcaccaaattaaagaagaaaaccaaaacttatgctgataaaaaagctagtaagaataaggatggaagcactgcacaattcgaagaagatgaagaggttaaggaggtgtcttggtttcaaaagaactggaaaatgttacttttaggcctattgatttacaattttgttgcgggctcagcaaagaagcaacaacaaggaggtgccggagctgatcaaaagactgagtaa

SEQ ID NO: 1908 - DNA, 618 bp, Artificial Sequence
  Description of Artificial Sequence: Synthetic polynucleotide
atgcttgtgagattattgcgtgtgattttattggccagcatggttttctgtgctgatattttacaattaagctattctgatgatgcgaaagacgctatacccttaggaacatttgagattgatagtacatccgatgggaatgttacagtaacaaccgttaatatacaggatgttgaagtttctggagaatactgtttgaatgcccagattgaaggtaagttggatatgccatgttttagctacatgaagttaaggacaccattgaaatacgatttaattgtggatgtagatgaagataatgaggtcaaacaagtgtctttatcttatgacgagactaacgatgctattactgctacagtcagatatccagaagcgggacctactgcaccagtcaccaaattaaagaagaaaaccaaaacttatgctgataaaaaagctagtaagaataaggatggaagcactgcacaattcgaagaagatgaagaggttaaggaggtgtcttggtttcaaaagaactggaaaatgttacttttaggccttttgatttacaattttgttgcgggcagtgcaaagaagcaacaacaaggaggtgccggagctgatcaaaagactgagtga

SEQ ID NO: 1909 - DNA, 1629 bp, Saccharomyces cerevisiae
atgcaagctaaaattatatatgctctgagcgcaatttctgcgttgattccgttaggatcatcactattagcacctatagaagaccccatagtatcgaataagtacctcatatcttacatcgatgaggacgactggagtgataggatattacaaaatcagtctgtcatgaactcgggatatatagtgaatatgggcgacgaccttgaatgctttattcaaaatgcaagcactcaattgaatgatgtattggaagactcaaatgagcatagcaatagtgaaaagacagcattattaactaaaaccctgaatcaaggtgttaagacaattttcgataaattaaatgaacggtgcatcttctaccaagccggattttggatttacgagtactgtcctggcatagaatttgttcagttccatggtagagtaaatacaaaaactggtgaaatagtaaatcgagatgaatctttggtctaccgcctgggaaaaccaaaagcaaatgtagaagagagagaatttgaactactttatgacgatgtaggatattacatcagcgaaattatagggtcaggtgatatttgcgatgtgacgggggctgaaagaatggttgaaatacaatatgtctgtggcggctcaaactctggaccatcgactattcaatgggtgagagaaacaaaaatttgtgtttatgaagcccaagttaccatacctgaattgtgcaatttagaattactagccaaaaatgaagaccaaaagaacgcctcacctatactttgcaggatgcccgcaaaatcaaaaattggtagtaactctattgatttaatcaccaaatatgaaccgatttttttaggttctggaatatactttctaaggccctttaacaccgacgaaagagacaaattaatggttactgacaatgccatgtcaaattgggatgagattacggaaacatattaccagaaatttggaaatgccataaacaaaatgcttagtttgagattagtatcgttacctaatggacatattctccagcctggtgactcatgtgtttggttggcggaagtggttgatatgaaagatcggtttcaaaccactttatcgttgaacatacttaattcacagagagcagagatatttttcaacaagacgtttacatttaatgaagataatggaaacttcctatcatacaaaattggggatcatggcgagtcaactgaacttggtcaaataacccactcaaacaaagcagatataaataccgcagaaattcggtcagatgaatacttaattaacactgataatgagctattcttgaggatttctaaggagatagcagaagtgaaagaattattaaacgaaatcgtaagtccacatgaaatggaagtaatatttgaaaacatgagaaatcaaccgaataatgattttgaactggcgttgatgaacaagttgaaatcctcattaaatgatgataacaaagttgagcagataaacaacgcaaggatggatgatgatgaaagcactagtcatacaaccagagacatcggggaagctggatcacaaacgacagggaatactgaatcggaggtaacaaacgtagcagctggtgttttcatcgaacatgatgagctttaa

SEQ ID NO: 1910 - DNA, 1629 bp, Artificial Sequence
  Description of Artificial Sequence: Synthetic polynucleotide
atgcaagctaaaattatatatgctttgagcgcaatttctgcgttgattccgttaggaagttctttattagcacctatagaagaccccatagtatctaataagtacctcatatcttacatcgatgaggacgactggagtgataggatattacaaaatcagtctgtcatgaactctggatatatagtgaatatgggcgacgaccttgaatgctttattcaaaatgcaagcactcaattgaatgatgtattggaagactctaatgagcatagcaatagtgaaaagacagcattattaactaaaaccttgaatcaaggtgttaagacaattttcgataaattaaatgaaagatgcatcttctaccaagccggattttggatttacgagtactgtcctggcatagaatttgttcagttccatggtagagtaaatacaaaaactggtgaaatagtaaatagagatgaatctttggtctaccgccttggaaaaccaaaagcaaatgtagaagagagagaatttgaattgctttatgacgatgtaggatattacatcagcgaaattatagggtctggtgatatttgcgatgtgacgggggctgaaagaatggttgaaatacaatatgtctgtggcggctctaactctggaccatctactattcaatgggtgagagaaacaaaaatttgtgtttatgaagcccaagttaccatacctgaattgtgcaatttagaattattagccaaaaatgaagaccaaaagaacgcctctcctatactttgcaggatgcccgcaaaatctaaaattggtagtaactctattgatttaatcaccaaatatgaaccgatttttttaggttctggaatatactttttaaggccctttaacaccgacgaaagagacaaattaatggttactgacaatgccatgagtaattgggatgagattacggaaacatattaccagaaatttggaaatgccataaacaaaatgcttagtttgagattagtatctttacctaatggacatattctccagcctggtgactcttgtgtttggttggcggaagtggttgatatgaaagatagatttcaaaccactttatctttgaacatacttaattctcagagagcagagatatttttcaacaagacgtttacatttaatgaagataatggaaacttcttatcttacaaaattggggatcatggcgagtctactgaacttggtcaaataacccactccaacaaagcagatataaataccgcagaaattagaagtgatgaatacttaattaacactgataatgagcttttcttgaggatttctaaggagatagcagaagtgaaagaattattaaacgaaatcgtaagtccacatgaaatggaagtaatatttgaaaacatgagaaatcaaccgaataatgattttgaattggcgttgatgaacaagttgaaatcctctttaaatgatgataacaaagttgagcagataaacaacgcaaggatggatgatgatgaaagcactagtcatacaaccagagacatcggggaagctggatctcaaacgacagggaatactgaaagtgaggtaacaaacgtagcagctggtgttttcatcgaacatgatgagctttga

SEQ ID NO: 1911 - DNA, 981 bp, Saccharomyces cerevisiae
atgaaaaatgataataaagctaatgatataataatagactccgtcaaagttcctgattcgtacaagcccccaaaaaatcctattgtattttgccatggtttatcaggatttgacaaattaattctaatcccttctgtattccatctgacaaacctaatttccaattcaatagtacataatatggcagaaaatttcatgcaggatgacgaagataagagtgataacaagtacacaaatttgttggagattgaatattggattggcgttaaaaaatttcttcaatctaagggatgtactgttatcaccactaaggtaccaggttttggtagcatcgaggaaagagcaatggctttggatgctcagttacagaaagaagtaaagaaaatcgagtcgaaggataagcgacattcgttaaatctaatcgcacactcaatggggggactagactgccgatatctaatttgcaatataaaaaataggaattacgatatattgagcctaaccactatttcaactccacatagagggtcagaaatggccgattacgtagtcgacctttttgaaaatctaaatgccttgagagttagccaaaagatattgccaatatgtttctaccaactcacgactgcgtatatgaaatatttcaatttggttacgccaaatagtccaaaagtctcttatttttcgtatggatgctcctttgtgcctaagtggtacaatgtcttttgtactccctggaaaattgtttatgaaaggtctaaaggttgccccaacgatggccttgtaaccataaatagtagtaaatggggtgaatacagggggactttgaaggacatggatcatctggacgtcatcaattggaaaaataagttacaggatgattggagtaaattttttcgtaccactactgtcggagagaaggttgacatcctgaatttttacttgaagataaccgatgacttggcaagaaaaggattttaa

SEQ ID NO: 1912 - DNA, 981 bp, Artificial Sequence
  Description of Artificial Sequence: Synthetic polynucleotide
atgaaaaatgataataaagctaatgatataataatagactccgtcaaagttcctgattcttacaagcccccaaaaaatcctattgtattttgccatggtttatctggatttgacaaattaattttgatcccttctgtattccatttaacaaacttgatttccaattctatagtacataatatggcagaaaatttcatgcaggatgacgaagataagagtgataacaagtacacaaatttgttggagattgaatattggattggcgttaaaaaatttcttcaatctaagggatgtactgttatcaccactaaggtaccaggttttggtagcatcgaggaaagagcaatggctttggatgctcagttacagaaagaagtaaagaaaatcgagtctaaggataagagacattctttaaatttgatcgcacactccatggggggattggactgcagatatttgatttgcaatataaaaaataggaattacgatatattgagcttgaccactatttctactccacatagagggagtgaaatggccgattacgtagtcgacctttttgaaaatttgaatgccttgagagttagccaaaagatattgccaatatgtttctaccaactcacgactgcgtatatgaaatatttcaatttggttacgccaaatagtccaaaagtctcttatttttcttatggatgctcctttgtgcctaagtggtacaatgtcttttgtactccctggaaaattgtttatgaaaggtctaaaggttgccccaacgatggccttgtaaccataaatagtagtaaatggggtgaatacagggggactttgaaggacatggatcatttggacgtcatcaattggaaaaataagttacaggatgattggagtaaattttttcgtaccactactgtcggagagaaggttgacatcttgaatttttacttgaagataaccgatgacttggcaagaaaaggattttga

SEQ ID NO: 1913 - DNA, 447 bp, Saccharomyces cerevisiae
atgtcttcctccaagcgtattgccaaggaattaagtgatttagggagagatcctcctgcttcatgttcagcaggacctgtaggggatgacctgtatcattggcaagcctctattatgggtccttcagactcaccctacgctggtggcgttttctttttgtctattcactttccaactgattatccattcaagccaccgaaggtaaactttacgaccaaaatttatcatccgaatattaattcgagtggtaatatctgccttgatattttaaaggaccagtggtcaccggcgctaaccctttcaaaagttttgttgtctatttgctctcttttaacagatgctaatcccgacgatcctttggtccctgaaattgctcaaatctacaagacagataaggctaagtatgaagccaccgctaaggagtggactaaaaaatatgctgtttga

SEQ ID NO: 1914 - DNA, 447 bp, Artificial Sequence
  Description of Artificial Sequence: Synthetic polynucleotide
atgtcttcctccaagcgtattgccaaggaattaagtgatttagggagagatcctcctgcttcttgttctgcaggacctgtaggggatgacctttatcattggcaagcctctattatgggtccttctgactctccctacgctggtggcgttttctttttgtctattcactttccaactgattatccattcaagccaccgaaggtaaactttacgaccaaaatttatcatccgaatattaatagtagtggtaatatctgccttgatattttaaaggaccagtggtctccggcgttgaccctttctaaagttttgttgtctatttgctctcttttaacagatgctaatcccgacgatcctttggtccctgaaattgctcaaatctacaagacagataaggctaagtatgaagccaccgctaaggagtggactaaaaaatatgctgtttga

SEQ ID NO: 1915 - DNA, 3078 bp, Saccharomyces cerevisiae
atgagtgagaacaacggcaatccgctggatttgtcttcactaagaaataagatttcgtcaaaattgcgagacaataacagcaaaaaggcgaagaaaacccacaaaggcaaggacgtgaaggccagtagtaattcaaagaaggtaaatgaggacatacgtcgtgaagcactagcattgggtgccagcgaagaagatctaaaattgattcaaggattaagcgatgatgatgacgctaagagcgaacaggaatttgatgccgtcgctgacgaggatgctgacgacaagggattcaagaacgatcttcaaaatttcatgaagaatgtaggatttgaccaacacaaactcgaagatgtagacgatgacgatatagaagaagaatccactagctccaaagaatctaaaatacccgctcaagagaaggaacatgcacaatcaaacattgcatcatcgacaatagagaaaacctcccaagagtcaatcgataatggcagtgaacaagaagaaaacacagtagaagaggctaatcttagttcagaccaagagccagaatcagaatctgcagagaaagaaaagaaagaggagaaagatggaggtttaattactcaaactactattatctcatctgacaaacttattattccttacgataaaccatggtatgaaattccattggatcctcaagttggacaaaatgatgatgttgaagaattatccaaggaacagattgagaaactttttgaaagaggtaagcaaacgctagaagctgacaaccaaacttactatgaggagtttacaaaggactcatcgcaggccaagttcatgtcccaaatcctatcggacggtaccctcaacgataaaatatctgccgtaactttactcattcaagattcgccattgcataacactaagtctttagaaactctggtttcatattgtggcaaaaaatcgagaaactctgctttacagagtttaaacgctttgaaggatttattcttaaatggtcttttgcccaacagaaagctgaggtatttcaaaaatcaacctggcttatctatgatgctaaacaagaaaactcttgcaattttctatttcgaagattatttaaagaaactgttctttcgtgttttagaagtcttggaagtgctttcccacgatccaattattcacgttagattacaaatattaaatcatgtatttgatttattgaccaaccaaccagagcaggaatttaatttattgagattaggtgtaaataaaattggtgatattgattccaaagtttcttcgaaggcgtcatatttactactgaagttggaacaagctcatccgaatatgaaatctattgtcattgatgctatcgttgatatcgcattgagaccgaatgcggattatcataccacttactattctgttattactttaaaccaaaccatcttaaaaagatcagaagactctgttgctaataaattagtaaaaacatacttcactttgtttgaaaaattcttgattaatactgataaagacaataccaatggcgttgttaagagtaactcaaagtcgtatgaggagaaaagaaagaagaactttaaaaagggtaaacacggtggtaaatctgtaaaaatcgaaaaaacggaaaatgaagttttagatgaaaagaactcaaaattattcagtgctttgttaacaggtatcaatcgtgcattcccattcgctcagattccagcgtctgtctatgaagtacatatggaaactcttttcaaaatcacacactcctctaactttaacacctcaatccaagcattagttttgattaatcaagtcaccgtcaaagcaaagttgaacagtgatcgatattatagaacattatacgaaagtttatttgaccccagactggtgaactcttctaagcagggtatttacttgaatttactatacaaatcattaaaacaagatgcactcaacgttgaacgagtagaagcctttgtcaagagaattcttcaagtttgttctcattggttgaacgtcggcaccattactggttttttcttcttattaatccagttggctaaaacagttccacaaataaaaaatcttctaaccaacacgccagttgattacgagtatgaatctgatgcagaagaggagcaaggggacaaggacataaaaaggaaggaatacgacggccgcaagcgtgatccaaagttcgccaatgctgaaaaatcttctttatgggaaatcaacaacttcatcaatcattttcatcctactgtgaaaacatatgcaaacgcctatgtgacaggagaaacagagcaaatagctaaaccagacctgggtctatttactctatcacacttccttgacagatttgtctacagaagtgccaagcagaccaatacagcaagaggtacatctattatgcaacctctgtttagtggctcacgagttaatgactctgtcttagttaaggcatctgatattatgcatgaccagggtcccgtgaacactgaagactggctaactaaaaaagttgaagatatcaaacctgaagataaattcttttatcaatatttcactaccaagaaaaccgctgatggaaaaggaaagaaatctaacaaagcatctaatttcgatagtgatgacgaaatggatgaaaatgaaatttggagtgctttggttaaatcgagaccagatgttgaagatgatagcgacgacagtgaacttgacttcgctgaagatgatttcagcgattcaactagtgacgatgaacctaagctggacgcaattgatgatgaagatgctaaaagtgaaggcagccaagaaagcgatcaagaagaaggcctcgatgaggatattttttacagtttcgatggagaacaagacaatagtgataaaaaacgttccttcgctgaaagtagtgaagaggacgagagcagcgaagaagaaaaagaagaagaagaaaataaagaggtatccgcaaaaagagcaaagaagaagcagagaaagaatatgctcaaaagtctaccggtatttgcatctgccgacgattatgctcaatatttagatcaagattcagactag

SEQ ID NO: 1916 - DNA, 3078 bp, Artificial Sequence
  Description of Artificial Sequence: Synthetic polynucleotide
atgagtgagaacaacggcaatccgttagatttgtcttctttgagaaataagatttcttctaaattgagagacaataacagcaaaaaggcgaagaaaacccacaaaggcaaggacgtgaaggccagtagtaattctaagaaggtaaatgaggacatacgtcgtgaagcattggcattgggtgccagcgaagaagatttgaaattgattcaaggattaagcgatgatgatgacgctaagagcgaacaggaatttgatgccgtcgctgacgaggatgctgacgacaagggattcaagaacgatcttcaaaatttcatgaagaatgtaggatttgaccaacacaaactcgaagatgtagacgatgacgatatagaagaagaatccactagctccaaagaatctaaaatacccgctcaagagaaggaacatgcacaaagtaacattgcatcttctacaatagagaaaacctcccaagagagtatcgataatggcagtgaacaagaagaaaacacagtagaagaggctaatcttagtagtgaccaagagccagaaagtgaatctgcagagaaagaaaagaaagaggagaaagatggaggtttaattactcaaactactattatctcttctgacaaacttattattccttacgataaaccatggtatgaaattccattggatcctcaagttggacaaaatgatgatgttgaagaattatccaaggaacagattgagaaactttttgaaagaggtaagcaaacgttagaagctgacaaccaaacttactatgaggagtttacaaaggactcctctcaggccaagttcatgtcccaaatcttaagtgacggtaccctcaacgataaaatatctgccgtaactttactcattcaagattctccattgcataacactaagtctttagaaactttggtttcttattgtggcaaaaaatctagaaactctgctttacagagtttaaacgctttgaaggatttattcttaaatggtcttttgcccaacagaaagttaaggtatttcaaaaatcaacctggcttatctatgatgttgaacaagaaaactcttgcaattttctatttcgaagattatttaaagaaattattctttcgtgttttagaagtcttggaagtgctttcccacgatccaattattcacgttagattacaaatattaaatcatgtatttgatttattgaccaaccaaccagagcaggaatttaatttattgagattaggtgtaaataaaattggtgatattgattccaaagtttcttccaaggcgtcttatttattattgaagttggaacaagctcatccgaatatgaaatctattgtcattgatgctatcgttgatatcgcattgagaccgaatgcggattatcataccacttactattctgttattactttaaaccaaaccatcttaaaaagaagtgaagactctgttgctaataaattagtaaaaacatacttcactttgtttgaaaaattcttgattaatactgataaagacaataccaatggcgttgttaagagtaactccaagagttatgaggagaaaagaaagaagaactttaaaaagggtaaacacggtggtaaatctgtaaaaatcgaaaaaacggaaaatgaagttttagatgaaaagaactccaaattattcagtgctttgttaacaggtatcaatcgtgcattcccattcgctcagattccagcgtctgtctatgaagtacatatggaaactcttttcaaaatcacacactcctctaactttaacacctctatccaagcattagttttgattaatcaagtcaccgtcaaagcaaagttgaacagtgatagatattatagaacattatacgaaagtttatttgaccccagattagtgaactcttctaagcagggtatttacttgaatttattgtacaaatctttaaaacaagatgcactcaacgttgaaagagtagaagcctttgtcaagagaattcttcaagtttgttctcattggttgaacgtcggcaccattactggttttttcttcttattaatccagttggctaaaacagttccacaaataaaaaatcttttaaccaacacgccagttgattacgagtatgaatctgatgcagaagaggagcaaggggacaaggacataaaaaggaaggaatacgacggccgcaagcgtgatccaaagttcgccaatgctgaaaaatcttctttatgggaaatcaacaacttcatcaatcattttcatcctactgtgaaaacatatgcaaacgcctatgtgacaggagaaacagagcaaatagctaaaccagacttgggtttatttactttatcccacttccttgacagatttgtctacagaagtgccaagcagaccaatacagcaagaggtacatctattatgcaacctttatttagtggcagtagagttaatgactctgtcttagttaaggcatctgatattatgcatgaccagggtcccgtgaacactgaagactggttgactaaaaaagttgaagatatcaaacctgaagataaattcttttatcaatatttcactaccaagaaaaccgctgatggaaaaggaaagaaatctaacaaagcatctaatttcgatagtgatgacgaaatggatgaaaatgaaatttggagtgctttggttaaatctagaccagatgttgaagatgatagcgacgacagtgaacttgacttcgctgaagatgatttcagcgattctactagtgacgatgaacctaagttggacgcaattgatgatgaagatgctaaaagtgaaggcagccaagaaagcgatcaagaagaaggcctcgatgaggatattttttacagtttcgatggagaacaagacaatagtgataaaaaacgttccttcgctgaaagtagtgaagaggacgagagcagcgaagaagaaaaagaagaagaagaaaataaagaggtatccgcaaaaagagcaaagaagaagcagagaaagaatatgctcaaaagtttaccggtatttgcatctgccgacgattatgctcaatatttagatcaagattctgactga

SEQ ID NO: 1917 - DNA, 1620 bp, Saccharomyces cerevisiae
atgagtaccaataagttcgttgtacgaataacgaatgcgctcttcaagtcatcactggctagcaacagtccacctgtttaccctaagaggattaggcatttcgagattttacccaacgaaaaatgggttatatggggacctggaaagggcaagttcttggatgtactgaataacaagtatatttgtgagcccccattatctttgaggtttggatttttgaaggaaagttcgaacatcctgccgaggatagagcaagtggccttcaaaggggttatgccaacggctcatttaagtgctagatatgaatacttcaaagatgactacgatcaaacctgcaaacagtttatatttgataaggcaagcggatcaaatgctgtttcatataaagttgagacgaacaatcggcaaataaacatggagctgtacaatgcattagttgaaaatttaaacctctccagtttacaggataggtgggtaatgggattgagtaatggacaaatgaggagagcaaggttagctcgtagtatactcaaggaaccggatctactacttattgacgacccatttttagggttggatccagccgcaatagcaaccatttcacaatttttagccaaatatgatagtatagaagtcagtggcggatgtccaatcgtcattggtttgaggtatcaagataccattccagcatggtgtactcatatatgttgcgttgatgagaaaaacggtatattgtttgaaggcccaatcgaaaaacttcaaagtaaaatggatgaaaccagatcaagggcactaaaagaactagagcagctcaaaaaagcgtctaattccaaagaggacatttccattaacgatttgatttgtatacatcctatgtatggcaagaaagagcacgaaattatcaaaatgcctcatcttatagaattagacgggttgagcgtttcatacaaaggcgaagctgttttggaaaatctgcactggaaagttcagccgggttcgaaatggcatataagaggtgacaatgggtcaggtaagtcgaccttattatctttgcttacggcggaacatccccaatcgtggaattcgagggtgatagataatggcgtcccacgaagaacaggtaaaacaaactactttgacctaaacagcaaaataggtatgtcatcacccgaattacacgcaatttttttgaagaatgctggaggaaggctaaacattcgggaaagtgttgcaactggctatcatgaggcgtcctccaacaattacctacccatatggaagcgcttggacaaaaatagccaagaaatagtgaatatgtatctgaaatattttggcctggacaaagacgccgatagtgttttatttgaacagttgtccgtaagtgaccagaaactagtcctttttgtcaggtctttaattaagatgccgcaaatattgattctcgatgaggcattttctggaatggaggtagaacctatgatgcgttgtcatgaatttttagaggagtggcctggaacagtccttgtagtggcacacgttgccgaagagacaccaaaatgtgcccattacttaaggctcatatctcctggagagtatgaaataggcgatatggaaaattaa

SEQ ID NO: 1918 - DNA, 1620 bp, Artificial Sequence
  Description of Artificial Sequence: Synthetic polynucleotide
atgagtaccaataagttcgttgtaagaataacgaatgcgctcttcaagagttctttggctagcaacagtccacctgtttaccctaagaggattaggcatttcgagattttacccaacgaaaaatgggttatatggggacctggaaagggcaagttcttggatgtattgaataacaagtatatttgtgagcccccattatctttgaggtttggatttttgaaggaaagtagtaacatcttaccgaggatagagcaagtggccttcaaaggggttatgccaacggctcatttaagtgctagatatgaatacttcaaagatgactacgatcaaacctgcaaacagtttatatttgataaggcaagcggaagtaatgctgtttcttataaagttgagacgaacaatagacaaataaacatggagttatacaatgcattagttgaaaatttaaacctctccagtttacaggataggtgggtaatgggattgagtaatggacaaatgaggagagcaaggttagctcgtagtatactcaaggaaccggatttattacttattgacgacccatttttagggttggatccagccgcaatagcaaccatttctcaatttttagccaaatatgatagtatagaagtcagtggcggatgtccaatcgtcattggtttgaggtatcaagataccattccagcatggtgtactcatatatgttgcgttgatgagaaaaacggtatattgtttgaaggcccaatcgaaaaacttcaaagtaaaatggatgaaaccagaagtagggcattgaaagaattagagcagctcaaaaaagcgtctaattccaaagaggacatttccattaacgatttgatttgtatacatcctatgtatggcaagaaagagcacgaaattatcaaaatgcctcatcttatagaattagacgggttgagcgtttcttacaaaggcgaagctgttttggaaaatttacactggaaagttcagccgggttccaaatggcatataagaggtgacaatgggtctggtaagtctaccttattatctttgcttacggcggaacatccccaaagttggaattctagggtgatagataatggcgtcccaagaagaacaggtaaaacaaactactttgacttgaacagcaaaataggtatgtcttctcccgaattacacgcaatttttttgaagaatgctggaggaaggttaaacattagagaaagtgttgcaactggctatcatgaggcgtcctccaacaattacttgcccatatggaagcgcttggacaaaaatagccaagaaatagtgaatatgtatttgaaatattttggccttgacaaagacgccgatagtgttttatttgaacagttgtccgtaagtgaccagaaattggtcctttttgtcaggtctttaattaagatgccgcaaatattgattctcgatgaggcattttctggaatggaggtagaacctatgatgcgttgtcatgaatttttagaggagtggcctggaacagtccttgtagtggcacacgttgccgaagagacaccaaaatgtgcccattacttaaggctcatatctcctggagagtatgaaataggcgatatggaaaattga

SEQ ID NO: 1919 - DNA, 1686 bp, Saccharomyces cerevisiae
atgagtactcctgcaaactatacccgtgtgcccctgtgcgaaccagaggagctgccagacgacatacaaaaagaaaatgaatatggtacactagattctccggggcatttgtatcaagtcaagtcacgtcatgggaagccactacctgagcccgttgtcgacacccctccttattacatttctttgttaacatatctaaattatttgattctgattatattaggtcatgttcacgacttcttaggtatgaccttccaaaaaaacaaacatctggatcttttagagcatgatgggttagcaccttggttttcaaatttcgagagtttttatgtcaggagaattaaaatgagaattgatgattgcttttctagaccaactactggtgttcctggtagatttattcgttgtattgatagaatttctcataatataaatgagtattttacctactcaggcgcagtgtatccatgcatgaacttatcatcatataactatttaggcttcgcacaaagtaagggtcaatgtaccgatgccgccttggaatctgtcgataaatattctattcaatctggtggtccaagagctcaaatcggtaccacagatttgcacattaaagcagagaaattagttgctagatttatcggtaaggaggatgccctcgttttttcgatgggttatggtacaaatgcaaacttgttcaacgctttcctcgataaaaagtgtttagttatctctgacgaattgaaccacacctctattagaacaggtgttaggctttctggtgctgctgtgcgaactttcaagcatggtgatatggtgggtttagaaaagcttatcagagaacagatagtacttggtcaaccaaaaacaaatcgtccatggaagaaaattttaatttgcgcagaagggttgttttccatggaaggtactttgtgtaacttgccaaaattggttgaattgaagaagaaatataaatgttacttgtttatcgatgaagcccattctataggcgctatgggcccaactggtcgcggtgtttgtgaaatatttggcgttgatcccaaggacgtcgacattctaatgggtactttcactaagtcgtttggtgctgctggtggttacattgctgctgatcaatggattatcgatagactgaggttggatttaaccactgtgagttatagtgagtcaatgccggctcctgttttagctcaaactatttcctcattacaaaccattagtggtgaaatatgtcccggacaaggtactgaaagattgcaacgtatagcctttaattcccgttatctacgtttagctttgcaaaggttaggatttattgtctacggtgtggctgactcaccagttattcccttactactgtattgtccctcaaagatgcccgcattttcgagaatgatgttacaaagacggattgctgttgttgttgttgcttatcctgctactccgctgatcgaatcaagagtaagattctgtatgtctgcatctttaacaaaggaagatatcgattatttactgcgtcatgttagtgaagttggtgacaaattgaatttgaaatcaaattccggcaaatccagttacgacggtaaacgtcaaagatgggacatcgaggaagttatcaggagaacacctgaagattgtaaggacgacaagtattttgttaattga

SEQ ID NO: 1920 - DNA, 1686 bp, Artificial Sequence
  Description of Artificial Sequence: Synthetic polynucleotide
atgagtactcctgcaaactatacccgtgtgcccctttgcgaaccagaggagttaccagacgacatacaaaaagaaaatgaatatggtacattagattctccggggcatttgtatcaagtcaagtctcgtcatgggaagccattgcctgagcccgttgtcgacacccctccttattacatttctttgttaacatatttgaattatttgattttaattatattaggtcatgttcacgacttcttaggtatgaccttccaaaaaaacaaacatttggatcttttagagcatgatgggttagcaccttggttttctaatttcgagagtttttatgtcaggagaattaaaatgagaattgatgattgcttttctagaccaactactggtgttcctggtagatttattcgttgtattgatagaatttctcataatataaatgagtattttacctactctggcgcagtgtatccatgcatgaacttatcttcttataactatttaggcttcgcacaaagtaagggtcaatgtaccgatgccgccttggaatctgtcgataaatattctattcaatctggtggtccaagagctcaaatcggtaccacagatttgcacattaaagcagagaaattagttgctagatttatcggtaaggaggatgccctcgttttttccatgggttatggtacaaatgcaaacttgttcaacgctttcctcgataaaaagtgtttagttatctctgacgaattgaaccacacctctattagaacaggtgttaggctttctggtgctgctgtgagaactttcaagcatggtgatatggtgggtttagaaaagcttatcagagaacagatagtacttggtcaaccaaaaacaaatcgtccatggaagaaaattttaatttgcgcagaagggttgttttccatggaaggtactttgtgtaacttgccaaaattggttgaattgaagaagaaatataaatgttacttgtttatcgatgaagcccattctataggcgctatgggcccaactggtcgcggtgtttgtgaaatatttggcgttgatcccaaggacgtcgacattttgatgggtactttcactaagagctttggtgctgctggtggttacattgctgctgatcaatggattatcgatagattaaggttggatttaaccactgtgagttatagtgagtccatgccggctcctgttttagctcaaactatttcctctttacaaaccattagtggtgaaatatgtcccggacaaggtactgaaagattgcaacgtatagcctttaattcccgttatttacgtttagctttgcaaaggttaggatttattgtctacggtgtggctgactctccagttattcccttattattatattgtccctccaagatgcccgcattttccagaatgatgttacaaagaagaattgctgttgttgttgttgcttatcctgctactccgttgatcgaatctagagtaagattctgtatgtctgcatctttaacaaaggaagatatcgattatttattacgtcatgttagtgaagttggtgacaaattgaatttgaaatctaattccggcaaatccagttacgacggtaaacgtcaaagatgggacatcgaggaagttatcaggagaacacctgaagattgtaaggacgacaagtattttgttaattga

SEQ ID NO: 1921 - DNA, 450 bp, Saccharomyces cerevisiae
atgtcgaacctctacaaaattggaactgaaactagaaataaaatcaagaagtttcgtacatctacagcaagaaccgactccataaaagctttatcaataaagatcgaaccaaaaccgtcctatgagataattgtcgatgaagacgaacaagaagagctagacgaaattgaagatttgagcgaattagccgagatcctacctgataactcacctagatttgtactaactgcatatccaacaacaacaaaagatgggttcaaacagactcccttagttctagtatattggaagccaatgacggtcgtttcacaggaatggaagatgctttatgccggcgcattagaaatgatcagagaggagtgcggtacttttaaattgatagaggtttcttcaggtttggaggatgactcagacgttgaagaattgagggagcaattagaaaattgttag

SEQ ID NO: 1922 - DNA, 450 bp, Artificial Sequence
  Description of Artificial Sequence: Synthetic polynucleotide
atgtccaacctctacaaaattggaactgaaactagaaataaaatcaagaagtttcgtacatctacagcaagaaccgactccataaaagctttatctataaagatcgaaccaaaaccgtcctatgagataattgtcgatgaagacgaacaagaagagttggacgaaattgaagatttgagcgaattagccgagatcttacctgataactctcctagatttgtattgactgcatatccaacaacaacaaaagatgggttcaaacagactcccttagttttggtatattggaagccaatgacggtcgtttctcaggaatggaagatgctttatgccggcgcattagaaatgatcagagaggagtgcggtacttttaaattgatagaggtttcttctggtttggaggatgacagtgacgttgaagaattgagggagcaattagaaaattgttga

SEQ ID NO: 1923 - DNA, 456 bp, Saccharomyces cerevisiae
atgggtcgtatgcacagtgccggtaaaggtatttcttcttctgctattccatactctagaaatgctccagcttggttcaagttgtcctctgaatctgtcattgaacaaattgtcaagtacgcgagaaagggtttgactccatctcaaattggtgtcttgttgagagatgctcacggtgttacccaagctcgtgttatcactggtaacaagatcatgagaatcttgaagtccaatggtttggctccagaaatcccagaagatttgtactacttgattaagaaggctgtctctgttagaaagcacttggaaagaaacagaaaggacaaagacgctaagttcagattgattttgatcgaatctagaattcacagattggccagatactacagaactgttgctgtcttaccaccaaactggaagtacgaatccgccactgcctccgctttggtcaactag

SEQ ID NO: 1924 - DNA, 456 bp, Artificial Sequence
  Description of Artificial Sequence: Synthetic polynucleotide
atgggtcgtatgcacagtgccggtaaaggtatttcttcttctgctattccatactctagaaatgctccagcttggttcaagttgtcctctgaatctgtcattgaacaaattgtcaagtacgcgagaaagggtttgactccatctcaaattggtgtcttgttgagagatgctcacggtgttacccaagctcgtgttatcactggtaacaagatcatgagaatcttgaagtccaatggtttggctccagaaatcccagaagatttgtactacttgattaagaaggctgtctctgttagaaagcacttggaaagaaacagaaaggacaaagacgctaagttcagattgattttgatcgaatctagaattcacagattggccagatactacagaactgttgctgtcttaccaccaaactggaagtacgaatccgccactgcctccgctttggtcaactga

SEQ ID NO: 1925 - DNA, 1098 bp, Saccharomyces cerevisiae
atggctcaaaattttggaaagattccttctcacaagtcttacgtattgagcttatatcggaccgttctcagaaacattccaaagtgttgccactcatatgcgtttcaatatgaaataaaaaaaacactttcaatacaattgttcaaacacaagcatgacaagtcaagttggagtgtttatactttactcaatgaattcagtttgttgaacaattgccttttggaaggtaaattacaagaaatcaaaaacttaatgaagccattaaaaaagatgaaaaaacaactgaaaacaacgaaaatcctcaactctttgacttcattaggggatgtaaagaccaacgacccagaagaagtaagaagatttcatgttctaagtgcttacattaagcgaaaacaagatttgggccttttacctgcatacataccaaaaacgtatcagcacaaactcctattaccattagcattgaacgaacatgcgtgcctgaaactatttcatattcagcaaaaattgaaaaatggcccaccttctgctgggctgtcatatacaaaagaaggaaggaatcaaatatggtttgttcggtcaccaattaacaagggcagacaacaatcgaaaaagctgggaatattgatacgaaaagaaaggaaggattctcagaaaaatatcgataatctcaatttttgcgaaattaatgctgcttgggcattacatgaggccatttgggaggaatatctagagtcgaaaaagattattaaagtaaacttaccgaaatacttggaatacgctgcaaatatcccaaagtctactaaatgtaatccttcgagtcaatatcagaaagttaaagaatgggtagatcccgtgagagaaataatgttcgaattacattccaaaagttttcaaagagtggagtactttaacaaatataaggaaaagcttttaaagaacggtggccaactagcatattttgataaaaagtcaaaagaaatgtacgccaaacggttgacactattcagaaaaatgagcaaagaaacattaccatatgtgacactctttatagaagggagggacttgccaagtgttttggcgaaatacggtttttaa

SEQ ID NO: 1926 - DNA, 1098 bp, Artificial Sequence
  Description of Artificial Sequence: Synthetic polynucleotide
atggctcaaaattttggaaagattccttctcacaagtcttacgtattgagcttatatagaaccgttctcagaaacattccaaagtgttgccactcctatgcgtttcaatatgaaataaaaaaaacactttccatacaattgttcaaacacaagcatgacaagagtagttggagtgtttatactttactcaatgaattcagtttgttgaacaattgccttttggaaggtaaattacaagaaatcaaaaacttaatgaagccattaaaaaagatgaaaaaacaattgaaaacaacgaaaatcctcaactctttgacttctttaggggatgtaaagaccaacgacccagaagaagtaagaagatttcatgttttgagtgcttacattaagagaaaacaagatttgggccttttacctgcatacataccaaaaacgtatcagcacaaactcttgttaccattagcattgaacgaacatgcgtgcttgaaattatttcatattcagcaaaaattgaaaaatggcccaccttctgctgggctttcctatacaaaagaaggaaggaatcaaatatggtttgttagatctccaattaacaagggcagacaacaaagtaaaaagttgggaatattgataagaaaagaaaggaaggattctcagaaaaatatcgataatctcaatttttgcgaaattaatgctgcttgggcattacatgaggccatttgggaggaatatttggagagtaaaaagattattaaagtaaacttaccgaaatacttggaatacgctgcaaatatcccaaagtctactaaatgtaatccttctagtcaatatcagaaagttaaagaatgggtagatcccgtgagagaaataatgttcgaattacattccaaaagttttcaaagagtggagtactttaacaaatataaggaaaagcttttaaagaacggtggccaattggcatattttgataaaaagagtaaagaaatgtacgccaaaagattgacattgttcagaaaaatgagcaaagaaacattaccatatgtgacactctttatagaagggagggacttgccaagtgttttggcgaaatacggtttttga

SEQ ID NO: 1927 - DNA, 591 bp, Saccharomyces cerevisiae
atgcagataataaccactacgttcattcaaaaagtaattttaggatcacaccaattacatgagcaattatctatagtggaagcccgaatgattgaatctgccatagtttcaatgctcacagaatcattttgcgaaaatgagcagacattaaaatacttagcacggctactttcaccgatgtcttatatggatgttattaatgcaagaaggggaaagaaaatatgtgggtacccgctatgctataagagtgcggcagaaaattcatctgatggcttctttatccactcaatgtattgtaataattatcacagtaaatgttcgttgtatttaatgagacagttatcacaaacgcctctgcatgaaaggcgaggcgtgcatttaactagttacattaatctagagtttgatgatatgtactcggtaagccttttagaagaattagttggaagtgaggtacctatagataccgtcaaatcgctgataacgagtttcaaggatcttgagtttgatgatacctacaagaatgagcctttaccattggatgtgtactttggacagttgactactgatgaggaaacctgtatagaatag

SEQ ID NO: 1928 - DNA, 591 bp, Artificial Sequence
  Description of Artificial Sequence: Synthetic polynucleotide
atgcagataataaccactacgttcattcaaaaagtaattttaggatctcaccaattacatgagcaattatctatagtggaagccagaatgattgaatctgccatagtttctatgctcacagaaagtttttgcgaaaatgagcagacattaaaatacttagcaagattactttctccgatgtcttatatggatgttattaatgcaagaaggggaaagaaaatatgtgggtacccgttatgctataagagtgcggcagaaaattcttctgatggcttctttatccactccatgtattgtaataattatcacagtaaatgttctttgtatttaatgagacagttatctcaaacgcctttgcatgaaaggagaggcgtgcatttaactagttacattaatttggagtttgatgatatgtacagtgtaagccttttagaagaattagttggaagtgaggtacctatagataccgtcaaatctttgataacgagtttcaaggatcttgagtttgatgatacctacaagaatgagcctttaccattggatgtgtactttggacagttgactactgatgaggaaacctgtatagaatga

SEQ ID NO: 1929 - DNA, 675 bp, Saccharomyces cerevisiae
atgacactagtgactccgttacaattttcgactgtacagccaaatttatatagaggatcttacccacgagaaatcaatctcccattcctgagaacccttagattgaaatacatattatctttgacaccagaacctttgagcactgatcctctaatggtaaagttttgtgaagaaaataacattaagacaattcatataaaatgtcaaagtgaaagaaaggcagacaagaccaaacccaagattaaaaggaaaaagaaaacagttcctattgaatacgatgttgtagtacgatgcgttaaatttctgattgataaagggcattacccctgttatatgcactgtacgaatggtgaattgataatatctctcgtagtagcatgtatgagaaagttttcatattggagtacggtatccatactaaatgagtttttggtgtataattccagcatcaatattcatgaaagaaatttcattgaaaactttaactctgaaatcgaagttgacgatctggatataaaggataaagttccctggattaccgtgcgatatattgcaaggacagccacagaatcaaaagatgagttgcgtgttgatgatgctaatgcgtctgaaaaagttgcaagagtaagtagcgtgtcaaattctttgccaaaactaaaatttcatagtatgtaa

SEQ ID NO: 1930 - DNA, 675 bp, Artificial Sequence
  Description of Artificial Sequence: Synthetic polynucleotide
atgacattagtgactccgttacaattttccactgtacagccaaatttatatagaggatcttacccaagagaaatcaatctcccattcttaagaacccttagattgaaatacatattatctttgacaccagaacctttgagcactgatcctttgatggtaaagttttgtgaagaaaataacattaagacaattcatataaaatgtcaaagtgaaagaaaggcagacaagaccaaacccaagattaaaaggaaaaagaaaacagttcctattgaatacgatgttgtagtaagatgcgttaaatttttgattgataaagggcattacccctgttatatgcactgtacgaatggtgaattgataatatctctcgtagtagcatgtatgagaaagttttcttattggagtacggtatccatattgaatgagtttttggtgtataattccagcatcaatattcatgaaagaaatttcattgaaaactttaactctgaaatcgaagttgacgatttggatataaaggataaagttccctggattaccgtgaggtatattgcaaggacagccacagaaagtaaagatgagttgcgtgttgatgatgctaatgcgtctgaaaaagttgcaagagtaagtagcgtgagtaattctttgccaaaattgaaatttcatagtatgtga

SEQ ID NO: 1931 - DNA, 933 bp, Saccharomyces cerevisiae
atggaattcttttatgaagaacaagtagcttgtatcgaagatgataaaataagcaactctcataccaaggaaactggatcaacagaaaacactgaaaataacgaacttcagagccgagatgacaaaacaaatgaggccttccaaaagttagaagaggaagtcaataaacgatatgaaaagactacaagtgcattcaaaaagttagtaatcgagaaagatgacggaattgaaattaacttgccaattagcaatgaaactacagagactgcacaaaagtatttgaagaaactagacgagaatattcacagcgtggaaagtctagcccagtcatattggagcaaaatgaaaactaagaatttttggtctggcttcagtagcttcgataatgctgcagaaaatgactctaatgacaaggatgagaattcgaaagaaaatgaaattgctgtgggtggaaatagaacagaagccgaactaaggacattatctaaagataaatcggtttatttagacaataaaatggatttgcaactggacccgtttgacgtggatgaaaaaactgaggagatatgttctattttacagggcgacaaagatatctccaaattaatgaacgacatcgtaccccataaaatcagctataaagatttctggcacatctatttcttacaaagaaacaaaattctagataaagaaagtaaaaggaaagaaatattgtccaaaaaggaaaaggaaacggaggaaaaagaagttgagtgggatgacgaagaagaagaagaagatgatgacaaagtagaagcagtagctgacaacaaatctaaaggggagacgaaagttgctgtgtctcaagagggattgaaagatgttagtgaccatgttggcctcgccaacaaggatgagagcaaggacgacgacgacgatgatgactgggaatga

SEQ ID NO: 1932 - DNA, 933 bp, Artificial Sequence
  Description of Artificial Sequence: Synthetic polynucleotide
atggaattcttttatgaagaacaagtagcttgtatcgaagatgataaaataagcaactctcataccaaggaaactggaagtacagaaaacactgaaaataacgaacttcagagcagagatgacaaaacaaatgaggccttccaaaagttagaagaggaagtcaataaaagatatgaaaagactacaagtgcattcaaaaagttagtaatcgagaaagatgacggaattgaaattaacttgccaattagcaatgaaactacagagactgcacaaaagtatttgaagaaattagacgagaatattcacagcgtggaaagtttggcccagagttattggagcaaaatgaaaactaagaatttttggtctggcttcagtagcttcgataatgctgcagaaaatgactctaatgacaaggatgagaattctaaagaaaatgaaattgctgtgggtggaaatagaacagaagccgaattgaggacattatctaaagataaatctgtttatttagacaataaaatggatttgcaattggacccgtttgacgtggatgaaaaaactgaggagatatgttctattttacagggcgacaaagatatctccaaattaatgaacgacatcgtaccccataaaatcagctataaagatttctggcacatctatttcttacaaagaaacaaaattttagataaagaaagtaaaaggaaagaaatattgtccaaaaaggaaaaggaaacggaggaaaaagaagttgagtgggatgacgaagaagaagaagaagatgatgacaaagtagaagcagtagctgacaacaaatctaaaggggagacgaaagttgctgtgtctcaagagggattgaaagatgttagtgaccatgttggcctcgccaacaaggatgagagcaaggacgacgacgacgatgatgactgggaatga

SEQ ID NO: 1933 - DNA, 2781 bp, Saccharomyces cerevisiae
atggagcagaatattattagtaccataagggatgagtgtattcgtcaccggtcgaagtaccttacgatagcacaactaaccgctattgcagaggctaaaattaacgaattcatcataactggtaaggcaaaagatcaagatttgagcagtcttctagataaatgcatcgatattttatctatttacaagaagaactcgaaagatatcaaaaatattatatcgtgcaaaaataagggtgcaatgattagttcaaattccgtaatgattattcaattaaattatgtttactacaaggtaattcacattattgtaacaaccaatattcctcatttaagtgaattcgccaagattaaattacataagagcacgagtgatgagggcaacggtaataacaacaataatgaatttcaactcatgaacatttacaacactttgctggaaaccttattaaaagatgaaaacattgcaaaaataaaaagtttcattaagtcttccataaaacaaacaaaattgaaccatgagcaagaagaatgtaacctgatgagaacgggttcctatatcacttccaatcaattaaactccctaataagttcatcagcaaattctgcttcctcccaaatggagatactactgatagatatacgatcaaggttggaattcaacaagtcacatattgatacaaaaaatattatatgcctggagcctatttcttttaaaatgtcatattcagatcatgatttggagaaaaaatcattaattacttctcctaatagtgagattaaaatgtttcaaagtagaaatcttttcaagtttatcattctctatacagacgcaaacgaatacaatgttaaacagcagtctgtcctgttggacattctggtgaatcattcctttgaaaaaccaatatccgatgactttaccaaaattttcattctggaatctggttttccaggttggcttaagtcaaattatgggaggcaagtatcatcatcttttccatcaaataacaatattaaagatgatagtgtttatattaatggtaacacttctggcctaagtttacaacatttacctaagatgtctcccagtataagacattcaatggacgactctatgaaagaaatgctagttgcgcctactccattaaatcatcttcaacaacagcaacaacagcaatcagacaatgatcatgtgctaaaaagatcttcaagtttcaaaaaattattctcaaattatacgtctcctaatccgaagaattcaaattcaaacttatattctatatcttcgttgtccatatctagttcaccatcgcctttacctctacattcgcctgacccagttaagggcaattcattgccaatcaattatccggaaacgccacatctttggaaaaacagtgagacagattttatgacaaatcaaagagaacagttgaatcacaactcttttgctcacatagctcctatcaacacgaaggccatcacttctccatcaagaactgccacaccgaagttacaacgcttcccgcaaacaattagtatgaaccttaatatgaactccaatggacacagttctgccacctctaccattcaaccttcgtgtctatccttgtctaataatgactctttagatcatacagatgttacaccaacttcttctcataattatgaccttgatttcgcggttggtttggaaaatctaggaaattcgtgttacatgaactgtatcattcagtgtatcttaggtacacacgaattaacccaaatctttttggacgattcatatgctaaacacatcaatattaatagtaagttgggatcgaaaggtattctggcaaaatattttgcaaggttggttcatatgatgtataaggaacaggttgatggttcaaagaaaatttccatatcaccgataaaatttaaattggcatgtggatctgttaactcattatttaagactgcatcccaacaggactgccaagagttttgccaattccttctagatggtcttcatgaagacttgaaccaatgcggttcaaacccacctttgaaggagctttctcaagaagctgaggcgagaagagaaaaactgtctttgcgaattgcctcgtcaattgagtgggaacgattcttgactactgatttcagtgttattgtcgacttatttcagggacaatacgcctcacgactaaaatgtaaagtctgtagtcatacctcgacaacataccaaccttttacggtgctgtcaatccctattcctaaaaaaaattcccgaaataatattaccattgaagattgtttcagagagttcaccaaatgtgagaacttggaagtggatgagcaatggttgtgcccacattgtgaaaaaaggcagccctccacgaaacaattgacaataacgagattaccgaggaatctgatagtccatttaaagagatttgataatttattaaacaaaaataatgacttcgtcatatacccttttttgttggacttgactccattttgggccaatgattttgacggggtttttcctccaggtgttaatgacgatgaactaccaataaggggacaaataccaccttttaagtatgaattatatggtgtagcatgccactttggtactttgtatggtggtcattatacagcctatgtgaaaaagggattaaagaagggatggctatattttgatgataccaaatataaacctgtcaaaaacaaagccgatgcaattaactctaatgcatacgttttgttttatcaccgcgtctacggtgtttga

SEQ ID NO: 1934 - DNA, 2781 bp, Artificial Sequence
  Description of Artificial Sequence: Synthetic polynucleotide
atggagcagaatattattagtaccataagggatgagtgtattcgtcacagatccaagtaccttacgatagcacaattgaccgctattgcagaggctaaaattaacgaattcatcataactggtaaggcaaaagatcaagatttgagcagtcttttagataaatgcatcgatattttatctatttacaagaagaactccaaagatatcaaaaatattatatcttgcaaaaataagggtgcaatgattagtagtaattccgtaatgattattcaattaaattatgtttactacaaggtaattcacattattgtaacaaccaatattcctcatttaagtgaattcgccaagattaaattacataagagcacgagtgatgagggcaacggtaataacaacaataatgaatttcaactcatgaacatttacaacactttgttggaaaccttattaaaagatgaaaacattgcaaaaataaaaagtttcattaagtcttccataaaacaaacaaaattgaaccatgagcaagaagaatgtaacttgatgagaacgggttcctatatcacttccaatcaattaaactccttgataagttcttctgcaaattctgcttcctcccaaatggagatattattgatagatataagaagtaggttggaattcaacaagagtcatattgatacaaaaaatattatatgcttagagcctatttcttttaaaatgtcttattctgatcatgatttggagaaaaaatctttaattacttctcctaatagtgagattaaaatgtttcaaagtagaaatcttttcaagtttatcattctctatacagacgcaaacgaatacaatgttaaacagcagtctgtcttattggacattttggtgaatcattcctttgaaaaaccaatatccgatgactttaccaaaattttcattttggaatctggttttccaggttggcttaagagcaattatgggaggcaagtatcttcttcttttccatccaataacaatattaaagatgatagtgtttatattaatggtaacacttctggcttaagtttacaacatttacctaagatgtctcccagtataagacattctatggacgactctatgaaagaaatgcttgttgcgcctactccattaaatcatcttcaacaacagcaacaacagcaatctgacaatgatcatgtgttgaaaagatcttccagtttcaaaaaattattcagtaattatacgtctcctaatccgaagaatagtaatagcaacttatattctatatcttctttgtccatatctagttctccatctcctttacctttgcattctcctgacccagttaagggcaattctttgccaatcaattatccggaaacgccacatctttggaaaaacagtgagacagattttatgacaaatcaaagagaacagttgaatcacaactcttttgctcacatagctcctatcaacacgaaggccatcacttctccatctagaactgccacaccgaagttacaacgcttcccgcaaacaattagtatgaaccttaatatgaactccaatggacacagttctgccacctctaccattcaaccttcttgtttatccttgtctaataatgactctttagatcatacagatgttacaccaacttcttctcataattatgaccttgatttcgcggttggtttggaaaatttaggaaattcttgttacatgaactgtatcattcagtgtatcttaggtacacacgaattaacccaaatctttttggacgattcttatgctaaacacatcaatattaatagtaagttgggatctaaaggtattttggcaaaatattttgcaaggttggttcatatgatgtataaggaacaggttgatggttccaagaaaatttccatatctccgataaaatttaaattggcatgtggatctgttaactctttatttaagactgcatcccaacaggactgccaagagttttgccaattccttttagatggtcttcatgaagacttgaaccaatgcggttccaacccacctttgaaggagctttctcaagaagctgaggcgagaagagaaaaattatctttgagaattgcctcttccattgagtgggaaagattcttgactactgatttcagtgttattgtcgacttatttcagggacaatacgccagtagattgaaatgtaaagtctgtagtcatacctctacaacataccaaccttttacggtgctttctatccctattcctaaaaaaaattccagaaataatattaccattgaagattgtttcagagagttcaccaaatgtgagaacttggaagtggatgagcaatggttgtgcccacattgtgaaaaaaggcagccctccacgaaacaattgacaataacgagattaccgaggaatttgatagtccatttaaagagatttgataatttattaaacaaaaataatgacttcgtcatatacccttttttgttggacttgactccattttgggccaatgattttgacggggtttttcctccaggtgttaatgacgatgaattaccaataaggggacaaataccaccttttaagtatgaattatatggtgtagcatgccactttggtactttgtatggtggtcattatacagcctatgtgaaaaagggattaaagaagggatggttatattttgatgataccaaatataaacctgtcaaaaacaaagccgatgcaattaactctaatgcatacgttttgttttatcaccgcgtctacggtgtttga

SEQ ID NO: 1935 - DNA, 282 bp, Saccharomyces cerevisiae
atgttgagaaccacttttttgcgcactccaagacaattgatgcgtaaatcgccaagggcgtctttctcaatcgtcactagggccgcctttcctcacctaaagaacaatcaagatgaagctgagaaaaaagaacagggtttgtttgatagcaacaagaagaggttggacactttggaacacggcaagaatccagattataagcaacctggaatggaagatttgaaaaaaaagggagatgacgctagaatcgaacaaaacaggccagatgacggtgtttattaa

SEQ ID NO: 1936 - DNA, 282 bp, Artificial Sequence
  Description of Artificial Sequence: Synthetic polynucleotide
atgttgagaaccacttttttgcgcactccaagacaattgatgcgtaaatctccaagggcgtctttctccatcgtcactagggccgcctttcctcacttgaagaacaatcaagatgaagctgagaaaaaagaacagggtttgtttgatagcaacaagaagaggttggacactttggaacacggcaagaatccagattataagcaacctggaatggaagatttgaaaaaaaagggagatgacgctagaatcgaacaaaacaggccagatgacggtgtttattga

SEQ ID NO: 1937 - DNA, 576 bp, Saccharomyces cerevisiae
atggcctcctcaagtagcacgctaccgcttcatatgtatattagacccttaatcattgaagatttaaagcagattttgaacttggaaagccaaggtttcccaccaaacgaaagagcttcagaagaaattatcagctttcgtttgatcaattgtccagagctatgttcaggtcttttcatcagagagatcgagggcaaagaagttaaaaaggagacactaattggtcatattatgggtactaagatacctcatgaatacattactatcgaaagcatgggcaaattacaagtggaatcgagtaatcatattggtattcactctgtagtaatcaagccagaataccagaaaaaaaacctggctactttacttttaactgactacattcagaaattgagtaatcaggaaattggtaacaaaattgtccttattgctcacgagccattgataccattttatgaaagagttggtttcaagatcattgctgagaacaccaatgttgctaaggacaaaaacttcgcagaacagaaatggatcgatatggagagagaactaattaaggaagaatacgacaactag

SEQ ID NO: 1938 - DNA, 576 bp, Artificial Sequence
  Description of Artificial Sequence: Synthetic polynucleotide
atggcctcctccagtagcacgttgccgcttcatatgtatattagacccttaatcattgaagatttaaagcagattttgaacttggaaagccaaggtttcccaccaaacgaaagagcttctgaagaaattatcagctttcgtttgatcaattgtccagagctctgttctggtcttttcatcagagagatcgagggcaaagaagttaaaaaggagacattaattggtcatattatgggtactaagatacctcatgaatacattactatcgaaagcatgggcaaattacaagtggaaagtagtaatcatattggtattcactctgtagtaatcaagccagaataccagaaaaaaaacttggctactttacttttaactgactacattcagaaattgagtaatcaggaaattggtaacaaaattgtccttattgctcacgagccattgataccattttatgaaagagttggtttcaagatcattgctgagaacaccaatgttgctaaggacaaaaacttcgcagaacagaaatggatcgatatggagagagaattgattaaggaagaatacgacaactga

SEQ ID NO: 1939 - DNA, 1584 bp, Saccharomyces cerevisiae
atgaatgtcatattttctttggcgagtttcgtcaaaaacatgtataatgcaagtttgaaccaacgtaatctaataagcctgccgttcaacttcatgcttaattttgcgccagtgtttatttggctgtctatattcaagcgcgctggtctgatacccataaggctcagacctgacattcatagcaagtttgctttttttgctgatcaattcctctttggggactattggcatgaacttactgtacaattgcccgataatacttcgaagctatttttctggtcattcatatcatcttctgcatttctcttagtatttctgatatgtattccctttgccatttggtactacatctattacattaagcacgttaactataatctgttagagtggttcgcaaatatttttcattacccctgcaagcgcaagcagcggccgatccaaaagagatttcggacaattttcataccgtttgccttgcccctgtttacatttgttatactcaacattgatcatttctttgcttaccagtcggatgcaaactttactaagaccaaggatttactggcttggttctcctatgtcatcctgcacttgacagctccaattttaacagctgtatacttatacgtcttccaaccaccggggactttaaaatgctttagttttgccctaggattacaaaatatagcgggggtccttacccatctgcttgttccaatggcctccccatggtttactcatctgtacggtattgatgacaccgaacatgttaattacacccaggaagggtttgctgccggtttgataagagtagatagccatttgggtactcatttgaacactaaaggatttcacatgtctcctattgtgtttggtgctgttccttcactacactccgccattgcatttcaatgtttcttgtttttggtttcaaggtccaccagcttaaaacacagattttccaatgctggaggtttcacaatgcacaataatgattcttccactttcaagttgagtgaggaagacagcgaagatgaaggtgacaatagcataccgcccacgattggccctaacgacttagagatggaaccattgggtaccgttgagcctgtagatatttcaaatgagcggtcctcctccccttcatcttcattcaccgtatccagtaatgaaagaagcaccggcggcggcgacggcagcattattaacagcaatggcaataagaaacctctccagtttgtccatttatatgatgaagacacgaacttcacaaacaaatggatttttaaaatagtcaacgatgggtttataccaaaattctgggctatcctatatataatactacaatggtgggctaccatgtatctggaccaccattatagatttgaccttttcgttggtgttttatatgcaatgacaagtttcatcatcataaactggtttgttttacaaccaaaagttttaaaaaagtggattcatataaggttaggcgacaaagtggatacaagaaacgaagctcgcacttttggcatgagagtattttgtggcaccaagatggaatggttttttgatccgcttgcatag

SEQ ID NO: 1940 - DNA, 1584 bp, Artificial Sequence
  Description of Artificial Sequence: Synthetic polynucleotide
atgaatgtcatattttctttggcgagtttcgtcaaaaacatgtataatgcaagtttgaaccaacgtaatttgataagcttaccgttcaacttcatgcttaattttgcgccagtgtttatttggttatctatattcaagcgcgctggtttgatacccataaggctcagacctgacattcatagcaagtttgctttttttgctgatcaattcctctttggggactattggcatgaacttactgtacaattgcccgataatacttctaagttatttttctggagtttcatatcttcttctgcatttctcttagtatttttaatatgtattccctttgccatttggtactacatctattacattaagcacgttaactataatttattagagtggttcgcaaatatttttcattacccctgcaagcgcaagcagagaccgatccaaaagagatttagaacaattttcataccgtttgccttgcccttatttacatttgttatactcaacattgatcatttctttgcttaccagagcgatgcaaactttactaagaccaaggatttattagcttggttctcctatgtcatcttgcacttgacagctccaattttaacagctgtatacttatacgtcttccaaccaccggggactttaaaatgctttagttttgccttaggattacaaaatatagcgggggtccttacccatttgcttgttccaatggcctccccatggtttactcatctttacggtattgatgacaccgaacatgttaattacacccaggaagggtttgctgccggtttgataagagtagatagccatttgggtactcatttgaacactaaaggatttcacatgtctcctattgtgtttggtgctgttccttctttacactccgccattgcatttcaatgtttcttgtttttggtttccaggtccaccagcttaaaacacagattttccaatgctggaggtttcacaatgcacaataatgattcttccactttcaagttgagtgaggaagacagcgaagatgaaggtgacaatagcataccgcccacgattggccctaacgacttagagatggaaccattgggtaccgttgagcctgtagatatttctaatgagagatcctcctccccttcttcttctttcaccgtatccagtaatgaaagaagcaccggcggcggcgacggcagcattattaacagcaatggcaataagaaacctctccagtttgtccatttatatgatgaagacacgaacttcacaaacaaatggatttttaaaatagtcaacgatgggtttataccaaaattctgggctatcttatatataatattgcaatggtgggctaccatgtatttggaccaccattatagatttgaccttttcgttggtgttttatatgcaatgacaagtttcatcatcataaactggtttgttttacaaccaaaagttttaaaaaagtggattcatataaggttaggcgacaaagtggatacaagaaacgaagctcgcacttttggcatgagagtattttgtggcaccaagatggaatggttttttgatccgcttgcatga

SEQ ID NO: 1941 - DNA, 510 bp, Saccharomyces cerevisiae
atgagcagtgaaattgcctactcgaatacgaacaccaacactgaaaacgagaaccgcaatactggcgctggcgtagatgtaaatacaaatgcaaatgcaaatgcaaatgcaactgcaaatgcaactgcaaatgcaactgcaaatgcaactgcagagctgaacctccccacggtcgatgagcaaagacagtataaggtacaactgctattgcatatcaacagcatattacttgctagagttattcagatgaataatagtttacaaaacaatctacagaacaatataaataatagcaataacaataacatcatcaggatacagcaacttatatctcagttccttaaaagggttcatgccaatcttcaatgcatatctcagataaaccaaggagtgccctcagcgaaaccactgatcctcacgcctcctcagctagccaaccagcagcaacctccacaggatattctttctaaactctatcttctcttggcaagagtgttcgagatatggtag

SEQ ID NO: 1942 - DNA, 510 bp, Artificial Sequence
  Description of Artificial Sequence: Synthetic polynucleotide
atgagcagtgaaattgcctactctaatacgaacaccaacactgaaaacgagaaccgcaatactggcgctggcgtagatgtaaatacaaatgcaaatgcaaatgcaaatgcaactgcaaatgcaactgcaaatgcaactgcaaatgcaactgcagagttgaacctccccacggtcgatgagcaaagacagtataaggtacaattattattgcatatcaacagcatattacttgctagagttattcagatgaataatagtttacaaaacaatttacagaacaatataaataatagcaataacaataacatcatcaggatacagcaacttatatctcagttccttaaaagggttcatgccaatcttcaatgcatatctcagataaaccaaggagtgccctctgcgaaaccattgatcctcacgcctcctcagttggccaaccagcagcaacctccacaggatattctttctaaactctatcttctcttggcaagagtgttcgagatatggtga

SEQ ID NO: 1943 - DNA, 2691 bp, Saccharomyces cerevisiae
atgaccaccactgcccaagacaattctccaaagaagagacagcgtatcatcaattgtgtcacgcagctgccctacaaaatccaattgggagaaagcaacgatgactggaaaatatctgctactacaggtaacagcgcattattttcctctctagaataccttcaatttgattctaccgagtacgagcaacacgttgttggttggaccggcgaaataacaagaaccgaacgcaacctgtttactagagaagcgaaagaaaaaccacaggatctggacgatgacccactatatttaacaaaagagcagatcaatgggttgactactactctacaagatcatatgaaatctgataaagaggcaaagaccgatactactcaaacagctcccgttaccaataacgttcatcccgtttggctacttagaaaaaaccagagtagatggagaaattacgcggaaaaagtaatttggccaaccttccactacatcttgaatccttcaaatgaaggtgaacaagaaaaaaactggtggtacgactacgtcaagtttaacgaagcttatgcacaaaaaatcggggaagtttacaggaagggtgacatcatctggatccatgactactacctactgttattgcctcaactactgagaatgaaatttaacgacgaatctatcattattggttatttccatcatgccccatggcctagtaatgaatattttcgttgtttgccacgtagaaaacaaatcttagatggtcttgttggggccaatagaatttgtttccaaaatgaatctttctcccgtcattttgtatcgagttgtaaaagattactcgacgcaaccgccaaaaaatctaaaaactcttccaatagtgatcaatatcaagtctctgtgtacggtggtgacgtactcgtagattctttgcctataggtgttaacacaactcaaatactaaaagatgctttcacgaaggatatagattccaaggttctttccatcaagcaagcttatcaaaacaaaaaaattattattggtagagatcgtctggattccgtcagaggcgtcgttcaaaaattaagagctttcgaaactttcttggccatgtatccagaatggcgagatcaagtggtattgatccaagtcagcagtcctactgccaacagaaattccccccaaactatcagattggaacaacaagtcaacgagttggttaactccataaattctgaatacggtaatttgaatttttctcccgtccagcattactatatgagaatccctaaagatgtatacttgtccttactaagagttgcagacttatgtttaatcacaagtgttagagacggtatgaataccactgctttggaatacgtcactgtcaaatcgcacatgtcgaactttttatgctacggaaatccattgatcttaagtgagttttctggctctagtaacgtattgaaagatgccattgtggttaacccatgggattcggtggccgtggctaaatctattaacatggctttgaaattggacaaggaagaaaagtccaatttagaatcaaaattatggaaagaagttcctacaattcaagattggactaataagtttttgagttcattaaaggaacaggcgtcatctaatgatgatatggaaaggaaaatgactccagcacttaatagacctgttcttttagaaaattacaagcaggctaagcgtagattgttcctttttgattacgatggtactttgaccccaattgtcaaagacccagctgcagctattccatcggcaagactttatacaattctacaaaaattatgtgctgatcctcataatcaaatctggattatttctggtcgtgaccagaagtttttgaacaagtggttaggcggtaaacttcctcaactgggtctaagtgcggagcatggatgtttcatgaaagatgtttcttgccaagattgggtcaatttgaccgaaaaagttgatatgtcttggcaagtacgcgtcaatgaagtgatggaagaatttaccacaaggaccccaggttcattcatcgaaagaaagaaagtcgctctaacttggcattatagacgtaccgttccagaattgggtgaattccacgccaaagaactgaaagaaaaattgttatcatttactgatgactttgatttagaggtcatggatggtaaagcaaacattgaagttcgtccaagattcgtcaacaaaggtgaaatagtcaagagactagtctggcatcaacatggcaaaccacaggacatgttgaagggaatcagtgaaaaactacctaaggatgaaatgcctgattttgtattatgtttgggtgatgacttcactgacgaagacatgtttagacagttgaataccattgaaacttgttggaaagaaaaatatcctgaccaaaaaaatcaatggggcaactacggattctatcctgtcactgtgggatctgcatccaagaaaactgtcgcaaaggctcatttaaccgatcctcagcaagtcctggagactttaggtttacttgttggtgatgtctctctcttccaaagtgctggtacggtcgacctggattccagaggtcatgtcaagaatagtgagagcagtttgaaatcaaagctagcatctaaagcttatgttatgaaaagatcggcttcttacaccggcgcaaaggtttga

SEQ ID NO: 1944 - DNA, 2691 bp, Artificial Sequence
  Description of Artificial Sequence: Synthetic polynucleotide
atgaccaccactgcccaagacaattctccaaagaagagacagcgtatcatcaattgtgtcacgcagttgccctacaaaatccaattgggagaaagcaacgatgactggaaaatatctgctactacaggtaacagcgcattattttcctctttggaataccttcaatttgattctaccgagtacgagcaacacgttgttggttggaccggcgaaataacaagaaccgaacgcaacttgtttactagagaagcgaaagaaaaaccacaggatttggacgatgacccattgtatttaacaaaagagcagatcaatgggttgactactactttacaagatcatatgaaatctgataaagaggcaaagaccgatactactcaaacagctcccgttaccaataacgttcatcccgtttggttacttagaaaaaaccagagtagatggagaaattacgcggaaaaagtaatttggccaaccttccactacatcttgaatccttccaatgaaggtgaacaagaaaaaaactggtggtacgactacgtcaagtttaacgaagcttatgcacaaaaaatcggggaagtttacaggaagggtgacatcatctggatccatgactactacttgttattattgcctcaattattaagaatgaaatttaacgacgaatctatcattattggttatttccatcatgccccatggcctagtaatgaatattttcgttgtttgccacgtagaaaacaaatcttagatggtcttgttggggccaatagaatttgtttccaaaatgaatctttctcccgtcattttgtatctagttgtaaaagattactcgacgcaaccgccaaaaaatctaaaaactcttccaatagtgatcaatatcaagtctctgtgtacggtggtgacgtactcgtagattctttgcctataggtgttaacacaactcaaatattgaaagatgctttcacgaaggatatagattccaaggttctttccatcaagcaagcttatcaaaacaaaaaaattattattggtagagatcgtttggattccgtcagaggcgtcgttcaaaaattaagagctttcgaaactttcttggccatgtatccagaatggagagatcaagtggtattgatccaagtcagcagtcctactgccaacagaaattccccccaaactatcagattggaacaacaagtcaacgagttggttaactccataaattctgaatacggtaatttgaatttttctcccgtccagcattactatatgagaatccctaaagatgtatacttgtccttattaagagttgcagacttatgtttaatcacaagtgttagagacggtatgaataccactgctttggaatacgtcactgtcaaatctcacatgtccaactttttatgctacggaaatccattgatcttaagtgagttttctggctctagtaacgtattgaaagatgccattgtggttaacccatgggattctgtggccgtggctaaatctattaacatggctttgaaattggacaaggaagaaaagtccaatttagaaagtaaattatggaaagaagttcctacaattcaagattggactaataagtttttgagttctttaaaggaacaggcgtcttctaatgatgatatggaaaggaaaatgactccagcacttaatagacctgttcttttagaaaattacaagcaggctaagcgtagattgttcctttttgattacgatggtactttgaccccaattgtcaaagacccagctgcagctattccatctgcaagactttatacaattttacaaaaattatgtgctgatcctcataatcaaatctggattatttctggtcgtgaccagaagtttttgaacaagtggttaggcggtaaacttcctcaattgggtttgagtgcggagcatggatgtttcatgaaagatgtttcttgccaagattgggtcaatttgaccgaaaaagttgatatgtcttggcaagtacgcgtcaatgaagtgatggaagaatttaccacaaggaccccaggttctttcatcgaaagaaagaaagtcgctttgacttggcattatagacgtaccgttccagaattgggtgaattccacgccaaagaattgaaagaaaaattgttatcttttactgatgactttgatttagaggtcatggatggtaaagcaaacattgaagttcgtccaagattcgtcaacaaaggtgaaatagtcaagagattggtctggcatcaacatggcaaaccacaggacatgttgaagggaatcagtgaaaaattacctaaggatgaaatgcctgattttgtattatgtttgggtgatgacttcactgacgaagacatgtttagacagttgaataccattgaaacttgttggaaagaaaaatatcctgaccaaaaaaatcaatggggcaactacggattctatcctgtcactgtgggatctgcatccaagaaaactgtcgcaaaggctcatttaaccgatcctcagcaagtcttggagactttaggtttacttgttggtgatgtctctctcttccaaagtgctggtacggtcgacttggattccagaggtcatgtcaagaatagtgagagcagtttgaaatccaagttagcatctaaagcttatgttatgaaaagatctgcttcttacaccggcgcaaaggtttga

SEQ ID NO: 1945 - DNA, 927 bp, Saccharomyces cerevisiae
atgatggacttagataagattatagcatcactgagagacggaaaacatattcctgaagaaaccgtttttaggctatgtttaaattcacaggaactattaatgaatgaaggcaatgtaacacaagtcgatacaccggttacaatatgcggtgatatacatggccaattacacgatctactaacgctcttcgaaaagagtggtggtgtagagaaaacaaggtatattttcttgggcgattttgtggataggggattttactcattggagagttttttacttttactatgttacaaattaagatatcctgataggattactttaattagaggcaatcacgaaacccggcaaattactaaagtatacggattttacgatgaagtagtaagaaaatatggtaatagtaacgtatggaggtactgctgtgaagtttttgattatttatcattgggggcaataataaacaatagcatattctgtgttcatggtggattatctccggatatgaccacggttgatgaaatacgaacaatagacaggaaacaagaagttccacatgaaggtgctatgtgtgacttattatggagcgaccccgaagacgttgacacatggtcattatcaccaagaggtgctggatttcttttcggtaaaagagaagttgatcaattcttagagaaaaacaacgttgagttaattgctagagctcatcagttagtgatggaaggttacaaagaaatgttcgacggtggattagtgacagtctggtcggcaccgaattactgttatcgttgtggtaatgtagcagctgtattgaagatagacgacgatttgaatcgtgaatatacaatttttgaagctgttcaggcacaaaatgaagtcggaaatgctataattccaaccaaaaaatctcaaatggactatttcttataa

SEQ ID NO: 1946 - DNA, 927 bp, Artificial Sequence
  Description of Artificial Sequence: Synthetic polynucleotide
atgatggacttagataagattatagcatctttgagagacggaaaacatattcctgaagaaaccgtttttaggttatgtttaaattctcaggaattattaatgaatgaaggcaatgtaacacaagtcgatacaccggttacaatatgcggtgatatacatggccaattacacgatttattgacgctcttcgaaaagagtggtggtgtagagaaaacaaggtatattttcttgggcgattttgtggataggggattttactctttggagagttttttacttttattatgttacaaattaagatatcctgataggattactttaattagaggcaatcacgaaaccagacaaattactaaagtatacggattttacgatgaagtagtaagaaaatatggtaatagtaacgtatggaggtactgctgtgaagtttttgattatttatctttgggggcaataataaacaatagcatattctgtgttcatggtggattatctccggatatgaccacggttgatgaaataagaacaatagacaggaaacaagaagttccacatgaaggtgctatgtgtgacttattatggagcgaccccgaagacgttgacacatggtctttatctccaagaggtgctggatttcttttcggtaaaagagaagttgatcaattcttagagaaaaacaacgttgagttaattgctagagctcatcagttagtgatggaaggttacaaagaaatgttcgacggtggattagtgacagtctggtctgcaccgaattactgttatcgttgtggtaatgtagcagctgtattgaagatagacgacgatttgaatcgtgaatatacaatttttgaagctgttcaggcacaaaatgaagtcggaaatgctataattccaaccaaaaaatctcaaatggactatttcttatga

SEQ ID NO: 1947 - DNA, 1221 bp, Saccharomyces cerevisiae
atgtcgcttggtataccactttcccaattaatagtagaaagtccaaagccattaagtagcggcatcacaggattagatgagatattaaacctgggattccaggcaaggtcgatctacgaaatatttgggcctccgggcattggcaagactaattttggcattcaattggtgtgtaattcgttagaaggcatacaacaatcggaaataaacgacgataaaattctatggatagaaacatttcaagaaatgcccataaacatactaagagaacgctttcaaaaatttaaaatcgtggaagaaaatgtgaagcgggtccgaataacgaaatttggacagctattatatttcttccagaatttgttcaaattatctcaaagtgtgcgatataaactagttataattgatggattttctcaattagtctgcgatcatctgtgtacactaagtaaaagaggcggcggaatgatagataaaactatacacgagttaaaatgtcgacatttgatattaatttttacggtaatgaccaaatacacacattccacgggttcgacaataatagttttaaatgactgtatgaacaccgccttccaatcaaacgaattcgaatccttggaagaatactacgaaattttagacgacggatctaacttctttgtcaactctaacaacgaaaggcgtaagaacaatgtacatatattgaaaagcgcgctcgttgccaatatcgctatgggaagcaaggattccacttgggaagtatttctaagagacaggatcggcctttttagggattggaatgaacaagtggacgaaaccgttttcgtgaaaagcaaaagagtgaaggcgtcatcctcgcagagtaacgagggatgtactaccatcaaagaaatgagaataaacaaacgaaactttgaaaacttgagaatagctattgtttttaatttacacggcgaagatagaaaaagagaaggacgaaatttaaagcggtcaagaagcagcgacgatcgtaactatattgtcaaatttgattttgataaagcaacaggtcaactccgcgatataattgatctgaaacctgatactgctaatattgcctcatttccaacattatcaacaagcagcagcagttgctcacaagtgtttaacaatattgactccaatgataatccattaccaaatgcggagggaaaggaggagataatttatgatagtgaaggttaa

SEQ ID NO: 1948 - DNA, 1221 bp, Artificial Sequence
  Description of Artificial Sequence: Synthetic polynucleotide
atgtctcttggtataccactttcccaattaatagtagaaagtccaaagccattaagtagcggcatcacaggattagatgagatattaaacttgggattccaggcaaggtctatctacgaaatatttgggcctccgggcattggcaagactaattttggcattcaattggtgtgtaattctttagaaggcatacaacaaagtgaaataaacgacgataaaattttatggatagaaacatttcaagaaatgcccataaacatattaagagaacgctttcaaaaatttaaaatcgtggaagaaaatgtgaagcgtgtcagaataacgaaatttggacagcttttatatttcttccagaatttgttcaaattatctcaaagtgtgaggtataaattggttataattgatggattttctcaattagtctgcgatcatttatgtacattgagtaaaagaggcggcggaatgatagataaaactatacacgagttaaaatgtagacatttgatattaatttttacggtaatgaccaaatacacacattccacgggttctacaataatagttttaaatgactgtatgaacaccgccttccaaagtaacgaattcgaatccttggaagaatactacgaaattttagacgacggatctaacttctttgtcaactctaacaacgaaaggcgtaagaacaatgtacatatattgaaaagcgcgctcgttgccaatatcgctatgggaagcaaggattccacttgggaagtatttttaagagacaggatcggcctttttagggattggaatgaacaagtggacgaaaccgttttcgtgaaaagcaaaagagtgaaggcgtcttcctctcagagtaacgagggatgtactaccatcaaagaaatgagaataaacaaaagaaactttgaaaacttgagaatagctattgtttttaatttacacggcgaagatagaaaaagagaaggaagaaatttaaagagatctagaagcagcgacgatcgtaactatattgtcaaatttgattttgataaagcaacaggtcaactccgcgatataattgatttgaaacctgatactgctaatattgcctcttttccaacattatctacaagcagcagcagttgctctcaagtgtttaacaatattgactccaatgataatccattaccaaatgcggagggaaaggaggagataatttatgatagtgaaggttga

SEQ ID NO: 1949 - DNA, 1017 bp, Saccharomyces cerevisiae
atgaaattatcaactgtcctattatctgccggtttagcctcgactactttggcccaattttccaacagtacatctgcttcttccaccgatgtcacttcctcctcttccatctccacttcctctggctcagtaactatcacatcttctgaagctccagaatccgacaacggtaccagcacagctgcaccaactgaaacctcaacagaggctccaaccactgctatcccaactaacggtacctctactgaagctccaaccactgctatcccaactaacggtacctctactgaagctccaactgatactactactgaagctccaaccaccgctcttccaactaacggtacttctactgaagctccaactgatactactactgaagctccaaccaccggtcttccaaccaacggtaccacttcagctttcccaccaactacatctttgccaccaagcaacactaccaccactcctccttacaacccatctactgactacaccactgactacactgtagtcactgaatatactacttactgtccagaaccaaccactttcaccacaaacggtaagacttacaccgtcactgaaccaaccacattgactatcactgactgtccatgcaccattgaaaagccaacaaccacatcaaccaccgaatacactgtagtcactgagtacactacttactgtccagaaccaaccactttcaccacaaacggtaagacttacaccgtcactgaaccaaccactttgactatcactgactgtccatgtactattgaaaagagcgaagcccctgagtcttctgtcccagttaccgaatctaagggcactaccaccaaagaaacaggtgttactaccaaacaaaccacagccaacccaagtctaaccgtctccacagtcgtcccagtttcatcctctgcttcttctcattccgttgtcatcaacagtaacggtgctaacgtcgtcgttccaggtgctttaggtttggctggtgttgctatgttattcttataa

SEQ ID NO: 1950 - DNA, 1017 bp, Artificial Sequence
  Description of Artificial Sequence: Synthetic polynucleotide
atgaaattatctactgtccttttatctgccggtttagcctctactactttggcccaattttccaacagtacatctgcttcttccaccgatgtcacttcctcctcttccatctccacttcctctggctctgtaactatcacatcttctgaagctccagaatccgacaacggtaccagcacagctgcaccaactgaaacctctacagaggctccaaccactgctatcccaactaacggtacctctactgaagctccaaccactgctatcccaactaacggtacctctactgaagctccaactgatactactactgaagctccaaccaccgctcttccaactaacggtacttctactgaagctccaactgatactactactgaagctccaaccaccggtcttccaaccaacggtaccactagtgctttcccaccaactacatctttgccaccaagcaacactaccaccactcctccttacaacccatctactgactacaccactgactacactgtagtcactgaatatactacttactgtccagaaccaaccactttcaccacaaacggtaagacttacaccgtcactgaaccaaccacattgactatcactgactgtccatgcaccattgaaaagccaacaaccacatctaccaccgaatacactgtagtcactgagtacactacttactgtccagaaccaaccactttcaccacaaacggtaagacttacaccgtcactgaaccaaccactttgactatcactgactgtccatgtactattgaaaagagcgaagcccctgagtcttctgtcccagttaccgaatctaagggcactaccaccaaagaaacaggtgttactaccaaacaaaccacagccaacccaagtttaaccgtctccacagtcgtcccagtttcttcctctgcttcttctcattccgttgtcatcaacagtaacggtgctaacgtcgtcgttccaggtgctttaggtttggctggtgttgctatgttattcttatga

SEQ ID NO: 1951 - DNA, 672 bp, Saccharomyces cerevisiae
atgtcgaaggatgtaatagaatactctaaattatttgctaaactggttaacacaaacgatgatacaaaactggatgatacaatagcatccttcttatattatatgtttccaagggaactatttattcgagcaatttcattactagaatcttcagacatgtttatatacatattagatagagtccataacaaggaaggtaatgagcatacatcattgattgatgtgttagttgatgaattttataagggttcatctaattcgctcctggagtatcgcttaatagtgaaggatactaatgatggagcgccaccaatactcgtagatatcgcacactggttctgctcatgtgaagagttttgtaaatactttcatgaagcactagaaaaaactgacgaaaaagaagaattacacgatgtgctaataaatgaagttgatgatcatttgcaattttcggatgataggtttgcacagctggatcctcatagcttatcaaagcagtggtatttcaaatttgataaagtttgttgttcgcatctactggcgttctccattttgcttagatcttccataaatgtgctgaagtttttcactgtgaactcgaataaagttttcgttatagcaatagataatatcgacgagtggttaaacttgcacatcaacatagttgagtaa

SEQ ID NO: 1952 - DNA, 672 bp, Artificial Sequence
  Description of Artificial Sequence: Synthetic polynucleotide
atgtccaaggatgtaatagaatactctaaattatttgctaaattggttaacacaaacgatgatacaaaattggatgatacaatagcatccttcttatattatatgtttccaagggaattatttattagagcaatttctttattggaatcttctgacatgtttatatacatattagatagagtccataacaaggaaggtaatgagcatacatctttgattgatgtgttagttgatgaattttataagggttcttctaatagtctcttggagtatcgcttaatagtgaaggatactaatgatggagcgccaccaatactcgtagatatcgcacactggttctgctcttgtgaagagttttgtaaatactttcatgaagcattggaaaaaactgacgaaaaagaagaattacacgatgtgttgataaatgaagttgatgatcatttgcaattttctgatgataggtttgcacagttagatcctcatagcttatccaagcagtggtatttcaaatttgataaagtttgttgttctcatttattggcgttctccattttgcttagatcttccataaatgtgttgaagtttttcactgtgaacagtaataaagttttcgttatagcaatagataatatcgacgagtggttaaacttgcacatcaacatagttgagtga

SEQ ID NO: 1953 - DNA, 336 bp, Saccharomyces cerevisiae
atgggtctatttaataacttcaagtttaaatatacaagggcgcaactggagatctttagattttcattttgtttgctagcacctgttgctgtaatgtactatattggtacagatactgataaaaaattaaatgttccagggttttggccagatcctgcaacgttgaaccaaataccaaaagagccttatgagattaaagctgaactggcaaggatgaaaaaagaacgtttagagaaaaggcttaggttggagaaaaagatacaagaggagtttggtttagaccttgaggaggaaaaagaaaaaattaaacgggatttggctctcaaaaaaggatga

SEQ ID NO: 1954 - DNA, 336 bp, Artificial Sequence
  Description of Artificial Sequence: Synthetic polynucleotide
atgggtttatttaataacttcaagtttaaatatacaagggcgcaattggagatctttagattttctttttgtttgttggcacctgttgctgtaatgtactatattggtacagatactgataaaaaattaaatgttccagggttttggccagatcctgcaacgttgaaccaaataccaaaagagccttatgagattaaagctgaattggcaaggatgaaaaaagaacgtttagagaaaaggcttaggttggagaaaaagatacaagaggagtttggtttagaccttgaggaggaaaaagaaaaaattaaaagagatttggctctcaaaaaaggatga

SEQ ID NO: 1955 - DNA, 219 bp, Saccharomyces cerevisiae
atggctagagcaagaaagggtgcactggttcaatgtgatccatccatcaaggcgctcatattacaaattgacgccaagatgagtgatatagtactagaggagttggatgacacccatcttttagtaaatccctcgaaagtcgaatttgttaagcatgagctaaataggctattatctaagaatatatataatcctatggatgaagaagaaaatcagtaa

SEQ ID NO: 1956 - DNA, 219 bp, Artificial Sequence
  Description of Artificial Sequence: Synthetic polynucleotide
atggctagagcaagaaagggtgcattggttcaatgtgatccatccatcaaggcgctcatattacaaattgacgccaagatgagtgatatagtattggaggagttggatgacacccatcttttagtaaatccctctaaagtcgaatttgttaagcatgagttgaataggttattatctaagaatatatataatcctatggatgaagaagaaaatcagtga

SEQ ID NO: 1957 - DNA, 2979 bp, Saccharomyces cerevisiae
atgactacagataatcatcagaatgattctgttttggatcaacaatcaggcgaacgaacaattgatgagagtaattccatctctgacgagaataatgttgataataagagggaagacgttaatgtaacttcaccaacaaaaagtgttagttgcatatcacaagcggaaaatggagtagcttctcgaacagatgagagtacaataacaggaagtgcgacggatgcagaaacaggtgatgatgatgatgatgatgatgatgacgatgatgaagatgaggatgacgaagatgagccccccttattgaagtacacacgaattagtcaactcccgaagaacttttttcaacgagactcgatctcttcatgtttatttggtgatactttttttgcatttggtacacactcaggcattctacacttaactacatgcgcgttcgaacccattaaaaccatcaaatgccatagatcttcgatactttgtattaacactgacggaaaatattttgctacgggatctattgacgggacagtgattatcggatcgatggatgatccacaaaacattacacaatacgatttcaaaagacctataaactctgtagcgttgcactcaaattttcaagcatccagaatgtttgtttctggtggaatggctggcgacgttgtactatctcagagaaattggctaggaaatagaatcgacatcgttttaaacaagaagaaaaagaaaaaaacaagaaaagatgacctatcctctgatatgaagggccctatcatgggaatttatactatgggtgaccttatattatggatggatgatgatggaataacattttgcgatgttcctacaagatcacagcttttgaatattccattcccctccagaatttttaacgtacaggatgtaaggccagatctatttagaccccatgttcattttttagaaagtgatcgtgtcgttatcggatggggatctaatatttggctatttaaagtttcctttaccaaggattcaaattcgatcaaatccggtgactctaattctcaaagtaataatatgagtcattttaaccctacgacaaacatcggatctctcttgtctagtgctgcatcgagttttagagggacacctgataagaaagttgaattagaatgccattttactgtgtcaatgttgattacagggcttgcatcgtttaaggatgatcagttattatgcctaggttttgatatagatattgaagaggaagcaaccatagatgaagatatgaaggaggggaagaattttagcaagcggccagaaaacttattagccaaagggaatgctccagaattaaaaattgttgatctttttaatggtgatgaaatctataatgatgaagttatcatgaaaaactatgaaaaattgtctataaatgattatcacctcggtaaacatatagataaaacaacaccagaatactatttgataagttccaacgatgccatcagggttcaagagttatcattgaaggatcatttcgattggtttatggaaagaaagcaatattataaagcttggaaaatcggtaaatatgtaattggatcagaagagaggtttagtatagggttgaaattcctcaactctttagtaactaaaaaagattggggtacattagtggaccacttaaatattattttcgaagaaactttaaactcattggattccaactcatatgatgtcactcaaaacgtgctgaaagaatgggcagatataatagagattttgattacatcaggaaatattgtagaaattgcgcctttgattcccaagaaacctgccttaagaaagtcggtatatgacgatgtattacattactttttggccaatgacatgatcaataagtttcatgagtatattactaagtgggatttaaagcttttttctgtggaagatttcgaagaagagctagaaacaagaatagaggctgctagtgaacctacagcttcatcgaaggaagaagggtctaatattacctatagaactgagttggtgcatttatatttgaaagagaataaatataccaaggctataccgcaccttttgaaagctaaggacttaagagctttaactattataaaaatacaaaatttattgccgcagtatctagaccagatagttgatatcattcttttaccatataagggtgaaatttcccatatttccaaactatcaatatttgaaattcaaacaatttttaacaaaccaatagacctgttgtttgaaaatagacacaccatatcagtcgctagaatatacgaaatatttgaacatgattgtccaaaaagtttcaaaaagattttattttgttatttaataaaatttttagatacggacgactcgttcatgataagtccttatgaaaatcaactaattgaactttattctgaatacgaccgacaaagccttctgccttttctgcaaaagcacaataactataatgtagagagtgccatcgaagtctgttcatcgaaacttggtttatataatgaactgatctatttgtgggggaaaatcggtgaaacgaagaaagcattgtctttgattattgacgagttaaaaaacccgcaattagctatagattttgttaaaaactggggtgattcagaactttgggaattcatgattaactatagtcttgacaaacctaattttactaaagccattttaacatgttctgatgagaccagcgaaatttacctaaaagtgatcagaggtatgtccgatgatctgcaaattgacaacctgcaggatattattaaacatatcgttcaagaaaattcattaagcttggaagttagagataatattttggttatcattaatgatgaaacgaaaaaatttgccaatgaattcctgaaaataagaagtcaaggtaaattgtttcaagtagacgaaagcgatattgaaattaatgacgacttaaatggtgttttataa

SEQ ID NO: 1958 - DNA, 2979 bp, Artificial Sequence
  Description of Artificial Sequence: Synthetic polynucleotide
atgactacagataatcatcagaatgattctgttttggatcaacaaagtggcgaaagaacaattgatgagagtaattccatctctgacgagaataatgttgataataagagggaagacgttaatgtaacttctccaacaaaaagtgttagttgcatatctcaagcggaaaatggagtagcttctcgcacagatgagagtacaataacaggaagtgcgacggatgcagaaacaggtgatgatgatgatgatgatgatgatgacgatgatgaagatgaggatgacgaagatgagccccccttattgaagtacacaagaattagtcaactcccgaagaacttttttcaaagagactctatctcttcttgtttatttggtgatactttttttgcatttggtacacactctggcattttacacttaactacatgcgcgttcgaacccattaaaaccatcaaatgccatagatcttctatactttgtattaacactgacggaaaatattttgctacgggatctattgacgggacagtgattatcggatccatggatgatccacaaaacattacacaatacgatttcaaaagacctataaactctgtagcgttgcactctaattttcaagcatccagaatgtttgtttctggtggaatggctggcgacgttgtattatctcagagaaattggttaggaaatagaatcgacatcgttttaaacaagaagaaaaagaaaaaaacaagaaaagatgacttatcctctgatatgaagggccctatcatgggaatttatactatgggtgaccttatattatggatggatgatgatggaataacattttgcgatgttcctacaagaagccagcttttgaatattccattcccctccagaatttttaacgtacaggatgtaaggccagatttatttagaccccatgttcattttttagaaagtgatcgtgtcgttatcggatggggatctaatatttggttatttaaagtttcctttaccaaggattctaattccatcaaatccggtgactctaattctcaaagtaataatatgagtcattttaaccctacgacaaacatcggatctctcttgtctagtgctgcaagtagttttagagggacacctgataagaaagttgaattagaatgccattttactgtgtccatgttgattacagggcttgcaagttttaaggatgatcagttattatgcttgggttttgatatagatattgaagaggaagcaaccatagatgaagatatgaaggaggggaagaattttagcaagagaccagaaaacttattagccaaagggaatgctccagaattaaaaattgttgatctttttaatggtgatgaaatctataatgatgaagttatcatgaaaaactatgaaaaattgtctataaatgattatcacctcggtaaacatatagataaaacaacaccagaatactatttgataagttccaacgatgccatcagggttcaagagttatctttgaaggatcatttcgattggtttatggaaagaaagcaatattataaagcttggaaaatcggtaaatatgtaattggatctgaagagaggtttagtatagggttgaaattcctcaactctttagtaactaaaaaagattggggtacattagtggaccacttaaatattattttcgaagaaactttaaactctttggattccaacagttatgatgtcactcaaaacgtgttgaaagaatgggcagatataatagagattttgattacatctggaaatattgtagaaattgcgcctttgattcccaagaaacctgccttaagaaagagtgtatatgacgatgtattacattactttttggccaatgacatgatcaataagtttcatgagtatattactaagtgggatttaaagcttttttctgtggaagatttcgaagaagagttagaaacaagaatagaggctgctagtgaacctacagcttcttccaaggaagaagggtctaatattacctatagaactgagttggtgcatttatatttgaaagagaataaatataccaaggctataccgcaccttttgaaagctaaggacttaagagctttaactattataaaaatacaaaatttattgccgcagtatttggaccagatagttgatatcattcttttaccatataagggtgaaatttcccatatttccaaattatctatatttgaaattcaaacaatttttaacaaaccaatagacttgttgtttgaaaatagacacaccatatctgtcgctagaatatacgaaatatttgaacatgattgtccaaaaagtttcaaaaagattttattttgttatttaataaaatttttagatacggacgactctttcatgataagtccttatgaaaatcaattgattgaactttattctgaatacgacagacaaagccttttaccttttttgcaaaagcacaataactataatgtagagagtgccatcgaagtctgttcttctaaacttggtttatataatgaattgatctatttgtgggggaaaatcggtgaaacgaagaaagcattgtctttgattattgacgagttaaaaaacccgcaattagctatagattttgttaaaaactggggtgattctgaactttgggaattcatgattaactatagtcttgacaaacctaattttactaaagccattttaacatgttctgatgagaccagcgaaatttacttgaaagtgatcagaggtatgtccgatgatttgcaaattgacaacttacaggatattattaaacatatcgttcaagaaaattctttaagcttggaagttagagataatattttggttatcattaatgatgaaacgaaaaaatttgccaatgaattcttgaaaataagaagtcaaggtaaattgtttcaagtagacgaaagcgatattgaaattaatgacgacttaaatggtgttttatga

SEQ ID NO: 1959 - DNA, 2778 bp, Saccharomyces cerevisiae
atgctttccattcagcaaagatataatatttgtctaatggcggagaggcacccaaagtggacgcaacttgaattggcaaaatgggcttatgagacgttccagctgccaaaaattccatcccaaggcacaatatcgcgtttgttggcaaggaaatcaacttatatgaattgtaaagagcatgaaaaagatgcgaatagattaaggaagccaaataatcttttggttcggaaaattttacaagaatggatttctcaaagtttgtggaatggaatccctataacgtcacctattattcaagacactgcacaagctgtttggcacagaattcctgcggagcatcgcgagggaaatggttcttttagttataaatggatttcgaattttttatcaaaaatggatgtcaatatttctgttttagacgaagagttacccaaaaccccaaaagtctggacatttgaagagagggatgtattgaaggcttatttctccaaaattcctccaaaggatttattcactttagatgaagcgtttctctcctacaacctaccgttggattatgctcaatatgaagcaagtagcattcaaaggcgtatagaggtggcaactgtcatgctgtgctccaatttagatggctctgaaaagttaaaacctgttgtcgtgggcaaatatgatagttacaaatcattcaggaattatttccccaatgaaccgaatgatcctgtgtcacaatcaatgttgggtactaagatggctaagaaatttgatatctcataccatagtaacaggaaagcatggctaacgagcaatcttttccacaactggttagtcaggtgggataagaggttggttgctgtgaataggaagatttggattgttttggatgattcttgctgtcatcgaataattaatttgcgccttcaaaatataaaacttgtatacacttcctcaaattcaaagtttttgccatttaactggggtgtctgggatgaattcaaaacacgatacagaatacaacagtatcaggcgctcattgacttgcaaaatagaatttcgaagaatatccaaaataaaaataaatcagaacggaacgaatgcatacccaatggtaaaaaatgtttgattagctttgagcagagtcaactcacaatgtcaaatgcattcaaatttattaaaaaagcttgggatgatatacccgttgatgctatcaaagcaaattggaaaagttccggtctgcttcctcctgaaatgatacatttgaatgagaatgttagtatggcatttaagaaaaacgaagtcttagagagcgttttgaatagattatgtgatgaatactactgtgttaaaaaatgggaatatgaaatgttgttagatttaaacattgaaaacaaaaacacaaacttcttgagtacagaagaattagtggaaagtgctattgtggagccttgtgaacctgattttgatactgcgccaaaaggtaatgaggtccatgatgataattttgatgtatcagtttttgccaatgaagatgataataatcaaaatcatttaagcatgtcacaagctagccacaaccccgattacaacagtaatcacagcaacaatgctattgaaaatactaataatagaggcagtaataataataacaataataatggtagtagtaataatattaatgataatgatagtagcgtaaagtatttgcaacagaatactgttgataatagtaccaaaacaggtaaccctggacaaccaaatatttctagtatggaatcgcaaaggaactcttcgactacagatttagttgttgacggtaattatgacgtcaattttaacggccttttgaatgatccatataatacaatgaaacagccgggcccattagattataatgtcagtacattaatcgataaacctaatttattcttaagtcctgatttggatttatctactgttggcgttgatatgcaactaccatcatcagaatattttagcgaagtattttcttcagctatcagaaacaacgaaaaagctgcctcagatcagaacaaatcaactgatgaacttccttcaagcacggccatggcaaattcaaactcgataacgactgcccttctagagtcaagaaatcaagcacagccgtttgatgtcccacatatgaatgggttgctgagcgacacatcaaaaagcggacattctgttaattcctcaaatgctatatctcaaaattctctgaataactttcaacataattcggcgtccgtcgcggaagcttcgtctccttcaattacaccatctcctgtggcaataaactcaacaggcgctccagcgagatctattatatctgcacccatagactcaaattcctctgcgtcatcgccatcagctttagaacatcttgaaggtgctgtttccggtatgtcaccctcttccaccacaatattaagtaacttacaaacaaatataaatatcgccaaatcattgagtaccattatgaaacatgcagaatcaaacgaaatatcactgacgaaagaaacaataaatgaacttaatttcaattatttgacacttttaaaaaggattaaaaagactagaaaacaattaaatagcgaaagcattaaaataaacagtaagaatgcacaagaccatttagaaacccttctatctggggctgcagctgcagctgcaacttccgccaataacttggaccttccgactggtggttcaaacctcccagactctaataacttacacttacctggtaacacaggctttttttag

SEQ ID NO: 1960 - DNA, 2778 bp, Artificial Sequence
  Description of Artificial Sequence: Synthetic polynucleotide
atgctttccattcagcaaagatataatatttgtttgatggcggagaggcacccaaagtggacgcaacttgaattggcaaaatgggcttatgagacgttccagttaccaaaaattccatcccaaggcacaatatctcgtttgttggcaaggaaatctacttatatgaattgtaaagagcatgaaaaagatgcgaatagattaaggaagccaaataatcttttggttagaaaaattttacaagaatggatttctcaaagtttgtggaatggaatccctataacgtctcctattattcaagacactgcacaagctgtttggcacagaattcctgcggagcatcgcgagggaaatggttcttttagttataaatggatttctaattttttatccaaaatggatgtcaatatttctgttttagacgaagagttacccaaaaccccaaaagtctggacatttgaagagagggatgtattgaaggcttatttctccaaaattcctccaaaggatttattcactttagatgaagcgtttctctcctacaacttaccgttggattatgctcaatatgaagcaagtagcattcaaaggcgtatagaggtggcaactgtcatgttgtgctccaatttagatggctctgaaaagttaaaacctgttgtcgtgggcaaatatgatagttacaaatctttcaggaattatttccccaatgaaccgaatgatcctgtgagtcaatctatgttgggtactaagatggctaagaaatttgatatctcctaccatagtaacaggaaagcatggttgacgagcaatcttttccacaactggttagtcaggtgggataagaggttggttgctgtgaataggaagatttggattgttttggatgattcttgctgtcatagaataattaatttgcgccttcaaaatataaaacttgtatacacttcctctaattctaagtttttgccatttaactggggtgtctgggatgaattcaaaacaagatacagaatacaacagtatcaggcgctcattgacttgcaaaatagaatttccaagaatatccaaaataaaaataaaagtgaaagaaacgaatgcatacccaatggtaaaaaatgtttgattagctttgagcagagtcaactcacaatgagtaatgcattcaaatttattaaaaaagcttgggatgatatacccgttgatgctatcaaagcaaattggaaaagttccggtttacttcctcctgaaatgatacatttgaatgagaatgttagtatggcatttaagaaaaacgaagtcttagagagcgttttgaatagattatgtgatgaatactactgtgttaaaaaatgggaatatgaaatgttgttagatttaaacattgaaaacaaaaacacaaacttcttgagtacagaagaattagtggaaagtgctattgtggagccttgtgaacctgattttgatactgcgccaaaaggtaatgaggtccatgatgataattttgatgtatctgtttttgccaatgaagatgataataatcaaaatcatttaagcatgtctcaagctagccacaaccccgattacaacagtaatcacagcaacaatgctattgaaaatactaataatagaggcagtaataataataacaataataatggtagtagtaataatattaatgataatgatagtagcgtaaagtatttgcaacagaatactgttgataatagtaccaaaacaggtaaccctggacaaccaaatatttctagtatggaatctcaaaggaactcttctactacagatttagttgttgacggtaattatgacgtcaattttaacggccttttgaatgatccatataatacaatgaaacagccgggcccattagattataatgtcagtacattaatcgataaacctaatttattcttaagtcctgatttggatttatctactgttggcgttgatatgcaattaccatcttctgaatattttagcgaagtattttcttctgctatcagaaacaacgaaaaagctgcctctgatcagaacaaatctactgatgaacttccttccagcacggccatggcaaatagcaacagcataacgactgcccttttggagagcagaaatcaagcacagccgtttgatgtcccacatatgaatgggttgttgagcgacacaagtaaaagcggacattctgttaattcctctaatgctatatctcaaaattctttgaataactttcaacataattctgcgtccgtcgcggaagcttcttctccttctattacaccatctcctgtggcaataaactccacaggcgctccagcgagatctattatatctgcacccatagactctaattcctctgcgtcttctccatctgctttagaacatcttgaaggtgctgtttccggtatgtctccctcttccaccacaatattaagtaacttacaaacaaatataaatatcgccaaatctttgagtaccattatgaaacatgcagaatctaacgaaatatctttgacgaaagaaacaataaatgaacttaatttcaattatttgacacttttaaaaaggattaaaaagactagaaaacaattaaatagcgaaagcattaaaataaacagtaagaatgcacaagaccatttagaaacccttttatctggggctgcagctgcagctgcaacttccgccaataacttggaccttccgactggtggttccaacctcccagactctaataacttacacttacctggtaacacaggctttttttga

SEQ ID NO: 1961 - DNA, 1485 bp, Saccharomyces cerevisiae
atggataagtacggacatatagctcatcaagaaggcgatgtttgttattatattccaaggctgttcaaatacaacagttattatagtgggacagaggacgttcgaatatttgttggagatttaaagtaccggatgagagtttctttgcaaatttgcgaaaagtattatgataggcggttgtcgatgttgttctggaaaaatcatcctttacagcaaatacaccttattggctgcatcattggactccagttcaaatggattgggaaacaagaatacattttttttcagttggacgattgtacttcagactcttcattggtgggttatactagtgacatgagattcttaacatgtaaagttaagaaggatagcatcctatcatgggggttgaacataaccgatttgataggcttaactcttcatgtctacgggcaagcaagtttgaactatcaagagcttcaagttgaatatttaagattatgctacagtttaacggaagaaatagatcattggaaaatcacaatgaacatgcgtgagcaacttgacacgccttggtccttaagcgattttgtaattggagaattgttcacgcaagagcaagagtggacacctgagacatcacagattgaggtagtaaacccggattttgtaggtatagggtacaaaaccccagaaagtaaaagaaatgaaactactttcatcgagcaactgcaagaagaacgcttgaaggatgaattagaaattattagtccatacaatagcacagatacttcgaatagtgtgcattccttgtcatttcggtttgtatcgtcgctaaaggattttcctgaaactcactttttgaattcaggtgatcaaattgacaacggcaatgacgaacagttaaaaaaactagaatatcaaagcgctaatctacctgtgatgattcccaataggacatcagcaaagtcaaacttgatgttgatcctattaggactacaaatgaaagagatttctaattctgacctttacaaactaaaggaagtacgcagcgtagtaactagcttagcatcgtttttgtttcaacaacaaaatgttggcgtcatgaaatcttttgactctttggaaaaggaagcgtttcgagacctggttaatcgtctagtcagccagggtttgatcggattaaaagataaaacaagtgagacatttgatttgcttcctctaaaaaatctttttgaatatgctgaaaaacgtatatcagttctaatgaagctacaatgttatacaggcactgtgcaattaagtcatgttcaggaaaagctacatttgccgtacataacaacgaacggcatcgttgatgttttcaaagaatgtcttaaaaggacaaagaaacagtatcctgaggtactaaaaaattggtggattgatcttgatccgaagaatggtatggaggaccaaaacagtggaatattattacatttggaatacgcagcagcatattcataa

SEQ ID NO: 1962 - DNA, 1485 bp, Artificial Sequence
  Description of Artificial Sequence: Synthetic polynucleotide
atggataagtacggacatatagctcatcaagaaggcgatgtttgttattatattccaaggttgttcaaatacaacagttattatagtgggacagaggacgttagaatatttgttggagatttaaagtacagaatgagagtttctttgcaaatttgcgaaaagtattatgataggagattgtccatgttgttctggaaaaatcatcctttacagcaaatacaccttattggctgcatcattggactccagttcaaatggattgggaaacaagaatacattttttttcagttggacgattgtacttctgactcttctttggtgggttatactagtgacatgagattcttaacatgtaaagttaagaaggatagcatcttatcttgggggttgaacataaccgatttgataggcttaactcttcatgtctacgggcaagcaagtttgaactatcaagagcttcaagttgaatatttaagattatgctacagtttaacggaagaaatagatcattggaaaatcacaatgaacatgcgtgagcaacttgacacgccttggtccttaagcgattttgtaattggagaattgttcacgcaagagcaagagtggacacctgagacatctcagattgaggtagtaaacccggattttgtaggtatagggtacaaaaccccagaaagtaaaagaaatgaaactactttcatcgagcaattacaagaagaacgcttgaaggatgaattagaaattattagtccatacaatagcacagatacttccaatagtgtgcattccttgagttttagatttgtatcttctttgaaggattttcctgaaactcactttttgaattctggtgatcaaattgacaacggcaatgacgaacagttaaaaaaattagaatatcaaagcgctaatttacctgtgatgattcccaataggacaagtgcaaagtctaacttgatgttgatcttattaggattacaaatgaaagagatttctaattctgacctttacaaattgaaggaagtacgcagcgtagtaactagcttagcaagttttttgtttcaacaacaaaatgttggcgtcatgaaatcttttgactctttggaaaaggaagcgtttagagacttggttaatcgtttagtcagccagggtttgatcggattaaaagataaaacaagtgagacatttgatttgcttcctttgaaaaatctttttgaatatgctgaaaaacgtatatctgttttgatgaagttacaatgttatacaggcactgtgcaattaagtcatgttcaggaaaagttgcatttgccgtacataacaacgaacggcatcgttgatgttttcaaagaatgtcttaaaaggacaaagaaacagtatcctgaggtattgaaaaattggtggattgatcttgatccgaagaatggtatggaggaccaaaacagtggaatattattacatttggaatacgcagcagcatattcttga

SEQ ID NO: 1963 - DNA, 1179 bp, Saccharomyces cerevisiae
atggccttatttaacgtagaaggttggtctattaagacaaaaaccgtcgcttttgataacaagactaataagtcttcaaaagataaaaaaaaaaataatagaaaaaatggcaaacttacaagagaacagaagttgaaagaagagacagaggctgagttgaaggaacaagtggaagacattccttccgaaggatcagtagccaaagacatcccaaaaaaaaaccaagagaaaagtgatcaaaatgaaacgagcaagaaacgcaagcacgatgaagaagcccctctgatgcaagtaaaagaaaatattgaaaaacctacaaagaagcaactaacccctttacaacaaaagatgatggctaaactgactggttctagatttagatggatcaatgaacaactgtatacaattagctctgatgaagctttgaaattaataaaagaacaaccacaattatttgacgaatatcatgatggttttagatcacaagtgcaagcatggccggaaaatccagttgatgtttttgttgaccaaattcgttatagatgcatgaaacctgtgaatgctccaggtgggttaccaggtcttaaggatagtaaagaaatagttattgctgatatggggtgtggtgaagctcaattagcattagaaatcaacaattttttcaaaaattacaataagaaagcgaagaaatatttgaaaagacgccataaagtccacagttttgatttgaagaaagctaacgaaagaataactgtggcagatattagaaatgtgccgctaccagatgagtcctgtactatagtggtcttctgcctggctctaatgggtacaaatttcctcgatttcataaaagaagcttataggattttagcgccaaggggtgaattatggatcgcagaaattaaatcaaggtttagtgacggcaaaggtaatgaatttgtagacgctttgaagctgatgggattttttcacaaaaagaccttcgacgagaataagatgtttacaagattcgaatttttcaagccacctgcggagattattgaagagagaaggcagaaattggaaagaagacaaaagtttattgaagttgaaactgagaaggaagaattagaaaagaaaagacggaaaattgccgaaggaaaatggctcttgaagccctgtatttataaaagaagataa

SEQ ID NO: 1964 - DNA, 1179 bp, Artificial Sequence
  Description of Artificial Sequence: Synthetic polynucleotide
atggccttatttaacgtagaaggttggtctattaagacaaaaaccgtcgcttttgataacaagactaataagtcttctaaagataaaaaaaaaaataatagaaaaaatggcaaacttacaagagaacagaagttgaaagaagagacagaggctgagttgaaggaacaagtggaagacattccttccgaaggaagtgtagccaaagacatcccaaaaaaaaaccaagagaaaagtgatcaaaatgaaacgagcaagaaacgcaagcacgatgaagaagcccctttgatgcaagtaaaagaaaatattgaaaaacctacaaagaagcaattgacccctttacaacaaaagatgatggctaaattaactggttctagatttagatggatcaatgaacaattatatacaattagctctgatgaagctttgaaattaataaaagaacaaccacaattatttgacgaatatcatgatggttttagatctcaagtgcaagcatggccggaaaatccagttgatgtttttgttgaccaaattcgttatagatgcatgaaacctgtgaatgctccaggtgggttaccaggtcttaaggatagtaaagaaatagttattgctgatatggggtgtggtgaagctcaattagcattagaaatcaacaattttttcaaaaattacaataagaaagcgaagaaatatttgaaaagacgccataaagtccacagttttgatttgaagaaagctaacgaaagaataactgtggcagatattagaaatgtgccgttaccagatgagtcctgtactatagtggtcttctgccttgctttgatgggtacaaatttcctcgatttcataaaagaagcttataggattttagcgccaaggggtgaattatggatcgcagaaattaaatctaggtttagtgacggcaaaggtaatgaatttgtagacgctttgaagttgatgggattttttcacaaaaagaccttcgacgagaataagatgtttacaagattcgaatttttcaagccacctgcggagattattgaagagagaaggcagaaattggaaagaagacaaaagtttattgaagttgaaactgagaaggaagaattagaaaagaaaagaagaaaaattgccgaaggaaaatggctcttgaagccctgtatttataaaagaagatga

SEQ ID NO: 1965 - DNA, 600 bp, Saccharomyces cerevisiae
atggaccaggcaagaaatttctacaacacaattttaaaatcgtcgcacccgttgctactatcatttcatctggcaggtaaggcagttcccattgtattttatatcataggatcaatgtttttgaatttcacacctcaattcatcactgtcgttcttttactttcttttgacttttacttaacaaaaaacattacaggtcggaaactggtccaattacgctggtggtatgattctacagatgtgaacaaagattctaattttactttcgaatcatataagcaatatgcgccgggcccaccaataaatgccatcgattctaagttattctggtggtcgatgtatgtgacacccgtaatctggggtgtcttcgctgtgttgtgtcttttaagactgaaaatattctacctgattttggtcattgttgcaatgtgtctgaccgcctggaacacgtatggatttcgttgttgcgatagatgggagcccaatagtggacaatctgacggtcaagatactaataattggttcgctcttccttctgttccgggctttgaaaatctttcaaggctggctaatatccaatcgtttttccagagacaataa

SEQ ID NO: 1966 - DNA, 600 bp, Artificial Sequence
  Description of Artificial Sequence: Synthetic polynucleotide
atggaccaggcaagaaatttctacaacacaattttaaaaagctctcacccgttgttattatcttttcatttagcaggtaaggcagttcccattgtattttatatcataggatccatgtttttgaatttcacacctcaattcatcactgtcgttcttttactttcttttgacttttacttaacaaaaaacattacaggtagaaaattggtccaattacgctggtggtatgattctacagatgtgaacaaagattctaattttactttcgaaagttataagcaatatgcgccgggcccaccaataaatgccatcgattctaagttattctggtggtctatgtatgtgacacccgtaatctggggtgtcttcgctgtgttgtgtcttttaagattgaaaatattctacttgattttggtcattgttgcaatgtgtttgaccgcctggaacacgtatggatttcgttgttgcgatagatgggagcccaatagtggacaatctgacggtcaagatactaataattggttcgctcttccttctgttccgggctttgaaaatctttctaggttggctaatatccaaagttttttccagagacaatga

SEQ ID NO: 1967 - DNA, 1863 bp, Saccharomyces cerevisiae
atggagggctcatatctatctgcacaagaaaaccaacccataccggagcgattgatacctaggtcgaactcaacttcgaatttgtttgctttgtctagtacattctctaaactcaatgttaggaatgatgctgattacaattattcgaacccgaataagaagagacacatttatagtggcgagatagactgtaggtctgtgacagcagctagaaaatttccagtaaggtcctgttcaatgacagccgcccagcaaagaaagagaactgcgctattcacagttagggaaagaaactcttaccatgaggggttcaataatgatcaagattatgtgagccaataccagaagccacagtacactttcggagtatataaagaattaacaccttatcaactgcagcgctctaaaatgaaaagaagctttcaatttcccaatggcgaaatatacaagccaaaacttgatggaaaatgcacccacagcttgaaaaagcctgaattaaattcaagagactcttctttattcaaattcagcgagaagaaaggtcgcaatttatcaaaagattttgtggggcctcataatgggacatcagtcatacatattcctcccaatgatacaggctacggtgtaaatagcttggagctgaacacttcagttccttcaacaataaaaagttcggtttcatcaacctctccgatatctgctgttaataccctgaccagcttgccagaaagtcaaactgatgatgatgacggttatgaaaataaaactgtaactatatcttattgcttcgaaaatacggtaaatgaaaaacatggtagccatatagaaaaattggatttatcaactaaggaaaaaactaagccaacaactaattcaggcctatttgatagaaagaaaaagactattctgggcactgagaaatatagatgtataaagtcacaatcgaagttgaaactgggttctgttttgaagaaattatggcgtacttcaggaaactcgaatacaaagcatggaaaaaaggatacaaaaagaaggagaattcctatcgatgatatggttacgcattctgatggaaattctgaagctgagaatgatattgaattaatggatgcaaatctggacggcattgaatttgacgacgacgaaactctaatggatacagattcaatttttgatgatctgttgtccaaggaaaatgataaatacgatttgaggcgaaggcaattagaaatacgacaaaagctccacgagacctcgcacaacgacgatggcaaggtttcttttcgagataccgaaaagcataatgtcaatgaaggtttgatcgacaagaccataatcgaagaattttcaaagctcggtgaatatataatcgacacgagaaatcaaccaccaccaagatcgtccaagaggccttcattagatgacaatgaatctgcacgatacttctacaacatatcgacagatttgcgacagtctctgtcaggtccaataagcttaccaatgcatgttgggaacgacatggtaaataggttgagaaatgactgggagtatatcagattcgaagatagaaggaattcgctgccagattcctcatttgataaagtcgaaacacctccaaaaccaataaaaaaagatgtccggtttgcaaaagaagtatgtttagcaagcacttggtcatcgaatgcatatgagagagctaatccggaattcattatgaatcgccacagattgttgtggatgatgaaagtacatccaagcatgaatagtgccatgaatgagatcaaacttgaacttaactcttacaaaaaaaatgagatggttgtccatgagaacagcaagtgctttacacattatttaatttga

SEQ ID NO: 1968 - DNA, 1863 bp, Artificial Sequence
  Description of Artificial Sequence: Synthetic polynucleotide
atggagggctcctatttatctgcacaagaaaaccaacccataccggagagattgatacctaggtctaactctacttccaatttgtttgctttgtctagtacattctctaaactcaatgttaggaatgatgctgattacaattattccaacccgaataagaagagacacatttatagtggcgagatagactgtaggtctgtgacagcagctagaaaatttccagtaaggtcctgttccatgacagccgcccagcaaagaaagagaactgcgttattcacagttagggaaagaaactcttaccatgaggggttcaataatgatcaagattatgtgagccaataccagaagccacagtacactttcggagtatataaagaattaacaccttatcaattgcagcgctctaaaatgaaaagaagctttcaatttcccaatggcgaaatatacaagccaaaacttgatggaaaatgcacccacagcttgaaaaagcctgaattaaattctagagactcttctttattcaaattcagcgagaagaaaggtcgcaatttatccaaagattttgtggggcctcataatgggacatctgtcatacatattcctcccaatgatacaggctacggtgtaaatagcttggagttgaacacttctgttccttctacaataaaaagttctgtttcttccacctctccgatatctgctgttaataccttaaccagcttgccagaaagtcaaactgatgatgatgacggttatgaaaataaaactgtaactatatcttattgcttcgaaaatacggtaaatgaaaaacatggtagccatatagaaaaattggatttatctactaaggaaaaaactaagccaacaactaatagtggcttatttgatagaaagaaaaagactattttgggcactgagaaatatagatgtataaagtctcaatccaagttgaaattgggttctgttttgaagaaattatggcgtacttctggaaacagtaatacaaagcatggaaaaaaggatacaaaaagaaggagaattcctatcgatgatatggttacgcattctgatggaaattctgaagctgagaatgatattgaattaatggatgcaaatttggacggcattgaatttgacgacgacgaaactttaatggatacagattctatttttgatgatttattgtccaaggaaaatgataaatacgatttgaggagaaggcaattagaaataagacaaaagctccacgagacctctcacaacgacgatggcaaggtttcttttagagataccgaaaagcataatgtcaatgaaggtttgatcgacaagaccataatcgaagaattttccaagctcggtgaatatataatcgacacgagaaatcaaccaccaccaagaagttccaagaggccttctttagatgacaatgaatctgcaagatacttctacaacatatctacagatttgagacagtctttatctggtccaataagcttaccaatgcatgttgggaacgacatggtaaataggttgagaaatgactgggagtatatcagattcgaagatagaaggaattctttaccagattcctcttttgataaagtcgaaacacctccaaaaccaataaaaaaagatgtcagatttgcaaaagaagtatgtttagcaagcacttggtcctctaatgcatatgagagagctaatccggaattcattatgaatcgccacagattgttgtggatgatgaaagtacatccaagcatgaatagtgccatgaatgagatcaaacttgaacttaactcttacaaaaaaaatgagatggttgtccatgagaacagcaagtgctttacacattatttaatttga

SEQ ID NO: 1969 - DNA, 243 bp, Saccharomyces cerevisiae
atggctagagctagtgaaaaaggtgaagagaaaaagcagagcaacaaccaggttgaaaagctggttgaagcacctgtagaatttgtcagagaaggtactcaattcttggccaagtgtaagaaacctgatttgaaggaatacaccaagattgtcaaggctgttggtattggttttattgcagtcggtatcattggttacgccatcaagttgattcatattccaatcagatacgttattgtttaa

SEQ ID NO: 1970 - DNA, 243 bp, Artificial Sequence
  Description of Artificial Sequence: Synthetic polynucleotide
atggctagagctagtgaaaaaggtgaagagaaaaagcagagcaacaaccaggttgaaaagttggttgaagcacctgtagaatttgtcagagaaggtactcaattcttggccaagtgtaagaaacctgatttgaaggaatacaccaagattgtcaaggctgttggtattggttttattgcagtcggtatcattggttacgccatcaagttgattcatattccaatcagatacgttattgtttga

SEQ ID NO: 1971 - DNA, 837 bp, Saccharomyces cerevisiae
atggagacctccaactttgttaaacaattatcgtcgaacaacagaaaaaccagggtaaatgcactcgaagcgttaaagaaatatctaaccgctaaacagttcaaggagaacaaacaaatagaattcaataaactttggaagggtctttactatgcaatgtggttcagtgaccgtcctagacctcagcaacgtttagccaatgaattaggtgaattgcatggattatattttgatcctaaggacaatagcactgcagatgagttgaccacaaacgataaagcatttataaagtttagcagagggttttggaaggtcatgtgctttgaatggtttaacattgacagatataggttggataagtatcttctattgataagaagggtattattcagtcaattgaagtatttgcagtccagaaactgggacaaaaaattagtcgacgagtatattaagaaagtgttgaggtggttacctctgagtggaagtccaaaggtctacacagggattccaattcatatcgtcgatattctgctggacgaatgggaaagattgcttaaagatggagatgaagacgatgaagacgaggaaaacaaagaggaagagatgcgcaaaattgcagagagcgcaaaaaaaacgccactagccgatgttatcgcaattttccaagatatcgtggcagattacaataacagtaaggtgttgagagagaagatcaaagaagacctattcagtgacaccagacttgtttcctgggatattcttgaaggcgaaacgcaacataatgattccagtaacgaatctgaagaagaggaagaggaagagtggaagggattttga

SEQ ID NO: 1972 - DNA, 837 bp, Artificial Sequence
  Description of Artificial Sequence: Synthetic polynucleotide
atggagacctccaactttgttaaacaattatcttccaacaacagaaaaaccagggtaaatgcactcgaagcgttaaagaaatatttgaccgctaaacagttcaaggagaacaaacaaatagaattcaataaactttggaagggtctttactatgcaatgtggttcagtgaccgtcctagacctcagcaacgtttagccaatgaattaggtgaattgcatggattatattttgatcctaaggacaatagcactgcagatgagttgaccacaaacgataaagcatttataaagtttagcagagggttttggaaggtcatgtgctttgaatggtttaacattgacagatataggttggataagtatcttttattgataagaagggtattattcagtcaattgaagtatttgcagtccagaaactgggacaaaaaattagtcgacgagtatattaagaaagtgttgaggtggttacctttgagtggaagtccaaaggtctacacagggattccaattcatatcgtcgatattttattagacgaatgggaaagattgcttaaagatggagatgaagacgatgaagacgaggaaaacaaagaggaagagatgcgcaaaattgcagagagcgcaaaaaaaacgccattggccgatgttatcgcaattttccaagatatcgtggcagattacaataacagtaaggtgttgagagagaagatcaaagaagaccttttcagtgacaccagacttgtttcctgggatattcttgaaggcgaaacgcaacataatgattccagtaacgaatctgaagaagaggaagaggaagagtggaagggattttga

SEQ ID NO: 1973 - DNA, 1149 bp, Saccharomyces cerevisiae
atgaataataacagcagaaacaacgaaaatcgaagcactattaacagaaataaaaggcaactacaacaagcaaaagaaaaaaatgaaaatattcatatccccaggtatattagaaatcaaccatggtactataaggatacccccaaagaacaagaagggaagaagcccggcaatgatgatacgagcactgcagaaggaggagaaaaaagcgactacttggtgcatcataggcaaaaagcaaaagggggtgctttagatattgacaataattcagaaccaaaaattggtatgggtataaaggatgagttcaaactaatcagaccccagaagatgtccgtccgagattctcattcgctgtcattttgtaggaattgtggggaagcagggcataaggagaaagactgcatggaaaaacctcgtaagatgcagaagcttgttcccgatttaaattcacaaaaaaataatggcacagttttagtacgagctactgatgatgactgggactccagaaaagatagatggtacggttactcagggaaagaatacaatgaactgataagtaagtgggagcgtgataaaagaaataaaataaaaggaaaagacaaatcccaaactgatgaaacactatgggatacagatgaagagatagaactaatgaagttagaactttacaaggattccgtaggttcattgaagaaagatgatgctgataattctcagttgtataggacatcaacgagattgagagaagataaggctgcttacttgaacgacataaattcaacggagagtaattatgatcctaaatcaagattgtacaaaactgaaacactgggcgcagttgatgaaaaatcaaaaatgttccgcagacatttgacaggtgaaggcctaaaattaaacgaattgaaccagtttgctagatctcacgctaaggaaatgggtatacgtgatgaaattgaggataaggaaaaagtacaacatgttttagtcgccaatcctactaaatatgaatatctgaagaaaaaacgggaacaagaagaaaccaagcagcccaagattgtcagcattggagatctggaagctaggaaagtagatggtacaaagcaatctgaggaacaacggaaccacttaaaagatttatatggttaa

SEQ ID NO: 1974 - DNA, 1149 bp, Artificial Sequence
  Description of Artificial Sequence: Synthetic polynucleotide
atgaataataacagcagaaacaacgaaaatagaagcactattaacagaaataaaaggcaattacaacaagcaaaagaaaaaaatgaaaatattcatatccccaggtatattagaaatcaaccatggtactataaggatacccccaaagaacaagaagggaagaagcccggcaatgatgatacgagcactgcagaaggaggagaaaaaagcgactacttggtgcatcataggcaaaaagcaaaagggggtgctttagatattgacaataattctgaaccaaaaattggtatgggtataaaggatgagttcaaattaatcagaccccagaagatgtccgtcagagattctcattctttatctttttgtaggaattgtggggaagcagggcataaggagaaagactgcatggaaaaacctcgtaagatgcagaagcttgttcccgatttaaattctcaaaaaaataatggcacagttttagtaagagctactgatgatgactgggactccagaaaagatagatggtacggttactctgggaaagaatacaatgaattgataagtaagtgggagcgtgataaaagaaataaaataaaaggaaaagacaaatcccaaactgatgaaacattatgggatacagatgaagagatagaattgatgaagttagaactttacaaggattccgtaggttctttgaagaaagatgatgctgataattctcagttgtataggacaagtacgagattgagagaagataaggctgcttacttgaacgacataaattctacggagagtaattatgatcctaaatctagattgtacaaaactgaaacattaggcgcagttgatgaaaaatctaaaatgttccgcagacatttgacaggtgaaggcttgaaattaaacgaattgaaccagtttgctagatctcacgctaaggaaatgggtatacgtgatgaaattgaggataaggaaaaagtacaacatgttttagtcgccaatcctactaaatatgaatatttgaagaaaaaaagagaacaagaagaaaccaagcagcccaagattgtcagcattggagatttggaagctaggaaagtagatggtacaaagcaatctgaggaacaaagaaaccacttaaaagatttatatggttga

SEQ ID NO: 1975 - DNA, 2610 bp, Saccharomyces cerevisiae
atgaaatttgaagatcgcatattgaataaatcaatccctgaatggaaattctacaatattaactatgagaagttaaaagtagccataaaaaaagtaacggcttatgattatgacaatccaaatgattcgggcatggagaagttgttgaatcaatgttcagtagcctttgaccaggaatttcaaaatgttaatttatttgtttctttgaaaataaaggaaatttccactcgtattctttctgtggaatcatcaataatcgatttttcaaagggcttaaacaaaacttccagaaaccgtttcaaccttcgtaaactgaaaatcatcaacgctcatgtagacgattgtaactttgaactacaactactgtcaaggtttttgataatacaaaggattgccttgagaaagttattcaaaaaattactaaatgaatttcctcaagacagtgaaaatccattgactgcaagtgagtatgttacgtcgatcagaaactctgaaagtttacgaaatggacacgaaggcatatcatttatgaagcttgatttagatccatatcttttagaagtttcgctaattgttgatgttttacatgatttggaaaataaacttgaagatgcaactgagccagcagtggagcaaagatccctaaaccgctccgatgaatctgcccatacaagttcaagtccagaagccaacaattcttccttgccagcatctccaaggtcaattccgctactttcaaacaagaaaacttcaaaaatgattgattcttcgctagaattcgatactgccctcatagataaagcagagaatctaggaaggtttttattatcgtccgaggacatagagggactgaagttcatgctattgaatattggttttaggataattgacgatagcatcatatccacttcaaaggagattttagacactacagataatattaattctgcgggcaacaaatctataagatcagcaaagtcattcaatgacttacaacataccttatccctatctaaacagaagaacatattaccctctgctgtacaatccaatgagaagtacgtttctattagtatactagatactgtcgggaacgaaggcagtcctttactacttactgatgataatataaatcagcacccaaacatgatagtcagctctactgctgaggatacttgtatagtaatgtgccacgtgggcggcttaagaaatcatgttgtcacaaatgatctgcttctaagggatgtaaagaatattctttcggccatgaggagtggcaacgacacaaaaaatattagcgctctcataaactcactggatccatcgccaatcagtaagatcgctttggagtggattcagtcccatcgattaaaaaccattgaaccaaagctagattttaaaagaacaagattcatatcagcagacaatggagatatatacttgatagctttggatgaatctatcactattggaaatgtatctacattaccctttccaattttagaaattaaaaagcttagtcgatccagtggtctttcacagacggctattaatgaagacaataagtttaaacagttaatgaaatcagttgttacaaatgagtttcaatgcagcttaataccaccagacttaaccacatggaaaatatgtttagaattagtacactcaaatgaattgcaaaatgatttatttcaacttttactaagagatcaatataaattaaattccgatgattcgctatcacctgatgaatttttccagctgggcaaggatcgtctagaggaagagtttgacctgactgggccgataaacaactcacaaggtagtgttgacagcggcagaagagttcgaattcacaaaaaatcaaagcaatcggataatgaaactaaaaagaaacctattaggtattggaatgaatttgatgaacaagaagaggataatttagacaatgctttttacattgatactaatggaagcaggagtacaacagataacgaagaatccttacttttgagaaattctccgcctgattatgggtttattttgtttagccggaatttcatcaaccgcacatatgatttttgtgagaagttacgaaacttgattcgccatgacaagaaaacatcgccagatttgtttcaaaactctaagcatccgcattgttcatcaactaactatggttctgttgcgtcatttggttcacaatcaacttcagcgtcatatgatgacgttcaaaggtacttacagtatcaacagcaagacatagaggactcacaatctatctacgaatataggcatgacgaagttgttacatttttatacttgtctgcactgctaacatcttgcattatggcaagtgtatgtctgggaatcgttttatccttgtttcgcgggcaaagtaataatgagatagatttagaaattcaaaatattctcatagccattattatcatttccttactggtttcccttattttgatctgtgcgtgcctgttgttgttatttagtcggttcactttggcgccaatctggcattatgttggttgcttcacaatgtttttctcagttactggaacagtgtgctatggtatgattgaaattttcttttaa

SEQ ID NO: 1976 - DNA, 2610 bp, Artificial Sequence
  Description of Artificial Sequence: Synthetic polynucleotide
atgaaatttgaagatcgcatattgaataaatctatccctgaatggaaattctacaatattaactatgagaagttaaaagtagccataaaaaaagtaacggcttatgattatgacaatccaaatgattctggcatggagaagttgttgaatcaatgttctgtagcctttgaccaggaatttcaaaatgttaatttatttgtttctttgaaaataaaggaaatttccactcgtattctttctgtggaatcttctataatcgatttttccaagggcttaaacaaaacttccagaaaccgtttcaaccttcgtaaattgaaaatcatcaacgctcatgtagacgattgtaactttgaattacaattattatctaggtttttgataatacaaaggattgccttgagaaagttattcaaaaaattattgaatgaatttcctcaagacagtgaaaatccattgactgcaagtgagtatgttacgtccatcagaaactctgaaagtttaagaaatggacacgaaggcatatcctttatgaagcttgatttagatccatatcttttagaagtttctttgattgttgatgttttacatgatttggaaaataaacttgaagatgcaactgagccagcagtggagcaaagatccttgaaccgctccgatgaatctgcccatacaagtagtagtccagaagccaacaattcttccttgccagcatctccaaggtctattccgttactttccaacaagaaaacttctaaaatgattgattcttctttggaattcgatactgccctcatagataaagcagagaatttaggaaggtttttattatcttccgaggacatagagggattgaagttcatgcttttgaatattggttttaggataattgacgatagcatcatatccacttctaaggagattttagacactacagataatattaattctgcgggcaacaaatctataagaagtgcaaagagtttcaatgacttacaacataccttatccttatctaaacagaagaacatattaccctctgctgtacaatccaatgagaagtacgtttctattagtatattggatactgtcgggaacgaaggcagtcctttattacttactgatgataatataaatcagcacccaaacatgatagtcagctctactgctgaggatacttgtatagtaatgtgccacgtgggcggcttaagaaatcatgttgtcacaaatgatttacttttgagggatgtaaagaatattctttctgccatgaggagtggcaacgacacaaaaaatattagcgctctcataaactctttagatccatctccaatcagtaagatcgctttggagtggattcagtcccatagattaaaaaccattgaaccaaagttggattttaaaagaacaagattcatatctgcagacaatggagatatatacttgatagctttggatgaatctatcactattggaaatgtatctacattaccctttccaattttagaaattaaaaagcttagtagatccagtggtctttctcagacggctattaatgaagacaataagtttaaacagttaatgaaatctgttgttacaaatgagtttcaatgcagcttaataccaccagacttaaccacatggaaaatatgtttagaattagtacactctaatgaattgcaaaatgatttatttcaacttttattaagagatcaatataaattaaattccgatgattctttatctcctgatgaatttttccagttaggcaaggatcgtttagaggaagagtttgacttgactgggccgataaacaactctcaaggtagtgttgacagcggcagaagagttagaattcacaaaaaatccaagcaatctgataatgaaactaaaaagaaacctattaggtattggaatgaatttgatgaacaagaagaggataatttagacaatgctttttacattgatactaatggaagcaggagtacaacagataacgaagaatccttacttttgagaaattctccgcctgattatgggtttattttgtttagcagaaatttcatcaaccgcacatatgatttttgtgagaagttaagaaacttgattcgccatgacaagaaaacatctccagatttgtttcaaaactctaagcatccgcattgttcttctactaactatggttctgttgcgtcttttggttctcaatctactagtgcgtcttatgatgacgttcaaaggtacttacagtatcaacagcaagacatagaggactctcaatctatctacgaatataggcatgacgaagttgttacatttttatacttgtctgcattattaacatcttgcattatggcaagtgtatgtttaggaatcgttttatccttgtttcgcgggcaaagtaataatgagatagatttagaaattcaaaatattctcatagccattattatcatttccttattggtttcccttattttgatctgtgcgtgcttgttgttgttatttagtcgtttcactttggcgccaatctggcattatgttggttgcttcacaatgtttttctctgttactggaacagtgtgctatggtatgattgaaattttcttttga

SEQ ID NO: 1977 - DNA, 933 bp, Saccharomyces cerevisiae
atgatctctgaaaaggctgctaccgctttagctactatagcaacagtttgctggtgtgtccagctaattccgcaaataatatataattggaaaaaaaaggactgtacggggctgccaccactgatgatgttcctctgggttgtttccggaattccatttgccatatatttctgtgttagtaaaggtaatgtcattttacaagttcaaccacacctttttatgttcttctgttctataagtttcgtccaatcgtgttattatccaccaatcagtatggcgagatccaaaatagtaatgattgtagctgctattattgcggctgatgttggcatggaagttggctttatattatggctgaggcccctttacgagaagggtgttaaatggcccgatctgatttttggtatttctgcatctgttttgttagctgtcggactgcttccaccttactttgaactagccaaaaggaaaggtcgtgttattggcatcaactttgccttcttattcatcgattcattaggtgcttggctatctatcatcagtgttatcctaggtaatatggatattatgggtattatattatactcaatagttgctggaatggagttaggaattttcgcgtctcatttcatatggtggtgtaggtttagattcctagctaaaggcaatacttttgacgaagaaagtggccaagctcaaaaggaagaacccgatgaaaaaatcgaacaagatattagcaagagtgaccgaaatgttactaactataacctggataactgttcaatccccgacgatgcttcgagctttgcagacgattttaatatatacgatagtactgatggggggacgttatcaagagcccaaacattgcatgctgtccatggagttgtggttagaacagatcctgatcgttattcgaggctaagtgtgtaa

SEQ ID NO: 1978 - DNA, 933 bp, Artificial Sequence
  Description of Artificial Sequence: Synthetic polynucleotide
atgatctctgaaaaggctgctaccgctttagctactatagcaacagtttgctggtgtgtccagttgattccgcaaataatatataattggaaaaaaaaggactgtacggggttaccaccattaatgatgttcctctgggttgtttccggaattccatttgccatatatttctgtgttagtaaaggtaatgtcattttacaagttcaaccacacctttttatgttcttctgttctataagtttcgtccaaagctgttattatccaccaatcagtatggcgagatccaaaatagtaatgattgtagctgctattattgcggctgatgttggcatggaagttggctttatattatggttaaggcccctttacgagaagggtgttaaatggcccgatttgatttttggtatttctgcatctgttttgttagctgtcggattgcttccaccttactttgaattggccaaaaggaaaggtcgtgttattggcatcaactttgccttcttattcatcgattctttaggtgcttggttatctatcatcagtgttatcttgggtaatatggatattatgggtattatattatactctatagttgctggaatggagttaggaattttcgcgtctcatttcatatggtggtgtaggtttagattcttggctaaaggcaatacttttgacgaagaaagtggccaagctcaaaaggaagaacccgatgaaaaaatcgaacaagatattagcaagagtgacagaaatgttactaactataaccttgataactgttctatccccgacgatgcttctagctttgcagacgattttaatatatacgatagtactgatggggggacgttatctagagcccaaacattgcatgctgtccatggagttgtggttagaacagatcctgatcgttattctaggttgagtgtgtga

SEQ ID NO: 1979 - DNA, 1827 bp, Saccharomyces cerevisiae
atgagtgataaaaacagtcgtatcgctatcgttagcgctgataaatgtaaaccaaaaaagtgtcgtcaagagtgtaaacgttcgtgtcccgttgtgaaaactggtaaattatgtattgaagtcactccaacttcaaaaatcgcattcatttccgaaatcttgtgtattggttgtggtatttgcgttaagaaatgtccatttgatgctattcaaattatcaatttgccaactaatttagaagcccatgtaactcaccgttactctgccaatagtttcaaactgcacagattgccaacaccaagaccgggtcaagtccttggtttagtcggtaccaacggtattggtaagtctaccgccttgaaaatcttagccggtaaacaaaaacctaatttaggtcgttttgatgatcctcctgaatggcaggaaattattaaatatttccgtggttctgaattacaaaattacttcaccaagatgctggaagatgatatcaaggctataatcaaacctcaatatgttgataacattcctcgtgctattaaaggtccggttcaaaaagttggcgaacttttgaaattgagaatggaaaaaagtcctgaagatgtgaaacgctacatcaaaattttacagttggaaaacgttttgaaaagagatattgaaaagttatctggtggtgaactgcaaagatttgccattggtatgtcatgtgttcaagaggctgatgtttatatgttcgatgaaccttcatcttatttggatgttaagcaacgtttgaatgccgctcaaattattagatctttactagctccaactaaatacgttatttgtgttgagcacgatttgtcagttttggattatctttccgatttcgtttgtatcatatatggtgttccatctgtttacggtgttgttacattaccagcctctgtcagagaaggtatcaacatattcttggacggtcatattcctgctgaaaacctgagattcagaactgaagctttacaatttagaatagctgatgctaccgaagacttgcagaatgactctgctagtcgcgccttctcttacccaagtttgaagaaaactcaaggtgattttgttttgaatgttgaagaaggtgaattctccgattccgaaatccttgttatgatgggtgaaaacggtaccggtaagaccactttgatcaaattactagctggtgctttgaagccagatgaaggacaagatattccaaaattgaatgtttctatgaaaccacaaaaaattgcaccaaagttcccaggtactgtcagacaattgtttttcaagaaaattagaggacaattcctaaatccacagtttcagactgatgtcgttaaacctttaaggattgacgatattattgatcaagaagtccaacatttgtctggtggtgaattacaaagagtcgccatcgtcttggcattgggtatcccagcagacatatacttgattgatgagccatctgcctacttagattccgaacaacgtattatctgttctaaagttatcagaagattcatcttacataataagaaaactgcgtttattgtcgagcacgatttcatcatggctacttatcttgctgataaggtcattgtttttgaaggtattccttccaagaatgctcacgcaagagcccctgaatctttgttgactggttgtaacagatttttgaagaatttgaatgtcaccttcagaagggatccaaactccttcagaccaagaattaataagctagattcccaaatggataaagaacaaaaatcatcaggaaactactttttcttggataacaccggtatttaa

SEQ ID NO: 1980 - DNA, 1827 bp, Artificial Sequence
  Description of Artificial Sequence: Synthetic polynucleotide
atgagtgataaaaacagtcgtatcgctatcgttagcgctgataaatgtaaaccaaaaaagtgtcgtcaagagtgtaaacgttcctgtcccgttgtgaaaactggtaaattatgtattgaagtcactccaacttctaaaatcgcattcatttccgaaatcttgtgtattggttgtggtatttgcgttaagaaatgtccatttgatgctattcaaattatcaatttgccaactaatttagaagcccatgtaactcaccgttactctgccaatagtttcaaattacacagattgccaacaccaagaccgggtcaagtccttggtttagtcggtaccaacggtattggtaagtctaccgccttgaaaatcttagccggtaaacaaaaacctaatttaggtcgttttgatgatcctcctgaatggcaggaaattattaaatatttccgtggttctgaattacaaaattacttcaccaagatgttggaagatgatatcaaggctataatcaaacctcaatatgttgataacattcctcgtgctattaaaggtccggttcaaaaagttggcgaacttttgaaattgagaatggaaaaaagtcctgaagatgtgaaacgctacatcaaaattttacagttggaaaacgttttgaaaagagatattgaaaagttatctggtggtgaattacaaagatttgccattggtatgtcctgtgttcaagaggctgatgtttatatgttcgatgaaccttcttcttatttggatgttaagcaacgtttgaatgccgctcaaattattagatctttattagctccaactaaatacgttatttgtgttgagcacgatttgagtgttttggattatctttccgatttcgtttgtatcatatatggtgttccatctgtttacggtgttgttacattaccagcctctgtcagagaaggtatcaacatattcttggacggtcatattcctgctgaaaacttgagattcagaactgaagctttacaatttagaatagctgatgctaccgaagacttgcagaatgactctgctagtcgcgccttctcttacccaagtttgaagaaaactcaaggtgattttgttttgaatgttgaagaaggtgaattctccgattccgaaatccttgttatgatgggtgaaaacggtaccggtaagaccactttgatcaaattattagctggtgctttgaagccagatgaaggacaagatattccaaaattgaatgtttctatgaaaccacaaaaaattgcaccaaagttcccaggtactgtcagacaattgtttttcaagaaaattagaggacaattcttgaatccacagtttcagactgatgtcgttaaacctttaaggattgacgatattattgatcaagaagtccaacatttgtctggtggtgaattacaaagagtcgccatcgtcttggcattgggtatcccagcagacatatacttgattgatgagccatctgcctacttagattccgaacaacgtattatctgttctaaagttatcagaagattcatcttacataataagaaaactgcgtttattgtcgagcacgatttcatcatggctacttatcttgctgataaggtcattgtttttgaaggtattccttccaagaatgctcacgcaagagcccctgaatctttgttgactggttgtaacagatttttgaagaatttgaatgtcaccttcagaagggatccaaactccttcagaccaagaattaataagttggattcccaaatggataaagaacaaaaatcttctggaaactactttttcttggataacaccggtatttga

SEQ ID NO: 1981 - DNA, 462 bp, Saccharomyces cerevisiae
atggcatcattacccaagagaataatcaaggaaactgagaaattagtaagtgacccagtacctggcattacagcagaaccacatgacgacaacttacgttacttccaagtaacaatcgaaggcccagaacagtcaccatatgaagacggtattttcgaattagaattatatctgcctgacgactatccaatggaagcaccgaaagtacgttttttaaccaagatatatcatcccaatattgataggttgggccgtatatgtcttgatgtgcttaaaactaattggtcacccgctttacagatcagaaccgtcctgctgtccattcaagcactgttggctagccctaatcctaatgatccgctagctaatgacgtcgctgaagattggataaagaatgagcaaggtgccaaagctaaggctcgcgaatggacgaaattgtatgcaaagaagaaacccgagtga

SEQ ID NO: 1982 - DNA, 462 bp, Artificial Sequence
  Description of Artificial Sequence: Synthetic polynucleotide
atggcatctttacccaagagaataatcaaggaaactgagaaattagtaagtgacccagtacctggcattacagcagaaccacatgacgacaacttacgttacttccaagtaacaatcgaaggcccagaacagtctccatatgaagacggtattttcgaattagaattatatttacctgacgactatccaatggaagcaccgaaagtacgttttttaaccaagatatatcatcccaatattgataggttgggccgtatatgtcttgatgtgcttaaaactaattggtcccccgctttacagatcagaaccgtcttattatccattcaagcattattggctagccctaatcctaatgatccgttagctaatgacgtcgctgaagattggataaagaatgagcaaggtgccaaagctaaggctcgcgaatggacgaaattgtatgcaaagaagaaacccgagtga

SEQ ID NO: 1983 - DNA, 4839 bp, Saccharomyces cerevisiae
atgtcaagtccctccaaacccacttctcccttcgtggatgatattgagcatgaatcgggatcagcatctaatggtctgtcgtccatgtcaccatttgacgatagttttcaatttgaaaaacccagtagtgcgcatggaaatattgaagtagcgaaaaccggcggttctgttttgaagcgacaatctaagccaatgaaagatattagcacacccgatctctcaaaagttacttttgatggaatcgatgattatagtaacgataatgatattaatgatgatgatgaactcaatggtaaaaaaaccgagatacatgaacacgaaaatgaggtggatgatgacctccattcgttccaggcaacacctatgcctaatactggaggctttgaggatgttgagttggataacaatgaaggtagcaacaatgattcccaggcagatcataagttgaaaagagtacgttttggtacaagaagaaataagtcaggtaggatagatataaataggtcaaaaacattgaaatgggccaagaagaacttccacaatgctattgatgaattcagtacaaaagaagacagtctcgaaaattcagccttgcaaaataggtctgatgagttgagaacagtttactataatttacccttgccggaggacatgcttgacgaggacggcttaccgttggcagtttacccgcgtaataaaatcaggactacgaagtatactccattaacattttttcccaagaacattcttttccaatttcataattttgccaatatttactttttaatactgttgattctaggtgcttttcaaatatttggtgtgacaaatccaggttttgcatccgttcccctaattgtcatcgtaattatcactgctattaaggatggtatcgaagattccagaaggactgtattggatttagaagttaataatacaagaacacatatcttaagcggggtgaagaatgaaaatgttgctgttgataacgtttccttatggaggcgtttcaagaaagcgaatacaagggcattgattaaaatttttgagtatttttcagaaaacctcactgctgctggtagagaaaagaagttacagaaaaaaagggaagaattacgaaggaagaggaactcgagaagctttgggccacgtgggtctctggattcaattggtagttacagaatgtctgccgactttggtcgtccctctttggattatgagaacctgaatcaaacaatgtcacaggctaacaggtataacgatggtgaaaatttagttgatcgaacgctacagccaaaccctgaatgtaggtttgccaaggattactggaaaaatgttaaagttggtgatattgttcgtgttcacaataacgatgaaattcctgctgatatgatcttattatcgacatcagatgttgatggcgcttgttatgtggaaaccaaaaatttggatggtgaaacaaatctaaaggtccgtcaatcattaaaatgtagcaagattattaagagttcaagggatattaccaggacgaagttttgggttgaaagtgaaggcccacatgccaacttgtattcttatcaaggtaatttcaaatggcaagatacacaaaatggaaacatcagaaatgagcctgtaaatatcaataacttattattgagaggttgtaccttgagaaacactaagtgggccatgggtatggttatttttactggtgacgataccaagattatgataaacgctggtgtcactccaaccaaaaaatccagaatttcaagagagttgaatttttctgtgattttgaattttgtactattgtttatcctatgtttcactgctggtattgttaacggtgtttattataaacagaaacctcgatcgagagattattttgaatttggtaccattggaggttctgcctcaactaacggttttgtttctttttgggtggcggttattctttatcagtcattggttccgatctctttatatatttctgtggaaattattaagacagcacaggctattttcatttacactgatgttttgttgtataatgccaagctagactatccatgtacaccaaagtcgtggaacatctccgatgatttgggtcaaattgagtatattttttcagataaaacaggcaccttgacacaaaatgtgatggaattcaaaaaatgtactattaacggtgtgtcttatggacgtgcctatacggaggcactagcaggcctgaggaagagacaaggtgttgatgtcgaatcggaaggtcgtcgcgaaaaggaagagatagcaaaagatagggaaacaatgatcgacgaattaagatcaatgagtgataatacacagttttgtccggaggatttaacttttgtatctaaggaaattgtggaagacttgaaaggatccagtggcgaccatcaacaaaagtgctgtgaacactttttgctggcgctcgcattatgtcattctgtccttgtggagccaaataaagatgatcctaaaaaactggacatcaaggctcaatcacctgatgagtctgccttagtttccaccgccagacaattagggtacagtttcgttggtagttcaaaaagtggattgatagtagagatccagggtgttcaaaaggagttccaagttctgaacgtacttgaattcaattcgtcgagaaaaaggatgagttgcattatcaagatccctggctctacaccaaaggatgaacctaaagcactgttaatatgtaaaggtgcggattccgttatctattcaagattagatcgcactcaaaacgacgctactttgttggaaaagacggccctccatttggaagaatatgccacagaaggtttaagaacattatgtttggctcaaagagagctcacgtggtccgagtatgaacgttgggttaagacttatgatgtggccgctgcatccgttactaatagggaggaagagttggacaaagttactgacgttattgaacgtgagcttattttgcttggtggtacggccattgaggatcgtttacaagatggtgttcctgattcgattgccctcttggccgaggccggtattaagttatgggtcctaacgggtgataaagtggaaactgccattaacattggtttttcctgcaatgttttgaacaatgatatggaattattggttgtgaaggcttccggcgaagatgtagaagaatttggtagtgaccctattcaagtggttaacaatttggtgacaaaatacttaagggaaaaatttggcatgagtggatccgaggaggagttaaaagaagctaaaagagagcatggtttgccacagggaaattttgctgtcattatcgatggcgatgcgctaaaagttgctttgaatggtgaagaaatgagacgcaagttcttgctactgtgtaagaattgtaaagctgttttgtgttgcagagtttctccagcacaaaaggctgcagtggtcaagttggtaaaaaagaccttagacgttatgaccttggccattggtgatggttcgaatgatgtagccatgattcaatcggcggacgttggtgttggtatcgcgggtgaagaaggcagacaagctgtcatgtgttctgattatgccatcgggcagttcagatatgtgacaagactggtattggtgcatggtaaatggtgttataagagactggcagagatgatcccacagtttttctacaagaacgttatttttacgctatccctgttctggtatggtatttacaataatttcgatgggtcgtatttgtttgagtatacgtacttgacattctacaatcttgcattcacatccgtacctgttattttactagcagtactcgaccaagatgtttccgacaccgtttcgatgctggtgccacagttgtaccgtgtgggtatcctaagaaaagaatggaaccaaaccaaatttctttggtacatgttggatggtgtataccaatctgtgatatgcttctttttcccctatttggcgtaccataaaaacatggttgtaactgaaaatggccttggactagaccaccgttactttgtcggtgtcttcgttacagcaattgcagtcacttcatgtaacttttacgtcttcatggaacagtatagatgggactggttctgtggcctattcatatgtctatcactggccgtgttttacggctggacgggtatatggacaagctcgtcgtcaagtaacgaattttacaagggtgcggcgcgtgtattcgcacaacctgcctattgggcagtacttttcgttggcgtgctgttctgcctactgccaagattcaccattgactgtatcagaaagatattctatccgaaagatatagagatcgttagagaaatgtggttacgcggtgattttgacctctacccacaaggctacgaccctacggaccctagcaggcccagaataaacgaaatacgtccccttacagatttcaaagagcccatttcactggacactcattttgatggtgtcagccactcacaagagaccatagtcacagaggaaataccaatgagtatactcaatggtgagcaaggctcgcgcaaggggtaccgtgtctctaccactctggaacgccgtgaccagctcagccccgttacaacaacgaacaacttgcctagaagatcaatggccagtgcccgcggaaataagctcagaacttcgctggatcgcacaagagaagagatgcttgccaaccaccaactggacacaagatactccgtggaaagagcacgtgcctcgctggatctgccgggtatcaatcatgcagagacgctgctcagccagcgcagcagggaccgttaa

SEQ ID NO: 1984 - DNA, 4839 bp, Artificial Sequence
  Description of Artificial Sequence: Synthetic polynucleotide
atgagcagtccctccaaacccacttctcccttcgtggatgatattgagcatgaatctggaagtgcatctaatggtttatcttccatgtctccatttgacgatagttttcaatttgaaaaacccagtagtgcgcatggaaatattgaagtagcgaaaaccggcggttctgttttgaagagacaatctaagccaatgaaagatattagcacacccgatctctctaaagttacttttgatggaatcgatgattatagtaacgataatgatattaatgatgatgatgaactcaatggtaaaaaaaccgagatacatgaacacgaaaatgaggtggatgatgacctccattctttccaggcaacacctatgcctaatactggaggctttgaggatgttgagttggataacaatgaaggtagcaacaatgattcccaggcagatcataagttgaaaagagtacgttttggtacaagaagaaataagtctggtaggatagatataaataggtccaaaacattgaaatgggccaagaagaacttccacaatgctattgatgaattcagtacaaaagaagacagtctcgaaaattctgccttgcaaaataggtctgatgagttgagaacagtttactataatttacccttgccggaggacatgcttgacgaggacggcttaccgttggcagtttacccgcgtaataaaatcaggactacgaagtatactccattaacattttttcccaagaacattcttttccaatttcataattttgccaatatttactttttaatattattgattttgggtgcttttcaaatatttggtgtgacaaatccaggttttgcatccgttcccttaattgtcatcgtaattatcactgctattaaggatggtatcgaagattccagaaggactgtattggatttagaagttaataatacaagaacacatatcttaagcggggtgaagaatgaaaatgttgctgttgataacgtttccttatggaggcgtttcaagaaagcgaatacaagggcattgattaaaatttttgagtatttttctgaaaacctcactgctgctggtagagaaaagaagttacagaaaaaaagggaagaattaagaaggaagaggaactctagaagctttgggccacgtgggtctttagattctattggtagttacagaatgtctgccgactttggtcgtccctctttggattatgagaacttgaatcaaacaatgtctcaggctaacaggtataacgatggtgaaaatttagttgatagaacgttgcagccaaaccctgaatgtaggtttgccaaggattactggaaaaatgttaaagttggtgatattgttcgtgttcacaataacgatgaaattcctgctgatatgatcttattatctacatctgatgttgatggcgcttgttatgtggaaaccaaaaatttggatggtgaaacaaatttgaaggtccgtcaatctttaaaatgtagcaagattattaagagttctagggatattaccaggacgaagttttgggttgaaagtgaaggcccacatgccaacttgtattcttatcaaggtaatttcaaatggcaagatacacaaaatggaaacatcagaaatgagcctgtaaatatcaataacttattattgagaggttgtaccttgagaaacactaagtgggccatgggtatggttatttttactggtgacgataccaagattatgataaacgctggtgtcactccaaccaaaaaatccagaatttctagagagttgaatttttctgtgattttgaattttgtacttttgtttatcttgtgtttcactgctggtattgttaacggtgtttattataaacagaaacctcgttccagagattattttgaatttggtaccattggaggttctgcctctactaacggttttgtttctttttgggtggcggttattctttatcagtctttggttccgatctctttatatatttctgtggaaattattaagacagcacaggctattttcatttacactgatgttttgttgtataatgccaagttggactatccatgtacaccaaagtcttggaacatctccgatgatttgggtcaaattgagtatattttttctgataaaacaggcaccttgacacaaaatgtgatggaattcaaaaaatgtactattaacggtgtgtcttatggacgtgcctatacggaggcattggcaggcttgaggaagagacaaggtgttgatgtcgaaagtgaaggtcgtcgcgaaaaggaagagatagcaaaagatagggaaacaatgatcgacgaattaagaagtatgagtgataatacacagttttgtccggaggatttaacttttgtatctaaggaaattgtggaagacttgaaaggatccagtggcgaccatcaacaaaagtgctgtgaacactttttgttagcgctcgcattatgtcattctgtccttgtggagccaaataaagatgatcctaaaaaattagacatcaaggctcaaagtcctgatgagtctgccttagtttccaccgccagacaattagggtacagtttcgttggtagttctaaaagtggattgatagtagagatccagggtgttcaaaaggagttccaagttttgaacgtacttgaattcaattcttctagaaaaaggatgagttgcattatcaagatccctggctctacaccaaaggatgaacctaaagcattattaatatgtaaaggtgcggattccgttatctattctagattagatcgcactcaaaacgacgctactttgttggaaaagacggccctccatttggaagaatatgccacagaaggtttaagaacattatgtttggctcaaagagagctcacgtggtccgagtatgaacgttgggttaagacttatgatgtggccgctgcatccgttactaatagggaggaagagttggacaaagttactgacgttattgaacgtgagcttattttgcttggtggtacggccattgaggatcgtttacaagatggtgttcctgattctattgccctcttggccgaggccggtattaagttatgggtcttgacgggtgataaagtggaaactgccattaacattggtttttcctgcaatgttttgaacaatgatatggaattattggttgtgaaggcttccggcgaagatgtagaagaatttggtagtgaccctattcaagtggttaacaatttggtgacaaaatacttaagggaaaaatttggcatgagtggatccgaggaggagttaaaagaagctaaaagagagcatggtttgccacagggaaattttgctgtcattatcgatggcgatgcgttgaaagttgctttgaatggtgaagaaatgagacgcaagttcttgttgttatgtaagaattgtaaagctgttttgtgttgcagagtttctccagcacaaaaggctgcagtggtcaagttggtaaaaaagaccttagacgttatgaccttggccattggtgatggtagtaatgatgtagccatgattcaaagtgcggacgttggtgttggtatcgcgggtgaagaaggcagacaagctgtcatgtgttctgattatgccatcgggcagttcagatatgtgacaagattggtattggtgcatggtaaatggtgttataagagattagcagagatgatcccacagtttttctacaagaacgttatttttacgttatcccttttctggtatggtatttacaataatttcgatgggtcttatttgtttgagtatacgtacttgacattctacaatcttgcattcacatccgtacctgttattttattggcagtactcgaccaagatgtttccgacaccgtttctatgttggtgccacagttgtaccgtgtgggtatcttaagaaaagaatggaaccaaaccaaatttctttggtacatgttggatggtgtataccaatctgtgatatgcttctttttcccctatttggcgtaccataaaaacatggttgtaactgaaaatggccttggattggaccaccgttactttgtcggtgtcttcgttacagcaattgcagtcacttcttgtaacttttacgtcttcatggaacagtatagatgggactggttctgtggccttttcatatgtttatctttggccgtgttttacggctggacgggtatatggacaagctcctcttccagtaacgaattttacaagggtgcggcgcgtgtattcgcacaacctgcctattgggcagtacttttcgttggcgtgcttttctgcttattaccaagattcaccattgactgtatcagaaagatattctatccgaaagatatagagatcgttagagaaatgtggttacgcggtgattttgacctctacccacaaggctacgaccctacggaccctagcaggcccagaataaacgaaatacgtccccttacagatttcaaagagcccatttctttggacactcattttgatggtgtcagccactctcaagagaccatagtcacagaggaaataccaatgagtatactcaatggtgagcaaggctctcgcaaggggtaccgtgtctctaccactttggaacgccgtgaccagctcagccccgttacaacaacgaacaacttgcctagaagaagtatggccagtgcccgcggaaataagctcagaacttctttagatcgcacaagagaagagatgcttgccaaccaccaattggacacaagatactccgtggaaagagcacgtgccagtttggatttaccgggtatcaatcatgcagagacgcttctcagccagcgcagcagggaccgttga

SEQ ID NO: 1985 - DNA, 2685 bp, Saccharomyces cerevisiae
atggaaatcaagccagttgaggttattgatggcgttccggtttttaagccgtctatgatggagtttgcaaatttccaatatttcattgatgaaattactaaattcggaatagaaaatggtattgtcaaagtcattcctcccaaagaatggctggagcttttagaaggctcacctcctgcggaaagtttaaagactatacaactagactccccgattcaacaacaagccaagcgatgggacaaacatgaaaacggtgtatttagcatcgaaaacgagtatgacaataagtcgtacaatttaacacagtggaagaacttggccgaaagtctagactctcgaataagtcaaggtgattttaatgataaaactttaaaggaaaattgccgcgtagatagtcagcaggattgttatgatttggcacagttacaaattttagaaagtgatttttggaaaaccatcgctttttcgaaacctttttatgcagtggacgaaaactcttcaattttcccctatgatttaactttatggaatttgaataatttgccagattctataaactcaagtaacagacggttacttactggtcagtctaaatgcatttttccatggcatttggacgaacagaataaatgctctataaactacttgcatttcggtgctcccaaacaatggtattccataccgtccgcaaacacagaccaatttttgaaaattttatcaaaggaaccatcaagtaataaggaaaattgtccagcttttattagacatcaaaacatcataacttctcccgatttcttgcgaaaaaataatataaaatttaatagagtggtgcagttccaacatgaattcatcattactttcccttattgcatgtactccggattcaattatggttacaattttggcgaatctattgagttcatattagatcagcaagctgtcgttagaaagcaacctttaaaatgcggctgtggaaacaagaaggaagagcgaaaatctggtccgttttcaaatttatcttatgattctaatgagtcggagcaacgaggctccattactgataatgataacgatttatttcaaaaagttcgaagttttgatgaattactaaaccattcctctcaagagttacaaaatttagaagacaataagaaccccttgttctccaatattaatatgaacagaccgcaaagtagttctcttcggtctactacccctaatggtgtaaaccagttcctgaacatgaatcaaactaccataagcagaatttcttccccgttgttatcaaggatgatggacttatcaaatattgtggaacccactttggatgatccgggttccaagttcaaaaggaaagttttaactccgcaattaccgcagatgaatattccgtctaattctagtaattttggcaccccttctctaactaatacaaactccttactatctaatataacggctacatcaaccaacccatcgacaactacaaatggcagccaaaaccacaataatgttaacgccaatggcattaacacctctgcagccgcatctatcaataataacattagcagtaccaataatagcgctaataatagtagtagtaataataacgtttccactgtgccttcttcaatgatgcattcgtccactttaaatgggacttcaggtctaggcggcgataacgatgacaatatgttagctttaagtttagcgacactggctaacagcgctactgcgtcaccaagattgacgttaccgccgctgtcgtcaccaatgaatccgaacggccacacctcatataatggcaatatgatgaacaacaacagtggtaatggtagcaacggtagcaacagctattctaacggtgtgactacggctgctgccacaactacatcagcgcctcacaatctatccatagtgtcccctaatccaacatacagtccgaatcccctatctctttatttgaccaactccaaaaatccattaaattcaggtcttgcacccttatcaccttcaacatctaacatcccatttctcaagaggaataatgtggttacattaaatatttcaagagaagcttcaaagagccctatatcttcttttgtaaatgactatagatctccgttgggtgtaagcaatccactcatgtattcttccacaatcaacgattattcaaacggtactggaattcgccaaaatagtaataatattaatcccttagatgcaggtccatctttttctcctctccacaaaaaacccaaaatactcaacggtaatgataatagcaatctggacagtaataattttgattacagtttcacgggtaacaagcaagaatctaatccatcaatcttgaacaataatactaataataatgataactatcgtacatcttcaatgaacaataacggcaacaattatcaagcgcattcttctaagttcggtgaaaatgaggtcattatgtcagatcatggtaagatttacatttgtcgggaatgtaatagacagttttcctctggtcaccatctaacaagacataaaaagtcagttcattccggtgagaaaccccattcttgcccaagatgcggtaaaagattcaagagaagagaccatgttctgcaacatttaaataaaaaaattccatgcactcaagaaatggaaaatactaaattagctgaatcatag

SEQ ID NO: 1986 - DNA, 2685 bp, Artificial Sequence
  Description of Artificial Sequence: Synthetic polynucleotide
atggaaatcaagccagttgaggttattgatggcgttccggtttttaagccgtctatgatggagtttgcaaatttccaatatttcattgatgaaattactaaattcggaatagaaaatggtattgtcaaagtcattcctcccaaagaatggttggagcttttagaaggctctcctcctgcggaaagtttaaagactatacaattggactccccgattcaacaacaagccaagagatgggacaaacatgaaaacggtgtatttagcatcgaaaacgagtatgacaataagtcctacaatttaacacagtggaagaacttggccgaaagtttggactctagaataagtcaaggtgattttaatgataaaactttaaaggaaaattgccgcgtagatagtcagcaggattgttatgatttggcacagttacaaattttagaaagtgatttttggaaaaccatcgctttttccaaacctttttatgcagtggacgaaaactcttccattttcccctatgatttaactttatggaatttgaataatttgccagattctataaacagtagtaacagaagattacttactggtcagtctaaatgcatttttccatggcatttggacgaacagaataaatgctctataaactacttgcatttcggtgctcccaaacaatggtattccataccgtccgcaaacacagaccaatttttgaaaattttatccaaggaaccatctagtaataaggaaaattgtccagcttttattagacatcaaaacatcataacttctcccgatttcttgagaaaaaataatataaaatttaatagagtggtgcagttccaacatgaattcatcattactttcccttattgcatgtactccggattcaattatggttacaattttggcgaatctattgagttcatattagatcagcaagctgtcgttagaaagcaacctttaaaatgcggctgtggaaacaagaaggaagagagaaaatctggtccgttttctaatttatcttatgattctaatgagagtgagcaaagaggctccattactgataatgataacgatttatttcaaaaagttagaagttttgatgaattattaaaccattcctctcaagagttacaaaatttagaagacaataagaaccccttgttctccaatattaatatgaacagaccgcaaagtagttctcttagatctactacccctaatggtgtaaaccagttcttgaacatgaatcaaactaccataagcagaatttcttccccgttgttatctaggatgatggacttatccaatattgtggaacccactttggatgatccgggttccaagttcaaaaggaaagttttaactccgcaattaccgcagatgaatattccgtctaattctagtaattttggcaccccttctttgactaatacaaactccttattatctaatataacggctacatctaccaacccatctacaactacaaatggcagccaaaaccacaataatgttaacgccaatggcattaacacctctgcagccgcatctatcaataataacattagcagtaccaataatagcgctaataatagtagtagtaataataacgtttccactgtgccttcttctatgatgcattcttccactttaaatgggacttctggtcttggcggcgataacgatgacaatatgttagctttaagtttagcgacattggctaacagcgctactgcgtctccaagattgacgttaccgccgttatcttctccaatgaatccgaacggccacacctcttataatggcaatatgatgaacaacaacagtggtaatggtagcaacggtagcaacagctattctaacggtgtgactacggctgctgccacaactacatctgcgcctcacaatttatccatagtgtcccctaatccaacatacagtccgaatcccttatctctttatttgaccaactccaaaaatccattaaattctggtcttgcacccttatctccttctacatctaacatcccatttctcaagaggaataatgtggttacattaaatatttctagagaagcttccaagagccctatatcttcttttgtaaatgactatagatctccgttgggtgtaagcaatccactcatgtattcttccacaatcaacgattattccaacggtactggaattcgccaaaatagtaataatattaatcccttagatgcaggtccatctttttctcctctccacaaaaaacccaaaatactcaacggtaatgataatagcaatttggacagtaataattttgattacagtttcacgggtaacaagcaagaatctaatccatccatcttgaacaataatactaataataatgataactatcgtacatcttctatgaacaataacggcaacaattatcaagcgcattcttctaagttcggtgaaaatgaggtcattatgagtgatcatggtaagatttacatttgtagagaatgtaatagacagttttcctctggtcaccatttaacaagacataaaaagtctgttcattccggtgagaaaccccattcttgcccaagatgcggtaaaagattcaagagaagagaccatgttttgcaacatttaaataaaaaaattccatgcactcaagaaatggaaaatactaaattagctgaaagttga

SEQ ID NO: 1987 - DNA, 3729 bp, Saccharomyces cerevisiae
atggccccagctacccctaaaacttctaagactgcacacttcgaaaatggctccacatcttctcaaaagaaaatgaagcaatcgagtttgttatcttttttctcaaaacaggtaccttctggcacaccgtcaaagaaggtccagaagcctactccagcgactttagaaaatacagctactgataagataacaaagaatccacaaggaggaaagacaggcaaacttttcgtagatgtagacgaagacaatgatttgacaatagctgaagaaacggtatcaactgtaaggagtgacataatgcattctcaagagccccaatctgatactatgttaaatagtaacacgacagaacctaaaagtaccactacggacgaggatttatcatcttcccaatctcgaaggaatcacaaaaggagagtgaattatgccgaaagtgatgatgatgactcagatactacattcactgctaaacggaagaagggtaaggtagttgatagtgaaagcgatgaggatgaatatttaccagataaaaatgacggcgatgaagatgacgatattgcagacgacaaagaggacatcaaaggagaattggcagaagatagtggtgatgacgatgatttaatctctctggcagaaacgacttctaagaaaaaattttcatacaacacttcgcattcttcatcgccctttacaagaaatatatcccgtgacaactcaaaaaagaaaagcaggccaaatcaggcaccaagtagatcgtacaatccttctcatagtcaaccatcagcgacttctaagtctagcaaattcaataaacaaaatgaagaacgatatcaatggttagtggatgaacgagatgctcagcgccgtcccaagagtgatccagagtacgatccaagaacactgtacatcccatcttctgcatggaacaagtttactccgtttgaaaaacaatattgggaaattaaatccaaaatgtgggattgtattgtctttttcaaaaagggtaagttctttgaattatatgaaaaggatgcattattggctaatgcattatttgacttaaagattgcaggtggaggacgcgctaatatgcaactagctgggattccagagatgtcatttgaatattgggccgctcagtttatccaaatgggatataaagttgcgaaagtggatcaaagagagtcaatgttggctaaagaaatgagggaaggttctaaaggtatcgttaaaagagaactccagtgcatattgacatcgggtacgttaactgatggagatatgttgcattcggatctggctactttttgtcttgccatcagggaagaacctggtaacttctacaatgaaactcagctagattcatcaacgatagtgcaaaagctgaatacaaaaatattcggtgcagcattcattgatactgcaactggtgagcttcaaatgctggagtttgaagatgatagtgaatgcaccaaattggacacattaatgtcgcaagtaagacctatggaagtcgtcatggagaggaataacttaagcacactagctaacaaaattgtaaaattcaattcagcacccaatgcaatttttaatgaggttaaagccggtgaagaattttatgactgcgataaaacctatgctgaaatcatatcatcagaatacttttctacggaagaagattggccagaggttttgaaatcctattatgatacgggtaaaaaagttggctttagtgcatttggtggattattgtattatttgaagtggttaaaactggataagaatttaatttcgatgaaaaatatcaaagagtacgattttgtaaaatcgcaacactccatggttttagatggtatcactttacagaacttggaaatattttccaattcgtttgatggttctgataagggtactttgttcaaattattcaacagggctattactccaatgggtaagagaatgatgaaaaagtggttaatgcatccattattacgtaagaatgatattgaaagcaggctcgatagtgttgactctttgttacaagatattacattaagagaacagctagagataacattttcaaaattgccagatttggaaagaatgttggcccgtatccatagtaggacaattaaagtgaaagattttgaaaaggtaattaccgcttttgaaacgattattgaattacaagactctttaaagaacaacgatttgaagggagatgtttcaaaatacatatcctctttccctgagggacttgtggaagctgtcaaaagctggactaatgcttttgaaagacaaaaagcaatcaatgaaaatatcattgtaccacaaaggggatttgacatagagtttgataagtcaatggatagaatacaggagctagaagacgaattgatggaaattctgatgacttataggaagcaattcaaatgttccaatatacaatataaagattccggaaaggagatatacactattgaaattcctatctctgcaactaaaaatgtcccatcaaattgggttcaaatggctgcgaacaaaacgtacaagagatactactctgatgaagtaagagctttagcaagatcgatggcggaggctaaagaaatacacaagacgttagaggaggacctaaaaaatagattatgtcaaaaatttgatgcgcattataatacaatttggatgccaaccatacaggccatctctaacatagattgtttgttggcaattacaaggacatctgaatatctaggtgctccctcttgtaggccaaccattgtagatgaggtggactcgaaaacgaatactcaattaaatggttttctgaaatttaaatcattaagacatccatgctttaacctcggcgctactacagcaaaggacttcattcctaacgacattgaattaggtaaagaacagcccagattaggattgttaacgggtgccaacgcagctggtaaatccacgatattgaggatggcatgtattgccgtaattatggcacaaatgggatgttatgttccttgtgaatctgccgttctgacgccgattgatagaatcatgactcgtttaggcgctaatgataatatcatgcaaggtaaatctactttttttgtggaattggcggaaacaaaaaaaatattagacatggctaccaataggtcattattagttgttgacgagttgggaagaggaggttcatcgagtgatggttttgcaattgcagaaagtgtgctacatcatgtcgcgacacatattcaaagtctgggtttttttgccacacattatgggacattggcatcaagtttcaagcaccatcctcaagtaagaccactgaaaatgagcattctagtcgatgaagcgactaggaacgttacatttttgtataagatgcttgaaggacaaagtgaaggctcttttggtatgcatgttgcgtcaatgtgtggcatttcaaaggaaattattgataacgcgcagattgccgctgataatttagaacatacttctaggctagtcaaagaacgtgatttagctgcaaataatttgaatggtgaagttgtctctgtgccaggtggcttacaaagtgatttcgttcgaattgcgtacggagatggactgaagaatacaaaattaggttctggtgaaggggtcttgaactatgattggaacataaaaaggaacgttttgaaaagtctatttagtataattgatgatttacaatcctaa

SEQ ID NO: 1988 - DNA, 3729 bp, Artificial Sequence
  Description of Artificial Sequence: Synthetic polynucleotide
atggccccagctacccctaaaacttctaagactgcacacttcgaaaatggctccacatcttctcaaaagaaaatgaagcaaagtagtttgttatcttttttctccaaacaggtaccttctggcacaccgtccaagaaggtccagaagcctactccagcgactttagaaaatacagctactgataagataacaaagaatccacaaggaggaaagacaggcaaacttttcgtagatgtagacgaagacaatgatttgacaatagctgaagaaacggtatccactgtaaggagtgacataatgcattctcaagagccccaatctgatactatgttaaatagtaacacgacagaacctaaaagtaccactacggacgaggatttatcttcttcccaatctagaaggaatcacaaaaggagagtgaattatgccgaaagtgatgatgatgacagtgatactacattcactgctaaaagaaagaagggtaaggtagttgatagtgaaagcgatgaggatgaatatttaccagataaaaatgacggcgatgaagatgacgatattgcagacgacaaagaggacatcaaaggagaattggcagaagatagtggtgatgacgatgatttaatctctttggcagaaacgacttctaagaaaaaattttcttacaacacttctcattcttcttctccctttacaagaaatatatcccgtgacaactccaaaaagaaaagcaggccaaatcaggcaccaagtagatcttacaatccttctcatagtcaaccatctgcgacttctaagtctagcaaattcaataaacaaaatgaagaaagatatcaatggttagtggatgaaagagatgctcagcgccgtcccaagagtgatccagagtacgatccaagaacattgtacatcccatcttctgcatggaacaagtttactccgtttgaaaaacaatattgggaaattaaatccaaaatgtgggattgtattgtctttttcaaaaagggtaagttctttgaattatatgaaaaggatgcattattggctaatgcattatttgacttaaagattgcaggtggaggacgcgctaatatgcaattggctgggattccagagatgagttttgaatattgggccgctcagtttatccaaatgggatataaagttgcgaaagtggatcaaagagagtccatgttggctaaagaaatgagggaaggttctaaaggtatcgttaaaagagaactccagtgcatattgacatctggtacgttaactgatggagatatgttgcattctgatttggctactttttgtcttgccatcagggaagaacctggtaacttctacaatgaaactcagttagattcttctacgatagtgcaaaagttgaatacaaaaatattcggtgcagcattcattgatactgcaactggtgagcttcaaatgttagagtttgaagatgatagtgaatgcaccaaattggacacattaatgtctcaagtaagacctatggaagtcgtcatggagaggaataacttaagcacattggctaacaaaattgtaaaattcaattctgcacccaatgcaatttttaatgaggttaaagccggtgaagaattttatgactgcgataaaacctatgctgaaatcatatcttctgaatacttttctacggaagaagattggccagaggttttgaaatcctattatgatacgggtaaaaaagttggctttagtgcatttggtggattattgtattatttgaagtggttaaaattggataagaatttaatttccatgaaaaatatcaaagagtacgattttgtaaaatctcaacactccatggttttagatggtatcactttacagaacttggaaatattttccaattcttttgatggttctgataagggtactttgttcaaattattcaacagggctattactccaatgggtaagagaatgatgaaaaagtggttaatgcatccattattacgtaagaatgatattgaaagcaggctcgatagtgttgactctttgttacaagatattacattaagagaacagttggagataacattttccaaattgccagatttggaaagaatgttggcccgtatccatagtaggacaattaaagtgaaagattttgaaaaggtaattaccgcttttgaaacgattattgaattacaagactctttaaagaacaacgatttgaagggagatgtttccaaatacatatcctctttccctgagggacttgtggaagctgtcaaaagctggactaatgcttttgaaagacaaaaagcaatcaatgaaaatatcattgtaccacaaaggggatttgacatagagtttgataagtctatggatagaatacaggagttagaagacgaattgatggaaattttgatgacttataggaagcaattcaaatgttccaatatacaatataaagattccggaaaggagatatacactattgaaattcctatctctgcaactaaaaatgtcccatccaattgggttcaaatggctgcgaacaaaacgtacaagagatactactctgatgaagtaagagctttagcaagaagtatggcggaggctaaagaaatacacaagacgttagaggaggacttgaaaaatagattatgtcaaaaatttgatgcgcattataatacaatttggatgccaaccatacaggccatctctaacatagattgtttgttggcaattacaaggacatctgaatatttgggtgctccctcttgtaggccaaccattgtagatgaggtggactctaaaacgaatactcaattaaatggttttttgaaatttaaatctttaagacatccatgctttaacctcggcgctactacagcaaaggacttcattcctaacgacattgaattaggtaaagaacagcccagattaggattgttaacgggtgccaacgcagctggtaaatccacgatattgaggatggcatgtattgccgtaattatggcacaaatgggatgttatgttccttgtgaatctgccgttttgacgccgattgatagaatcatgactcgtttaggcgctaatgataatatcatgcaaggtaaatctactttttttgtggaattggcggaaacaaaaaaaatattagacatggctaccaataggtctttattagttgttgacgagttgggaagaggaggttcttccagtgatggttttgcaattgcagaaagtgtgttacatcatgtcgcgacacatattcaaagtttgggtttttttgccacacattatgggacattggcaagtagtttcaagcaccatcctcaagtaagaccattgaaaatgagcattttagtcgatgaagcgactaggaacgttacatttttgtataagatgcttgaaggacaaagtgaaggctcttttggtatgcatgttgcgtccatgtgtggcatttccaaggaaattattgataacgcgcagattgccgctgataatttagaacatacttctaggttggtcaaagaacgtgatttagctgcaaataatttgaatggtgaagttgtctctgtgccaggtggcttacaaagtgatttcgttagaattgcgtacggagatggattgaagaatacaaaattaggttctggtgaaggggtcttgaactatgattggaacataaaaaggaacgttttgaaaagtttatttagtataattgatgatttacaatcctga

SEQ ID NO: 1989 - DNA, 753 bp, Saccharomyces cerevisiae
atgcctgttattgaaattaacgatcaagagcaatttacttacctaactaccactgcggccggcgacaagttaatcgtgctttatttccataccagttgggcagaaccatgcaaagcattaaagcaggtttttgaggccattagtaatgagccttccaattccaacgtctctttcttatccattgatgcggacgaaaactcggaaatttcagaactttttgaaatctcagctgttccatattttatcataattcacaaagggacaatcttaaaagaattatccggcgcggatccaaaggagtatgtgtctttattagaagactgcaagaactcagtcaattccggatcatcacaaactcatactatggaaaatgcaaacgtaaatgaggggagtcataatgatgaagacgatgacgacgaagaagaggaagaagaaactgaggagcaaataaacgctagattgactaaattggtcaatgccgcgccggtaatgttatttatgaaggggagcccctctgaacctaaatgcgggttttcgagacaacttgtgggtatcttgagagaacatcaagtaagatttggcttctttgatatattaagagacgaatctgttagacaaaacttgaaaaagttttctgaatggccaactttccctcaactttatataaatggggagtttcaaggcggtttagacattatcaaggaatccttggaggaagaccctgattttttgcagcatgctctccaatcttaa

SEQ ID NO: 1990 - DNA, 753 bp, Artificial Sequence
  Description of Artificial Sequence: Synthetic polynucleotide
atgcctgttattgaaattaacgatcaagagcaatttacttacttgactaccactgcggccggcgacaagttaatcgtgctttatttccataccagttgggcagaaccatgcaaagcattaaagcaggtttttgaggccattagtaatgagccttccaattccaacgtctctttcttatccattgatgcggacgaaaactctgaaatttctgaactttttgaaatctctgctgttccatattttatcataattcacaaagggacaatcttaaaagaattatccggcgcggatccaaaggagtatgtgtctttattagaagactgcaagaactctgtcaattccggaagttctcaaactcatactatggaaaatgcaaacgtaaatgaggggagtcataatgatgaagacgatgacgacgaagaagaggaagaagaaactgaggagcaaataaacgctagattgactaaattggtcaatgccgcgccggtaatgttatttatgaaggggagcccctctgaacctaaatgcgggttttccagacaacttgtgggtatcttgagagaacatcaagtaagatttggcttctttgatatattaagagacgaatctgttagacaaaacttgaaaaagttttctgaatggccaactttccctcaactttatataaatggggagtttcaaggcggtttagacattatcaaggaatccttggaggaagaccctgattttttgcagcatgctctccaatcttga

SEQ ID NO: 1991 - DNA, 822 bp, Saccharomyces cerevisiae
atgtcccaaactcgtgaagattctgtttacctagctaaattagctgaacaagccgaacgttatgaagaaatggtcgaaaacatgaaggccgttgcttcatcaggtcaagagttatctgtcgaagaacggaatctattgtcggttgcttacaagaacgtcatcggtgctcgccgtgcttcatggagaatagtttcttcgatcgaacaaaaagaagaatcaaaggagaaatctgaacatcaagttgaattaatccgttcttaccgttctaaaattgaaactgaattgaccaaaatctctgacgacattttatctgtgttagattctcatttaatcccttctgctactactggtgagtctaaagtattttactataagatgaagggtgactaccaccgttatttagctgaattttccagcggagatgcaagagaaaaggcaaccaactcctctttggaggcttataaaaccgcttccgaaatcgccacaactgaattgcctccaactcacccaattcgtttaggtctagctttgaatttctccgtcttctattacgaaattcaaaactctcctgataaggcttgccacttggccaaacaagcctttgatgatgctattgctgagttagatactttatctgaagaatcatacaaggatagcactttgatcatgcaattattaagggacaacttgaccttatggacctctgatatttctgaatctggtcaagaagatcaacaacaacaacaacaacagcaacagcaacagcaacaacagcaacaacaagctccagctgaacaaactcaaggtgaaccaaccaaataa

SEQ ID NO: 1992 - DNA, 822 bp, Artificial Sequence
  Description of Artificial Sequence: Synthetic polynucleotide
atgtcccaaactcgtgaagattctgtttacttggctaaattagctgaacaagccgaacgttatgaagaaatggtcgaaaacatgaaggccgttgcttcttctggtcaagagttatctgtcgaagaaagaaatttattgagtgttgcttacaagaacgtcatcggtgctcgccgtgcttcttggagaatagtttcttctatcgaacaaaaagaagaatccaaggagaaatctgaacatcaagttgaattaatccgttcttaccgttctaaaattgaaactgaattgaccaaaatctctgacgacattttatctgtgttagattctcatttaatcccttctgctactactggtgagtctaaagtattttactataagatgaagggtgactaccaccgttatttagctgaattttccagcggagatgcaagagaaaaggcaaccaactcctctttggaggcttataaaaccgcttccgaaatcgccacaactgaattgcctccaactcacccaattcgtttaggtttagctttgaatttctccgtcttctattacgaaattcaaaactctcctgataaggcttgccacttggccaaacaagcctttgatgatgctattgctgagttagatactttatctgaagaatcttacaaggatagcactttgatcatgcaattattaagggacaacttgaccttatggacctctgatatttctgaatctggtcaagaagatcaacaacaacaacaacaacagcaacagcaacagcaacaacagcaacaacaagctccagctgaacaaactcaaggtgaaccaaccaaatga

SEQ ID NO: 1993 - DNA, 432 bp, Saccharomyces cerevisiae
atgtcagttattcctccaaaattcttcaagattgcaaatatatcaattggctgcatagacattattgctgccctttcacaattgacgtatattttcaccaatttaaacgtcttcctcttggcagtttacggactggcactctccgtacctatcgtctatctggagttcaaggttccgtcaaatctttacaggtatgcttccttttactttagttttcttggaaggggtttatcttatattttactaagtctgataatcagcttcggcggtatctacaacatattggcgggaatgtttacttttattttaggggttgcctttattgtttttcatttttcccagtttgtggaagaacctgctaacttcagagcacccggctcatctttgtcaattggtgatgatgacatcgacgatgacgatgacatgatttaa

SEQ ID NO: 1994 - DNA, 432 bp, Artificial Sequence
  Description of Artificial Sequence: Synthetic polynucleotide
atgtctgttattcctccaaaattcttcaagattgcaaatatatctattggctgcatagacattattgctgccctttctcaattgacgtatattttcaccaatttaaacgtcttcctcttggcagtttacggattagcactctccgtacctatcgtctatttggagttcaaggttccgtccaatctttacaggtatgcttccttttactttagttttcttggaaggggtttatcttatattttattaagtttgataatcagcttcggcggtatctacaacatattggcgggaatgtttacttttattttaggggttgcctttattgtttttcatttttcccagtttgtggaagaacctgctaacttcagagcacccggctcttctttgtctattggtgatgatgacatcgacgatgacgatgacatgatttga

SEQ ID NO: 1995 - DNA, 1782 bp, Saccharomyces cerevisiae
atggctctagctatctcccacgaggatactcagattttgctaaaggacaaaaatattctacaggaatcggtcttgaacaaatacagaactgctggacaaatcgcacaaactgctttgaaatatgttacttctttgatcaatgattcatatcactctaagaccacacagcgccaattaaccgtgccagagctatgtttgcttaccgattcttttattttgacccggttggaacaatattataaaaacaaagttaatgaaagaggtattgccattccaaccactattgatatcgaccaaatttctggtggatggtgccccgaaatagatgatactcaaaatttgttaaactggaataaggggaaagactccacttttgcatcatctgtcactgggactttgagaccgggggatttagtcaagattacactaggtgttcatattgatggttacacctctgaagtttctcatactatggttatttaccccgttgatgaaaccaaacctattcttcaacccactgggccactactaggtggtaaagcggatgctgtagctgctgctcacattgctatggaaacagttgttgctttattagcctgtgctctgactccagaaaagcttcctgcctcactgggaggaacttcaagtggtatcacaggccaattgattagaactatagtggatactattgccagatcttataactgtggcgttgttcctggttctcgtgtaagaaggattagaagattcctggcaggccaaaacgaaggtattgttgccgaaagggaatataagggtgttgtttggacagagtcccatcaagaagcagatttgctatctaatactgatgccaaggatttaacagtggtagatcgtggacaatcgactccattcactaatgtttctgctattccaagtgatgatttcgttgttcaatcaggtgaagtgtatttaattgatttgaaaatggcatctttggagcattgtaccaaaaagggtttagtaactttagaaaccgttgactcttacacaggtaaatctcataaggctggagaattgattgcaagacccggtgcatatgttagagattttgctcaaacccatattcttaaattaaaaacttctagacaattattaactaaaatcgataaacaaggcgtttatccattcaagttatctcatttatcttctaactttcctttcgttcacgaaaatgaagaagaactccaaagcttaaagaaagatttgaaatcatttagacttgggatgagtgagatttccaacaactacttatgtgtggaaagtccaatacaaattgctagatgggttccatgggaccatattttaaaggctaccaatccaaacggtaatttaagttatgatgcaacctctacattaacattacctgggcatgagttacctttaccaaaattgggtgtttcagccatcaagcttaaatccttaatgaattcaaccaaggaatcgatttctttaccagttgctcgtgaatgtaataccatcgtattatgtgactctagtgtaagtacaacggacagacccgaattattgagattaactggtggttctaagacctgtcaaccgagctggattcactctcagcacgaattaaatccacaagattcaattgttcaagggatctttcaattagctactttggccaaggataagaggttcggtctattattaaaggaaacgcagccaatgaagcagaagagtgttgagacatcaaatggcggagttgaagaaaccatgaaaatgtag

SEQ ID NO: 1996 - DNA, 1782 bp, Artificial Sequence
  Description of Artificial Sequence: Synthetic polynucleotide
atggctttggctatctcccacgaggatactcagattttgttgaaggacaaaaatattttacaggaatctgtcttgaacaaatacagaactgctggacaaatcgcacaaactgctttgaaatatgttacttctttgatcaatgattcttatcactctaagaccacacagcgccaattaaccgtgccagagctctgtttgcttaccgattcttttattttgaccagattggaacaatattataaaaacaaagttaatgaaagaggtattgccattccaaccactattgatatcgaccaaatttctggtggatggtgccccgaaatagatgatactcaaaatttgttaaactggaataaggggaaagactccacttttgcatcttctgtcactgggactttgagaccgggggatttagtcaagattacattaggtgttcatattgatggttacacctctgaagtttctcatactatggttatttaccccgttgatgaaaccaaacctattcttcaacccactgggccattgttgggtggtaaagcggatgctgtagctgctgctcacattgctatggaaacagttgttgctttattagcctgtgctttgactccagaaaagcttcctgccagtttgggaggaacttctagtggtatcacaggccaattgattagaactatagtggatactattgccagatcttataactgtggcgttgttcctggttctcgtgtaagaaggattagaagattcttggcaggccaaaacgaaggtattgttgccgaaagggaatataagggtgttgtttggacagagtcccatcaagaagcagatttgttatctaatactgatgccaaggatttaacagtggtagatcgtggacaatctactccattcactaatgtttctgctattccaagtgatgatttcgttgttcaatctggtgaagtgtatttaattgatttgaaaatggcatctttggagcattgtaccaaaaagggtttagtaactttagaaaccgttgactcttacacaggtaaatctcataaggctggagaattgattgcaagacccggtgcatatgttagagattttgctcaaacccatattcttaaattaaaaacttctagacaattattaactaaaatcgataaacaaggcgtttatccattcaagttatctcatttatcttctaactttcctttcgttcacgaaaatgaagaagaactccaaagcttaaagaaagatttgaaaagttttagacttgggatgagtgagatttccaacaactacttatgtgtggaaagtccaatacaaattgctagatgggttccatgggaccatattttaaaggctaccaatccaaacggtaatttaagttatgatgcaacctctacattaacattacctgggcatgagttacctttaccaaaattgggtgtttctgccatcaagcttaaatccttaatgaattctaccaaggaaagtatttctttaccagttgctcgtgaatgtaataccatcgtattatgtgactctagtgtaagtacaacggacagacccgaattattgagattaactggtggttctaagacctgtcaaccgagctggattcactctcagcacgaattaaatccacaagattctattgttcaagggatctttcaattagctactttggccaaggataagaggttcggtttattattaaaggaaacgcagccaatgaagcagaagagtgttgagacaagtaatggcggagttgaagaaaccatgaaaatgtga

SEQ ID NO: 1997 - DNA, 333 bp, Saccharomyces cerevisiae
atgactctcctacttcaaaaatgtatcagagtagaactgcggaaagatccaatatttaacgcttcttcttcactcgaaatatttctgtcagttttagaatctgttatatatccctttaaaggaaacttgatacttctagattttcatcttgtcgatgttcaaacaacgtgttatcagagaaacagctctatgagaaatcagctgatgtcagtattctgtcagtcacttcgtgaatttacattgactgctctttcgtgcaattcatactgtattattatagttgcaactagatggcaaaaaattgataatgccctaaaaatgacaggccggtaa

SEQ ID NO: 1998 - DNA, 333 bp, Artificial Sequence
  Description of Artificial Sequence: Synthetic polynucleotide
atgactctcttacttcaaaaatgtatcagagtagaattaagaaaagatccaatatttaacgcttcttcttctctcgaaatatttttaagtgttttagaatctgttatatatccctttaaaggaaacttgatacttttagattttcatcttgtcgatgttcaaacaacgtgttatcagagaaacagctctatgagaaatcagttgatgtctgtattctgtcagtctcttcgtgaatttacattgactgctctttcttgcaattcttactgtattattatagttgcaactagatggcaaaaaattgataatgccttgaaaatgacaggccgttga

SEQ ID NO: 1999 - DNA, 2754 bp, Saccharomyces cerevisiae
atgatggaaactcctacagacaatatagtttccccttttcacaattttggtagctcgacacaatatagtggtaccttgtcgagaactcccaaccaaataatagagctagagaagcccagtactctatccccattgtcaagaggaaaaaaatggacggaaaagttagccaggttccaaagaagtagtgctaaaaagaaaagattctcaccttctcctatttcctcctctacattttcgttctcacccaaatctagggtcacttcttcaaactcttctggcaatgaagacggtaacctaatgaatacaccttctacggtttccactgattatttgccacaacaccctcacagaacatcgtctttgccaagacctaattccaatctctttcacgcaagtaatagtaacctatcccgagcaaatgagcccccaagggccgaaaatttatcagataatataccacccaaggtcgctccatttggctatccaatacaaagaacctctattaaaaaatcctttttgaatgcttcttgtacgttatgtgacgagcctatttctaacagaagaaagggagagaaaattatagagcttgcatgtggccacttaagtcaccaagaatgtcttattatctcttttggcaccacttcaaaggcagacgttcgtgcgctatttcctttttgtaccaaatgtaaaaaagatactaacaaagccgttcaatgcattccagaaaatgatgaactaaaggatattctaatttctgattttttgattcataagattcctgattctgagttatcaatcacacctcagtcccgctttcctccttattcaccactcttgcctccttttgggttatcctatacacctgttgaaagacaaacgatatattctcaagctccaagtctaaacccaaatctcatattggctgcaccccccaaggaaagaaaccaaattccacaaaaaaaatcaaactatacatttttacattcacccctggggcacagaagaattccgtccggagcaaactctatcttagcagacacctctgtagcgttgtcagctaatgattctatttctgctgtttccaattcggtaagagcaaaggatgacgaaaccaaaacaacgttgccgctgttaaggtcatattttattcaaattcttttgaacaatttccaggaagaattgcaggattggagaatagacggggactatggattactaaggttggtagacaaattgatgatttccaaagatggtcagagatatatacaatgctggtgtttcttatttgaagacgcatttgtaatagcagaagtggataacgatgttgatgttttggaaattagactaaagaatttagaagtatttacacctattgccaacttgagaatgactacactcgaagcttcagtactcaaatgcaccttaaataaacaacattgcgccgatttatcagatctttacattgttcagaatataaattctgacgaaagcacaactgtacagaaatggatatcaggtatattgaatcaggattttgtattcaatgaggacaatatcacttcgaccctgcctattcttcccattataaagaacttttcaaaagatgttggtaatggtaggcacgagacgagtacctttctaggtttaatcaatcctaacaaagttgttgaagttggaaatgtgcacgataatgatactgtaatcataaggaggggattcaccttaaattcaggagaatgttctaggcagagtactgtcgacagtatacaatctgttctaaccacgataagctcaattctttcccttaaacgagaaaaacctgataatttggcaataatcttacagatcgattttacgaaattgaaggaagaagacagtttaattgttgtttataacagtctaaaagctttaaccattaaatttgcgcgtttgcagttttgtttcgttgatcgaaataattatgttctggactatggatcggtattacacaagatagattcactagattccatctcaaatctcaaatcaaagagttcctcgacacaattttcacctatttggttgaaaaatactctatatcccgaaaatattcatgaacatttgggtattgttgctgtatcaaatagtaatatggaagcaaaaaaatccatactatttcaagattacagatgctttacaagttttggaagaagaaggcccaatgaattgaagattaaggtgggctatttgaacgttgactacagtgataaaattgatgaactagtcgaggccagctcctggacttttgttttagaaactctttgctacagtttcggtctaagttttgatgaacatgatgacgatgacgaagaggataatgatgattcgaccgataatgaacttgataatagttcaggatcactgtcggatgctgaatctacaactactattcatattgattctccatttgataatgaaaatgctaccgcaaatatggtgaatgacagaaaccttctcactgagggtgaacatagcaatatagaaaacttagaaactgtcgcttcttcagtacagccagctctgattcctaatattagattttcacttcattctgaggaggaaggtactaatgaaaatgaaaatgaaaatgatatgccagtattattacttagtgatatggataaaggaatcgatggcataaccagacgcagttcattctcgagtcttatagagagcggtaataacaactgtcccctccatatggattatatatag

SEQ ID NO: 2000 - DNA, 2754 bp, Artificial Sequence
  Description of Artificial Sequence: Synthetic polynucleotide
atgatggaaactcctacagacaatatagtttccccttttcacaattttggtagctctacacaatatagtggtaccttgtccagaactcccaaccaaataatagagttagagaagcccagtactttatccccattgtccagaggaaaaaaatggacggaaaagttagccaggttccaaagaagtagtgctaaaaagaaaagattcagtccttctcctatttcctcctctacattttctttctctcccaaatctagggtcacttcttccaactcttctggcaatgaagacggtaacttgatgaatacaccttctacggtttccactgattatttgccacaacaccctcacagaacatcttctttgccaagacctaattccaatctctttcacgcaagtaatagtaacctttccagagcaaatgagcccccaagggccgaaaatttaagtgataatataccacccaaggtcgctccatttggctatccaatacaaagaacctctattaaaaaatcctttttgaatgcttcttgtacgttatgtgacgagcctatttctaacagaagaaagggagagaaaattatagagcttgcatgtggccacttaagtcaccaagaatgtcttattatctcttttggcaccacttctaaggcagacgttcgtgcgttatttcctttttgtaccaaatgtaaaaaagatactaacaaagccgttcaatgcattccagaaaatgatgaattgaaggatattttaatttctgattttttgattcataagattcctgattctgagttatctatcacacctcagtcccgctttcctccttattctccactcttgcctccttttgggttatcctatacacctgttgaaagacaaacgatatattctcaagctccaagtttgaacccaaatctcatattggctgcaccccccaaggaaagaaaccaaattccacaaaaaaaaagtaactatacatttttacattctcccttagggcacagaagaattccgtccggagcaaactctatcttagcagacacctctgtagcgttgtctgctaatgattctatttctgctgtttccaattctgtaagagcaaaggatgacgaaaccaaaacaacgttgccgttgttaaggagttattttattcaaattcttttgaacaatttccaggaagaattgcaggattggagaatagacggggactatggattattgaggttggtagacaaattgatgatttccaaagatggtcagagatatatacaatgctggtgtttcttatttgaagacgcatttgtaatagcagaagtggataacgatgttgatgttttggaaattagattaaagaatttagaagtatttacacctattgccaacttgagaatgactacactcgaagcttctgtactcaaatgcaccttaaataaacaacattgcgccgatttaagtgatctttacattgttcagaatataaattctgacgaaagcacaactgtacagaaatggatatctggtatattgaatcaggattttgtattcaatgaggacaatatcacttctaccttacctattcttcccattataaagaacttttccaaagatgttggtaatggtaggcacgagacgagtacctttttaggtttaatcaatcctaacaaagttgttgaagttggaaatgtgcacgataatgatactgtaatcataaggaggggattcaccttaaattctggagaatgttctaggcagagtactgtcgacagtatacaatctgttttaaccacgataagctctattctttcccttaaaagagaaaaacctgataatttggcaataatcttacagatcgattttacgaaattgaaggaagaagacagtttaattgttgtttataacagtttgaaagctttaaccattaaatttgcgcgtttgcagttttgtttcgttgatagaaataattatgttttggactatggaagtgtattacacaagatagattctttagattccatctctaatctcaaatccaagagttcctctacacaattttctcctatttggttgaaaaatactttatatcccgaaaatattcatgaacatttgggtattgttgctgtatctaatagtaatatggaagcaaaaaaatccatattgtttcaagattacagatgctttacaagttttggaagaagaaggcccaatgaattgaagattaaggtgggctatttgaacgttgactacagtgataaaattgatgaattggtcgaggccagctcctggacttttgttttagaaactctttgctacagtttcggtttgagttttgatgaacatgatgacgatgacgaagaggataatgatgattctaccgataatgaacttgataatagtagtggatctttaagtgatgctgaatctacaactactattcatattgattctccatttgataatgaaaatgctaccgcaaatatggtgaatgacagaaaccttctcactgagggtgaacatagcaatatagaaaacttagaaactgtcgcttcttctgtacagccagctttgattcctaatattagattttcccttcattctgaggaggaaggtactaatgaaaatgaaaatgaaaatgatatgccagtattattacttagtgatatggataaaggaatcgatggcataaccagacgcagttctttctctagtcttatagagagcggtaataacaactgtcccctccatatggattatatatga

SEQ ID NO: 2001 - DNA, 3738 bp, Saccharomyces cerevisiae
atggattctatcgttaatgttgttgaagacgatgttaagtacgcgcagagagtgactagcttcagctcaccacaaaatgcaaatgtcaaggtcttcaccattccccggcattccttcacagcgtttagactgtcgtatgtttcacctacagagctttcagcatgttcacaggtgactttgctaggtggtattccaaaacaatggtacgctgatcaaaataatcaagtctggaaacttctaactaaaatttcacttcggaaggttaggaagcaatctgacatgctaagaagatatggctatggaacaatttacaaaaagcgtgtagggaagatcccaactgcattgtacttaagaaagcactttacatggtcctatgaagataatacatcaattcacaacggtcatcgtcttaaagaagcggaaatggagatgaagagaactaggtcaagtcctgtgcagaaaagtgaatataaattaagtctacccagaaggtgtaggagttcttccgatcaaaacttcatgcgacaagagcttttgaaagaaaaaaaatcagagctttctagaaacaatagtttgcctctcatcgatacggcgcaagccgtggatatccacccagttttacatgaagaagatcaagaaaatacaaataaaaggaataaatcactcctttcgaatttgaaacgaaaagatctaggggaatcaaaaagcatatccagaaaagattattcgcattttgatagaataccgagcccctcttcagccagaagtgttggagaaacagactttaattataatagagaaccttctgaagatactttgagatatcccgacagtataattgaagtaacaaatcggacaagccccgccccaaatagtattctaagtagatcaggacaatttgttaactcgaatgacctaagtgatggcttttcaacatctaatactatcaataacgtgggattaaatgcaaatgaaaagattttttttaatgctctacaaagtatggaaaaggaaaacttgatgctgtggaaaacatcccagaaatatgggacttatctcgatgaaagacgtaaaagtgcggatgcctttcaaaaaagagaaagaggttcatgcgtggacattggtaagttgcattcgagtcatcttccgtttattaatatcctacctccatggcctaccgaactgacggaggaagagagaattatacacgataggctagcctctaaacattctcatcatataagaaaacatgttcacaatgctcgaaacaaaactagctgcaaaatcaaagatagtgttggaactttcttaggtatgacaaattcactaacaaataaagcaactgtcaagaaacgcaccggtcagatccttaaaaaagaaaaaatgctagtgatggtaaaagaagctatacaaaataaagtaccacttcccaacttctctgaaaacgagtgctttgatacaagggtcagtgaacggtggaaagaatatattgttattgcaagatccacgggaagattcgatcccccgatacttttacagttctatcgtcatcgtcatatcccagaaatcgaagatatcagttccatagctacaaagtatcaccgcaacccgttggatttttttctttcaagaaattgtattgtaaaattctacagctctctagacaaaactatatccatacaaaagcctgataagcggttaggtgggtttatagacgagagtattgaaaagaaggacgaattaaaacactattcccccattaaaatttttatcttaagatgcagcagtattcgttcgtctggtagatggtacaaatttctactagaatctttggaccgacaactatttacacctgccatcaacttgaaaattccattaactgagatctcgataaaaataaacttgaatgaaattatattccaaaagctaatagatttagggaagcaggaaaaagatagattaaaaatatgttttcttcaaagaggttataaaattttccagcatcccattttacgatatttcacagttgctattttggagaaattaaaattggcgcattatgactatctgattagaaaatgggatacagaaaatcctgtactaggatgtgccctgaaaagatatgatagattggagtggattccatgtgatgaagattctctggtaactggaatttttgcattttgtcaatctcacctaatccagtacaggccaattgcgaatcgtttaagggaaacaaaatctttagaaggaaaatgtctgaaagaaccaacacctattgaaggttttttaataagattgactgacaagtatggctctgcgaggacaaattttggtaaatatagtatttcaacagcttacttcttcacgtgtgagaatttgcttttttcgatgaaagcatatagagcaaacccaccattgcctatagattcgatgattgacgacactagcacagaaatagaaaaagaagaaatttggaaacagtggaagaaaattccagaggtttacgagcaacaaccttatcccttagacacaaatgatcacatcgagtggatgaactgtcaaacgacccaaagtgaatatgattccagagatttctatgctttccattgttttcatagaaggattgatcaaatactaaaaacggacaatgtgattgacctaactgaggtgaaagatatatatcaaggaacaaggactgattacgaagcagacaaaataaaatatggggtttacaaggaagctagtgaaatcttttggcatagaaactacgagattgatgatgtttcacggtccgtaataaatatagaaacctcaaatggactcctcttgaagctgcttgctacatcagcaacagttgctgaagagtgggtcataaagctgaaacaaatgatatcctattggaaaaacaagcaaagggaagatacggagaggcttttaaaaataaggcgttcaaatgcaggtcttttgatgctaaatggagaagaggaaacaaaaattggtgagaatacattgcgctggatcgtagaacatgggcgtgcagatgagcaaacctttaatgcaaatggaatatcattaagtaggccgttaattcaaaagggacctttatatcaaaagccgcacaagcattctgttttctcgaagtactacgtcgttttgatatcaggttttattgtactgttccactgctttcatagatcaaccacaggttttgctaaggaagttttggagtatgctcattatgtaaccattccgattgacgattgctacctatactctgggaccacaacagaactagaccttctgcagagagatcgtacttttgacgaaataaactatggatcccacgctctcccacgagtttatggggacggatggcgatctgtagaagacgagagttcgcgatgctttacgctttggtttggaacaaggcgtgccctttctagcaatcgcttacagaagaaagggaatgaaaagcaatatacgcaagattatggtagacaagataataatattgacccaccttctgctccggaagctgacttgaataactctaatgttccaagtaacacagataagatccatttcactaaaaagttaggtgtgagcggcaagtcaatggttttcatggcaagatcaagacaggaaagagatctttgggtaatgtctatttactatgaacttgaaagactaagaagaactgcgtccacttcaaattcacggaatcaaactatgtaa

SEQ ID NO: 2002 - DNA, 3738 bp, Artificial Sequence
  Description of Artificial Sequence: Synthetic polynucleotide
atggattctatcgttaatgttgttgaagacgatgttaagtacgcgcagagagtgactagcttcagctctccacaaaatgcaaatgtcaaggtcttcaccattccccgtcattccttcacagcgtttagattatcttatgtttctcctacagagctttctgcatgttctcaggtgactttgttgggtggtattccaaaacaatggtacgctgatcaaaataatcaagtctggaaacttttgactaaaatttctcttagaaaggttaggaagcaatctgacatgttgagaagatatggctatggaacaatttacaaaaagcgtgtagggaagatcccaactgcattgtacttaagaaagcactttacatggtcctatgaagataatacatccattcacaacggtcatcgtcttaaagaagcggaaatggagatgaagagaactaggtctagtcctgtgcagaaaagtgaatataaattaagtttacccagaaggtgtaggagttcttccgatcaaaacttcatgagacaagagcttttgaaagaaaaaaaaagtgagctttctagaaacaatagtttgcctctcatcgatacggcgcaagccgtggatatccacccagttttacatgaagaagatcaagaaaatacaaataaaaggaataaatctctcctttctaatttgaaaagaaaagatttaggggaaagtaaaagcatatccagaaaagattattctcattttgatagaataccgagcccctcttctgccagaagtgttggagaaacagactttaattataatagagaaccttctgaagatactttgagatatcccgacagtataattgaagtaacaaatagaacaagccccgccccaaatagtattttaagtagatctggacaatttgttaacagtaatgacttgagtgatggcttttctacatctaatactatcaataacgtgggattaaatgcaaatgaaaagattttttttaatgctttacaaagtatggaaaaggaaaacttgatgttatggaaaacatcccagaaatatgggacttatctcgatgaaagacgtaaaagtgcggatgcctttcaaaaaagagaaagaggttcttgcgtggacattggtaagttgcattctagtcatcttccgtttattaatatcttacctccatggcctaccgaattgacggaggaagagagaattatacacgataggttggcctctaaacattctcatcatataagaaaacatgttcacaatgctagaaacaaaactagctgcaaaatcaaagatagtgttggaactttcttaggtatgacaaattctttaacaaataaagcaactgtcaagaaacgcaccggtcagatccttaaaaaagaaaaaatgttggtgatggtaaaagaagctatacaaaataaagtaccacttcccaacttctctgaaaacgagtgctttgatacaagggtcagtgaaagatggaaagaatatattgttattgcaagatccacgggaagattcgatcccccgatacttttacagttctatcgtcatcgtcatatcccagaaatcgaagatatcagttccatagctacaaagtatcaccgcaacccgttggatttttttctttctagaaattgtattgtaaaattctacagctctttggacaaaactatatccatacaaaagcctgataagagattaggtgggtttatagacgagagtattgaaaagaaggacgaattaaaacactattcccccattaaaatttttatcttaagatgcagcagtattcgttcttctggtagatggtacaaatttttattggaatctttggacagacaattatttacacctgccatcaacttgaaaattccattaactgagatctccataaaaataaacttgaatgaaattatattccaaaagttaatagatttagggaagcaggaaaaagatagattaaaaatatgttttcttcaaagaggttataaaattttccagcatcccattttaagatatttcacagttgctattttggagaaattaaaattggcgcattatgactatttgattagaaaatgggatacagaaaatcctgtattgggatgtgccttgaaaagatatgatagattggagtggattccatgtgatgaagattctttagtaactggaatttttgcattttgtcaatctcacttaatccagtacaggccaattgcgaatcgtttaagggaaacaaaatctttagaaggaaaatgtttgaaagaaccaacacctattgaaggttttttaataagattgactgacaagtatggctctgcgaggacaaattttggtaaatatagtatttctacagcttacttcttcacgtgtgagaatttgcttttttccatgaaagcatatagagcaaacccaccattgcctatagattctatgattgacgacactagcacagaaatagaaaaagaagaaatttggaaacagtggaagaaaattccagaggtttacgagcaacaaccttatcccttagacacaaatgatcacatcgagtggatgaactgtcaaacgacccaaagtgaatatgattccagagatttctatgctttccattgttttcatagaaggattgatcaaatattgaaaacggacaatgtgattgacttgactgaggtgaaagatatatatcaaggaacaaggactgattacgaagcagacaaaataaaatatggggtttacaaggaagctagtgaaatcttttggcatagaaactacgagattgatgatgtttctagatccgtaataaatatagaaacctctaatggactcctcttgaagcttcttgctacaagtgcaacagttgctgaagagtgggtcataaagttgaaacaaatgatatcctattggaaaaacaagcaaagggaagatacggagaggcttttaaaaataaggcgttccaatgcaggtcttttgatgttgaatggagaagaggaaacaaaaattggtgagaatacattgcgctggatcgtagaacatgggcgtgcagatgagcaaacctttaatgcaaatggaatatctttaagtaggccgttaattcaaaagggacctttatatcaaaagccgcacaagcattctgttttctccaagtactacgtcgttttgatatctggttttattgtattattccactgctttcatagatctaccacaggttttgctaaggaagttttggagtatgctcattatgtaaccattccgattgacgattgctacttgtactctgggaccacaacagaattagaccttttacagagagatcgtacttttgacgaaataaactatggatcccacgctctcccaagagtttatggggacggatggagatctgtagaagacgagagttctaggtgctttacgctttggtttggaacaaggcgtgccctttctagcaatcgcttacagaagaaagggaatgaaaagcaatatacgcaagattatggtagacaagataataatattgacccaccttctgctccggaagctgacttgaataactctaatgttccaagtaacacagataagatccatttcactaaaaagttaggtgtgagcggcaagtctatggttttcatggcaagatctagacaggaaagagatctttgggtaatgtctatttactatgaacttgaaagattgagaagaactgcgtccacttccaattccagaaatcaaactatgtga

SEQ ID NO: 2003 - DNA, 1422 bp, Saccharomyces cerevisiae
atgggtgccgtaatttctttgccagttagcatggcgggctcattcgtggcgtcctgttttggaggttgctgctcaaacttggtgactaagactgcatcttccctaggatcttcttctttagggacaagacttctgtacgccgtttggcttttacttaactcattgatatcatgggtgtcctattctgcgaacaaatcaatcctatggccagggaagacatgtactgggactggggaatgtggattttttacagttcataggttgaattttgcattgggatgcttacatttgatattggcgcttgtactaacgggcgtaaagtcgactaatgacgtaagagcagcattacagaattcgtggtggagtttaaaatttatactgtatttatgtctcattgttttgtcatttgtcatccccaatgacttttatattttcttttccaagtgggtgtcagtccctagtggagcaattttcatcctggttgggcttatattattagtagacttcgctcatgagtgggctgaaacgtgtattagtcacgttgagtcagaagatgaagattcctcattctggcaacgatttttggttttagggacaacttcaatgtataccgcatcgattatcatgactgttgttatgtatgttatgttttgtcatcaacaatgtaacatgaatcaaacagcggtaacagtcaatttaatattaactgttataacgcttgtcttatcggtgaatcctaagatccaagaggccaaccctaaaagtgggctggcccaaagtagtatggtttctgtttactgtacttatttgacaatgagtgccatgtcttccgaaccggatgacaaaatgtgtaatccgttggttagatctagtggaacccgtaagtttagtatcattttgggctctttatttacttttattgcgattgcttacaccacaactagagccgctgctaatagtgcttttcaaggcaccaatactaatggtgctatatatctcgggaatgatatcgagtacgaaggactaggtggacagacaagaaatcagttgaggtatgaagctattaaacaagctgtagaagaaggatctttaccggaaagtgccttatatgataccgcttggttagggacatcatctcctacaggcgcaatggataaccaaaatgatgatgaaaggactggaaccaagtacaattacactctgttccacgttatattctttctggcaacccagtggattgcaattttactaacaataaacgttacccaggatgatgtaggtgattttatacccgtaggaagaacatatttttattcttgggtaaaaatagttagtgcatggatatgttatgccctttacggttggacagtggtagccccagcgattatgcccgatagatttgattacgagaattactattaa

SEQ ID NO: 2004 - DNA, 1422 bp, Artificial Sequence
  Description of Artificial Sequence: Synthetic polynucleotide
atgggtgccgtaatttctttgccagttagcatggcgggcagtttcgtggcgtcctgttttggaggttgctgcagcaacttggtgactaagactgcatcttccttgggatcttcttctttagggacaagacttttatacgccgtttggcttttacttaactctttgatatcttgggtgtcctattctgcgaacaaatctatcttatggccagggaagacatgtactgggactggggaatgtggattttttacagttcataggttgaattttgcattgggatgcttacatttgatattggcgcttgtattgacgggcgtaaagtctactaatgacgtaagagcagcattacagaattcttggtggagtttaaaatttatactttatttatgtctcattgttttgagttttgtcatccccaatgacttttatattttcttttccaagtgggtgtctgtccctagtggagcaattttcatcttggttgggcttatattattagtagacttcgctcatgagtgggctgaaacgtgtattagtcacgttgagagtgaagatgaagattccagtttctggcaaagatttttggttttagggacaacttctatgtataccgcatctattatcatgactgttgttatgtatgttatgttttgtcatcaacaatgtaacatgaatcaaacagcggtaacagtcaatttaatattaactgttataacgcttgtcttatctgtgaatcctaagatccaagaggccaaccctaaaagtgggttagcccaaagtagtatggtttctgtttactgtacttatttgacaatgagtgccatgtcttccgaaccggatgacaaaatgtgtaatccgttggttagatctagtggaacccgtaagtttagtatcattttgggctctttatttacttttattgcgattgcttacaccacaactagagccgctgctaatagtgcttttcaaggcaccaatactaatggtgctatatatctcgggaatgatatcgagtacgaaggattaggtggacagacaagaaatcagttgaggtatgaagctattaaacaagctgtagaagaaggatctttaccggaaagtgccttatatgataccgcttggttagggacatcttctcctacaggcgcaatggataaccaaaatgatgatgaaaggactggaaccaagtacaattacactttattccacgttatattctttttggcaacccagtggattgcaattttattaacaataaacgttacccaggatgatgtaggtgattttatacccgtaggaagaacatatttttattcttgggtaaaaatagttagtgcatggatatgttatgccctttacggttggacagtggtagccccagcgattatgcccgatagatttgattacgagaattactattga

SEQ ID NO: 2005 - DNA, 855 bp, Saccharomyces cerevisiae
atgtcgaatactattgtgatagtctatttgggagctaacagaatcgaaattggaagaagtgctgatgcgtgtccacaagaaattatcgcctggaaaacaggtagtattaatgaaaaaaatagggaagaattgaaaaaaatatttgaacattacttccaaatttgcaacatcttgggaaatcgagaagtacaagtgttgatactagaagatatcttcatttctgtagtagagaaaagaattatttgtagcatcttgtttaaggaatttgactgcgctcacgtttcgtttgtccccagggccattgtgcactgcttatcctgtaatacaaggaatgccatagttatagatataggtaccaattatactacatgcgtacctattttcgaccttagacctttgcaacagttcataaaatactcaaaacgaggcaaaagacaggttgagtcaagaattcctctcccgggcagtctctacatgccaatattttttgacgaagaatacaactctaaaaattgtgaagtagatgaaaccccggtaataaatcttgtcaaaaatattgtagagtcacttcctatcgacttgagaaggccactgagagaaaatatcattatagtaaacattgaagaggcgtatgaaacagtaataaggaatttattcaagttaaaaatggatacgtccaaaatccagtttcctaaaaattactggcaggctggttctgcatgcgcgaaaatacttctgcactataaggggagcaacattgtaggaatagaaagagatgagttttataacaatcctcatattgctcctgattggtttgattattacttcagaactggagtgaagcgcttacaatag

SEQ ID NO: 2006 - DNA, 855 bp, Artificial Sequence
  Description of Artificial Sequence: Synthetic polynucleotide
atgagtaatactattgtgatagtctatttgggagctaacagaatcgaaattggaagaagtgctgatgcgtgtccacaagaaattatcgcctggaaaacaggtagtattaatgaaaaaaatagggaagaattgaaaaaaatatttgaacattacttccaaatttgcaacatcttgggaaatagagaagtacaagtgttgatattggaagatatcttcatttctgtagtagagaaaagaattatttgtagcatcttgtttaaggaatttgactgcgctcacgtttcttttgtccccagggccattgtgcactgcttatcctgtaatacaaggaatgccatagttatagatataggtaccaattatactacatgcgtacctattttcgaccttagacctttgcaacagttcataaaatactctaaaagaggcaaaagacaggttgagagcagaattcctctcccgggcagtctctacatgccaatattttttgacgaagaatacaactctaaaaattgtgaagtagatgaaaccccggtaataaatcttgtcaaaaatattgtagagtctcttcctatcgacttgagaaggccattgagagaaaatatcattatagtaaacattgaagaggcgtatgaaacagtaataaggaatttattcaagttaaaaatggatacgtccaaaatccagtttcctaaaaattactggcaggctggttctgcatgcgcgaaaatacttttacactataaggggagcaacattgtaggaatagaaagagatgagttttataacaatcctcatattgctcctgattggtttgattattacttcagaactggagtgaagcgcttacaatga

SEQ ID NO: 2007 - DNA, 2019 bp, Saccharomyces cerevisiae
atgaaacgaggtgtttggttgctgatttattgctatgcaactttaactaaaggattttccttgccaggcctatctcccacaacatatcactcaggcgatgaaatcccgctattggtgaaccgcttgactccatcaatttactttcagcatcaagatgaggaaggtaacgatgtttcaggcgataaagaacattttctttactcctatgattactataataagaggtttcatttttgtagaccagagcacgttgagaaacagcctgagtcgttaggttcagtcatatttggtgacagaatttacaattccccattccaattgaacatgttagaggagaaagagtgtgttgcactttgtaaaagcacgattccgggaaaagatgccaaatttatcaacacccttattaaaagtggatttttccaaaactggctcgtggatggattgccagcagcaagaaaggcttatgatagcagaacaaaaacaaactattacggcacaggatttgagttaggttttacagatgttaagcaaaccgttgacggtaaagcagttcccagtacgatggaagagcttacttcagaggcctcaaatgaggatgttatattggatgctcgactgcccaagaatgttaagcctaatttagttaaaacggtagaattaccttactttgtaaatcattttgacattgaagtggaatttcacgatcgtggaaacgataattaccgagttgttggtgtcattgtaaaccctgtatctatcgaaagatcgtcacctggcgcgtgttctacaacgggaaaacctctgatactagacgaggataaggataacgaggtttacttcacttattctgttaaatttgttgcctctgatacagtgtgggctacgagatgggataagtatctacatatttatgacccgcagatacaatggttttcattaataaatttttccgttattgttattttgttgtcatctgttgtaatgcattctctattacgggctttgaaaagcgatctcgctcgttataacgaactaaacttggataatgaattccatgaagattctggctggaaattgggccatggtgacgtatttagaaccccatctaagtcgatgctgctatccattcttgtgggatccggtatgcagttatttttgatggtcatgtgtagcattttttttgccgcagtaggtcttgtgtcgcctgtttccagaggatccctgccaactgtaatgtttgttctttatgcattatttggatttgtaggatcctacgcctcaatgggtgtctacaaattttttcgtggaccctattggaaggcgaatatgatattaacgccaatattacttcctggagcaatttttttactgattgtaataatgaacttctttttgttatttgcacattcttcaggtgtcatcccagcgagaagcctattctttatcattcttctatggtttttagtttctgttccgttgtcgtttgcgggttcaattgttgctcataagcagtgtaattgggatgagcatccaactaaaacaaaccaaatcgccagacagattccatatcaaccctggtacttgagaacagcacaagcaaccttaatcgctggaattttcagtttcggatcaatagcggttgagctgtacttcatttactccagtttatggttcaacaaaattttttatatgtttggatttttactcttttcattcttattgttgaccttgacaacctcattagttaccatcttgatcacatattactcgttatgtctagaaaactggctatggcaatggagaagttttattattggtggtttaggatgttcaatctatacgttcatccactccatactatttactaagttcaagcttggtggagttattactgtcgtgctctatctcggatattcacttattatatctgcattatgttgtgtcgtcactggagcgattggtttttttagtagtatgttttttattaggaagatatactctgccattaaagttgagtga

SEQ ID NO: 2008 - DNA, 2019 bp, Artificial Sequence
  Description of Artificial Sequence: Synthetic polynucleotide
atgaaaagaggtgtttggttgttaatttattgctatgcaactttaactaaaggattttccttgccaggcttatctcccacaacatatcactctggcgatgaaatcccgttattggtgaaccgcttgactccatctatttactttcagcatcaagatgaggaaggtaacgatgtttctggcgataaagaacattttctttactcctatgattactataataagaggtttcatttttgtagaccagagcacgttgagaaacagcctgagtctttaggttctgtcatatttggtgacagaatttacaattccccattccaattgaacatgttagaggagaaagagtgtgttgcactttgtaaaagcacgattccgggaaaagatgccaaatttatcaacacccttattaaaagtggatttttccaaaactggctcgtggatggattgccagcagcaagaaaggcttatgatagcagaacaaaaacaaactattacggcacaggatttgagttaggttttacagatgttaagcaaaccgttgacggtaaagcagttcccagtacgatggaagagcttacttccgaggcctctaatgaggatgttatattggatgctaggttacccaagaatgttaagcctaatttagttaaaacggtagaattaccttactttgtaaatcattttgacattgaagtggaatttcacgatcgtggaaacgataattacagagttgttggtgtcattgtaaaccctgtatctatcgaaagaagtagccctggcgcgtgttctacaacgggaaaacctttgatattggacgaggataaggataacgaggtttacttcacttattctgttaaatttgttgcctctgatacagtgtgggctacgagatgggataagtatttgcatatttatgacccgcagatacaatggttttctttaataaatttttccgttattgttattttgttgtcttctgttgtaatgcattctttattaagagctttgaaaagcgatctcgctcgttataacgaattgaacttggataatgaattccatgaagattctggctggaaattgggccatggtgacgtatttagaaccccatctaagtctatgttattatccattcttgtgggatccggtatgcagttatttttgatggtcatgtgtagcattttttttgccgcagtaggtcttgtgtctcctgtttccagaggatccttgccaactgtaatgtttgttctttatgcattatttggatttgtaggatcctacgcctctatgggtgtctacaaattttttcgtggaccctattggaaggcgaatatgatattaacgccaatattacttcctggagcaatttttttattgattgtaataatgaacttctttttgttatttgcacattcttctggtgtcatcccagcgagaagcttattctttatcattcttttatggtttttagtttctgttccgttgagttttgcgggttccattgttgctcataagcagtgtaattgggatgagcatccaactaaaacaaaccaaatcgccagacagattccatatcaaccctggtacttgagaacagcacaagcaaccttaatcgctggaattttcagtttcggatccatagcggttgagttatacttcatttactccagtttatggttcaacaaaattttttatatgtttggatttttactcttttctttcttattgttgaccttgacaaccagtttagttaccatcttgatcacatattactctttatgtttagaaaactggttatggcaatggagaagttttattattggtggtttaggatgttctatctatacgttcatccactccatattgtttactaagttcaagcttggtggagttattactgtcgtgctctatctcggatattctcttattatatctgcattatgttgtgtcgtcactggagcgattggtttttttagtagtatgttttttattaggaagatatactctgccattaaagttgagtga

SEQ ID NO: 2009 - DNA, 2097 bp, Saccharomyces cerevisiae
atggttttttcttatgagcactatatgaatctccttttccatttggataacagtaaagaaacggtgcctccagagattgcaaaaagaataatttcaaatgctatagctcctgtaataacagttacttcaactcctctcttcgacaaacatattcaagaaacgtacaaagtagattctctctatatgctgctgcgattctttggcggttgtgtctctgatagagatcaagccaatgaagcgaaggttggacagcatgagcatgaggtttgtgatgcaagtgactcgacggattcaattcccaaaaataaaaatttggaagtgcccaatttatcaaagaaaggtagtcgcagtaggtcgaatagtcttttccagagggattcaacgcaatctcaatatatcaggtttacaaggccattaggtgacttgatcgaaacaagagatgcaaatgatatgttattcaattaccattctttagaggtattcttagataattatttgaaattggttgcagcaaatactgatgaaatggttcctcataatcttcttaagaaatccatttatcatagtttcttttcactagcaatttcatccacaaataacttatcgccctatgaaacttttaatcaccctattctttccttgattgctttagatatatcaaatggcgaagtttatgaggatgcaagagatcttttagtcaatttcaagaatcttaatcataatactgaaaactttcctatcttcatgaatacaaatgaaatgcttccagttttcttactctgctacaatgacgattcccaagaagaattcgaaaaatgccaggcgttagctaagaaactaaagaagcagttgtttgttgagagtatcttactagcactctggaaggattcttttatttacgacgaaaattcagtcatacagttacaccaaccagtaatgtcatcgcttgaagaaattctcttcttccttcaagctccaactcaaacaacactctctctggctttgataaactcgatctatgatatgcttgattatttggtttatgatttaatgataccattcatgaaaagaaaagtgtcattctgggaagagacaattttacagccaagaaagtcgctatttaatggtgcaaagtttttcaaaaaatttatgaataaaaatcctgtcaatggtaatcaccaacataattctctaacgagagacagccagggaaatgaatacttcgcatcgtcatcttctgagtttttgatgagaaagttagcagattggtctatgatgctatccgacttcaaaactgcttattccacatacgaatcgcttatggatgacctagatgcatttccaaagtacctggcatcatgcatcgaatggtgcgcggtatcactattgatgggtgcgcagagcatagtcaccgtgaaaatgatcaaaaacgatataaatcctcttatcgaaagggcattagccacatacgaaaactgctcacgaatacaacgtggtaaaggcaaagaatcaaactctttggatgttacagagccagtgcgttcgtatgagacacgttgtatgattttggcatctgaattgtttttatctttaagcaatacgtggacatctaccccatacgctatccaatatttagaaacaattctagacgagtgcaagttgggaccttgttcacagataatggtttgggaaaggcttagtgactgctataatttgagagttgaccctagaatcaaacatagagttggagcaatgaagaaggacgctaaagacaccgaagatctccgaggtgagcataagtatagcacagatcatttcacagacgaggacatattatcggaagggttaacaagaagacgcaaggcagctttttttaggttaatagcagctaagaagtgggcagagcaaaaacaatggagacaggtttcttggtgcttaaaagatattgaaagtacctattcagagatcaaatttttgcatggtaacggtttaattttaagcaaactaaaaaatcaactcaatttaaaggacgtggattctgcaccacggccctccgaaaagaatcttacaagaacaagtgttagctttattggatga

SEQ ID NO: 2010 - DNA, 2097 bp, Artificial Sequence
  Description of Artificial Sequence: Synthetic polynucleotide
atggttttttcttatgagcactatatgaatctccttttccatttggataacagtaaagaaacggtgcctccagagattgcaaaaagaataatttctaatgctatagctcctgtaataacagttacttctactcctctcttcgacaaacatattcaagaaacgtacaaagtagattctctctatatgttacttcgtttctttggcggttgtgtctctgatagagatcaagccaatgaagcgaaggttggacagcatgagcatgaggtttgtgatgcaagtgacagtacggattctattcccaaaaataaaaatttggaagtgcccaatttatccaagaaaggtagtcgcagtaggtctaatagtcttttccagagggattctacgcaatctcaatatatcaggtttacaaggccattaggtgacttgatcgaaacaagagatgcaaatgatatgttattcaattaccattctttagaggtattcttagataattatttgaaattggttgcagcaaatactgatgaaatggttcctcataatcttcttaagaaatccatttatcatagtttcttttctttggcaatttcttccacaaataacttatctccctatgaaacttttaatcaccctattctttccttgattgctttagatatatccaatggcgaagtttatgaggatgcaagagatcttttagtcaatttcaagaatcttaatcataatactgaaaactttcctatcttcatgaatacaaatgaaatgcttccagttttcttactctgctacaatgacgattcccaagaagaattcgaaaaatgccaggcgttagctaagaaattgaagaagcagttgtttgttgagagtatcttattggcactctggaaggattcttttatttacgacgaaaattctgtcatacagttacaccaaccagtaatgtcttctcttgaagaaattctcttcttccttcaagctccaactcaaacaacactctctttggctttgataaactctatctatgatatgcttgattatttggtttatgatttaatgataccattcatgaaaagaaaagtgtctttctgggaagagacaattttacagccaagaaagtctttatttaatggtgcaaagtttttcaaaaaatttatgaataaaaatcctgtcaatggtaatcaccaacataattctttgacgagagacagccagggaaatgaatacttcgcatcttcttcttctgagtttttgatgagaaagttagcagattggtctatgatgctttccgacttcaaaactgcttattccacatacgaatctcttatggatgacttggatgcatttccaaagtacttggcatcttgcatcgaatggtgcgcggtatctttgttgatgggtgcgcagagcatagtcaccgtgaaaatgatcaaaaacgatataaatcctcttatcgaaagggcattagccacatacgaaaactgctctagaatacaacgtggtaaaggcaaagaatctaactctttggatgttacagagccagtgcgttcttatgagacacgttgtatgattttggcatctgaattgtttttatctttaagcaatacgtggacatctaccccatacgctatccaatatttagaaacaattttggacgagtgcaagttgggaccttgttctcagataatggtttgggaaaggcttagtgactgctataatttgagagttgaccctagaatcaaacatagagttggagcaatgaagaaggacgctaaagacaccgaagatctccgtggtgagcataagtatagcacagatcatttcacagacgaggacatattatctgaagggttaacaagaagacgcaaggcagctttttttaggttaatagcagctaagaagtgggcagagcaaaaacaatggagacaggtttcttggtgcttaaaagatattgaaagtacctattctgagatcaaatttttgcatggtaacggtttaattttaagcaaattgaaaaatcaactcaatttaaaggacgtggattctgcaccaagaccctccgaaaagaatcttacaagaacaagtgttagctttattggatga

SEQ ID NO: 2011 - DNA, 2148 bp, Saccharomyces cerevisiae
atgaaaagcaggaaacgccaaaacaatatgcaaaatgaaacacgggagccagcggtattgtcgtcacaggaaacctcgatttctcgcatttctccacaagatccagaagcaaaattctacgttggtgtagatgtcggaacaggctctgcaagggcatgtgttatcgatcaatctggtaacatgttgtcgctagcagaaaaacccataaaaagggaacaattgatatccaattttattactcagtcttcaagagaaatctggaatgcagtttgctattgtgttagaactgttgttgaagaatcaggagttgaccctgaaagagttcgtggaattggttttgatgcgacttgttccttagtagtcgtatccgctaccaattttgaagaaattgcagttggaccggattttaccaataatgaccagaatatcatattatggatggaccatagggcgatgaaggagactgaagaaatcaactcatctggtgataaatgtttaaaatatgtgggagggcaaatgtctgttgaaatggaaattccgaagattaagtggttgaagaacaacttagaagctggaatttttcaggattgtaagttttttgaccttccggattacttgactttcaaagccacgggaaaagagaataggtcattttgttctgctgtttgtaagcagggatttctaccagtgggtgtcgaaggttccgatataggctggtccaaagaattcttaaattcaattgggctttcagagcttacgaagaatgattttgaaagactgggtggatcgttaagggaaaaaaaaaactttctgaccgcaggtgaatgtatcagcccgttagataaaaaggctgcctgtcaattaggcttgacagagcattgtgtagtaagttcaggaattattgatgcatatgcaggctgggtagggacggtagccgccaagccggaatcagcagtaaaaggtcttgccgagaccgaaaattataaaaaggatttcaatggtgcaattggcagattggcagctgttgccggtacgtctacgtgtcatattttgttatcaaaaaaccctatatttgtccatggcgtttgggggccttatagagatgtccttgcaagaggcttttgggcggcagaaggcggccaaagctgtacaggcgttcttttagatcatttaataacgacgcatccagctttcactgagctatcccatatggctaatttggcaggtgtgtcgaaattcgaatatttaaacaaaatacttgaaaccttggtcgagaagcgcaaagtaagatctgttatttctttagctaagcacttgtttttttatggtgactatcacggtaatcgatcaccgatagcagatccgaatatgcgcgcttgtattataggacaatctatggataactcaattgaagacttagcggttatgtatttgagtgcctgtgaattcatatcacaacaaacaagacaaatcattgaagtaatgctaaaaagtgggcatgaaataaatgctattttcatgtcaggtggacagtgtcgaaatagcttgttgatgaggttgttggctgattgtactggcctgccgatagtgattcctcgatacgttgacgctgcagttgtatttggttctgccttgcttggggctgcagcaagtgaagattttgattataccagggaaaaaagaactctcaaaggccaaaaatcttctcagacaaagacggaacgttttaacgattcatattcgtcgatacaaaagttatcaatggaagatcgaaactcgacaaatggctttgtatccccacataatctacaactttcaactccaagtgcgcctgccaaaataaataactattctcttccgatttgcacacaacaaccacttgacaaaacctctgaggaaagtagtaaggatgcttcattgaccgtgggacaggagagcctaggagagggaagatataacgggacaagttttctatggaaagttatgcaagagctaacgggtaatgcaagaattgtcaatccaaatgagaaaactcatccagatagaattcttttagacacgaagtaccaaatttttctcgatatgattgaaacacagagaaaatataggcgtatggtagataaagtagaagggtcctttagtagataa

SEQ ID NO: 2012 - DNA, 2148 bp, Artificial Sequence
  Description of Artificial Sequence: Synthetic polynucleotide
atgaaaagcaggaaacgccaaaacaatatgcaaaatgaaacaagagagccagcggtattgagttctcaggaaacctctatttctcgcatttctccacaagatccagaagcaaaattctacgttggtgtagatgtcggaacaggctctgcaagggcatgtgttatcgatcaatctggtaacatgttgtccttggcagaaaaacccataaaaagggaacaattgatatccaattttattactcagtcttctagagaaatctggaatgcagtttgctattgtgttagaactgttgttgaagaatctggagttgaccctgaaagagttcgtggaattggttttgatgcgacttgttccttagtagtcgtatccgctaccaattttgaagaaattgcagttggaccggattttaccaataatgaccagaatatcatattatggatggaccatagggcgatgaaggagactgaagaaatcaactcttctggtgataaatgtttaaaatatgtgggagggcaaatgtctgttgaaatggaaattccgaagattaagtggttgaagaacaacttagaagctggaatttttcaggattgtaagttttttgaccttccggattacttgactttcaaagccacgggaaaagagaataggtctttttgttctgctgtttgtaagcagggatttttaccagtgggtgtcgaaggttccgatataggctggtccaaagaattcttaaattctattgggctttctgagcttacgaagaatgattttgaaagattaggtggatctttaagggaaaaaaaaaactttttaaccgcaggtgaatgtatcagcccgttagataaaaaggctgcctgtcaattaggcttgacagagcattgtgtagtaagtagtggaattattgatgcatatgcaggctgggtagggacggtagccgccaagccggaaagtgcagtaaaaggtcttgccgagaccgaaaattataaaaaggatttcaatggtgcaattggcagattggcagctgttgccggtacgtctacgtgtcatattttgttatccaaaaaccctatatttgtccatggcgtttgggggccttatagagatgtccttgcaagaggcttttgggcggcagaaggcggccaaagctgtacaggcgttcttttagatcatttaataacgacgcatccagctttcactgagctttcccatatggctaatttggcaggtgtgtctaaattcgaatatttaaacaaaatacttgaaaccttggtcgagaagcgcaaagtaagatctgttatttctttagctaagcacttgtttttttatggtgactatcacggtaatagatctccgatagcagatccgaatatgcgcgcttgtattataggacaatctatggataactctattgaagacttagcggttatgtatttgagtgcctgtgaattcatatctcaacaaacaagacaaatcattgaagtaatgttgaaaagtgggcatgaaataaatgctattttcatgagtggtggacagtgtaggaatagcttgttgatgaggttgttggctgattgtactggcttaccgatagtgattcctcgttacgttgacgctgcagttgtatttggttctgccttgcttggggctgcagcaagtgaagattttgattataccagggaaaaaagaactctcaaaggccaaaaatcttctcagacaaagacggaacgttttaacgattcttattcttctatacaaaagttatctatggaagatagaaactccacaaatggctttgtatccccacataatttacaactttctactccaagtgcgcctgccaaaataaataactattctcttccgatttgcacacaacaaccacttgacaaaacctctgaggaaagtagtaaggatgcttctttgaccgtgggacaggagagcttgggagagggaagatataacgggacaagttttttatggaaagttatgcaagagcttacgggtaatgcaagaattgtcaatccaaatgagaaaactcatccagatagaattcttttagacacgaagtaccaaatttttctcgatatgattgaaacacagagaaaatataggcgtatggtagataaagtagaagggtcctttagtagatga

SEQ ID NO: 2013 - DNA, 1701 bp, Saccharomyces cerevisiae
atgacgaaaccgcgttacaatgacgtgttgtttgatgatgatgactcggtaccatcagaatcagttacgaggaaatcgcagagaagaaaggcaacgtcacctggggaatcaagagagtcctcaaaagatcgtctactgatacttccctctatgggggaatcatatactgagtacgtagactcttatttgaacttagaattattggaaaggggagaaagagaaacaccaatctttcttgaatctctgacaagacaactaacgcagaaaatatatgaactaataaaaacaaaatctttaactgcagataccttgcaacaaataagtgataaatacgatggtgtagtggcagaaaacaagctgttatttttgcaaagacagtattatgttgatgatgaaggaaatgttagagatggccgaaataatgataaaatatactgtgagccaaagcatgtatacgacatggtgatggcaacacacttgatgaataagcatcttaggggtaaaacattacattcctttttattttctcattttgccaatattagtcatgccatcatcgattgggtccagcaattttgttcaaaatgtaataaaaagggcaaaattaaaccattgaaggaatataaacgtcctgacatgtacgataaactactaccaatggaaaggatacatattgaggtattcgaacccttcaatggagaagctattgagggaaaatattcttatgtccttttatgccgagactatcgctctagttttatgtggttattaccacttaagagtaccaaattcaaacatcttatcccagttgtttcctcactttttttaacatttgctagggttccaattttcgtaacatcaagcactttagataaagatgatctttatgatatttgtgaagaaattgcatcaaaatacggtctccgtattggcttgggtttgaagagttctgcgagatttcatactgggggtatactgtgcattcagtatgctctaaatagttataagaaggaatgtctagccgattggggtaagtgcctaagatatggcccttacagattcaaccgaaggagaaataagagaacgaaacgtaaacctgtgcaagtactacttagtgaagttccaggtcacaatgccaagtttgagactaagagagaaagggttatagaaaacacatattcccgtaatatgttcaagatggcaggtggaaaaggtcttatatatttggaagatgtcaatacttttgcccttgctaatgaagcggataatagctgtaacaataatggaattcttcataataacaatataggaaatgataactttgaagaagaagtgcaaaaacaatttgatctaactgaaaaaaactatatcgatgagtatgatgatttggcacatgattcttcagagggcgaatttgaacctaataccttaactcccgaagaaaagcctcctcataatgtcgatgaggaccgaatagagtccaccggcgtggcagccccaatgcagggaacagaagagcctgaaaaaggggatcaaaaagaaagtgacggtgcatcacaagtagatcaaagtgtcgaaataactagaccagaaacttcctactatcaaactctggaatcgccgtcaacaaaacgacagaaattagaccaacagggtaatggagatcaaacaagagactttggcacatcaatggaattgtaa

SEQ ID NO: 2014 - DNA, 1701 bp, Artificial Sequence
  Description of Artificial Sequence: Synthetic polynucleotide
atgacgaaaccgcgttacaatgacgtgttgtttgatgatgatgactctgtaccatctgaatctgttacgaggaaatctcagagaagaaaggcaacgtctcctggggaatctagagagtcctctaaagatcgtttattgatacttccctctatgggggaaagttatactgagtacgtagactcttatttgaacttagaattattggaaaggggagaaagagaaacaccaatctttcttgaatctttaacaagacaattaacgcagaaaatatatgaattgataaaaacaaaatctttaactgcagataccttgcaacaaataagtgataaatacgatggtgtagtggcagaaaacaagcttttatttttgcaaagacagtattatgttgatgatgaaggaaatgttagagatggcagaaataatgataaaatatactgtgagccaaagcatgtatacgacatggtgatggcaacacacttgatgaataagcatcttaggggtaaaacattacattcctttttattttctcattttgccaatattagtcatgccatcatcgattgggtccagcaattttgttctaaatgtaataaaaagggcaaaattaaaccattgaaggaatataaacgtcctgacatgtacgataaattattaccaatggaaaggatacatattgaggtattcgaacccttcaatggagaagctattgagggaaaatattcttatgtccttttatgcagagactatcgctctagttttatgtggttattaccacttaagagtaccaaattcaaacatcttatcccagttgtttcctctctttttttaacatttgctagggttccaattttcgtaacatctagcactttagataaagatgatctttatgatatttgtgaagaaattgcatccaaatacggtctccgtattggcttgggtttgaagagttctgcgagatttcatactgggggtatattgtgcattcagtatgctttgaatagttataagaaggaatgtttggccgattggggtaagtgcttgagatatggcccttacagattcaacagaaggagaaataagagaacgaaacgtaaacctgtgcaagtattgcttagtgaagttccaggtcacaatgccaagtttgagactaagagagaaagggttatagaaaacacatattcccgtaatatgttcaagatggcaggtggaaaaggtcttatatatttggaagatgtcaatacttttgcccttgctaatgaagcggataatagctgtaacaataatggaattcttcataataacaatataggaaatgataactttgaagaagaagtgcaaaaacaatttgatttgactgaaaaaaactatatcgatgagtatgatgatttggcacatgattcttctgagggcgaatttgaacctaataccttaactcccgaagaaaagcctcctcataatgtcgatgaggacaggatagagtccaccggcgtggcagccccaatgcagggaacagaagagcctgaaaaaggggatcaaaaagaaagtgacggtgcatctcaagtagatcaaagtgtcgaaataactagaccagaaacttcctactatcaaactttggaatctccgtccacaaaaagacagaaattagaccaacagggtaatggagatcaaacaagagactttggcacatctatggaattgtga

SEQ ID NO: 2015 - DNA, 1524 bp, Saccharomyces cerevisiae
atgacaatgacacaccaacaggatttgaaaggtgtgttcaccgcaaaggatttggattttaagcccgctggcaagattactaaaaaagatttgaatacaggtgtcactaaggcagaatatgctgtaagaggagctattccaaccagagctgacgagctaaaagaggaattgaaaaaaaacccagaagttttgcctttcgatgatattatcaatgcgaacattggtaatccgcagcaactggatcagaagcctttgacctttaccaggcaagtactggccatcctggagtacccggaaattttacgagtaggccataatgaactggcttctttgaacttgttttccagggacgccttggaaagagctgagcgcctcttgaatgatattggcggttctataggggcatattcgcattctcaaggtgtgccaggaataaggcaaacagttgctgacttcattactagaagagacggcggtgagcccgctacaccggaagatatttatttaaccactggcgcttcgtccgcggcaacttctttgttatctttattgtgtaaagattctcaaacaggcctgctgattccaattccgcagtatccgctttatactgcatccgcatctcttttcaatgcacaagtgctgccatactacttagatgaggagtcaaattggtctacaaacagcgacgaaattgaaaaagtagtgcaagatgctttgaaaaaacagatcagaccatctgtgctgatagttattaatccaggtaacccaaccggtgcagttctttctgaagaaaccattgccaggatctgtttgatcgctgcgaaatacggcattacaatcatttctgatgaggtctatcaagaaaacattttcaacgatgttaaatttcattcgatgaagaaagtcctaagaaaattgcagcatctttatccaggaaaattcgataacgttcagctcgcctctttacactccatttctaaaggattcatggatgagtgcggccaaagaggcggttacatggaaattattgggttttctcaagaaataagagatgctcttttcaaactcatgtctatatccatatgttctgttgtcacaggacaagctgtggttgatttaatggtcaaaccaccccagcctggagacgagtcctatgaacaagatcatgacgaaaggctgaaaatttttcatgaaatgcgtacgagagcaaacttattgtacgagacgtttaaggaactagagggtatcgaatgccaaaaacctcagggtgcaatgtatcttttccctaggcttgttttacctaagaaagctctttgtgaaagcgaacgccttggcatcgaacctgatgagttctattgcacatctttgctagaatctacaggtatttgtactgtcccagggtctgggttcggacaaagacccgggacttatcatgtgcgaacaacgtttttggctccagggactaaatggattcaagactggaaagaatttcatcaagatttcttcagcaagtatcgtaattga

SEQ ID NO: 2016 - DNA, 1524 bp, Artificial Sequence
  Description of Artificial Sequence: Synthetic polynucleotide
atgacaatgacacaccaacaggatttgaaaggtgtgttcaccgcaaaggatttggattttaagcccgctggcaagattactaaaaaagatttgaatacaggtgtcactaaggcagaatatgctgtaagaggagctattccaaccagagctgacgagttgaaagaggaattgaaaaaaaacccagaagttttgcctttcgatgatattatcaatgcgaacattggtaatccgcagcaattggatcagaagcctttgacctttaccaggcaagtattggccatcttggagtacccggaaattttaagagtaggccataatgaattggcttctttgaacttgttttccagggacgccttggaaagagctgagcgcctcttgaatgatattggcggttctataggggcatattctcattctcaaggtgtgccaggaataaggcaaacagttgctgacttcattactagaagagacggcggtgagcccgctacaccggaagatatttatttaaccactggcgcttcttccgcggcaacttctttgttatctttattgtgtaaagattctcaaacaggcttattgattccaattccgcagtatccgctttatactgcatccgcatctcttttcaatgcacaagtgttaccatactacttagatgaggagagcaattggtctacaaacagcgacgaaattgaaaaagtagtgcaagatgctttgaaaaaacagatcagaccatctgtgttgatagttattaatccaggtaacccaaccggtgcagttctttctgaagaaaccattgccaggatctgtttgatcgctgcgaaatacggcattacaatcatttctgatgaggtctatcaagaaaacattttcaacgatgttaaatttcattctatgaagaaagtcttgagaaaattgcagcatctttatccaggaaaattcgataacgttcagctcgcctctttacactccatttctaaaggattcatggatgagtgcggccaaagaggcggttacatggaaattattgggttttctcaagaaataagagatgctcttttcaaactcatgtctatatccatatgttctgttgtcacaggacaagctgtggttgatttaatggtcaaaccaccccagcctggagacgagtcctatgaacaagatcatgacgaaaggttgaaaatttttcatgaaatgcgtacgagagcaaacttattgtacgagacgtttaaggaattagagggtatcgaatgccaaaaacctcagggtgcaatgtatcttttccctaggcttgttttacctaagaaagctctttgtgaaagcgaacgccttggcatcgaacctgatgagttctattgcacatctttgttggaatctacaggtatttgtactgtcccagggtctgggttcggacaaagacccgggacttatcatgtgagaacaacgtttttggctccagggactaaatggattcaagactggaaagaatttcatcaagatttcttcagcaagtatcgtaattga

SEQ ID NO: 2017 - DNA, 1122 bp, Saccharomyces cerevisiae
atgatgccagctaacgaagataaagagaataatatcgtatatacagggaatgaaagttccggcattaactttccacagacgccggctcacttgctgaaaaggtcgcactctaatattttaaaaccacctgtaagattggaccaactcaaaagggatgcgaacagcaacaatggcaacacattaaagtacatacaaggagggaaggaggtgtcacccacaaaaaggttgcatacccatgcgcaacaacaaggaagattgcctctggcagcaaaagacaacaatagatcgaaaagctttatttttcccgaaacttctaatcagagtaaagatgcagacttaccacaactacagaatacactatctatacgcaaaaacgaccaactcaggaaactttcgcaaatttctcgcagtcgtagtagggccaaccataatgatttgttaagcaattcaagaaagttacaaaagtacggttctgtccttggttataatgctttacctaaaatgaaaagtctagttttaaaagatcttgcagattcaggtaaaaatgaagagagttccgacgatgatgaaggtaatgaagattccgagagtaaacttggcaaaaaactccaaagtgcacttttaaaacaggattcctccgacggtgaaaatgaattaaatggtggcctaggactatttaatgagcaaggtggtctgcaacaactcataaagaactccacgaagaatgagcaaaaaactaaaaacgataaaagtgataaaactgatgactatgatatcgaaatagcaccacagaggcaggagccgttaccgtatgtaccagaaggctattccccatttcaacaagatgatattgaaaagctgaagacgttcaactcaccatataagcttgacttggaagacgaagatgacaccccagataaagttgatttactcccactagaacaaattgatgaagaaggcgaaaaagatgagactgagtgcatcactcggaatcaagaagaaggtgcagcgttaccactgctgtctaagaacttcaaagaagttgccgccgtcccaaccatggagttagtgtacagcgaagaaggcctcgatcctgaagaactagaggacttagttacttag

SEQ ID NO: 2018 - DNA, 1122 bp, Artificial Sequence
  Description of Artificial Sequence: Synthetic polynucleotide
atgatgccagctaacgaagataaagagaataatatcgtatatacagggaatgaaagttccggcattaactttccacagacgccggctcacttgttgaaaaggtctcactctaatattttaaaaccacctgtaagattggaccaactcaaaagggatgcgaacagcaacaatggcaacacattaaagtacatacaaggagggaaggaggtgtctcccacaaaaaggttgcatacccatgcgcaacaacaaggaagattgcctttggcagcaaaagacaacaatagaagtaaaagctttatttttcccgaaacttctaatcagagtaaagatgcagacttaccacaattgcagaatacattatctatacgcaaaaacgaccaactcaggaaactttctcaaatttctcgcagtcgtagtagggccaaccataatgatttgttaagcaattctagaaagttacaaaagtacggttctgtccttggttataatgctttacctaaaatgaaaagtttggttttaaaagatcttgcagattctggtaaaaatgaagagagttccgacgatgatgaaggtaatgaagattccgagagtaaacttggcaaaaaactccaaagtgcacttttaaaacaggattcctccgacggtgaaaatgaattaaatggtggcttgggattatttaatgagcaaggtggtttacaacaactcataaagaactccacgaagaatgagcaaaaaactaaaaacgataaaagtgataaaactgatgactatgatatcgaaatagcaccacagaggcaggagccgttaccgtatgtaccagaaggctattccccatttcaacaagatgatattgaaaagttgaagacgttcaactctccatataagcttgacttggaagacgaagatgacaccccagataaagttgatttactcccattggaacaaattgatgaagaaggcgaaaaagatgagactgagtgcatcactagaaatcaagaagaaggtgcagcgttaccattattatctaagaacttcaaagaagttgccgccgtcccaaccatggagttagtgtacagcgaagaaggcctcgatcctgaagaattagaggacttagttacttga

SEQ ID NO: 2019 - DNA, 303 bp, Saccharomyces cerevisiae
atgaaaacattcttcttgattgaggctggcagagccttgcaaatagtggcattccgtcctgcgattactactgttctattccaacgtttctcagtgagtttctcctgtagttatttcacttgttgtacctcacagcttctacgggaaaattggcttttcaaattccttacagctttcgatcacgtgatccgagcttcaaatgacctttcgacgatgcgtttcatgattatgtatatatatgtatatatatatatctatacagtcttaaggaagcgcttaagttgttacatgttaatactttag

SEQ ID NO: 2020 - DNA, 303 bp, Artificial Sequence
  Description of Artificial Sequence: Synthetic polynucleotide
atgaaaacattcttcttgattgaggctggcagagccttgcaaatagtggcattccgtcctgcgattactactgttttgttccaacgtttctctgtgagtttctcctgtagttatttcacttgttgtacctctcagcttttgagagaaaattggcttttcaaattccttacagctttcgatcacgtgatcagagcttctaatgacctttctacgatgcgtttcatgattatgtatatatatgtatatatatatatctatacagtcttaaggaagcgcttaagttgttacatgttaatactttga

SEQ ID NO: 2021 - DNA, 318 bp, Saccharomyces cerevisiae
atgccactatttgcaaggctctgccagcctcaatcaagaagaatgttttcatctatatcttctttctctgctctatctgtgttacgcccacaaaccggtatgctcttaaacagttcaccattgaagactccgtccttcacaccgttgggatttggcttaataggtcaaagaagatggaaatcaaggggtaacacctatcaacctagtacattgaaacggaagagaacttttggtttcttggctagggccaagagcaaacagggctctaagatattgaaaaggaggaagctcaaaggtaggtggtttttgtctcattga

SEQ ID NO: 2022 - DNA, 318 bp, Artificial Sequence
  Description of Artificial Sequence: Synthetic polynucleotide
atgccattatttgcaaggctctgccagcctcaatctagaagaatgttttcttctatatcttctttctctgctttatctgtgttacgcccacaaaccggtatgctcttaaacagttctccattgaagactccgtccttcacaccgttgggatttggcttaataggtcaaagaagatggaaatctaggggtaacacctatcaacctagtacattgaaaagaaagagaacttttggtttcttggctagggccaagagcaaacagggctctaagatattgaaaaggaggaagctcaaaggtaggtggtttttgtctcattga

SEQ ID NO: 2023 - DNA, 858 bp, Saccharomyces cerevisiae
atgctatccgtagtagcgatcccgaaaatatgtgtcacaggtcctgcaagaagatgcttttttcatactgcaaaaaaactatacgcagatgactataaaccagcagctatgtcctccaatgcaccttcgctaacaaaagaccaagccaaaaaaagagagttgaaaagattggtacaacgaaaggccgaggcaaagagaccagctacagcaagcccattgtacatgcctgttacaaaggcactaagatatttacgcgcagcagaagttggcagaccgcaatcgcaacagacaattaatttgactacattggtagtcggtgaaagaggtacagcgcctttatccggtagcgtgacatttcctaagcctttgagatatatcaaaattgctgcctttaccaacgacgaaagtaaattggaagagcttcgtgagaaatacccaaatcatttgattggcggagcagatcttgttgccaaaattaaaagcggtgaaattagcgttgattttgacaaagcatttgcaactcctgatattgttccagctttacaatcgcaggtggccaggatacttggtcctcgtggggttttaccctctgtcaaaaaaggtacggtgagtgatgatataagctccttacttcaagaaagtctaggatctatgcctttcaggcaaaggggaaactctatcagcattggagtcggcaaatgctacttcactgatcgagaaattttacaaaacattatatccgctagagcggcatttaaaactgctgttgataatcaaaaatctaagaaaccaaatatactgagtaaaaccacattatcaagcacacatggccccggtattgtaatcgattttgcttaa

SEQ ID NO: 2024 - DNA, 858 bp, Artificial Sequence
  Description of Artificial Sequence: Synthetic polynucleotide
atgctttccgtagtagcgatcccgaaaatatgtgtcacaggtcctgcaagaagatgcttttttcatactgcaaaaaaactttacgcagatgactataaaccagcagctatgtcctccaatgcaccttctttaacaaaagaccaagccaaaaaaagagagttgaaaagattggtacaaagaaaggccgaggcaaagagaccagctacagcaagcccattgtacatgcctgttacaaaggcattgagatatttacgcgcagcagaagttggcagaccgcaatctcaacagacaattaatttgactacattggtagtcggtgaaagaggtacagcgcctttatccggtagcgtgacatttcctaagcctttgagatatatcaaaattgctgcctttaccaacgacgaaagtaaattggaagagcttcgtgagaaatacccaaatcatttgattggcggagcagatcttgttgccaaaattaaaagcggtgaaattagcgttgattttgacaaagcatttgcaactcctgatattgttccagctttacaatctcaggtggccaggatacttggtcctcgtggggttttaccctctgtcaaaaaaggtacggtgagtgatgatataagctccttacttcaagaaagtttgggatctatgcctttcaggcaaaggggaaactctatcagcattggagtcggcaaatgctacttcactgatagagaaattttacaaaacattatatccgctagagcggcatttaaaactgctgttgataatcaaaaatctaagaaaccaaatatattgagtaaaaccacattatccagcacacatggccccggtattgtaatcgattttgcttga

SEQ ID NO: 2025 - DNA, 1698 bp, Saccharomyces cerevisiae
atgtttaagaaggagcctcacataaaagctttaagtaatttgaagaattccgaaagaaagaagttgctacaaacattccaaaaacaaacgaataatgaggaatatagctttcgtacttccactataaaacaaaccaactttaacggccagaaaagtgtaggaacggtttacacagatgagaataataccccaatattattcaaggaaaagcataaggagcaactttttccaactgtgtattcttgttgggaatatcctgcgttattgccgatcgttttaactcatggatttgttatagaagaacatttattcaacggcgctaacttaatgatttccggttcgatcccaccctttgatcctcgttgtaaaataggtactctttgtggtatagctagcaaacaggcaccagaaactgtcttagccatcggtattgtcgaattagatctaccgtcctttgataaagtaattggtgaaacaggagttgctgtcaaaatcatacatcatttcaatgatgggctctccaaagtctttaaaatgaaattggaacctccatttgttctcagtactcaatcaaaggataacaatatcagtagtaaacagatagaatcctcggagcaaatcaaggctgttgaaaaggaacaagaagatgtaaaagaagcgtctgttgatgtagaggagattgctgaagttctagaccatttcactgtgtcggatgtagattatttcattacaagagcattatattataccttgactcaagataaaggtttggaattacccatttcagcttctaacttcatctcaaaccacattatgcgtaatttgcctccaattgatcacaatgaagtcaatgtaaagaaaacttcatggaaaaaaagcgcaaaatttttgaaacacttcgagaaagaaggcttcttgaaattaaaaggaaagggggatgacttaactattgtgggcaaaaatactgacaaggatgagttaaagaactttgtgccatataagcttggttgtagcaagtctgccacagaaagtagggagagcacaacctcgaaggagaaaacatctggaatgatgtattcactgactctgtataaaccctttaatcttgccaaagatcttttgaaggaggttaatttggcttctcacacgtactacacctctcaggacattagaagcgcggtttctcagtatatttctgtcaagaacctagcagacacaaaagataaaggaaaagttattatggacgatctattattcgatatggtcaataagaagaagaaagtcttgaatgcttcacgtatcattgctagaggtgaaattttgcatcccttactcaccaataattttaccgagttctatcagatattcaaaagcgatgatactctcttgttcaaggcgccaatgaagggttcccttccgcatattaagattattactgaaatgaaaattggcagaaaagttattaccagagtgagcaattttgaagtgtttcaagtcgacccagaatcacttgcggctgacttaagaaagatttgtagcggatcgacaacaataagtgaatcacaaacattcaaatgtgctgaagtgcaggttcaaggtccacacggtcaatcgatcattgatcaccttaacaagctaggtattccaagcaaatggatagactttgagaacaagttgaagaagaaaaaaagaaagtag

SEQ ID NO: 2026 - DNA, 1698 bp, Artificial Sequence
  Description of Artificial Sequence: Synthetic polynucleotide
atgtttaagaaggagcctcacataaaagctttaagtaatttgaagaattccgaaagaaagaagttgttgcaaacattccaaaaacaaacgaataatgaggaatatagctttcgtacttccactataaaacaaaccaactttaacggccagaaaagtgtaggaacggtttacacagatgagaataataccccaatattattcaaggaaaagcataaggagcaactttttccaactgtgtattcttgttgggaatatcctgcgttattgccgatcgttttaactcatggatttgttatagaagaacatttattcaacggcgctaacttaatgatttccggttctatcccaccctttgatcctcgttgtaaaataggtactctttgtggtatagctagcaaacaggcaccagaaactgtcttagccatcggtattgtcgaattagatttaccgtcctttgataaagtaattggtgaaacaggagttgctgtcaaaatcatacatcatttcaatgatgggctctccaaagtctttaaaatgaaattggaacctccatttgttctcagtactcaatccaaggataacaatatcagtagtaaacagatagaatcctctgagcaaatcaaggctgttgaaaaggaacaagaagatgtaaaagaagcgtctgttgatgtagaggagattgctgaagttttggaccatttcactgtgtctgatgtagattatttcattacaagagcattatattataccttgactcaagataaaggtttggaattacccatttctgcttctaacttcatctccaaccacattatgcgtaatttgcctccaattgatcacaatgaagtcaatgtaaagaaaacttcttggaaaaaaagcgcaaaatttttgaaacacttcgagaaagaaggcttcttgaaattaaaaggaaagggggatgacttaactattgtgggcaaaaatactgacaaggatgagttaaagaactttgtgccatataagcttggttgtagcaagtctgccacagaaagtagggagagcacaacctccaaggagaaaacatctggaatgatgtattctttgactttatataaaccctttaatcttgccaaagatcttttgaaggaggttaatttggcttctcacacgtactacacctctcaggacattagaagcgcggtttctcagtatatttctgtcaagaacttggcagacacaaaagataaaggaaaagttattatggacgatttattattcgatatggtcaataagaagaagaaagtcttgaatgcttctcgtatcattgctagaggtgaaattttgcatcccttactcaccaataattttaccgagttctatcagatattcaaaagcgatgatactctcttgttcaaggcgccaatgaagggttcccttccgcatattaagattattactgaaatgaaaattggcagaaaagttattaccagagtgagcaattttgaagtgtttcaagtcgacccagaatctcttgcggctgacttaagaaagatttgtagcggaagtacaacaataagtgaatctcaaacattcaaatgtgctgaagtgcaggttcaaggtccacacggtcaatccatcattgatcaccttaacaagttgggtattccaagcaaatggatagactttgagaacaagttgaagaagaaaaaaagaaagtga

SEQ ID NO: 2027 - DNA, 1959 bp, Saccharomyces cerevisiae
atgtcgtctcctattaatgattatttcattgattataaccctctttttccaatctttgctacaagaattgcgaaaggccttgctatttacagagtctcggatcacgctaggcttgcagtaattccaataagaaatataaacttggtggcgaattacgattgggatacaactactggtaaatttttgtccatcttttttaaggatgggacgatcagaatccatgacatttttaaagacggtcgattagtttcattcctaagaattccgagtacaaaaatatcaaaaggtatatgggaccgaattccattaagatacgaaccaaataatcgagattttgcatgtaacatcattgatgatttaccaaagctaataaggtttgtaaaggactccaaaaggataaacattgtcccttacactcaaccgaatagcttgtggagaggtcctgatgaggatgatctagatagtaatgaaaaactagacgttcacgtagtattcaatgagggaaatgataaaattacagttttttttaatggtgattacgctgttttcttgtcggtggataatattgaaaacgaaaattctttaaaatcaattatcaaagttcaagatggcttttaccagtgcttctatgaggatggaactgtacaaactttaaatttaggacctttattacagagcaaatcatcagtgaacctgctgaattatataatggtaataaaagagcttataggttatatgcttactcatctcgagttcattaaccgggaactggcaacaccttatttagatttcgtcaaaagattgtgtgatgaagcctacggatatggcaaactcaaatcggaattagaagccctctttttacttggagagatctcatgtgacttggaagactggctttgcaattcagtaggtgagaagaactttaaaaggtggaagtatttaggttgtgaagcttaccaaaaaactgttcagattttaactttaatatttgtacccgcatgtgaaagaatcattatttatgtggagaagttaagggcaatattacaagccttttctatacagaataagctcagttatacgtcagatttgacagctgttgaagtgctcctaaaaagttcacagaaattgttaactatgacattaaattcaataataggcttggggagggacgaaacactttttgagaagtttttcatatggttcaacgacagacttcatgaagcgctagatgaagattataaactgaaatttcaatttgaggatgatctttactttggatacgatttactaagttactttgacagaatcttatctaaaaaaggtacggaacctagctcaataatcgacgtgaaactttatagagacctaattaacagcatgtctgatatggaaaaagatattgcacaaagtaatgttaattctcatattcaacagcatattctggttgatttaaaaacggatgtttttgcgcaaaaatatccatcttcgcaaataaatttgcttgatgccataaaattaccaaagcataattacatagtctaccttattcaggtaacaaaacacaacagtgctcaagaacctttctcagaagaaaacaaaaagaaactatatataggtactctgaaagatgagaatttaggcattatatcaaaggaatcgtcagtcaagattccggcgctattcaagagctataggttgagcagtacaaggtttgtgccgaatagggtccatagcttgcttcgggatattggattgtcagatagtaactatcatagtagccacgtcaccgattataggggagaaaactatgaaaacgaggaagatgatggcacaatagctattcctgcttacatcagggagaatagggaaaatgatgatttcatagcatgcaccgcgaaggtatcggtggatggaagaagcgcatccctagtgtttccaaaagaaaaacaaaatgtttga

SEQ ID NO: 2028 - DNA, 1959 bp, Artificial Sequence
  Description of Artificial Sequence: Synthetic polynucleotide
atgtcttctcctattaatgattatttcattgattataaccctctttttccaatctttgctacaagaattgcgaaaggccttgctatttacagagtctctgatcacgctaggcttgcagtaattccaataagaaatataaacttggtggcgaattacgattgggatacaactactggtaaatttttgtccatcttttttaaggatgggacgatcagaatccatgacatttttaaagacggtagattagtttctttcttaagaattccgagtacaaaaatatccaaaggtatatgggacagaattccattaagatacgaaccaaataatagagattttgcatgtaacatcattgatgatttaccaaagttaataaggtttgtaaaggactccaaaaggataaacattgtcccttacactcaaccgaatagcttgtggagaggtcctgatgaggatgatttggatagtaatgaaaaattagacgttcacgtagtattcaatgagggaaatgataaaattacagttttttttaatggtgattacgctgttttcttgtctgtggataatattgaaaacgaaaattctttaaaatccattatcaaagttcaagatggcttttaccagtgcttctatgaggatggaactgtacaaactttaaatttaggacctttattacagagcaaatcttctgtgaacttattgaattatataatggtaataaaagagcttataggttatatgcttactcatctcgagttcattaacagagaattggcaacaccttatttagatttcgtcaaaagattgtgtgatgaagcctacggatatggcaaactcaaaagtgaattagaagccctctttttacttggagagatcagttgtgacttggaagactggctttgcaattctgtaggtgagaagaactttaaaaggtggaagtatttaggttgtgaagcttaccaaaaaactgttcagattttaactttaatatttgtacccgcatgtgaaagaatcattatttatgtggagaagttaagggcaatattacaagccttttctatacagaataagctcagttatacgtctgatttgacagctgttgaagtgctcttgaaaagttctcagaaattgttaactatgacattaaattctataataggcttggggagggacgaaacactttttgagaagtttttcatatggttcaacgacagacttcatgaagcgttggatgaagattataaattgaaatttcaatttgaggatgatctttactttggatacgatttattaagttactttgacagaatcttatctaaaaaaggtacggaacctagcagtataatcgacgtgaaactttatagagacttgattaacagcatgtctgatatggaaaaagatattgcacaaagtaatgttaattctcatattcaacagcatattttggttgatttaaaaacggatgtttttgcgcaaaaatatccatcttctcaaataaatttgcttgatgccataaaattaccaaagcataattacatagtctaccttattcaggtaacaaaacacaacagtgctcaagaacctttctctgaagaaaacaaaaagaaactttatataggtactttgaaagatgagaatttaggcattatatccaaggaatcttctgtcaagattccggcgttattcaagagctataggttgagcagtacaaggtttgtgccgaatagggtccatagcttgcttagagatattggattgagtgatagtaactatcatagtagccacgtcaccgattataggggagaaaactatgaaaacgaggaagatgatggcacaatagctattcctgcttacatcagggagaatagggaaaatgatgatttcatagcatgcaccgcgaaggtatctgtggatggaagaagcgcatccttagtgtttccaaaagaaaaacaaaatgtttga

SEQ ID NO: 2029 - DNA, 2307 bp, Saccharomyces cerevisiae
atggggaagaaggatagacagcgcaagaaactgcgtgagtttgctaaattgaaaaacaggcagcgaaacttgagaaagagcgtgcaaacattgaagaatgaggttcaacgagaggctaaagtcccaagaacttcgaatcaaattgctttaggaaacgacaaaatcgaagagattaacgaaaatagtccattattatcagctcctagtaaacaagaggaggtatcaattccgaaagcggttgatattgataccattgatgcacagcctcttcacgaaggcccaaaaattgatgactcgccccaagatgaggtcaatagcattaaaggaaaacctgcggacaaggctaatgaagacgatcttaagccgccttcacaacatgaagcatgtggaaattcagctttgcaaagctctattacagattttagtgatagatcagtatcaccattgcaaagtattaccagctgcaatactccgatgagtgagcacgagctaccagtatcttcctcaaattcgtttgaaagagctgatgatatgcctgtagtgcaggcagataaccagacgtcaagtagtaaatctttgcacattgttgcaccatctcctgaagtaccagtcagcggagatgaaatcacttcatatggatatggctctataccccagagcatcggggatgtagagaacggattgaatcctccttatgtcgaaaatacatcatctgatgaacttgtacatgatctgacgagaagacggatattttcatcctgtatgtgtacttatttattctttattgcaatggacagttctataatcctagtaattgcgtccaaaattgcttcggagtttcatgagttatggagattatccttagtcatctcagcatacctattgagtaatgctattgggcaactggtatttttgaagctatctttaatatccagtgtaaaattgttgttgtgtattgctcaattcagttttatccttggtggctatttatcttggagttctgcccatttttggacgtttatctttgcccgttgtgtcacaggatttgggggcggttccttaatagcgctcaaaagtactattatgaatcggttttctcaaaagaacgacagtcggtactcattgagtgcctctatgataacatttgctatgggtgtggtaattgggccctttatgatgaacttgtttgattcttctcatggtagcgggtggagaaatgccttcttaataccagttcctttttgccttgtgaatgcctcgattatgctggcagatatgtattctgttaagagcactttatatggacgcccaacgcctacattatggaaaagattcaagaatactctattaagtcctgatttatacgaaatattgacacttacgctattcctactttgtttcgttcaagtgacctcattggatttaacagggttaaagaataatacgatgattcaagcgctactattttctgtaattatcgtttgtggcattttatttttcttgatagagacaagcgatacttacatgaactctgtaatttcaatgtccttacaaggtgacaagcgtttaatatggacaatgataggaatttcattttgctttgcagcattaatgtgcatcatcccattcggtacaacgtacttcatcattgttttaaatttaagcactttacaacttgcagagagattgtccccattctttttctccattgtactgggttactttagtgtttcttatttttggaagtcgaaaggacagaattttttgctaaaatttgttttaagcggagccaccctgttactatatgtggcacttatgggggtaagtttgaatttaccagtatggaagcaatatatatgtttgtctctgccatttttgggctcctctatgatattgaccttgctgtcaaatctttatcatgagtaccatgaacaaagaaagtcacctatcagtggttctatcgtatattgtttcggtgccgtgggggggacggttggtatttccttgggtggttatgtcttccacaaaacattaataaaacttatgcatgagaaggtgatgccatttagcaagcaaggttatcttaaaaaggaccttttgaaaattatcaagcacgctacggaatcttcagattgggtacacgaatcagccccaaagtttgtttttcaaactttgattgagtgttatttacaagcatgtcgaaacgtattcaaactctctacccttttttttacgattactgtcgtagcaatattcattttcaacagaatccattgtcgtagtcaaaattgtttgtcactatcttga

SEQ ID NO: 2030 - DNA, 2307 bp, Artificial Sequence
  Description of Artificial Sequence: Synthetic polynucleotide
atggggaagaaggatagacagcgcaagaaattacgtgagtttgctaaattgaaaaacaggcagagaaacttgagaaagagcgtgcaaacattgaagaatgaggttcaaagagaggctaaagtcccaagaacttccaatcaaattgctttaggaaacgacaaaatcgaagagattaacgaaaatagtccattattatctgctcctagtaaacaagaggaggtatctattccgaaagcggttgatattgataccattgatgcacagcctcttcacgaaggcccaaaaattgatgactctccccaagatgaggtcaatagcattaaaggaaaacctgcggacaaggctaatgaagacgatcttaagccgccttctcaacatgaagcatgtggaaattctgctttgcaaagctctattacagattttagtgatagatctgtatctccattgcaaagtattaccagctgcaatactccgatgagtgagcacgagttaccagtatcttcctctaattcttttgaaagagctgatgatatgcctgtagtgcaggcagataaccagacgtccagtagtaaatctttgcacattgttgcaccatctcctgaagtaccagtcagcggagatgaaatcacttcttatggatatggctctataccccagagcatcggggatgtagagaacggattgaatcctccttatgtcgaaaatacatcttctgatgaacttgtacatgatttgacgagaagaagaatattttcttcctgtatgtgtacttatttattctttattgcaatggacagttctataatccttgtaattgcgtccaaaattgcttctgagtttcatgagttatggagattatccttagtcatctctgcatacttgttgagtaatgctattgggcaattggtatttttgaagttatctttaatatccagtgtaaaattgttgttgtgtattgctcaattcagttttatccttggtggctatttatcttggagttctgcccatttttggacgtttatctttgcccgttgtgtcacaggatttgggggcggttccttaatagcgctcaaaagtactattatgaatagattttctcaaaagaacgacagtagatactctttgagtgcctctatgataacatttgctatgggtgtggtaattgggccctttatgatgaacttgtttgattcttctcatggtagcgggtggagaaatgccttcttaataccagttcctttttgccttgtgaatgcctctattatgttagcagatatgtattctgttaagagcactttatatggacgcccaacgcctacattatggaaaagattcaagaatactttattaagtcctgatttatacgaaatattgacacttacgcttttcttgctttgtttcgttcaagtgacctctttggatttaacagggttaaagaataatacgatgattcaagcgttacttttttctgtaattatcgtttgtggcattttatttttcttgatagagacaagcgatacttacatgaactctgtaatttccatgtccttacaaggtgacaagcgtttaatatggacaatgataggaatttccttttgctttgcagcattaatgtgcatcatcccattcggtacaacgtacttcatcattgttttaaatttaagcactttacaacttgcagagagattgtccccattctttttctccattgtattgggttactttagtgtttcttatttttggaagagtaaaggacagaattttttgttgaaatttgttttaagcggagccaccttattattatatgtggcacttatgggggtaagtttgaatttaccagtatggaagcaatatatatgtttgtctttaccatttttgggctcctctatgatattgaccttgttatccaatctttatcatgagtaccatgaacaaagaaagtctcctatcagtggttctatcgtatattgtttcggtgccgtgggggggacggttggtatttccttgggtggttatgtcttccacaaaacattaataaaacttatgcatgagaaggtgatgccatttagcaagcaaggttatcttaaaaaggaccttttgaaaattatcaagcacgctacggaatcttctgattgggtacacgaaagtgccccaaagtttgtttttcaaactttgattgagtgttatttacaagcatgtagaaacgtattcaaactctctacccttttttttacgattactgtcgtagcaatattcattttcaacagaatccattgtcgtagtcaaaattgtttgtccttatcttga

SEQ ID NO: 2031 - DNA, 201 bp, Saccharomyces cerevisiae
atgttcttcagccaagttttgagatcttccgctcgtgctgccccaatcaagaggtatacaggcggtagaataggtgaatcgtgggtaattacggaaggtagaaggctcattccagaaatctttcaatggagtgcagtattgagcgtttgtttaggttggcctggtgctgtatacttctttagtaaggcaagaaaagcatga

SEQ ID NO: 2032 - DNA, 201 bp, Artificial Sequence
  Description of Artificial Sequence: Synthetic polynucleotide
atgttcttcagccaagttttgagatcttccgctcgtgctgccccaatcaagaggtatacaggcggtagaataggtgaaagttgggtaattacggaaggtagaaggctcattccagaaatctttcaatggagtgcagtattgagcgtttgtttaggttggcctggtgctgtatacttctttagtaaggcaagaaaagcatga

SEQ ID NO: 2033 - DNA, 1713 bp, Saccharomyces cerevisiae
atggaaggtttcttcaggatacccctcaagcgggcaaatttacacggaatgttgaaggctgctatatccaaaattaaagcgaattttaccgcgtatggtgcaccaagaatcaatattgaggatttcaatatagtcaaggaaggaaaagcagaaattcttttccctaaaaaggaaactgttttctataatcccatccaacaatttaatagagatctaagtgttacatgcatcaaggcgtgggacaacctatatggtgaggaatgtggccaaaagagaaataataaaaaaagtaagaagaaaaggtgcgcggaaactaacgatgattcttccaagcgtcaaaaaatgggaaacgggtcaccaaaagaagccgttggtaattctaatcgaaacgaaccttatataaatattttggaagcattgtcagccactgggttaagagccattaggtatgctcatgaaattccccatgtgagggaagttattgctaacgatttacttccagaggctgtcgaatctataaaacgaaacgttgaatataatagtgtcgaaaacattgtcaagccaaaccttgatgatgctaatgtcttaatgtaccgtaacaaagcgacgaataataagtttcacgtcatcgacttggatccttacggtaccgttacaccttttgtagatgcggctattcagagtattgaggagggtggtctaatgctggtaacttgcactgatttatccgttttggccggtaacggatacccagaaaagtgttttgccttatatggtggtgcaaatatggtttctcatgaatcaactcacgaaagtgcgctgagactagtattgaacttactaaagcaaactgccgcgaaatacaagaaaactgtggaaccgcttttgtcgttgagcattgacttttacgtcagagtttttgtcaaagtcaaaacaagcccgattgaagtcaaaaacgttatgtcaagtactatgactacttaccattgttcccgttgcggctcttaccacaatcaacctctgggcagaatttctcaacgcgaaggtaggaacaacaaaacattcaccaaatactcggttgcgcaagggcctccggttgatactaaatgtaagttctgcgaggggacataccatttagctggtccaatgtatgcaggacctctacacaacaaggagttcatcgaggaggtgttgagaattaataaagaagagcatcgtgaccaggatgatacatatggaacacgtaaaagaattgaaggtatgctatctctagctaagaatgaattatccgattcgccattctatttcagtcctaaccatattgcatcggtaataaaattacaagtacctcccttgaaaaaagtagtcgcaggcctaggttccctaggctttgaatgttcattgacacatgcccaaccatcgtccctaaagactaacgctccatgggatgcaatctggtatgtgatgcagaaatgtgatgatgagaagaaagacttaagcaaaatgaatccaaatactacgggctataagattttatcggcaatgccaggatggttgagtggcactgtcaaatcagagtatgactcaaagctgtcgttcgcaccaaatgaacaaagcggtaatattgaaaaactaaggaagctaaaaattgtgagatatcaggaaaatccaacaaagaattggggcccaaaagcccgtcccaacacttcataa

SEQ ID NO: 2034 - DNA, 1713 bp, Artificial Sequence
  Description of Artificial Sequence: Synthetic polynucleotide
atggaaggtttcttcaggatacccctcaagagagcaaatttacacggaatgttgaaggctgctatatccaaaattaaagcgaattttaccgcgtatggtgcaccaagaatcaatattgaggatttcaatatagtcaaggaaggaaaagcagaaattcttttccctaaaaaggaaactgttttctataatcccatccaacaatttaatagagatttgagtgttacatgcatcaaggcgtgggacaacttatatggtgaggaatgtggccaaaagagaaataataaaaaaagtaagaagaaaaggtgcgcggaaactaacgatgattcttccaagcgtcaaaaaatgggaaacgggtctccaaaagaagccgttggtaattctaatagaaacgaaccttatataaatattttggaagcattgagtgccactgggttaagagccattaggtatgctcatgaaattccccatgtgagggaagttattgctaacgatttacttccagaggctgtcgaatctataaaaagaaacgttgaatataatagtgtcgaaaacattgtcaagccaaaccttgatgatgctaatgtcttaatgtaccgtaacaaagcgacgaataataagtttcacgtcatcgacttggatccttacggtaccgttacaccttttgtagatgcggctattcagagtattgaggagggtggtttgatgttggtaacttgcactgatttatccgttttggccggtaacggatacccagaaaagtgttttgccttatatggtggtgcaaatatggtttctcatgaatctactcacgaaagtgcgttaagattggtattgaacttattgaagcaaactgccgcgaaatacaagaaaactgtggaaccgcttttgtctttgagcattgacttttacgtcagagtttttgtcaaagtcaaaacaagcccgattgaagtcaaaaacgttatgagcagtactatgactacttaccattgttcccgttgcggctcttaccacaatcaacctttgggcagaatttctcaacgcgaaggtaggaacaacaaaacattcaccaaatactctgttgcgcaagggcctccggttgatactaaatgtaagttctgcgaggggacataccatttagctggtccaatgtatgcaggacctttacacaacaaggagttcatcgaggaggtgttgagaattaataaagaagagcatcgtgaccaggatgatacatatggaacacgtaaaagaattgaaggtatgctttctttggctaagaatgaattatccgattctccattctatttcagtcctaaccatattgcatctgtaataaaattacaagtacctcccttgaaaaaagtagtcgcaggcttgggttccttgggctttgaatgttctttgacacatgcccaaccatcttccttgaagactaacgctccatgggatgcaatctggtatgtgatgcagaaatgtgatgatgagaagaaagacttaagcaaaatgaatccaaatactacgggctataagattttaagtgcaatgccaggatggttgagtggcactgtcaaaagtgagtatgactccaagctttctttcgcaccaaatgaacaaagcggtaatattgaaaaattgaggaagttgaaaattgtgagatatcaggaaaatccaacaaagaattggggcccaaaagcccgtcccaacactagctga

SEQ ID NO: 2035 - DNA, 591 bp, Saccharomyces cerevisiae
atgccaccaaaaggttggagaaaagacgcccaagggaattaccccactacttcgtatattaaagaacaagagaacattacgattcaggacctgttatttcctaaaagcactattgtgaatttggcacgcgaagtgccacagcaaagcggcaaaaagctgctgataaataaagacgcatcactagcgttacagcgtggtgctacagtatttgttaaccacttgctcctgtttgcaagggaaattgcaaagagtcaagataaaaaaagctgcagtgtagatgatgttctgagtgctttggaccatataggacactcggcattgaagggtccggttagagataaactagatgaataccaagctgctgttgaacagaggaagaaggaaaaactagatagtggtgaagtagatgctgatggcgatatagatatgggtgaagataaggagaatgtgcccgtggaaaaggttaaagagcatgacgaaatagaagaacaaggcgatgcattacaggacgtagaagagtcctccgaaaagaaacagaaaacggagagccaagatgtagaaactagagttcaaaaccttgagcaaacgtaa

SEQ ID NO: 2036 - DNA, 591 bp, Artificial Sequence
  Description of Artificial Sequence: Synthetic polynucleotide
atgccaccaaaaggttggagaaaagacgcccaagggaattaccccactacttcttatattaaagaacaagagaacattacgattcaggacttattatttcctaaaagcactattgtgaatttggcacgcgaagtgccacagcaaagcggcaaaaagttattgataaataaagacgcatctttagcgttacagcgtggtgctacagtatttgttaaccacttgctcttatttgcaagggaaattgcaaagagtcaagataaaaaaagctgcagtgtagatgatgttttgagtgctttggaccatataggacactctgcattgaagggtccggttagagataaattggatgaataccaagctgctgttgaacagaggaagaaggaaaaattggatagtggtgaagtagatgctgatggcgatatagatatgggtgaagataaggagaatgtgcccgtggaaaaggttaaagagcatgacgaaatagaagaacaaggcgatgcattacaggacgtagaagagtcctccgaaaagaaacagaaaacggagagccaagatgtagaaactagagttcaaaaccttgagcaaacgtga

SEQ ID NO: 2037 - DNA, 3195 bp, Saccharomyces cerevisiae
atggatgattatcacgtaaatactgccttctcaatgggcagaggtaaccagcaggatgatggcaatagtgaaagcaacagcatgcatacacaaccaagcactatggcgcccgctacgctgagaatgatgggaaaaagtccacagcagcagcagcagcagaacacaccgctaatgcccccggcggatatcaaatacgccaataatggtaactcacatcaagcagagcaaaaggagagacaagtagaacttgaaggtaaatcgagagagaatgcaccaaagccaaatactaccagccagagtcgagtttcgtcttctcagggcatgcctaagcagtttcatcgaaaatcgttaggagattgggagtttgttgaaacagttggtgcaggttctatgggtaaagtgaagctggcaaaacatcgttacactaatgaggtttgtgcagtaaaaattgtaaaccgtgctacaaaggctttcctacataaagaacaaatgctgccaccacccaaaaatgaacaagatgttttggagagacagaagaaattagagaaggaaatatctagggacaaaagaactattcgagaagcgtccttgggacaaatcttatatcatccacacatatgtagactttttgagatgtgcacgttgtcaaatcatttctatatgttgtttgaatatgtttcaggtggtcagctgttagactatatcatccaacatgggtcaatacgagaacaccaagcgagaaagtttgctaggggtatcgcgagcgccttaatatatttgcatgctaacaacatcgtccatagagatttgaagatagaaaatataatgatttcagattccagtgaaatcaagataattgattttggactttcaaatatttatgattctaggaagcagcttcatacattctgtggctctctgtattttgccgctcccgagctgttaaaagcgaatccttatacaggacctgaagtagatgtctggtcatttggtgtagttttatttgttttggtatgcggtaaagtgccatttgacgacgaaaattcgagcgttttacatgaaaagatcaagcaaggtaaggttgaatatccccaacatttatctatcgaagtaatatcactgttatccaaaatgttggtagtagatccgaaaagaagagccacacttaaacaggttgtggagcaccactggatggtaagagggttcaatggtccccctccttcttacttaccgaaaagagttcccctaactatcgaaatgcttgatataaatgtcttaaaagaaatgtaccgtttagaatttattgacgatgtagaggaaacaagaagtgttttggtcagtataatcacagatcctacttacgttcttctctctagacaatactggactttagcggccaaaatgaacgcagaatccagtgataacggaaacgcgccaaacataacagagagttttgaagacccaactcgggcatatcatccaatgatttccatatattacttgacttctgagatgcttgataggaaacatgcgaaaattcggaatcaacaacagcgacagagccacgaaaatatagaaaagctttctgaaataccggaaagtgtgaagcaaagggacgtagaggtcaatacaaccgctatgaaatcagagccagaagccacgttggcgacaaaagatacctctgtgccattcactccaaagaatagcgatggcacagagccccccttacatgtcttaattccaccgaggttagcaatgccagaacaagcgcatacgtcaccaacgagtagaaaaagttctgataatcaacgccgtgaaatggaatatgctctctctccaactcctcagggaaatgactatcaacaatttagggtaccttcaactactggcgatccctcagaaaaggcgaagtttgggaatatatttagaaaattatcacagcgccgtaaaaagaccattgaacagacatctgttaatagtaataatagtatcaataaacctgtgcaaaagacgcattctcgcgctgtttcagactttgtccctggttttgctaaaccgagttatgattcaaattataccatgaatgagcctgtcaagacaaacgatagcagaggtggcaataaaggtgactttccagcattgcctgcggatgcagaaaatatggtagagaagcaaagggagaagcaaattgaagaagatataatgaaattgcatgatattaataaacagaataatgaagttgcaaaaggaagcgggcgggaagcttacgctgcacagaagtttgaaggaagcgacgacgacgagaatcatcccttaccacctctcaatgttgcaaaaggtcgaaaactacatccaagcgcaagagctaaatcagttggtcatgctcgtcgtgaatcactcaaatatatgagacccccaatgccttcatctgcctatcctcagcaagagcttatagatactgggttcttagaatcaagtgacgataacaaatccgatagtttgggaaatgttacttcacagacgaatgatagcgtcagcgtgcattctgtgaacgcacacataaactcgccatctgtggagaaggaattaacagatgaagagatattgcaggaagcttctagagctccagccggttctatgccatccatcgatttcccccgttctttatttttgaagggtttcttttctgttcagacaacttcatcgaagcctttgccaattgttagatacaagattatgtttgttctgaggaaaatgaatatagagttcaaggaggttaagggtggttttgtttgtatgcaaaggttctcttccaataatgtggcagcgaagagagaagggactccaagatcgatcatgccactttcgcaccacgaatccattagacgtcaaggctctaataaatactcaccttcttctcctttgacaactaattccattcaccagagaaaaacatctattaccgaaacctatggagatgataagcattcgggaacatctttggagaacatccaccaacaaggtgacggtagcgaaggcatgactacaacagaaaaagagcccatcaaattcgaaattcatatcgtcaaggttcgtattgttggtttagccggtgtgcattttaagaaaatttctgggaacacttggttgtataaagagctggcttctagtatattaaaagaactaaagttgtaa

SEQ ID NO: 2038 - DNA, 3195 bp, Artificial Sequence
  Description of Artificial Sequence: Synthetic polynucleotide
atggatgattatcacgtaaatactgccttctccatgggcagaggtaaccagcaggatgatggcaatagtgaaagcaacagcatgcatacacaaccaagcactatggcgcccgctacgttgagaatgatgggaaaaagtccacagcagcagcagcagcagaacacaccgttaatgcccccggcggatatcaaatacgccaataatggtaactctcatcaagcagagcaaaaggagagacaagtagaacttgaaggtaaatctagagagaatgcaccaaagccaaatactaccagccagagtagagtttcttcttctcagggcatgcctaagcagtttcatagaaaatctttaggagattgggagtttgttgaaacagttggtgcaggttctatgggtaaagtgaagttagcaaaacatcgttacactaatgaggtttgtgcagtaaaaattgtaaaccgtgctacaaaggctttcttacataaagaacaaatgcttccaccacccaaaaatgaacaagatgttttggagagacagaagaaattagagaaggaaatatctagggacaaaagaactattagagaagcgtccttgggacaaatcttatatcatccacacatatgtagactttttgagatgtgcacgttgagcaatcatttctatatgttgtttgaatatgtttctggtggtcagcttttagactatatcatccaacatgggtccataagagaacaccaagcgagaaagtttgctaggggtatcgcgagcgccttaatatatttgcatgctaacaacatcgtccatagagatttgaagatagaaaatataatgatttctgattccagtgaaatcaagataattgattttggactttctaatatttatgattctaggaagcagcttcatacattctgtggctctttgtattttgccgctcccgagttattaaaagcgaatccttatacaggacctgaagtagatgtctggtcttttggtgtagttttatttgttttggtatgcggtaaagtgccatttgacgacgaaaatagtagcgttttacatgaaaagatcaagcaaggtaaggttgaatatccccaacatttatctatcgaagtaatatctttattatccaaaatgttggtagtagatccgaaaagaagagccacacttaaacaggttgtggagcaccactggatggtaagagggttcaatggtccccctccttcttacttaccgaaaagagttcccttaactatcgaaatgcttgatataaatgtcttaaaagaaatgtaccgtttagaatttattgacgatgtagaggaaacaagaagtgttttggtcagtataatcacagatcctacttacgttcttctctctagacaatactggactttagcggccaaaatgaacgcagaatccagtgataacggaaacgcgccaaacataacagagagttttgaagacccaactagagcatatcatccaatgatttccatatattacttgacttctgagatgcttgataggaaacatgcgaaaattagaaatcaacaacagagacagagccacgaaaatatagaaaagctttctgaaataccggaaagtgtgaagcaaagggacgtagaggtcaatacaaccgctatgaaaagtgagccagaagccacgttggcgacaaaagatacctctgtgccattcactccaaagaatagcgatggcacagagccccccttacatgtcttaattccaccgaggttagcaatgccagaacaagcgcatacgtctccaacgagtagaaaaagttctgataatcaacgccgtgaaatggaatatgctctctctccaactcctcagggaaatgactatcaacaatttagggtaccttccactactggcgatcccagtgaaaaggcgaagtttgggaatatatttagaaaattatctcagcgccgtaaaaagaccattgaacagacatctgttaatagtaataatagtatcaataaacctgtgcaaaagacgcattctcgcgctgtttctgactttgtccctggttttgctaaaccgagttatgattctaattataccatgaatgagcctgtcaagacaaacgatagcagaggtggcaataaaggtgactttccagcattgcctgcggatgcagaaaatatggtagagaagcaaagggagaagcaaattgaagaagatataatgaaattgcatgatattaataaacagaataatgaagttgcaaaaggaagcgggagagaagcttacgctgcacagaagtttgaaggaagcgacgacgacgagaatcatcccttaccacctctcaatgttgcaaaaggtagaaaattgcatccaagcgcaagagctaaatctgttggtcatgctcgtcgtgaatctctcaaatatatgagacccccaatgccttcttctgcctatcctcagcaagagcttatagatactgggttcttagaaagtagtgacgataacaaatccgatagtttgggaaatgttacttctcagacgaatgatagcgtcagcgtgcattctgtgaacgcacacataaactctccatctgtggagaaggaattaacagatgaagagatattgcaggaagcttctagagctccagccggttctatgccatccatcgatttcccccgttctttatttttgaagggtttcttttctgttcagacaacttcttccaagcctttgccaattgttagatacaagattatgtttgttttgaggaaaatgaatatagagttcaaggaggttaagggtggttttgtttgtatgcaaaggttctcttccaataatgtggcagcgaagagagaagggactccaagatctatcatgccactttctcaccacgaatccattagacgtcaaggctctaataaatactctccttcttctcctttgacaactaattccattcaccagagaaaaacatctattaccgaaacctatggagatgataagcattctggaacatctttggagaacatccaccaacaaggtgacggtagcgaaggcatgactacaacagaaaaagagcccatcaaattcgaaattcatatcgtcaaggttcgtattgttggtttagccggtgtgcattttaagaaaatttctgggaacacttggttgtataaagagttggcttctagtatattaaaagaattgaagttgtga

SEQ ID NO: 2039 - DNA, 915 bp, Saccharomyces cerevisiae
atgcaacaagcaactgggaacgaattactgggtatcctagatctggataacgatatagactttgaaactgcttaccaaatgctcagcagtaacttcgacgaccaaatgtctgcgcacatacatgaaaacacgtttagtgcaacttcccctcctctgttaacacacgagctcggcataattcctaacgtagcaaccgtgcaaccctctcacgtagaaactatacctgccgataaccaaactcatcatgctcctttgcatactcatgcacactatctaaatcacaaccctcatcaaccaagcatgggttttgatcaagcgcttggtctcaagttgtctccttccagttcggggttgttgagcacgaatgaatcgaatgccattgaacagtttttagacaatctaatatcacaggatatgatgtcttccaacgcttccatgaactccgaatcacatctacatataagatcaccaaaaaagcagcataggtataccgaattaaatcaaagatatcctgaaacacatccacacagtaacacaggggagttacccacaaacacagcagatgtgccaactgagttcaccacgagggaaggacctcatcagcctatcggcaatgaccactacaacccgccaccgttttcagtacctgagatacgaatcccagactctgatattccagccaatatcgaggacgaccctgtgaaggtacggaaatggaaacacgttcaaatggagaagatacgaagaataaacaccaaagaagcctttgaaaggctcattaaatcagtaaggaccccaccgaaggaaaacgggaaaagaattcccaagcatattcttttaacttgtgtaatgaacgatatcaagtccattagaagcgcaaatgaagcactacagcacatactggatgattcctga

SEQ ID NO: 2040 - DNA, 915 bp, Artificial Sequence
  Description of Artificial Sequence: Synthetic polynucleotide
atgcaacaagcaactgggaacgaattattgggtatcttagatttggataacgatatagactttgaaactgcttaccaaatgctcagcagtaacttcgacgaccaaatgtctgcgcacatacatgaaaacacgtttagtgcaacttcccctcctttattaacacacgagctcggcataattcctaacgtagcaaccgtgcaaccctctcacgtagaaactatacctgccgataaccaaactcatcatgctcctttgcatactcatgcacactatttgaatcacaaccctcatcaaccaagcatgggttttgatcaagcgcttggtctcaagttgtctccttccagttccgggttgttgagcacgaatgaaagtaatgccattgaacagtttttagacaatttgatatctcaggatatgatgtcttccaacgcttccatgaactccgaaagtcatttgcatataagatctccaaaaaagcagcataggtataccgaattaaatcaaagatatcctgaaacacatccacacagtaacacaggggagttacccacaaacacagcagatgtgccaactgagttcaccacgagggaaggacctcatcagcctatcggcaatgaccactacaacccgccaccgtttagcgtacctgagataagaatcccagactctgatattccagccaatatcgaggacgaccctgtgaaggtaagaaaatggaaacacgttcaaatggagaagataagaagaataaacaccaaagaagcctttgaaaggctcattaaatctgtaaggaccccaccgaaggaaaacgggaaaagaattcccaagcatattcttttaacttgtgtaatgaacgatatcaagtccattagaagcgcaaatgaagcattacagcacatattggatgattcctga

SEQ ID NO: 2041 - DNA, 975 bp, Saccharomyces cerevisiae
atgcgtataggtatggaagagcttagaagggcgctggcgctgctaaatggtcaaggatatgagtttatggtgttcataaaggaaaaagaccatttaataagtgagtcaattccaaaaaacttgttctcagagagttttatatcatcttcaattgaaaaaaaccctccactcacgttcgatccattggtaaataggaaaagaataactgtttatgaagaaaatatccaaccagcgatcatgctacccttagatcaacccctactaatacagaattatctgtatacggcttttaaattattaagacaggtcccatgcaaggcgattgctaagttgtggataaaaattattgagccaaggaagaaaaccaggtttccatacattaaaggcaatgctggaaggccggaatggtggccaaaagatgtagaacataaagagccggaccacctccagaaagcggatcgactgaaattgatgtgcacgataattatgaatgttctaccgcaatctcccttcagccttgagattttggacgagcttacaggagtgaccgccgcaatgaccatttttaagaaagaaactgtgaagaaagtaatcatgaaaaatgttttcgaaattgcgaaatgcttgtgcaacaaagatttcaagcagaagaccatatcacttgatgatttaaatgacctagcccaaaaacagaaaaaatcataccatagtcgtcgatttgatgtaaataaaatggttaaggtagaaaaagatttgttacaacagtcaagtggaagcgattcttcaccctcgatgatccttccttcaaaagaaagtgacacagagtatttccccagggaatatccgaaagaccctgtatcggaggattattcgaatagcatatctcgattagaaaatttagtggaatttgatccgttattcctcactaaattggatgaattaactagtagcgatgattgtaaagattttatttga

SEQ ID NO: 2042 - DNA, 975 bp, Artificial Sequence
  Description of Artificial Sequence: Synthetic polynucleotide
atgcgtataggtatggaagagcttagaagggcgttagcgttattgaatggtcaaggatatgagtttatggtgttcataaaggaaaaagaccatttaataagtgagtctattccaaaaaacttgttcagtgagagttttatatcttcttccattgaaaaaaaccctccactcacgttcgatccattggtaaataggaaaagaataactgtttatgaagaaaatatccaaccagcgatcatgttgcccttagatcaacccttattgatacagaattatttgtatacggcttttaaattattaagacaggtcccatgcaaggcgattgctaagttgtggataaaaattattgagccaaggaagaaaaccaggtttccatacattaaaggcaatgctggaaggccggaatggtggccaaaagatgtagaacataaagagccggaccacctccagaaagcggatagattgaaattgatgtgcacgataattatgaatgttttaccgcaatctcccttcagccttgagattttggacgagcttacaggagtgaccgccgcaatgaccatttttaagaaagaaactgtgaagaaagtaatcatgaaaaatgttttcgaaattgcgaaatgcttgtgcaacaaagatttcaagcagaagaccatatctcttgatgatttaaatgacttggcccaaaaacagaaaaaatcttaccatagtcgtagatttgatgtaaataaaatggttaaggtagaaaaagatttgttacaacagagcagtggaagcgattcttctccctctatgatccttccttccaaagaaagtgacacagagtatttccccagggaatatccgaaagaccctgtatctgaggattattctaatagcatatctagattagaaaatttagtggaatttgatccgttattcctcactaaattggatgaattaactagtagcgatgattgtaaagattttatttga

SEQ ID NO: 2043 - DNA, 1362 bp, Saccharomyces cerevisiae
atgcttttaataaagaggtacttgatggaccctgaaagtttaaggaggcagataatgaatgtatataaatgttacatgtggaagagagcgttccacagtaatagaagcctactggaagttaaacgtcgtgaaaagagtctccagagaaaaattttggaaaggattcttagacccaaggaggaaaatgctgtcaaaaaatctggattcaagctatggtcaagccatttgaataacccacacaaaacttatatgcggctggaggaattacagagacgtattatggaagaggtacacgttgaaggtattaaaaagaatgataagttattcaacgaaataaatcaatggcatttccaaaatgaaaacacaagtactgttcgaacaccaacattgctgatacatggctatgccgcatcttcaatgtcttttttcagaaattatccaggtctgtccaagcacatccgaaatttatactcaattgacatgccagcgagcggattgtcttcagtaccgtctttagagatcaatacaacaacacctctgccgttagatatcaaatttattggagaaaataaatttaaggttccatatacaataaatgcaaatcacaataaatttgtgattcaaatgtacgaagatttctatctcgacagaatcgagcaatggcgcattgataacaaattgggcaaaatgaatgttgtggggcattcttttggcggatatttatcttttaaatatgctgttaaatatccaaactcggtaaacaaactttgcttggtatccccactaggagtggaaaggaatatctggtctgtaaataataatttccactccaacactctttatactatcgattttaaaaatccaaattccaagttttactccaaaagaaatatgattccaaaatacttatttgaacaacaatttcacattttgagaatgatgggaccattaggagctaagttatgttggaattacataatggcggcatatagccgagtcccatcgttggcatacaaagagtacatatttgaactgttttacggtaagggaggtataccggaggttacgacagatattttcaaagcgttattttcaagatgtatcctagcaaaggaccccttgatggattctctgcaatatttaaatgttaagaaattattgatagtatatgggcaatatgattggatgaataaaaaagccggtatgttcatggtcaaagagttgaacaatttaaagaactgtctagaaggagcaagttatttagaaataccttcttccggtcacaatctttttttagataacccagaatcattcaaccaatctatagtgtccttcttatcagacgaaactaaatcgccttga

SEQ ID NO: 2044 - DNA, 1362 bp, Artificial Sequence
  Description of Artificial Sequence: Synthetic polynucleotide
atgcttttaataaagaggtacttgatggaccctgaaagtttaaggaggcagataatgaatgtatataaatgttacatgtggaagagagcgttccacagtaatagaagcttattggaagttaaacgtcgtgaaaagagtctccagagaaaaattttggaaaggattcttagacccaaggaggaaaatgctgtcaaaaaatctggattcaagttatggtctagccatttgaataacccacacaaaacttatatgagattggaggaattacagagacgtattatggaagaggtacacgttgaaggtattaaaaagaatgataagttattcaacgaaataaatcaatggcatttccaaaatgaaaacacaagtactgttagaacaccaacattgttaatacatggctatgccgcatcttctatgtcttttttcagaaattatccaggtttatccaagcacatcagaaatttatactctattgacatgccagcgagcggattgtcttctgtaccgtctttagagatcaatacaacaacacctttgccgttagatatcaaatttattggagaaaataaatttaaggttccatatacaataaatgcaaatcacaataaatttgtgattcaaatgtacgaagatttctatctcgacagaatcgagcaatggcgcattgataacaaattgggcaaaatgaatgttgtggggcattcttttggcggatatttatcttttaaatatgctgttaaatatccaaactctgtaaacaaactttgcttggtatccccattaggagtggaaaggaatatctggtctgtaaataataatttccactccaacactctttatactatcgattttaaaaatccaaattccaagttttactccaaaagaaatatgattccaaaatacttatttgaacaacaatttcacattttgagaatgatgggaccattaggagctaagttatgttggaattacataatggcggcatatagcagagtcccatctttggcatacaaagagtacatatttgaattattttacggtaagggaggtataccggaggttacgacagatattttcaaagcgttattttccagatgtatcttggcaaaggaccccttgatggattctttacaatatttaaatgttaagaaattattgatagtatatgggcaatatgattggatgaataaaaaagccggtatgttcatggtcaaagagttgaacaatttaaagaactgtttagaaggagcaagttatttagaaataccttcttccggtcacaatctttttttagataacccagaatctttcaaccaatctatagtgtccttcttaagtgacgaaactaaatctccttga

SEQ ID NO: 2045 - DNA, 1011 bp, Saccharomyces cerevisiae
atgtcatggaatctactatttgtgctgctaataggattcgtagttttgatattactttcgcccgtcttcaagtcaacatggccattttcgactttctatcgtaatgtgtttcagcccttcctagtggatgaccaaaaatatcgttggaagttgcatttagtacctcttttctacacctctatttacctgtacctagtatatacataccacatgagagtggagtctacgattaagaatgagctattccttttagaacgaatactgatcgtgcctataattatactaccgccggtagcattaggaattctagccatggtaagcagagctgaggattcaaaggatcataaatcaggctcgacagaggaatatccatatgattacctattgtattatcctgccataaagtgttcgacatgccggatcgtcaagcctgctagatccaaacattgtagcatttgcaaccgatgcgttctcgtcgccgaccatcattgcatctggataaataactgcatcggaaagggaaactaccttcaattctaccttttcctaatttccaacatattctcgatgtgctacgcctttctaaggctgtggtacatttctttaaatagcacaagtacgctccctagagctgttctgactcttaccatattatgtggatgcttcactatcatctgcgctattttcacgtatcttcaattggccattgtaaaggagggaatgactacaaatgagcaagataaatggtataccattcaagagtatatgagagaaggaaaactggtgagatcattggatgatgattgcccatcttggtttttcaaatgcacagaacaaaaagatgacgctgctgaaccactccaagatcaacatgttacgttttatagcacgaatgcctacgaccataagcactacaaccttacacactacatcacgattaaagacgcgtccgaaattcccaatatatatgacaaaggtaccttcctggccaatctcacagatttaatatag

SEQ ID NO: 2046 - DNA, 1011 bp, Artificial Sequence
  Description of Artificial Sequence: Synthetic polynucleotide
atgtcttggaatttactttttgtgcttttgataggattcgtagttttgatattactttctcccgtcttcaagagtacatggccattttccactttctatcgtaatgtgtttcagcccttcttggtggatgaccaaaaatatcgttggaagttgcatttagtacctcttttctacacctctatttacttgtacttggtatatacataccacatgagagtggagtctacgattaagaatgagcttttccttttagaaagaatattgatcgtgcctataattatattaccgccggtagcattaggaattttagccatggtaagcagagctgaggattctaaggatcataaatctggctctacagaggaatatccatatgattacttgttgtattatcctgccataaagtgttctacatgcaggatcgtcaagcctgctagatccaaacattgtagcatttgcaacagatgcgttctcgtcgccgaccatcattgcatctggataaataactgcatcggaaagggaaactaccttcaattctaccttttcttgatttccaacatattctccatgtgctacgcctttttaaggctttggtacatttctttaaatagcacaagtacgctccctagagctgttttaactcttaccatattatgtggatgcttcactatcatctgcgctattttcacgtatcttcaattggccattgtaaaggagggaatgactacaaatgagcaagataaatggtataccattcaagagtatatgagagaaggaaaattagtgagaagtttggatgatgattgcccatcttggtttttcaaatgcacagaacaaaaagatgacgctgctgaaccactccaagatcaacatgttacgttttatagcacgaatgcctacgaccataagcactacaaccttacacactacatcacgattaaagacgcgtccgaaattcccaatatatatgacaaaggtaccttcttggccaatctcacagatttaatatga

SEQ ID NO: 2047 - DNA, 4767 bp, Saccharomyces cerevisiae
atggtgcagttagccaaagtcccaattctaggaaatgatattatccacgttgggtataacattcatgaccatttggttgaaaccataattaaacattgtccttcttcgacatacgttatttgcaatgatacgaacttgagtaaagttccatactaccagcaattagtcctggaattcaaggcttctttgccagaaggctctcgtttacttacttatgttgttaaaccaggtgagacaagtaaaagtagagaaaccaaagcgcagctagaagattatcttttagtggaaggatgtactcgtgatacggttatggtagcgatcggtggtggtgttattggtgacatgattgggttcgttgcatctacatttatgagaggtgttcgtgttgtccaagtaccaacatccttattggcaatggtcgattcctccattggtggtaaaactgctattgacactcctctaggtaaaaactttattggtgcattttggcaaccaaaatttgtccttgtagatattaaatggctagaaacgttagccaagagagagtttatcaatgggatggcagaagttatcaagactgcttgtatttggaacgctgacgaatttactagattagaatcaaacgcttcgttgttcttaaatgttgttaatggggcaaaaaatgtcaaggttaccaatcaattgacaaacgagattgacgagatatcgaatacagatattgaagctatgttggatcatacatataagttagttcttgagagtattaaggtcaaagcggaagttgtctcttcggatgaacgtgaatccagtctaagaaaccttttgaacttcggacattctattggtcatgcttatgaagctatactaaccccacaagcattacatggtgaatgtgtgtccattggtatggttaaagaggcggaattatcccgttatttcggtattctctcccctacccaagttgcacgtctatccaagattttggttgcctacgggttgcctgtttcgcctgatgagaaatggtttaaagagctaaccttacataagaaaacaccattggatatcttattgaagaaaatgagtattgacaagaaaaacgagggttccaaaaagaaggtggtcattttagaaagtattggtaagtgctatggtgactccgctcaatttgttagcgatgaagacctgagatttattctaacagatgaaaccctcgtttaccccttcaaggacatccctgctgatcaacagaaagttgttatcccccctggttctaagtccatctccaatcgtgctttaattcttgctgccctcggtgaaggtcaatgtaaaatcaagaacttattacattctgatgatactaaacatatgttaaccgctgttcatgaattgaaaggtgctacgatatcatgggaagataatggtgagacggtagtggtggaaggacatggtggttccacattgtcagcttgtgctgaccccttatatctaggtaatgcaggtactgcatctagatttttgacttccttggctgccttggtcaattctacttcaagccaaaagtatatcgttttaactggtaacgcaagaatgcaacaaagaccaattgctcctttggtcgattctttgcgtgctaatggtactaaaattgagtacttgaataatgaaggttccctgccaatcaaagtttatactgattcggtattcaaaggtggtagaattgaattagctgctacagtttcttctcagtacgtatcctctatcttgatgtgtgccccatacgctgaagaacctgtaactttggctcttgttggtggtaagccaatctctaaattgtacgtcgatatgacaataaaaatgatggaaaaattcggtatcaatgttgaaacttctactacagaaccttacacttattatattccaaagggacattatattaacccatcagaatacgtcattgaaagtgatgcctcaagtgctacatacccattggccttcgccgcaatgactggtactaccgtaacggttccaaacattggttttgagtcgttacaaggtgatgccagatttgcaagagatgtcttgaaacctatgggttgtaaaataactcaaacggcaacttcaactactgtttcgggtcctcctgtaggtactttaaagccattaaaacatgttgatatggagccaatgactgatgcgttcttaactgcatgtgttgttgccgctatttcgcacgacagtgatccaaattctgcaaatacaaccaccattgaaggtattgcaaaccagcgtgtcaaagagtgtaacagaattttggccatggctacagagctcgccaaatttggcgtcaaaactacagaattaccagatggtattcaagtccatggtttaaactcgataaaagatttgaaggttccttccgactcttctggacctgtcggtgtatgcacatatgatgatcatcgtgtggccatgagtttctcgcttcttgcaggaatggtaaattctcaaaatgaacgtgacgaagttgctaatcctgtaagaatacttgaaagacattgtactggtaaaacctggcctggctggtgggatgtgttacattccgaactaggtgccaaattagatggtgcagaacctttagagtgcacatccaaaaagaactcaaagaaaagcgttgtcattattggcatgagagcagctggcaaaactactataagtaaatggtgcgcatccgctctgggttacaaattagttgacctagacgagctgtttgagcaacagcataacaatcaaagtgttaaacaatttgttgtggagaacggttgggagaagttccgtgaggaagaaacaagaattttcaaggaagttattcaaaattacggcgatgatggatatgttttctcaacaggtggcggtattgttgaaagcgctgagtctagaaaagccttaaaagattttgcctcatcaggtggatacgttttacacttacatagggatattgaggagacaattgtctttttacaaagtgatccttcaagacctgcctatgtggaagaaattcgtgaagtttggaacagaagggaggggtggtataaagaatgctcaaatttctctttctttgctcctcattgctccgcagaagctgagttccaagctctaagaagatcgtttagtaagtacattgcaaccattacaggtgtcagagaaatagaaattccaagcggaagatctgcctttgtgtgtttaacctttgatgacttaactgaacaaactgagaatttgactccaatctgttatggttgtgaggctgtagaggtcagagtagaccatttggctaattactctgctgatttcgtgagtaaacagttatctatattgcgtaaagccactgacagtattcctatcatttttactgtgcgaaccatgaagcaaggtggcaactttcctgatgaagagttcaaaaccttgagagagctatacgatattgccttgaagaatggtgttgaattccttgacttagaactaactttacctactgatatccaatatgaggttattaacaaaaggggcaacaccaagatcattggttcccatcatgacttccaaggattatactcctgggacgacgctgaatgggaaaacagattcaatcaagcgttaactcttgatgtggatgttgtaaaatttgtgggtacggctgttaatttcgaagataatttgagactggaacactttagggatacacacaagaataagcctttaattgcagttaatatgacttctaaaggtagcatttctcgtgttttgaataatgttttaacacctgtgacatcagatttattgcctaactccgctgcccctggccaattgacagtagcacaaattaacaagatgtatacatctatgggaggtatcgagcctaaggaactgtttgttgttggaaagccaattggccactctagatcgccaattttacataacactggctatgaaattttaggtttacctcacaagttcgataaatttgaaactgaatccgcacaattggtgaaagaaaaacttttggacggaaacaagaactttggcggtgctgcagtcacaattcctctgaaattagatataatgcagtacatggatgaattgactgatgctgctaaagttattggtgctgtaaacacagttataccattgggtaacaagaagtttaagggtgataataccgactggttaggtatccgtaatgccttaattaacaatggcgttcccgaatatgttggtcataccgctggtttggttatcggtgcaggtggcacttctagagccgccctttacgccttgcacagtttaggttgcaaaaagatcttcataatcaacaggacaacttcgaaattgaagccattaatagagtcacttccatctgaattcaacattattggaatagagtccactaaatctatagaagagattaaggaacacgttggcgttgctgtcagctgtgtaccagccgacaaaccattagatgacgaacttttaagtaagctggagagattccttgtgaaaggtgcccatgctgcttttgtaccaaccttattggaagccgcatacaaaccaagcgttactcccgttatgacaatttcacaagacaaatatcaatggcacgttgtccctggatcacaaatgttagtacaccaaggtgtagctcagtttgaaaagtggacaggattcaagggccctttcaaggccatttttgatgccgttacgaaagagtag

SEQ ID NO: 2048 - DNA, 4767 bp, Artificial Sequence
  Description of Artificial Sequence: Synthetic polynucleotide
atggtgcagttagccaaagtcccaattttaggaaatgatattatccacgttgggtataacattcatgaccatttggttgaaaccataattaaacattgtccttcttctacatacgttatttgcaatgatacgaacttgagtaaagttccatactaccagcaattagtcttggaattcaaggcttctttgccagaaggctctcgtttacttacttatgttgttaaaccaggtgagacaagtaaaagtagagaaaccaaagcgcagttagaagattatcttttagtggaaggatgtactcgtgatacggttatggtagcgatcggtggtggtgttattggtgacatgattgggttcgttgcatctacatttatgagaggtgttcgtgttgtccaagtaccaacatccttattggcaatggtcgattcctccattggtggtaaaactgctattgacactcctttaggtaaaaactttattggtgcattttggcaaccaaaatttgtccttgtagatattaaatggttagaaacgttagccaagagagagtttatcaatgggatggcagaagttatcaagactgcttgtatttggaacgctgacgaatttactagattagaatctaacgcttctttgttcttaaatgttgttaatggggcaaaaaatgtcaaggttaccaatcaattgacaaacgagattgacgagatatccaatacagatattgaagctatgttggatcatacatataagttagttcttgagagtattaaggtcaaagcggaagttgtctcttctgatgaacgtgaatccagtttgagaaaccttttgaacttcggacattctattggtcatgcttatgaagctatattgaccccacaagcattacatggtgaatgtgtgtccattggtatggttaaagaggcggaattatcccgttatttcggtattctctcccctacccaagttgcacgtctttccaagattttggttgcctacgggttgcctgtttctcctgatgagaaatggtttaaagagttgaccttacataagaaaacaccattggatatcttattgaagaaaatgagtattgacaagaaaaacgagggttccaaaaagaaggtggtcattttagaaagtattggtaagtgctatggtgactccgctcaatttgttagcgatgaagacttgagatttattttaacagatgaaaccctcgtttaccccttcaaggacatccctgctgatcaacagaaagttgttatcccccctggttctaagtccatctccaatcgtgctttaattcttgctgccctcggtgaaggtcaatgtaaaatcaagaacttattacattctgatgatactaaacatatgttaaccgctgttcatgaattgaaaggtgctacgatatcttgggaagataatggtgagacggtagtggtggaaggacatggtggttccacattgtctgcttgtgctgaccccttatatttgggtaatgcaggtactgcatctagatttttgacttccttggctgccttggtcaattctacttccagccaaaagtatatcgttttaactggtaacgcaagaatgcaacaaagaccaattgctcctttggtcgattctttgcgtgctaatggtactaaaattgagtacttgaataatgaaggttccttgccaatcaaagtttatactgattctgtattcaaaggtggtagaattgaattagctgctacagtttcttctcagtacgtatcctctatcttgatgtgtgccccatacgctgaagaacctgtaactttggctcttgttggtggtaagccaatctctaaattgtacgtcgatatgacaataaaaatgatggaaaaattcggtatcaatgttgaaacttctactacagaaccttacacttattatattccaaagggacattatattaacccatctgaatacgtcattgaaagtgatgcctccagtgctacatacccattggccttcgccgcaatgactggtactaccgtaacggttccaaacattggttttgagtctttacaaggtgatgccagatttgcaagagatgtcttgaaacctatgggttgtaaaataactcaaacggcaacttctactactgtttctggtcctcctgtaggtactttaaagccattaaaacatgttgatatggagccaatgactgatgcgttcttaactgcatgtgttgttgccgctatttctcacgacagtgatccaaattctgcaaatacaaccaccattgaaggtattgcaaaccagcgtgtcaaagagtgtaacagaattttggccatggctacagagctcgccaaatttggcgtcaaaactacagaattaccagatggtattcaagtccatggtttaaacagcataaaagatttgaaggttccttccgactcttctggacctgtcggtgtatgcacatatgatgatcatcgtgtggccatgagtttctctcttcttgcaggaatggtaaattctcaaaatgaacgtgacgaagttgctaatcctgtaagaatacttgaaagacattgtactggtaaaacctggcctggctggtgggatgtgttacattccgaattgggtgccaaattagatggtgcagaacctttagagtgcacatccaaaaagaactccaagaaaagcgttgtcattattggcatgagagcagctggcaaaactactataagtaaatggtgcgcatccgctttgggttacaaattagttgacttggacgagttatttgagcaacagcataacaatcaaagtgttaaacaatttgttgtggagaacggttgggagaagttccgtgaggaagaaacaagaattttcaaggaagttattcaaaattacggcgatgatggatatgttttcagtacaggtggcggtattgttgaaagcgctgagtctagaaaagccttaaaagattttgcctcttctggtggatacgttttacacttacatagggatattgaggagacaattgtctttttacaaagtgatccttccagacctgcctatgtggaagaaattcgtgaagtttggaacagaagggaggggtggtataaagaatgctccaatttctctttctttgctcctcattgctccgcagaagctgagttccaagctttgagaagatcttttagtaagtacattgcaaccattacaggtgtcagagaaatagaaattccaagcggaagatctgcctttgtgtgtttaacctttgatgacttaactgaacaaactgagaatttgactccaatctgttatggttgtgaggctgtagaggtcagagtagaccatttggctaattactctgctgatttcgtgagtaaacagttatctatattgcgtaaagccactgacagtattcctatcatttttactgtgagaaccatgaagcaaggtggcaactttcctgatgaagagttcaaaaccttgagagagttatacgatattgccttgaagaatggtgttgaattccttgacttagaattgactttacctactgatatccaatatgaggttattaacaaaaggggcaacaccaagatcattggttcccatcatgacttccaaggattatactcctgggacgacgctgaatgggaaaacagattcaatcaagcgttaactcttgatgtggatgttgtaaaatttgtgggtacggctgttaatttcgaagataatttgagattagaacactttagggatacacacaagaataagcctttaattgcagttaatatgacttctaaaggtagcatttctcgtgttttgaataatgttttaacacctgtgacatctgatttattgcctaactccgctgcccctggccaattgacagtagcacaaattaacaagatgtatacatctatgggaggtatcgagcctaaggaattatttgttgttggaaagccaattggccactctagatctccaattttacataacactggctatgaaattttaggtttacctcacaagttcgataaatttgaaactgaatccgcacaattggtgaaagaaaaacttttggacggaaacaagaactttggcggtgctgcagtcacaattcctttgaaattagatataatgcagtacatggatgaattgactgatgctgctaaagttattggtgctgtaaacacagttataccattgggtaacaagaagtttaagggtgataataccgactggttaggtatccgtaatgccttaattaacaatggcgttcccgaatatgttggtcataccgctggtttggttatcggtgcaggtggcacttctagagccgccctttacgccttgcacagtttaggttgcaaaaagatcttcataatcaacaggacaacttctaaattgaagccattaatagagtctcttccatctgaattcaacattattggaatagagtccactaaatctatagaagagattaaggaacacgttggcgttgctgtcagctgtgtaccagccgacaaaccattagatgacgaacttttaagtaagttggagagattccttgtgaaaggtgcccatgctgcttttgtaccaaccttattggaagccgcatacaaaccaagcgttactcccgttatgacaatttctcaagacaaatatcaatggcacgttgtccctggatctcaaatgttagtacaccaaggtgtagctcagtttgaaaagtggacaggattcaagggccctttcaaggccatttttgatgccgttacgaaagagtga

SEQ ID NO: 2049 - DNA, 3447 bp, Saccharomyces cerevisiae
atgtgcagtagtataaatgaaggtccgtataattcgcccacttttggaaaatcattatcgttgaaagtagatggtgggttcaatgccgtatctatcaatccctctggtagggatattgttttggccagtcggcaaggtctttatattatcgacctggatgatccgtttacacctccaaggtggttgcatcatattacgccctggcaagttgctgatgtacaatggtcgccacatcccgcaaaaccatattggatagtctcgacatcgaatcaaaaggcaatcatatggaacttagcaaaatcttcatcaaatgccattgagtttgtacttcatgggcactcaagagcaattacagatataaacttcaatccgcaacatccggatgttttagctacctgttcagtcgatacgtatgtacatgcttgggatatgagaagtccacatagaccattttattcgacaagttcatggagatctgctgcttctcaagtgaagtggaattacaaggatcctaacgtcttggcatcttcacatggaaatgatatatttgtgtgggatttgagaaaaggctccactcccctctgttctttgaaaggccatgtaagctccgtaaatagcatagattttaaccggttcaaatattctgaaattatgtcgagttcgaacgatgggacggtgaagttttgggattattcaaaaagtacgacagaatcaaagagaactgtaacaacaaattttccaatctggagaggacgttaccttccttttggagaaggttattgtattatgccaatggttggaggcaataacgcagtttatctgattaatctatgcgacgatgatgacagtgaacaaaataagaagacgaaactccagccaatatatgcatttaaagggcatagtgaccgagtaattgactttctttggagatcaagacatacgtgcgatggggattacgacgatcgtgaatttcaattggttacttggtccaaagactgcgatttaaaactatggccaatttctgatagtatttatgggaaagttaactttgacagaggcaagagacttgaggagaaactaccagattatgattattgctcatacaataaggaacctgaaaatagggaaaatgttcaaaagaatgagtttaggcgtttacgagaaaactttgtgacaacttctggattgaagaaaaacaagacaaaccacataacatggctctcaggaattagaatgaatagcgcaacttcacaagaggatttattcaatgagacaaaaatccaaaatttaggagaggaagtaagcgccattggtcacaagttcccaaaagtcgtttttgaaaagatatccgtgtccacaagggaattgtgcctgacgcttaatggcccctggtcagaggaaaatcctgatgattatatattcttacgaataagtattaatttccctctcaactatccaaacaaaggggacccccccaaattcacaattgaagagaattcaaatttaaccatgagtaagagacaagaaatactttccaatttagcaacaattggtcaaaagtatactgactcaaatctttactgcctggagccatgtatacgatttgttttaggtgagaaggttagcctggaggacatcgaagaagggcaagaacccttattaaattttgatattgcagatcacatagattttgaagaattatcgtcactggatagttcatattccgattctcaaaacccggaaaacctttcttcgcaatcagatatagagtcatacaaggaagcactggtattcccagatacttcgaatcaaggtttggattttggaagaaatttagctcttgatacgacacctgttccaaatgggtgtggatcttgttggactgcaacaggtgaactcttctgcttctttgcaaatgagaaaaaacccgagaaaaagcaaaatgcaataattaaactctctcaaaaagaagcaggggtagagaagcatccttttaaaattgagcctcaagttttatatgataaggaagttgacagcagtgtaatcaccgctgctgatgaattgaaagctcgccctaagcggtacgtggacaccttggggctgggaggcggtactaatggggattcaagaacatactttgacgacgagacatcttccgacgattcatttgatagtgtcgcggacgattgggacgatatattgagaaatgatataatagtgagaacaaaaattccaatactaagaggtaattttaaagctttcagctcagtacattcggaatccgggaaaacagtagaatctaccaaaaaaaataagaatttagtgatttccaaaaatttcagcagtttattaagcgaccgcaaagaactagcattagaatacttatttatggatgccacaccggaaggatttgctagaaataacgctttggtggcagaaaagtttgaccttgatgaaattagtcattgttggcaaatattatctgatatgttgatagaccaaagtgattacgatccttatactactatatggaataaccatcccatggggataaagtggttcataaaggaagcgattgtctactttgagaggcaacaaaatttacagatgctggccatgttatgctgtgtcatattaagcgccaggagaaaaaagattccagccagatattatgggcaagaattagagaatatggaaggaaccattgtgtttaatgacaacgaaagtcaaaacacatcattttggaaaggatctgatgctttttccaccaggtctaggagtagcactgttacaccaaatttttatggtaatcatttgagaggaaaaaacattcatggaggagacaactcctcaataaggtccgacgaccaccacgctaggttaaggacgcacaacactcttaatggtagtagtaaatttacggagccggcccaaaagcagggcagccgtgccatttcatccagcccttttcatagtagaatgcctgacatcaaagtcgagcttttacatgacgatattatagaagcttatgaacaagaagacctcttacatttagaggtatcagacataccaaagttccaaacttatatttatcaatattcaaagttactttttagatggggactgcctttagaaagggtcaaaattctaaaagttagtactgatttcagaagttcttatagttcccaaggcatcccccctaacaataacaagaaaagtccttacaatggtgtacttacgcactggatcgagaacaacgagtttggagaagaaaaattcctagcccgaaattgtaattactgtgatttaagagtgacaagaagtagcttcatatgtggaaattgtcaacatgttttacactcttcgtgcgcgaggatatggtgggagattggtgatgagtgcccatctggatgtgggtgcaattgtccggaaatgttcgatgcctaa

SEQ ID NO: 2050 - DNA, 3447 bp, Artificial Sequence
  Description of Artificial Sequence: Synthetic polynucleotide
atgtgcagtagtataaatgaaggtccgtataattctcccacttttggaaaatctttatctttgaaagtagatggtgggttcaatgccgtatctatcaatccctctggtagggatattgttttggccagtagacaaggtctttatattatcgacttggatgatccgtttacacctccaaggtggttgcatcatattacgccctggcaagttgctgatgtacaatggtctccacatcccgcaaaaccatattggatagtctctacaagtaatcaaaaggcaatcatatggaacttagcaaaatcttcttccaatgccattgagtttgtacttcatgggcactccagagcaattacagatataaacttcaatccgcaacatccggatgttttagctacctgttctgtcgatacgtatgtacatgcttgggatatgagaagtccacatagaccattttattctacaagttcttggagatctgctgcttctcaagtgaagtggaattacaaggatcctaacgtcttggcatcttctcatggaaatgatatatttgtgtgggatttgagaaaaggctccactcccctctgttctttgaaaggccatgtaagctccgtaaatagcatagattttaacagattcaaatattctgaaattatgagcagtagtaacgatgggacggtgaagttttgggattattctaaaagtacgacagaatccaagagaactgtaacaacaaattttccaatctggagaggacgttaccttccttttggagaaggttattgtattatgccaatggttggaggcaataacgcagtttatttgattaatttatgcgacgatgatgacagtgaacaaaataagaagacgaaactccagccaatatatgcatttaaagggcatagtgacagagtaattgactttctttggagatctagacatacgtgcgatggggattacgacgatcgtgaatttcaattggttacttggtccaaagactgcgatttaaaattatggccaatttctgatagtatttatgggaaagttaactttgacagaggcaagagacttgaggagaaattaccagattatgattattgctcttacaataaggaacctgaaaatagggaaaatgttcaaaagaatgagtttaggcgtttaagagaaaactttgtgacaacttctggattgaagaaaaacaagacaaaccacataacatggctctctggaattagaatgaatagcgcaacttctcaagaggatttattcaatgagacaaaaatccaaaatttaggagaggaagtaagcgccattggtcacaagttcccaaaagtcgtttttgaaaagatatccgtgtccacaagggaattgtgcttaacgcttaatggcccctggtctgaggaaaatcctgatgattatatattcttaagaataagtattaatttccctctcaactatccaaacaaaggggacccccccaaattcacaattgaagagaatagtaatttaaccatgagtaagagacaagaaatactttccaatttagcaacaattggtcaaaagtatactgactctaatctttactgcttagagccatgtataagatttgttttaggtgagaaggttagcttagaggacatcgaagaagggcaagaacccttattaaattttgatattgcagatcacatagattttgaagaattatcttctttagatagttcttattccgattctcaaaacccggaaaacctttcttctcaatctgatatagagagttacaaggaagcattggtattcccagatacttccaatcaaggtttggattttggaagaaatttagctcttgatacgacacctgttccaaatgggtgtggatcttgttggactgcaacaggtgaactcttctgcttctttgcaaatgagaaaaaacccgagaaaaagcaaaatgcaataattaaactctctcaaaaagaagcaggggtagagaagcatccttttaaaattgagcctcaagttttatatgataaggaagttgacagcagtgtaatcaccgctgctgatgaattgaaagctcgccctaagagatacgtggacaccttggggttgggaggcggtactaatggggattccagaacatactttgacgacgagacatcttccgacgattcttttgatagtgtcgcggacgattgggacgatatattgagaaatgatataatagtgagaacaaaaattccaatattaagaggtaattttaaagctttcagctctgtacattctgaatccgggaaaacagtagaatctaccaaaaaaaataagaatttagtgatttccaaaaatttcagcagtttattaagcgaccgcaaagaattggcattagaatacttatttatggatgccacaccggaaggatttgctagaaataacgctttggtggcagaaaagtttgaccttgatgaaattagtcattgttggcaaatattatctgatatgttgatagaccaaagtgattacgatccttatactactatatggaataaccatcccatggggataaagtggttcataaaggaagcgattgtctactttgagaggcaacaaaatttacagatgttggccatgttatgctgtgtcatattaagcgccaggagaaaaaagattccagccagatattatgggcaagaattagagaatatggaaggaaccattgtgtttaatgacaacgaaagtcaaaacacatctttttggaaaggatctgatgctttttccaccaggtctaggagtagcactgttacaccaaatttttatggtaatcatttgagaggaaaaaacattcatggaggagacaactcctccataaggtccgacgaccaccacgctaggttaaggacgcacaacactcttaatggtagtagtaaatttacggagccggcccaaaagcagggcagccgtgccatttcttccagcccttttcatagtagaatgcctgacatcaaagtcgagcttttacatgacgatattatagaagcttatgaacaagaagacctcttacatttagaggtaagtgacataccaaagttccaaacttatatttatcaatattccaagttactttttagatggggattgcctttagaaagggtcaaaattttgaaagttagtactgatttcagaagttcttatagttcccaaggcatcccccctaacaataacaagaaaagtccttacaatggtgtacttacgcactggatcgagaacaacgagtttggagaagaaaaattcttggccagaaattgtaattactgtgatttaagagtgacaagaagtagcttcatatgtggaaattgtcaacatgttttacactctagttgcgcgaggatatggtgggagattggtgatgagtgcccatctggatgtgggtgcaattgtccggaaatgttcgatgcctga

SEQ ID NO: 2051 - DNA, 1929 bp, Saccharomyces cerevisiae
atgaatattgtcaaattacaaagaaaatttccaattttgactcaagaggatcttttttccacaattgaaaagttcagagccattgacttagatgataaaggatgggttgaaaaacagcaagctctagaagcggtgtccaaagatggtgatgctacttatgacgaagcaagagaaaccctgaagcatgtgggtgtggatgcgtcaggccgtgttgaactggacgattacgtcgggttggttgcaaaattaagagaatctaaaacaggagctgctccacagaccactttcaacgtagcacctaactcaacccctattgtttccactgctgccacaggactacagcacaagggtaagggtactcaagccaagattattgttgctggctcccaaacaggtactacacataccatcaatgaagaagaaagacgtgaatttactaaacatatcaatagcgtcttggcgggagaccaagatataggtgatttgcttccatttcctactgatactttccaattatttgatgaatgtagggatgggttggtgctatctaagttgatcaacgactctgttcctgatactatcgatacaagagttttgaattggcctaagaagggtaaggaattgaataattttcaggctagtgaaaatgctaatattgttattaattctgcaaaagccattggttgtgtcgttgttaatgttcattccgaggacattattgaaggtagagagcatttgatcctgggtttgatttggcaaattattaggagaggtttgttaagtaaaattgatattaagctgcatcctgagttataccgtctattggaggatgatgaaacgttggagcaatttttgaggttgcctccggagcaaattctactacgttggtttaactaccatttgaagcaagcaaactggaacagaagggttaccaatttttcaaaagacgtgtctgatggtgaaaactatactatcttgttgaaccagttggaccccgccttgtgttctaaggcaccattacaaaccacagatttaatggagagagctgagcaagttttacaaaatgctgaaaagctagattgtagaaagtatttaaccccaagttcattagttgcggggaaccctaaattaaacctggctttcgtggcacatctattcaatacacatcctggattagagcctattcaggaagaggaaaagcctgaaattgaagaatttgacgccgaaggtgagagagaggcaagagtctttaccttatggttgaactctcttgacgttgatccacctgtcatttcgctgtttgatgatttgaaggatggtttgatattattgcaagcttacgaaaaggtgatgcccggtgctgttgattttaaacatgtcaacaaaagaccggcctcgggtgcagagatatccagattcaaagccttagaaaacaccaactatgcagtcgacttgggcagagccaaaggattttctttggttggtatcgaaggatctgatattgtagatggtaacaaattactgaccttagggttagtgtggcaattgatgcgtagaaatatttcgataaccatgaagacattatcctcaagtggtagagacatgagtgattctcaaatattaaagtgggcccaagaccaggtaactaaaggtggtaaaaactctaccattagatcatttaaggaccaagctttatcaaacgcccacttcttattggatgttctgaatggtatcgcgccgggctatgttgattatgatctagtcacccctggtaacaccgaggaagaaaggtacgcaaacgcaagattggctatttctattgctagaaagttgggtgctttgatttggttggtgccagaagatatcaacgaagttcgtgcaagattaattattacttttatcgcttcgttaatgactttgaacaaatga

SEQ ID NO: 2052 - DNA, 1929 bp, Artificial Sequence
  Description of Artificial Sequence: Synthetic polynucleotide
atgaatattgtcaaattacaaagaaaatttccaattttgactcaagaggatcttttttccacaattgaaaagttcagagccattgacttagatgataaaggatgggttgaaaaacagcaagctttggaagcggtgtccaaagatggtgatgctacttatgacgaagcaagagaaaccttgaagcatgtgggtgtggatgcgtctggccgtgttgaattagacgattacgtcgggttggttgcaaaattaagagaatctaaaacaggagctgctccacagaccactttcaacgtagcacctaactctacccctattgtttccactgctgccacaggattacagcacaagggtaagggtactcaagccaagattattgttgctggctcccaaacaggtactacacataccatcaatgaagaagaaagacgtgaatttactaaacatatcaatagcgtcttggcgggagaccaagatataggtgatttgcttccatttcctactgatactttccaattatttgatgaatgtagggatgggttggtgttatctaagttgatcaacgactctgttcctgatactatcgatacaagagttttgaattggcctaagaagggtaaggaattgaataattttcaggctagtgaaaatgctaatattgttattaattctgcaaaagccattggttgtgtcgttgttaatgttcattccgaggacattattgaaggtagagagcatttgatcttgggtttgatttggcaaattattaggagaggtttgttaagtaaaattgatattaagttgcatcctgagttataccgtttattggaggatgatgaaacgttggagcaatttttgaggttgcctccggagcaaattttattacgttggtttaactaccatttgaagcaagcaaactggaacagaagggttaccaatttttccaaagacgtgtctgatggtgaaaactatactatcttgttgaaccagttggaccccgccttgtgttctaaggcaccattacaaaccacagatttaatggagagagctgagcaagttttacaaaatgctgaaaagttggattgtagaaagtatttaaccccaagttctttagttgcggggaaccctaaattaaacttggctttcgtggcacatcttttcaatacacatcctggattagagcctattcaggaagaggaaaagcctgaaattgaagaatttgacgccgaaggtgagagagaggcaagagtctttaccttatggttgaactctcttgacgttgatccacctgtcatttctttatttgatgatttgaaggatggtttgatattattgcaagcttacgaaaaggtgatgcccggtgctgttgattttaaacatgtcaacaaaagaccggcctctggtgcagagatatccagattcaaagccttagaaaacaccaactatgcagtcgacttgggcagagccaaaggattttctttggttggtatcgaaggatctgatattgtagatggtaacaaattattaaccttagggttagtgtggcaattgatgcgtagaaatatttctataaccatgaagacattatcctccagtggtagagacatgagtgattctcaaatattaaagtgggcccaagaccaggtaactaaaggtggtaaaaactctaccattagatcttttaaggaccaagctttatctaacgcccacttcttattggatgttttgaatggtatcgcgccgggctatgttgattatgatttggtcacccctggtaacaccgaggaagaaaggtacgcaaacgcaagattggctatttctattgctagaaagttgggtgctttgatttggttggtgccagaagatatcaacgaagttcgtgcaagattaattattacttttatcgcttctttaatgactttgaacaaatga

SEQ ID NO: 2053 - DNA, 876 bp, Saccharomyces cerevisiae
atgagcaataaaagcaaccgcaggagtttacgtgacatagggaatacgattggtcgaaataatataccaagtgacaaggacaatgtctttgtgagattgagtatgtcccctttgaggacgacaagccaaaaagagtttttgaaaccacctatgaggatatcacctaacaagacagatggaatgaagcatagtatacaagtaacaccaagaaggattatgtcgccggaatgtctgaagggctatgtctctaaggaaactcaaagcctggataggcctcagttcaaaaattcgaataaaaatgtgaagatccaaaactcagatcatataactaatataatattccctacatcaccaaccaaactgacattcagtaatgaaaataaaatcgggggtgatggttcgttaacgagaatacgggcccggtttaagaatggactcatgtcacctgaaaggatacagcagcaacagcagcaacatattctcccatcggatgccaaaagcaacactgacctctgttctaatactgagctcaaggacgccccatttgagaatgaccttcctcgagctaaattgaaagggaagaatttattagttgaactcaagaaagaagaggaagacgtgggaaatggcatagaatcccttactaaatcgaacactaaactgaattccatgctggcgaacgaaggtaagatacacaaagctagtttccagaaaagtgtaaaatttaaactacctgataatatagtgactgaagaaaccgtggaacttaaagaaataaaggacttgctactacaaatgttgagaagacagcgagagattgaatcaagattatccaatatcgaacttcaactcacggaaataccgaaacataagtaa

SEQ ID NO: 2054 - DNA, 876 bp, Artificial Sequence
  Description of Artificial Sequence: Synthetic polynucleotide
atgagcaataaaagcaaccgcaggagtttacgtgacatagggaatacgattggtagaaataatataccaagtgacaaggacaatgtctttgtgagattgagtatgtcccctttgaggacgacaagccaaaaagagtttttgaaaccacctatgaggatatctcctaacaagacagatggaatgaagcatagtatacaagtaacaccaagaaggattatgtctccggaatgtttgaagggctatgtctctaaggaaactcaaagcttagataggcctcagttcaaaaatagtaataaaaatgtgaagatccaaaacagtgatcatataactaatataatattccctacatctccaaccaaattaacattcagtaatgaaaataaaatcgggggtgatggttctttaacgagaataagagccagatttaagaatggactcatgtctcctgaaaggatacagcagcaacagcagcaacatattctcccaagtgatgccaaaagcaacactgacctctgttctaatactgagctcaaggacgccccatttgagaatgaccttcctagggctaaattgaaagggaagaatttattagttgaactcaagaaagaagaggaagacgtgggaaatggcatagaatcccttactaaaagtaacactaaattgaattccatgttggcgaacgaaggtaagatacacaaagctagtttccagaaaagtgtaaaatttaaattacctgataatatagtgactgaagaaaccgtggaacttaaagaaataaaggacttgttattacaaatgttgagaagacagagagagattgaatctagattatccaatatcgaacttcaactcacggaaataccgaaacataagtga

SEQ ID NO: 2055 - DNA, 1671 bp, Saccharomyces cerevisiae
atgtttgataagttaccttatgagatttttaaacaaattgcctggagaattccgcaggaagataaaatttcgttaacatatgtatgcaaaagatcctatgaatcaattatacctttcatctaccagaatttatttcttaatgaaacctatcacatcaatggtgactatgataactcatttggaacctgttattggtctgtcctaaactttcactacatagatgaagatgattccaatactaaaaacgacatgtcgaatagaagactagctaaagtgaaatttagttatttcgaaagaacattagcagagtcaccgaaaagattatgtcccttaattaatcgaatacgttgtacatggcatttaaatgaagatgtgatgacaaatgtacttaaattgctatccgagtatggatccaatttgaaatttgtcgatcaatttgttcgctcatcagttaacaaggggctagaacctttatcaaagcaattaaaaactctaacattaacgccaccaacgttaatgcccacccataacagtgtaagcggttcttatttgaataaaattgatcggttgctcttgaagtgcgatctatctcgattagaaaaactttccattcatataaacgcattgaagtacttcaaaaataccgggtctcctatgaagatcaaagcattggtattaaatttgcgacccgacacacttaaccttgcggagtacgacgcttccgatgacttcttaaaagagctagaatacatcgacatatttgatgcttccaccttaaggcagctagagattttgtcttggtacagtcgcgacgattttccctctggcgaagaaggtggttttgacaggttatatgtcaaatgggggctagaaggattttggaaatttccgaacattgagaaactatcattagcgtcattggtttacagcgaattttttctaatgaattgtttggctgtgtttcacaatttaaagatactgaaacttgattacatgggtaaatttgacttcgatgtgtcgttgattaacttcttatctaaacaagtgtgtggcaaaaaattacagcgttttgacatacactgccaactaaatcacaggcttttttttcccatgacagataacccactaactcgcttgaatttcgatggtttctgcccttgttcaacttgcaaaaatacaattcacgaggtcattctaaaaaaaatctttcctgaaacccggtcaaaacttttaaagaacccaaataagttccaagcccataatttcttttaccaaatgtttttcgagaacaagatcatgccctatacaaacattattgacaacgaatcacctgcgatgggatgggattctgtacctattgaaacgtttgtacgaaagttcaatgaaaatctgcaaagcaccatagaaaatactgagaatattacagtgaataaaattactagagaagatgccattagtttgtaccacttataccttcattatctaaaagacgtatttaaagtttttgagcaaagtttgccgaacttagaatatctaaccatcaacggtatacctacaaaaataatacaagtggacgagttacaacgatgcgcggttcccctcttctataataatggctataaaagcaactctgtttatgaattggtggacgcagaagctctatttagttga

SEQ ID NO: 2056 - DNA, 1671 bp, Artificial Sequence
  Description of Artificial Sequence: Synthetic polynucleotide
atgtttgataagttaccttatgagatttttaaacaaattgcctggagaattccgcaggaagataaaatttctttaacatatgtatgcaaaagatcctatgaaagtattatacctttcatctaccagaatttatttcttaatgaaacctatcacatcaatggtgactatgataactcttttggaacctgttattggtctgtcttgaactttcactacatagatgaagatgattccaatactaaaaacgacatgagtaatagaagattggctaaagtgaaatttagttatttcgaaagaacattagcagagtctccgaaaagattatgtcccttaattaatagaatacgttgtacatggcatttaaatgaagatgtgatgacaaatgtacttaaattgttatccgagtatggatccaatttgaaatttgtcgatcaatttgttcgctcttctgttaacaaggggttggaacctttatccaagcaattaaaaactttgacattaacgccaccaacgttaatgcccacccataacagtgtaagcggttcttatttgaataaaattgatagattgctcttgaagtgcgatttatctagattagaaaaactttccattcatataaacgcattgaagtacttcaaaaataccgggtctcctatgaagatcaaagcattggtattaaatttgagacccgacacacttaaccttgcggagtacgacgcttccgatgacttcttaaaagagttagaatacatcgacatatttgatgcttccaccttaaggcagttggagattttgtcttggtacagtcgcgacgattttccctctggcgaagaaggtggttttgacaggttatatgtcaaatgggggttggaaggattttggaaatttccgaacattgagaaattatctttagcgtctttggtttacagcgaattttttttgatgaattgtttggctgtgtttcacaatttaaagatattgaaacttgattacatgggtaaatttgacttcgatgtgtctttgattaacttcttatctaaacaagtgtgtggcaaaaaattacagcgttttgacatacactgccaattgaatcacaggcttttttttcccatgacagataacccattgactcgcttgaatttcgatggtttctgcccttgttccacttgcaaaaatacaattcacgaggtcattttgaaaaaaatctttcctgaaaccagaagtaaacttttaaagaacccaaataagttccaagcccataatttcttttaccaaatgtttttcgagaacaagatcatgccctatacaaacattattgacaacgaatctcctgcgatgggatgggattctgtacctattgaaacgtttgtaagaaagttcaatgaaaatttacaaagcaccatagaaaatactgagaatattacagtgaataaaattactagagaagatgccattagtttgtaccacttataccttcattatttgaaagacgtatttaaagtttttgagcaaagtttgccgaacttagaatatttgaccatcaacggtatacctacaaaaataatacaagtggacgagttacaaagatgcgcggttcccctcttctataataatggctataaaagcaactctgtttatgaattggtggacgcagaagctttgtttagttga

SEQ ID NO: 2057 - DNA, 1488 bp, Saccharomyces cerevisiae
atgtcaaattctccaacagtagcaactttgtcacaagaatatttcgatccgaatattcctcaaatactcccacacgagaaaatgtataagattcaggtggggaaatcattattcaaaatcagcggtgcttctttaagctcggatggtcctagtttcttcaccgaatatttttctaagaagcgctctccttccaataacgatgacagtaataacgataccatggaatctaataaaaatgaggttctattcatagacagatcagccgaagtttttgaatggatctatcaacatttgcaaggatatataattgagattaaggatgaagtacaatataccatgcttttcgcagatgcgatgtactacaatttaccgcgattgcgatctttactgaaagaaacggactattattttaccaacattggtggacaatcattcaagatagcgaaaaatttatttagaagagaaggagattccccaaattatttcgaaatatatgcggctacagtttatatcgatgtggaagagctgataatatctaaaaaactattaaggcctccatctcattctgctccttacattccaagatcttctgagtacttcaaagatttgctgacgttactgggaggagcatccatcgatctagatgataataaaagaaatgccttgataaaagagtgccgttattacaggcttttaaatctcgaacagcggctaatcaaatctcatattagctataacccaataacaaggaaagaagagatttgcctcctattgaaggatttgtcaaaaaaaggcatcacttttccagcttcttctgcattttcaacctcgccctactttgaagacgatttctgtagcataaatgaatgcgactcgctatcaaaaacccgtgaacagccagcaaataaaaagattaaacttgacatgactgaaaaatataacgattcctggaatatgctttgttataagagaccttttttagataagcatccgagagagttgatatttcaaataaattcgactgattgtacgataatcctcaataaggaaagccaaagtatccatgtagacataactggagaatccgcctataagtttgaggccttatttggaagtcatttgccaaatacaccctctggtgcgcctaagttgaaaaattaccagtatcggttcccatccgatagtacgcagacgaaaattgaaactcattatttacttccagcatgcatatatctctgtgatttggacataaacggcattaagatttctcaagttcaaactttgctaactgataaaaataaattcaatgacagggtcattgacgtgtctgatccacttgaccttagattttgttctggtttaaagctttacttaagaaagtctctctggaaactggccgtgaaagatggcaatattatgctgatagctattaaagctatagcatttaacggaactaaggaatactacaagggatatgaatatctgtag

SEQ ID NO: 2058 - DNA, 1488 bp, Artificial Sequence
  Description of Artificial Sequence: Synthetic polynucleotide
atgagtaattctccaacagtagcaactttgtctcaagaatatttcgatccgaatattcctcaaatactcccacacgagaaaatgtataagattcaggtggggaaatctttattcaaaatcagcggtgcttctttaagcagtgatggtcctagtttcttcaccgaatatttttctaagaagcgctctccttccaataacgatgacagtaataacgataccatggaatctaataaaaatgaggttttgttcatagacagatctgccgaagtttttgaatggatctatcaacatttgcaaggatatataattgagattaaggatgaagtacaatataccatgcttttcgcagatgcgatgtactacaatttaccgcgtttgagatctttattgaaagaaacggactattattttaccaacattggtggacaaagtttcaagatagcgaaaaatttatttagaagagaaggagattccccaaattatttcgaaatatatgcggctacagtttatatcgatgtggaagagttgataatatctaaaaaattattaaggcctccatctcattctgctccttacattccaagatcttctgagtacttcaaagatttgttgacgttattaggaggagcatccatcgatttggatgataataaaagaaatgccttgataaaagagtgccgttattacaggcttttaaatctcgaacagaggttgatcaaatctcatattagctataacccaataacaaggaaagaagagatttgcctcttattgaaggatttgagtaaaaaaggcatcacttttccagcttcttctgcattttccaccagcccctactttgaagacgatttctgtagcataaatgaatgcgactctttatccaaaacccgtgaacagccagcaaataaaaagattaaacttgacatgactgaaaaatataacgattcctggaatatgctttgttataagagaccttttttagataagcatccgagagagttgatatttcaaataaattctactgattgtacgataatcctcaataaggaaagccaaagtatccatgtagacataactggagaatccgcctataagtttgaggccttatttggaagtcatttgccaaatacaccctctggtgcgcctaagttgaaaaattaccagtatagattcccatccgatagtacgcagacgaaaattgaaactcattatttacttccagcatgcatatatctctgtgatttggacataaacggcattaagatttctcaagttcaaactttgttgactgataaaaataaattcaatgacagggtcattgacgtgtctgatccacttgaccttagattttgttctggtttaaagctttacttaagaaagtctctctggaaattggccgtgaaagatggcaatattatgttgatagctattaaagctatagcatttaacggaactaaggaatactacaagggatatgaatatttatga

SEQ ID NO: 2059 - DNA, 4548 bp, Saccharomyces cerevisiae
atggctggtaatcttgtttcatgggcctgcaagctctgtagatctcctgaagggtttggacctatatccttttacggtgactttactcaatgcttcatcgacggtgtgatcctaaatctatcagcaattttcatgataaccttcggtatcagagatttagttaacctttgcaagaaaaaacactctggcatcaaatataggcggaattggattattgtctctaggatggcactagttctgttggagatagcgtttgtttcacttgcgtctttaaatatttctaaagaagaagcggaaaactttaccattgtaagtcaatatgcttctacaatgttatctttatttgttgctttagccttacactggatagaatacgatagatcagttgtagccaatacggtacttttattctattggctttttgaaacattcggtaattttgctaaactaataaatattctaattagacacacctacgaaggcatttggtattccggacaaacgggtttcatactaacgttattccaagtaataacatgtgccagtatcctgttacttgaagctcttccaaagaagccgctaatgccacatcaacacatacatcaaactttaacaagaagaaaaccaaatccatacgatagcgcaaacatattttccaggattaccttctcttggatgtcaggtttgatgaaaactggctatgaaaaatacttagtggaagcagatttatataaattaccgaggaactttagtagtgaagaactctctcaaaaattggagaaaaactgggaaaatgagttgaagcaaaaatcaaatccttcattatcatgggctatatgcagaacttttggatctaaaatgcttttagccgcattctttaaagcaattcatgatgttctagcatttactcaaccacaactactaaggattttaatcaagttcgtcacagactataacagtgagagacaggatgaccattcttctcttcaagggtttgaaaataaccacccacaaaaattacccattgtaagagggtttttgattgcgtttgctatgtttctggtgggctttactcagacatctgtcctgcatcaatatttcctgaatgtcttcaacacaggcatgtatattaagagcgccctaacggctttaatatatcaaaaatccttagtgctatctaatgaggcttctggactttcctctaccggtgacattgtcaatctcatgagtgtggatgttcaaaaattacaagatttaacacaatggctaaatttaatatggtcagggccttttcaaatcattatttgcttatattctctgtataagttgttgggaaattccatgtgggttggcgtgattatactagttattatgatgccattgaactcatttttgatgaggatacaaaagaagttgcaaaaatcccagatgaagtacaaagatgaaaggacccgtgttataagtgaaatactaaacaatattaaatctttgaagttatatgcatgggagaagccttatagggaaaagctagaagaagtaagaaataacaaagagttaaaaaatcttacaaaactaggatgttatatggctgtgacaagttttcagttcaatatagtaccattccttgtttcatgttgtacctttgctgtatttgtttatactgaggatagagcattgactactgacttagttttccctgctttgactctgttcaacctgctctcattcccactaatgattattcctatggttttaaattcttttatcgaagcttctgtttctattggtagattatttacattctttaccaatgaagagctacaaccagattcggttcagcgtttaccaaaagtaaaaaatattggcgatgtagccattaacattggagatgatgctacctttttatggcaacggaaaccggaatacaaagtagccttaaagaatattaatttccaagctaaaaaaggaaatttgacctgtattgttggtaaagttggcagtggtaaaacagctctattgtcatgcatgttaggtgatctattcagggttaaaggtttcgccaccgttcatggttctgttgcttatgtttcacaagttccatggataatgaatggtactgtaaaggaaaacattttatttgggcatagatacgacgcggaattttacgaaaaaacgatcaaggcctgtgcgttaactattgatcttgcaattttgatggatggagataagacattagttggcgagaaagggatctccttatctggaggacaaaaagctcgtttgtctttagcaagagcagtttatgcgagagctgacacttatttacttgatgatcctttggcagctgttgatgaacacgttgccaggcacttgatcgaacatgtgttgggtccaaatggtttattacatacaaaaacgaaggtattagccactaataaggtgagcgcgttatccatcgcagattctattgcattattagataatggagaaatcacacagcagggtacatatgatgagattacgaaggacgctgattcgccattatggaaattgctcaacaactatggtaaaaaaaataacggtaagtcgaatgaattcggtgactcctctgaaagctcagttcgagaaagtagtatacctgtagaaggagagctggaacaactgcagaaattaaatgatttggattttggcaactctgacgccataagtttaaggagggccagtgatgcaactttgggaagcatcgattttggtgacgatgaaaatattgctaaaagagagcatcgtgaacagggaaaagtaaagtggaacatttacctagagtacgctaaagcttgcaacccgaaaagcgtttgtgtattcatattgtttattgttatatcgatgttcctctctgttatgggtaacgtttggttgaaacattggtctgaagttaatagccgctatggatctaatccaaatgccgcgcgttacttggccatttattttgcacttggtattggttcagcactggcaacattaatccagacaatcgttctctgggttttttgtaccattcatgcctccaaatatttacacaacttgatgacaaactctgtgttgagagccccaatgacgttttttgaaacaacaccaatcggtagaattctaaacagattctcaaatgacatatacaaagtggatgctttattaggaagaacattttctcagtttttcgtcaatgcagtgaaagtcacattcactattacggttatctgtgcgacgacatggcaatttatcttcattatcattccactaagtgtgttttacatctactaccagcagtattacctgagaacatcaagggagttgcgtcgtttagactctattactaggtctccaatctactctcatttccaagagactttgggtggccttgcaacggttagaggttattctcaacagaaaaggttttcccacattaatcaatgccgcattgataataacatgagtgcgttctatccctctatcaatgctaaccgttggctagcatataggttggaacttattggttcaattatcattctaggtgctgcaactttatccgtttttagactaaaacaaggcacattaacggcaggtatggtgggtttatcattaagctatgctttacaaatcactcaaacgttaaattggattgttagaatgactgtggaagttgaaacgaatattgtttcagtggaaagaataaaggaatatgctgatttgaagagcgaggcacctttaatagttgaaggccacagaccacccaaagaatggccgagccagggtgatataaagtttaataattattccactcgttataggccggagcttgatcttgttctgaagcacattaatatacacattaaaccaaatgaaaaagttggtatcgtgggtagaacgggtgcgggaaaatcctcattaacgctagcattattcaggatgattgaggctagcgagggaaacatcgtaatcgacaacattgccatcaacgagattgggttatatgatttgagacataaattgtcaatcatacctcaggattctcaagtttttgagggcactgttcgtgagaacattgatcccattaaccaatacactgatgaagctatttggagggcattggaactttctcatttgaaagaacacgtgctatcaatgagcaatgacggattagatgcccaactaaccgaaggtggtggcaacttaagtgttggacaaagacaattattatgtcttgcaagagcaatgttggttccatcaaagattttggtgcttgatgaagccacggccgcagtcgacgtggagacagataaagtcgtccaagagacgattcgtactgctttcaaggacagaactatcttgaccatcgcgcatagactgaacacgataatggacagtgatagaatcatagtgttggacaatggtaaagtagccgagtttgactctccgggccagttattaagtgataacaaatcattgttctattcactgtgcatggaggctggtttggtcaatgaaaattaa

SEQ ID NO: 2060 - DNA, 4548 bp, Artificial Sequence
  Description of Artificial Sequence: Synthetic polynucleotide
atggctggtaatcttgtttcctgggcctgcaagctctgtagatctcctgaagggtttggacctatatccttttacggtgactttactcaatgcttcatcgacggtgtgatcttgaatttaagtgcaattttcatgataaccttcggtatcagagatttagttaacctttgcaagaaaaaacactctggcatcaaatataggagaaattggattattgtctctaggatggcattggttttattggagatagcgtttgtttcccttgcgtctttaaatatttctaaagaagaagcggaaaactttaccattgtaagtcaatatgcttctacaatgttatctttatttgttgctttagccttacactggatagaatacgatagatctgttgtagccaatacggtacttttattctattggctttttgaaacattcggtaattttgctaaattgataaatattttaattagacacacctacgaaggcatttggtattccggacaaacgggtttcatattaacgttattccaagtaataacatgtgccagtatcttattacttgaagctcttccaaagaagccgttaatgccacatcaacacatacatcaaactttaacaagaagaaaaccaaatccatacgatagcgcaaacatattttccaggattaccttctcttggatgagtggtttgatgaaaactggctatgaaaaatacttagtggaagcagatttatataaattaccgaggaactttagtagtgaagaactctctcaaaaattggagaaaaactgggaaaatgagttgaagcaaaaatctaatccttctttatcttgggctatatgcagaacttttggatctaaaatgcttttagccgcattctttaaagcaattcatgatgttttagcatttactcaaccacaattattgaggattttaatcaagttcgtcacagactataacagtgagagacaggatgaccattcttctcttcaagggtttgaaaataaccacccacaaaaattacccattgtaagagggtttttgattgcgtttgctatgtttttagtgggctttactcagacatctgtcttgcatcaatatttcttgaatgtcttcaacacaggcatgtatattaagagcgccttgacggctttaatatatcaaaaatccttagtgttatctaatgaggcttctggactttcctctaccggtgacattgtcaatctcatgagtgtggatgttcaaaaattacaagatttaacacaatggttaaatttaatatggtctgggccttttcaaatcattatttgcttatattctttgtataagttgttgggaaattccatgtgggttggcgtgattatattagttattatgatgccattgaactcttttttgatgaggatacaaaagaagttgcaaaaatcccagatgaagtacaaagatgaaaggacccgtgttataagtgaaatattaaacaatattaaatctttgaagttatatgcatgggagaagccttatagggaaaagttggaagaagtaagaaataacaaagagttaaaaaatcttacaaaattaggatgttatatggctgtgacaagttttcagttcaatatagtaccattccttgtttcttgttgtacctttgctgtatttgtttatactgaggatagagcattgactactgacttagttttccctgctttgactttattcaacttactctctttcccattaatgattattcctatggttttaaattcttttatcgaagcttctgtttctattggtagattatttacattctttaccaatgaagagttacaaccagattctgttcagcgtttaccaaaagtaaaaaatattggcgatgtagccattaacattggagatgatgctacctttttatggcaaagaaaaccggaatacaaagtagccttaaagaatattaatttccaagctaaaaaaggaaatttgacctgtattgttggtaaagttggcagtggtaaaacagctttattgtcttgcatgttaggtgatcttttcagggttaaaggtttcgccaccgttcatggttctgttgcttatgtttctcaagttccatggataatgaatggtactgtaaaggaaaacattttatttgggcatagatacgacgcggaattttacgaaaaaacgatcaaggcctgtgcgttaactattgatcttgcaattttgatggatggagataagacattagttggcgagaaagggatctccttatctggaggacaaaaagctcgtttgtctttagcaagagcagtttatgcgagagctgacacttatttacttgatgatcctttggcagctgttgatgaacacgttgccaggcacttgatcgaacatgtgttgggtccaaatggtttattacatacaaaaacgaaggtattagccactaataaggtgagcgcgttatccatcgcagattctattgcattattagataatggagaaatcacacagcagggtacatatgatgagattacgaaggacgctgattctccattatggaaattgctcaacaactatggtaaaaaaaataacggtaagagcaatgaattcggtgactcctctgaaagctctgttagagaaagtagtatacctgtagaaggagagttagaacaattgcagaaattaaatgatttggattttggcaactctgacgccataagtttaaggagggccagtgatgcaactttgggaagcatcgattttggtgacgatgaaaatattgctaaaagagagcatcgtgaacagggaaaagtaaagtggaacatttacttggagtacgctaaagcttgcaacccgaaaagcgtttgtgtattcatattgtttattgttatatccatgttcctctctgttatgggtaacgtttggttgaaacattggtctgaagttaatagccgctatggatctaatccaaatgccgcgcgttacttggccatttattttgcacttggtattggttctgcattggcaacattaatccagacaatcgttctctgggttttttgtaccattcatgcctccaaatatttacacaacttgatgacaaactctgtgttgagagccccaatgacgttttttgaaacaacaccaatcggtagaattttgaacagattcagtaatgacatatacaaagtggatgctttattaggaagaacattttctcagtttttcgtcaatgcagtgaaagtcacattcactattacggttatctgtgcgacgacatggcaatttatcttcattatcattccattaagtgtgttttacatctactaccagcagtattacttgagaacatccagggagttgcgtcgtttagactctattactaggtctccaatctactctcatttccaagagactttgggtggccttgcaacggttagaggttattctcaacagaaaaggttttcccacattaatcaatgccgcattgataataacatgagtgcgttctatccctctatcaatgctaaccgttggttggcatataggttggaacttattggttccattatcattttgggtgctgcaactttatccgtttttagattgaaacaaggcacattaacggcaggtatggtgggtttatctttaagctatgctttacaaatcactcaaacgttaaattggattgttagaatgactgtggaagttgaaacgaatattgtttctgtggaaagaataaaggaatatgctgatttgaagagcgaggcacctttaatagttgaaggccacagaccacccaaagaatggccgagccagggtgatataaagtttaataattattccactcgttataggccggagcttgatcttgttttgaagcacattaatatacacattaaaccaaatgaaaaagttggtatcgtgggtagaacgggtgcgggaaaatcctctttaacgttggcattattcaggatgattgaggctagcgagggaaacatcgtaatcgacaacattgccatcaacgagattgggttatatgatttgagacataaattgtccatcatacctcaggattctcaagtttttgagggcactgttcgtgagaacattgatcccattaaccaatacactgatgaagctatttggagggcattggaactttctcatttgaaagaacacgtgctttctatgagcaatgacggattagatgcccaattgaccgaaggtggtggcaacttaagtgttggacaaagacaattattatgtcttgcaagagcaatgttggttccatctaagattttggtgcttgatgaagccacggccgcagtcgacgtggagacagataaagtcgtccaagagacgattcgtactgctttcaaggacagaactatcttgaccatcgcgcatagattgaacacgataatggacagtgatagaatcatagtgttggacaatggtaaagtagccgagtttgactctccgggccagttattaagtgataacaaatctttgttctattctttatgcatggaggctggtttggtcaatgaaaattga

SEQ ID NO: 2061 - DNA, 1992 bp, Saccharomyces cerevisiae
atgcgtgcgcacagaatcgatacatttctcataagagaaaacatcaaactggagatcatacatgaatcgaattcctattttggtggagaacatatatcaattgctttccgatttaagcacctaggctcacagcatgaattgttcaactataaagaaaagcttctcactgtcgataaagctgttgaagagaagttggaacaacaagcgaaagtgcaagatgatggtgaaggcacgatggaaaatcaaacctggtccctaaaatcattactaggtgccttcaaaagaacaggcgaacctgaagagagtgtggatgtggataacatgaaaatgctaaatgagagtaagatgttaagagaaaaaatacagaagcaaatgtattttcatcaacctgtaacgttaatatccggttatgttcaaatatcgggggtctttcaatacgattcagaggtaatttcagagtcaaaatttaaacaagatgaagtaaaaatggtaggactagatattgtacctggacatacgacaaattctgttcttgcattggaagatggagaacatttcaaaggtaaaagaaatttaaccaactacctcaactcagattatacaaatgtgaccaatggtcttcttttctcagaaagcggttctaggggaagaacaggtacctataacgaacggaccttaatgatatcaaacgataccagtataaaaacattacctcttcttttaataccacagacgcttttattttctgaaatttctttagaaccaggtgaagtaagaacattctattttaaatccacaaagctgccaaaagatatatgcccaagttattcatcgtcaaaagtggcatcaataaattacacgctggaggttggtgcggatgtactttctgatgataatatcgagaaattttcaaatagagtcccaataacaatagcaccatatattagttcgaatgccgaacagtacacatcacgtctggataagcctgctatcatattaaagacaggtaacataaaggaactaaagccacgtttgtttactcgaaaagtttctacggcttctgctgtatcatttggtaggagaaaatcttctataattgacattgattctccattagaagataatgaatttgtcaagcgtgtcaaaaaaaacttcattgaactggtggaatctaaccaaaatgtgtcaagagatatagacgaacttattgacttgcaaatgggggtacagttcggaaaggatgaggattcttcggatcctgaacccaacgactcacacttttcgaacgaaatggtgacgtctgcagagtctagcctgagaagcgatgctgtaactaagaggagaaaaagttattcggtacgcgataacatttctaacctcgagcaaaagatgtggaacgattgttctctcgttaagtcagatgagaattctaatcttctacctcagctaattaatttacagaacgcatatcaaattaacagaaataatgagactatggcaaaagtatccttatcagcacctttttataagacaactgatgatataaatttagtcattgaattagatccgataacgacgcctttacttaaagtgacttcgttgactgtatccttagaatcgtttgaaattataaatccaaaatataagactgaaggaaaaggaatagggagcaaaccaaaaggaaactcggtgtatgagaaacattttatttgtttcgatgagtgcaagtccgtatcggtgaaattacttcctccaagatcgcctacaaaccagattaccggacaattcaagacagatgtttttcaacataagtggatgataggactaaaatttgtaataattgcaaagacagaaagtatcactttggatcaattttatgaggataaaaagggcatcctattccattcaaaagagaatttagaaggtgaagagtttacatgttacgttcccattccaatactgtgtacatccgaagatttcatgggatggtaa

SEQ ID NO: 2062 - DNA, 1992 bp, Artificial Sequence
  Description of Artificial Sequence: Synthetic polynucleotide
atgcgtgcgcacagaatcgatacatttctcataagagaaaacatcaaattagagatcatacatgaaagtaattcctattttggtggagaacatatatctattgctttcagatttaagcacttgggctctcagcatgaattgttcaactataaagaaaagcttctcactgtcgataaagctgttgaagagaagttggaacaacaagcgaaagtgcaagatgatggtgaaggcacgatggaaaatcaaacctggtccttgaaatctttattgggtgccttcaaaagaacaggcgaacctgaagagagtgtggatgtggataacatgaaaatgttgaatgagagtaagatgttaagagaaaaaatacagaagcaaatgtattttcatcaacctgtaacgttaatatccggttatgttcaaataagcggggtctttcaatacgattctgaggtaatttctgagagtaaatttaaacaagatgaagtaaaaatggtaggattagatattgtacctggacatacgacaaattctgttcttgcattggaagatggagaacatttcaaaggtaaaagaaatttaaccaactacctcaacagtgattatacaaatgtgaccaatggtcttcttttctctgaaagcggttctaggggaagaacaggtacctataacgaaagaaccttaatgataagcaacgataccagtataaaaacattacctcttcttttaataccacagacgcttttattttctgaaatttctttagaaccaggtgaagtaagaacattctattttaaatccacaaagttaccaaaagatatatgcccaagttattcttcttctaaagtggcatctataaattacacgttggaggttggtgcggatgtactttctgatgataatatcgagaaattttctaatagagtcccaataacaatagcaccatatattagtagtaatgccgaacagtacacatctcgtttggataagcctgctatcatattaaagacaggtaacataaaggaattgaagccacgtttgtttactagaaaagtttctacggcttctgctgtatcctttggtaggagaaaatcttctataattgacattgattctccattagaagataatgaatttgtcaagcgtgtcaaaaaaaacttcattgaattagtggaatctaaccaaaatgtgtccagagatatagacgaacttattgacttgcaaatgggggtacagttcggaaaggatgaggattcttctgatcctgaacccaacgactctcacttttccaacgaaatggtgacgtctgcagagtctagcttaagaagcgatgctgtaactaagaggagaaaaagttattctgtacgcgataacatttctaacctcgagcaaaagatgtggaacgattgttctctcgttaagagtgatgagaattctaatcttttacctcagttgattaatttacagaacgcatatcaaattaacagaaataatgagactatggcaaaagtatccttaagtgcacctttttataagacaactgatgatataaatttagtcattgaattagatccgataacgacgcctttacttaaagtgacttctttgactgtatccttagaaagttttgaaattataaatccaaaatataagactgaaggaaaaggaatagggagcaaaccaaaaggaaactctgtgtatgagaaacattttatttgtttcgatgagtgcaagtccgtatctgtgaaattacttcctccaagatctcctacaaaccagattaccggacaattcaagacagatgtttttcaacataagtggatgataggattgaaatttgtaataattgcaaagacagaaagtatcactttggatcaattttatgaggataaaaagggcatcttattccattctaaagagaatttagaaggtgaagagtttacatgttacgttcccattccaatattatgtacatccgaagatttcatgggatggtga

SEQ ID NO: 2063 - DNA, 2259 bp, Saccharomyces cerevisiae
atgtctaataccgaggaattgatccaaaactcaataggttttctccagaaaacttttaaagcactcccagtttcgtttgactccattcgacatgaaccacttccatcttcaatgttgcatgcaagtgttctcaattttgaatgggaaccgctcgaaaaaaatatttcggcaattcatgatagagattctttgattgacattatacttaaaagattcattatagattcaatgacaaatgctattgaagacgaagaagaaaataatcttgaaaaagggttactaaattcgtgtataggtctcgattttgtgtataactcaagatttaatagatctaatccagctagctggggaaatacctttttcgagttattttccaccatcattgatttgctaaactcaccatctacgtttttgaagttttggccctatgctgaatcacgtatcgaatggttcaaaatgaatacatctgttgagccagtatcattgggggagagcaatttgattagttacaaacagcctttatacgaaaagctgcgccactggaacgatattttagctaaattagagaataatgacatccttaataccgtcaaacattataatatgaaatacaaactagagaactttttatccgagctactacctataaatgaagaatcgaacttcaatagatccgcttctatttcagctttacaagaatctgataacgaatggaacagatcagcacgtgaacgagaaagcaaccgcagttccgacgttatatttgctgcagattataacttcgtgttttatcatctaattatttgcccgatcgaatttgcttttagcgatttagaatataaaaatgatgtggacagatcattaagtccccttcttgatgcaatcttggaaatcgaagagaacttttacagcaaaatcaagatgaacaataggactagatattccttagaggaagctctgaacactgagtattacgcgaattacgatgttatgacccctaaattacccgtgtatatgaagcattcaaacgcaatgaaaatggacaggaatgaattttgggcgaatctacagaatattaaagaatcagatgactacactcttcgacctaccattatggatatctctttgagcaatacgacctgcctttataaacaattgactcaagaggacgatgattactaccgcaaacagttcattttacaactatgtttcacaacaaatcttatacgcaatttaatttcttctgatgaaacgaggaatttctataaaagctgctatttgagggaaaacccgttgagcgatattgattttgagaaccttgatgaagttaacaaaaagcgtgggctcaatttatgttcatacatttgcgacaatcgtgttttgaaattttataaaattaaagaccctgacttttatcgtgttatccgcaaattaatgtcttctgacgaaaagtttacaaccgccaagatcgatggctttaaagaattccaaaacttcagaatatctaaggagaagataccgccacccgcttttgacgaaacttttaaaaagtttacgttcatcaagatggggaataaattgattaataatgtttggaaaatacctactggtctagataaaattgagcaagaagtaaagaagcctgaaggtgtctatgaagcagcccaagcgaaatgggaatcaaaaatttcttctgaaacttccggtggagaagcgaaagatgaaataatcagacaatggcaaactttacggtttctaagatcgcgatacttgttcgattttgataaagttaacgaaaagactggtgttgatggtttgttcgaggaacccagaaaagtggaagcgttggatgatagtttcaaagagaaacttttgtacaaaatcaatcaagagcacaggaaaaaacttcaggatgctagggagtacaagattggaaaggaaagaaagaagagggcactggaagaagaggcttcgtttcctgaaagagagcaaaaaattaagtcgcaacgtataaacagcgcttctcaaacagaaggagatgagttgaagagcgaacagacgcaaccaaagggagaaatatcagaagagaataccaaaataaaaagctcggaagtttcttcgcaagatcctgacagtggtgttgccggggagtttgctccacagaatacaacagctcaactagaaaatccaaaaacagaagataacaatgcagctacttcgaacatttctaatggttcatctacccaagatatgaaataa

SEQ ID NO: 2064 - DNA, 2259 bp, Artificial Sequence
  Description of Artificial Sequence: Synthetic polynucleotide
atgtctaataccgaggaattgatccaaaacagcataggttttctccagaaaacttttaaagcactcccagtttcttttgactccattagacatgaaccacttccatcttctatgttgcatgcaagtgttctcaattttgaatgggaaccgctcgaaaaaaatatttctgcaattcatgatagagattctttgattgacattatacttaaaagattcattatagattctatgacaaatgctattgaagacgaagaagaaaataatcttgaaaaagggttattgaattcttgtataggtctcgattttgtgtataactctagatttaatagatctaatccagctagctggggaaatacctttttcgagttattttccaccatcattgatttgttgaactctccatctacgtttttgaagttttggccctatgctgaatcccgtatcgaatggttcaaaatgaatacatctgttgagccagtatctttgggggagagcaatttgattagttacaaacagcctttatacgaaaagttgcgccactggaacgatattttagctaaattagagaataatgacatccttaataccgtcaaacattataatatgaaatacaaattagagaactttttatccgagttattgcctataaatgaagaatctaacttcaatagatccgcttctatttctgctttacaagaatctgataacgaatggaacagaagtgcacgtgaaagagaaagcaaccgcagttccgacgttatatttgctgcagattataacttcgtgttttatcatttgattatttgcccgatcgaatttgcttttagcgatttagaatataaaaatgatgtggacagatctttaagtccccttcttgatgcaatcttggaaatcgaagagaacttttacagcaaaatcaagatgaacaataggactagatattccttagaggaagctttgaacactgagtattacgcgaattacgatgttatgacccctaaattacccgtgtatatgaagcattccaacgcaatgaaaatggacaggaatgaattttgggcgaatttacagaatattaaagaaagtgatgactacactcttagacctaccattatggatatctctttgagcaatacgacctgcctttataaacaattgactcaagaggacgatgattactaccgcaaacagttcattttacaattatgtttcacaacaaatcttatacgcaatttaatttcttctgatgaaacgaggaatttctataaaagctgctatttgagggaaaacccgttgagcgatattgattttgagaaccttgatgaagttaacaaaaagcgtgggctcaatttatgttcttacatttgcgacaatcgtgttttgaaattttataaaattaaagaccctgacttttatcgtgttatccgcaaattaatgtcttctgacgaaaagtttacaaccgccaagatcgatggctttaaagaattccaaaacttcagaatatctaaggagaagataccgccacccgcttttgacgaaacttttaaaaagtttacgttcatcaagatggggaataaattgattaataatgtttggaaaatacctactggtttggataaaattgagcaagaagtaaagaagcctgaaggtgtctatgaagcagcccaagcgaaatgggaaagtaaaatttcttctgaaacttccggtggagaagcgaaagatgaaataatcagacaatggcaaactttaagatttttaagatctcgttacttgttcgattttgataaagttaacgaaaagactggtgttgatggtttgttcgaggaacccagaaaagtggaagcgttggatgatagtttcaaagagaaacttttgtacaaaatcaatcaagagcacaggaaaaaacttcaggatgctagggagtacaagattggaaaggaaagaaagaagagggcattggaagaagaggcttcttttcctgaaagagagcaaaaaattaagtctcaacgtataaacagcgcttctcaaacagaaggagatgagttgaagagcgaacagacgcaaccaaagggagaaatatctgaagagaataccaaaataaaaagctctgaagtttcttctcaagatcctgacagtggtgttgccggggagtttgctccacagaatacaacagctcaattggaaaatccaaaaacagaagataacaatgcagctacttctaacatttctaatggttcttctacccaagatatgaaatga

SEQ ID NO: 2065 - DNA, 234 bp, Saccharomyces cerevisiae
atgattgttaaagtgaagacactgactgggaaggagatctctgttgagctgaaggaatcagatctcgtatatcacatcaaggaacttttggaggaaaaagaagggattccaccatctcaacaaagacttatattccagggaaaacaaattgatgataaattaacagtaacggatgcacatctagtagagggaatgcaactccacttggtattaacactaagaggtggtaactag

SEQ ID NO: 2066 - DNA, 234 bp, Artificial Sequence
  Description of Artificial Sequence: Synthetic polynucleotide
atgattgttaaagtgaagacattgactgggaaggagatctctgttgagttgaaggaaagtgatctcgtatatcacatcaaggaacttttggaggaaaaagaagggattccaccatctcaacaaagacttatattccagggaaaacaaattgatgataaattaacagtaacggatgcacatttggtagagggaatgcaactccacttggtattaacattaagaggtggtaactga

SEQ ID NO: 2067 - DNA, 666 bp, Saccharomyces cerevisiae
atgctaccgaccccttatgtaaaatgcgattacgataaagtatatgagcctgctgaggatagcttcctcatactggactgtttggaaaaagagcatgattttttgaaacagaaatttggtaatcgtttggccatcgtttgcgaaattggttcgggatcaggtatcgtcacaacatttctaatgcaaaacaaaataataccgcaggaaaattccatccacttagctgttgatatcaacccatgggcgctcgaagcaactttggatactgcgaagttaaattcatgtaaaagttcttttttagaagtgattcaagctgatttaaactccagtattcggaataatcaggttgatgtcctaatatttaacccaccatatgtgccagcagaatgtgtgccagatgtcccaggatcaagagaggaggcagaccaatggctagatttagcgttattgggtggaaaagacgggatggcgattactgataaactgctacgacaattagaacaaattctttctccagatggtgttgcatatatattattttgtgcaagaaataagcctaaagaagtcattaagaggtttgtcgatacttacaaatggaatgtgaaacttattgaaacgagaaaagcgggatgggaagtcctcagtgtgtacagctttacaaggtga

SEQ ID NO: 2068 - DNA, 666 bp, Artificial Sequence
  Description of Artificial Sequence: Synthetic polynucleotide
atgttaccgaccccttatgtaaaatgcgattacgataaagtatatgagcctgctgaggatagcttcctcatattggactgtttggaaaaagagcatgattttttgaaacagaaatttggtaatcgtttggccatcgtttgcgaaattggttctggatctggtatcgtcacaacatttttgatgcaaaacaaaataataccgcaggaaaattccatccacttagctgttgatatcaacccatgggcgctcgaagcaactttggatactgcgaagttaaattcttgtaaaagttcttttttagaagtgattcaagctgatttaaactccagtattagaaataatcaggttgatgtcttgatatttaacccaccatatgtgccagcagaatgtgtgccagatgtcccaggaagcagagaggaggcagaccaatggcttgatttagcgttattgggtggaaaagacgggatggcgattactgataaattacttagacaattagaacaaattctttctccagatggtgttgcatatatattattttgtgcaagaaataagcctaaagaagtcattaagaggtttgtcgatacttacaaatggaatgtgaaacttattgaaacgagaaaagcgggatgggaagtcctcagtgtgtacagctttacaaggtga

SEQ ID NO: 2069 - DNA, 5097 bp, Saccharomyces cerevisiae
atgtccttaccactaaagccccttacaattgactcaaataataaacaactagactccaaacagaagaagtttcgtgctaatgtcgagcgagcattagaaagatttgactctgtaacagaatgggcggactatattgctagtttgggaacactattaaaggcgttgcaaagctggtcacctaaatttcagaatgtaaggtactatgttccttctccatatcaagtaagtcgaagattgacatcctcattatcgccggcgttaccagcaggtgttcatcagaaaactttagaagtatatacgtatatctttgaacatattggccttgaaactctggctacagaatgtaacatttggatcccgggaattttacctttgatgacttatgcctctatgtctgttaggtcacatttgatagagctttacgataactatatccttctgttgcctcaaacaacgttaagactgctcatcagacctttgatttctagtttattgccaggaattgatgatgaaagcaacgattttttacctttaactttaaaactcattgagactctgcaggagaacttggatgatgattccttattttggcaaacgttgtttctagtcatgactgcaaataaaggcagaagactgggcggactcacgtggttgactagaaagtttccgtcgttgaatgctgtacctcatctagtaaataaaataaaaatggaagcggaagagaacccaagtgaaactgaaaccaacgattctcatctagacaggaaaaaaagaaaagaagaagctttcaaggtcttattgcctgctgccaaagatttagtaacccctgaaccaggtctacttatccgatgccttgtcggttgtttagaagatgaaaatgatattcttattaaaaggagcgttttggaccttttattacagaggttgaggctagactctcccgttttgaatgttcttattacttctgaggataaaaagttattgataatgagttgttgtagaactactttgagcaaggatatgtctttgaacagaagaatatggaactggcttctcggtcctactgctgggggcatgctaaacaataacggcgggaactccatggaatatactacctcggttaagtcagcaaacgaggaaagtaatgtatattttacaaaatatggattaagcgcccttttagaaggtttaagcgaccttctttcagaagaagaatccgtgttaactgcattcaggataagtatggcagtaatggatagatgggaaattggctcacttgtaattcctgaattgttcatcccacttctctattcctcggaaaaatttaaacaaaacgaacaaataatgaaaacggcacgtactttctttgacaatactgaaacaaatattatatggggaaagctatttcaagaacttgaagacatcaaaaacctaaaaattttggatttcgtattaacaaattttaatattggaaacgacgaagagattatcgtacgccaccttcctttgatattattaactttactggcccttccatctaatgataaagatttcgacaatatttataagctccaaaaattttctttgtacaacaaattgttaaactatatccccgagagagcccttctccctctcagtcactcaaaactaaagcacgatgatgaagtaagctgcgaagaacttttggccaaaatacgtgggttttataccaatgtttctaatccatctagcattttagagaaagaaaatatagctgagcgtttgccaccctttacaacagaagatctaacttttttaatagcagacctgattcagaagaagcttctttcaagtttatgggacttggaaaatatcaatgaaagctccaaattatttatagctattttcgaaaagatacctgagtctgaagaacttaaaggacgatctcacataagctggtcggataaaaaaataactcagagcatatttgaggctattcccaggctttgtgaatctaataatgatgcaaaatcagaagaaatcgttggaattgtggaaatttttggtaactacttatattcacgcatggaattcattgaatcgatgaaattattgaaagtagtcatgatggccgtatggaaatctttaaaagatccacgccatcaaatactaggtgtcaagaacttaaagactttaaacagatttattccatccaaatttattgaaagtgcgttagtgtatacttttgtggaagaggaagatatatccgagagattaagcgtgttagatctgttatggacacaattagactcagattcaaacttgattaggcgccctcttgaattaattttgggcgaactttttgatgaccagaatcctttttatttaaccgtttcaaagtggattttatcgatattaaactcgggatctgcttcaagattattttacattttgactgataatattttaaaggttaatcgtctcgaaaaagaaagattagacgaaagggatgatcttgatatgctcacatatgagttccaaatgcttgcttatgttttgaaaacaaacaatggacgcactaggaaagttttttccactgagcttacctcaataaaatcttcgaccatatggaagaatgaagacgtttccacatataaaagtttgctgttggttacattgatgagatttctaaatataaagagcaatacacatgcgaaaagtatcaggagtgctctgattcttttggatatcttactcgatggaactgagcaaaatttcaaggacattgtcatatttttgctgcaaatgtcgtctaaatatattgcagaagaaggaattgagcccgagttaatagcagtttccttgttagatattgtatcgaaggttctcagactatcacacgataatggtattaaactagacatttttgatgacaatgctgcccatttaaaatatatcgatttccttgttaccagcgtttcaaatatgaaaagccctcttattgtaacggcctatgtgaagcttctttccgaaagcattgtttattttgagaattctatatttcgaatgattttaccattgtctgcatctcttgtacagtgtgttcagagattgtttttgctagaaaagagagaaggtggttattaccaaccaatagctttgcttctgggtggtctggaagagctattagagatttcacatggttaccttgtcaccgaggaaagggaaggatacttttctgggtctaatctaaagggtgattttattcaatccgttgtttcaaacgttttttcgtcagattcttccaatgaagaaagtaagattcagggggaaagagacgtaatactacaatctttcagacaggtgatttcatgctgtttagatatctggtattgggcccataacatttcgtgtaaatctaacgatgattctagcctggacgccactaatcataactcatacaagttcaaatttaggtcgaagaaactgttggaaaccttatttctactagaacctttggaacttctggaaaatttgatcagcattagatcagacaatactacagtcacactagtacatgtgctcgacggcaataaacccgccattacaataccacatttattgtatggtgtaattatcagatacaacagaacggcatctgtcaagttttctaatcgtgacggaagtaggtcaagcacaactaaattaactaaaggggagccttccatgttaaaaagattaagcggggaatcgattattgcatttttgtttaactacgtggattctgtagaaaactctgcaatggaggagttttatggggatttcctgctatttttcagagaagtagcaaccaattataacctttattctgatgtttcgttgtctatattaaaacttgttgcccttatttctggaaaagtaagtaaaacgcagtttggagaacaaaaacgagttaggagggagatatctgatgtgtttttcaaatacctacctaatgcatttataaactttacgaacttatatcgtggccaccctgattcatttaaagatttagaatttgtagtatggcgtgttcaatatatcgtcaacgatcaaattggaggagacaagtttaatacaacgttagcgacaattgtaaatcaatgcctaaccccttatatcaaacccaaaagtgaaaaaactattccaggttatgtcttagaattggccgcggtcgtatcccatttaggttcaaaagttaaaagttggaggcttttaattgcggaattgttccaaaatgacaaaaaactttcggtaattggcagcgatcaaacttgggaaaagattatttacgaatggtccatttatccagaaaataagtcaaaaatcttgaacgatttactattagaaattggctccaagcgttcaagtgtgactccgactttaatcacgtttaacttaggaagcgattctgaagtcgagtacaagtgccaaaaccttttgaaaatatcgtacttgttgatggtatcgccaaatgacgcatatttgttgcacttttcctctttaataagttgcattttccactatttggtgtccaaagatatcaagctcaagggaagctgctggatcttactaagggttttacttttaagattttcagagtcccatttcaatgactattggtctatgatcagttactgtttacaaactaatttgcaagaattttatgaatcacttcaaatacagtcagaagtcgatccacaaacaatattgcaagtatgtaaaactttggatttgctactcttactcaacatggaaggcttcacctctacgaatgagtggatctttgttattgatacaataaattgcgtatataaaacgaactcattcgtcgcgctggtagatgaaatcgcagaattcaaagattacgaaataaccaaaactgatgatcttgaattaccgacaactttaaaagatggtctcccattattacgaggcattcacaaaatcgagagacacacgcaactaagaagcttcttccagaatttgagttatctacattatgagaaagtttacggactagggtcagttgatttatatggttgtggtgaagatctcaaaaaagatattctgtcatga

SEQ ID NO: 2070 - DNA, 5097 bp, Artificial Sequence
  Description of Artificial Sequence: Synthetic polynucleotide
atgtccttaccattgaagccccttacaattgactctaataataaacaattggactccaaacagaagaagtttcgtgctaatgtcgagagagcattagaaagatttgactctgtaacagaatgggcggactatattgctagtttgggaacattattaaaggcgttgcaaagctggtctcctaaatttcagaatgtaaggtactatgttccttctccatatcaagtaagtagaagattgacatcctctttatctccggcgttaccagcaggtgttcatcagaaaactttagaagtatatacgtatatctttgaacatattggccttgaaactttggctacagaatgtaacatttggatcccgggaattttacctttgatgacttatgcctctatgtctgttaggagccatttgatagagctttacgataactatatccttttattgcctcaaacaacgttaagattactcatcagacctttgatttctagtttattgccaggaattgatgatgaaagcaacgattttttacctttaactttaaaactcattgagactttacaggagaacttggatgatgattccttattttggcaaacgttgtttttagtcatgactgcaaataaaggcagaagattgggcggactcacgtggttgactagaaagtttccgtctttgaatgctgtacctcatttggtaaataaaataaaaatggaagcggaagagaacccaagtgaaactgaaaccaacgattctcatttggacaggaaaaaaagaaaagaagaagctttcaaggtcttattgcctgctgccaaagatttagtaacccctgaaccaggtttacttatccgttgccttgtcggttgtttagaagatgaaaatgatattcttattaaaaggagcgttttggaccttttattacagaggttgaggttggactctcccgttttgaatgttcttattacttctgaggataaaaagttattgataatgagttgttgtagaactactttgagcaaggatatgtctttgaacagaagaatatggaactggcttctcggtcctactgctgggggcatgttgaacaataacggcgggaactccatggaatatactacctctgttaagtctgcaaacgaggaaagtaatgtatattttacaaaatatggattaagcgcccttttagaaggtttaagcgaccttctttctgaagaagaatccgtgttaactgcattcaggataagtatggcagtaatggatagatgggaaattggctctcttgtaattcctgaattgttcatcccacttctctattccagtgaaaaatttaaacaaaacgaacaaataatgaaaacggcacgtactttctttgacaatactgaaacaaatattatatggggaaagttatttcaagaacttgaagacatcaaaaacttgaaaattttggatttcgtattaacaaattttaatattggaaacgacgaagagattatcgtacgccaccttcctttgatattattaactttattagcccttccatctaatgataaagatttcgacaatatttataagctccaaaaattttctttgtacaacaaattgttaaactatatccccgagagagcccttctccctctcagtcactctaaattgaagcacgatgatgaagtaagctgcgaagaacttttggccaaaatacgtgggttttataccaatgtttctaatccatctagcattttagagaaagaaaatatagctgagcgtttgccaccctttacaacagaagatttgacttttttaatagcagacttgattcagaagaagcttctttccagtttatgggacttggaaaatatcaatgaaagctccaaattatttatagctattttcgaaaagatacctgagtctgaagaacttaaaggaagatctcacataagctggtctgataaaaaaataactcagagcatatttgaggctattcccaggctttgtgaatctaataatgatgcaaaaagtgaagaaatcgttggaattgtggaaatttttggtaactacttatattctcgcatggaattcattgaaagtatgaaattattgaaagtagtcatgatggccgtatggaaatctttaaaagatccacgccatcaaatattaggtgtcaagaacttaaagactttaaacagatttattccatccaaatttattgaaagtgcgttagtgtatacttttgtggaagaggaagatatatccgagagattaagcgtgttagatttattatggacacaattagacagtgattccaacttgattaggcgccctcttgaattaattttgggcgaactttttgatgaccagaatcctttttatttaaccgtttccaagtggattttatctatattaaactctggatctgcttccagattattttacattttgactgataatattttaaaggttaatcgtctcgaaaaagaaagattagacgaaagggatgatcttgatatgctcacatatgagttccaaatgcttgcttatgttttgaaaacaaacaatggacgcactaggaaagttttttccactgagcttaccagtataaaatcttccaccatatggaagaatgaagacgtttccacatataaaagtttgttgttggttacattgatgagatttttgaatataaagagcaatacacatgcgaaaagtatcaggagtgctttgattcttttggatatcttactcgatggaactgagcaaaatttcaaggacattgtcatatttttgttgcaaatgtcttctaaatatattgcagaagaaggaattgagcccgagttaatagcagtttccttgttagatattgtatccaaggttctcagattatcccacgataatggtattaaattagacatttttgatgacaatgctgcccatttaaaatatatcgatttccttgttaccagcgtttctaatatgaaaagccctcttattgtaacggcctatgtgaagcttctttccgaaagcattgtttattttgagaattctatatttagaatgattttaccattgtctgcatctcttgtacagtgtgttcagagattgtttttgttggaaaagagagaaggtggttattaccaaccaatagctttgcttttgggtggtttggaagagttattagagatttctcatggttaccttgtcaccgaggaaagggaaggatacttttctgggtctaatttgaagggtgattttattcaatccgttgtttctaacgttttttcttctgattcttccaatgaagaaagtaagattcagggggaaagagacgtaatattgcaatctttcagacaggtgatttcttgctgtttagatatctggtattgggcccataacattagttgtaaatctaacgatgattctagcttggacgccactaatcataactcttacaagttcaaatttaggtctaagaaacttttggaaaccttatttttattggaacctttggaacttttagaaaatttgatcagcattagaagtgacaatactacagtcacattggtacatgtgctcgacggcaataaacccgccattacaataccacatttattgtatggtgtaattatcagatacaacagaacggcatctgtcaagttttctaatcgtgacggaagtaggagcagcacaactaaattaactaaaggggagccttccatgttaaaaagattaagcggggaaagtattattgcatttttgtttaactacgtggattctgtagaaaactctgcaatggaggagttttatggggatttcttactttttttcagagaagtagcaaccaattataacctttattctgatgtttctttgtctatattaaaacttgttgcccttatttctggaaaagtaagtaaaacgcagtttggagaacaaaaaagagttaggagggagatatctgatgtgtttttcaaatacttacctaatgcatttataaactttacgaacttatatcgtggccaccctgattcttttaaagatttagaatttgtagtatggcgtgttcaatatatcgtcaacgatcaaattggaggagacaagtttaatacaacgttagcgacaattgtaaatcaatgcttaaccccttatatcaaacccaaaagtgaaaaaactattccaggttatgtcttagaattggccgcggtcgtatcccatttaggttccaaagttaaaagttggaggcttttaattgcggaattgttccaaaatgacaaaaaactttctgtaattggcagcgatcaaacttgggaaaagattatttacgaatggtccatttatccagaaaataagagtaaaatcttgaacgatttattattagaaattggctccaagcgttctagtgtgactccgactttaatcacgtttaacttaggaagcgattctgaagtcgagtacaagtgccaaaaccttttgaaaatatcttacttgttgatggtatctccaaatgacgcatatttgttgcacttttcctctttaataagttgcattttccactatttggtgtccaaagatatcaagctcaagggaagctgctggatcttattgagggttttacttttaagattttctgagtcccatttcaatgactattggtctatgatcagttactgtttacaaactaatttgcaagaattttatgaatctcttcaaatacagtctgaagtcgatccacaaacaatattgcaagtatgtaaaactttggatttgttgctcttactcaacatggaaggcttcacctctacgaatgagtggatctttgttattgatacaataaattgcgtatataaaacgaactctttcgtcgcgttggtagatgaaatcgcagaattcaaagattacgaaataaccaaaactgatgatcttgaattaccgacaactttaaaagatggtctcccattattaagaggcattcacaaaatcgagagacacacgcaattgagaagcttcttccagaatttgagttatttgcattatgagaaagtttacggattagggtctgttgatttatatggttgtggtgaagatctcaaaaaagatattttatcctga

SEQ ID NO: 2071 - DNA, 1128 bp, Saccharomyces cerevisiae
atgctcagatatcatatgcaaggttttagtgggtacggtgtccagtattctccctttttcgataacaggctcgcggtagctgctggttcaaactttggcctggttgggaatggaaaattgttcatccttgagattgatcgttcaggtagaatagtggaagttaattcctttttaacacaggattgtttatttgatcttgcatggaacgaaagtcatgaaaaccaagtgttggttgcacagggcgatggtacattacgcttgtttgatacaacctttaaagagtttcctattgctatatttaaagagcatgaacgagaagtattcagttgtaattggaacttagtcaacaggcagaatttcttaagtagttcatgggatggatctataaaaatatggtcccctctaagaaagcaaagtttaatgacccttactccacgacctttagagattaccaaaatggtggatccattaaacgccattatattgaaaaagaaaagctttacaggtatttcaaaaaacaggaactgtgtataccaagcacagttctcgccccacgaccaaaatctcgtattatcctgttcagggaattcttatgcaagcttatttgacattagactaccttccggcaaaaatcagaataattttttagtgcattcaggactagaagcattgacttgcgatttcaacaaatacagaccttatgtagttgccacaggaggtgtagataatgccattagaatctgggacattaggatgctaaataaaaatgaatcagcgactatcaagaggactgtgcccggccaacttcacaattcatcatgcatcaatgaaatccctaatgcgcacgggctggcaatcagaaaagttacctggtcccctcatcattccaatattttaatgtcagcttcatatgatatgacctgtcgaatatggagagatctcagcaacgatggtgcaaaagaaacatataaaactaactctacggatgctactaaaggttccattttcaatttcacacagcattcagaattcgtatttggagctgactggagcttgtggggaaagccaggatatgtggcttcaactgcatgggatggaaatttatttgtatggaacggcttaggttga

SEQ ID NO: 2072 - DNA, 1128 bp, Artificial Sequence
  Description of Artificial Sequence: Synthetic polynucleotide
atgctcagatatcatatgcaaggttttagtgggtacggtgtccagtattctccctttttcgataacaggctcgcggtagctgctggttccaactttggccttgttgggaatggaaaattgttcatccttgagattgatcgttctggtagaatagtggaagttaattcctttttaacacaggattgtttatttgatcttgcatggaacgaaagtcatgaaaaccaagtgttggttgcacagggcgatggtacattacgcttgtttgatacaacctttaaagagtttcctattgctatatttaaagagcatgaaagagaagtattcagttgtaattggaacttagtcaacaggcagaatttcttaagtagttcttgggatggatctataaaaatatggtcccctttgagaaagcaaagtttaatgacccttactccaagacctttagagattaccaaaatggtggatccattaaacgccattatattgaaaaagaaaagctttacaggtatttccaaaaacaggaactgtgtataccaagcacagttctctccccacgaccaaaatctcgtattatcctgttctgggaattcttatgcaagcttatttgacattagattaccttccggcaaaaatcagaataattttttagtgcattctggattagaagcattgacttgcgatttcaacaaatacagaccttatgtagttgccacaggaggtgtagataatgccattagaatctgggacattaggatgttgaataaaaatgaaagtgcgactatcaagaggactgtgcccggccaacttcacaattctagttgcatcaatgaaatccctaatgcgcacgggttagcaatcagaaaagttacctggtcccctcatcattccaatattttaatgtctgcttcttatgatatgacctgtaggatatggagagatctcagcaacgatggtgcaaaagaaacatataaaactaactctacggatgctactaaaggttccattttcaatttcacacagcattctgaattcgtatttggagctgactggagcttgtggggaaagccaggatatgtggcttccactgcatgggatggaaatttatttgtatggaacggcttaggttga

SEQ ID NO: 2073 - DNA, 1833 bp, Saccharomyces cerevisiae
atgagtgaaagtggtcaagaacaaaacagaggcacaaatacatcaccaaataatgctgaaaataataataattcaaatgcagcttccggtccactcaatggtggtgctgagcaaacaagaaacataaccgtttccattcagtattcctatttcactccggagagattagcacatttgagcaatatatctaataatgataataacgaaaacaacagcgcagcatccggtagcacgattgccaacggtactgggcccagctttggcatcggaaatgggggccatcaacccgacggtgctcttgttttatcttttcgtgatgttcctgcgtctactccacaagaccgtttgaacagcttcatatctgttgctgctcagcttgcaatggagagattcaacagactattaaatagaccaaaaggaatatcaaaggatgagtttgataagctccccgttctgcaagtttctgatctacccaaggccgaagggcccttatgtagtatatgttatgacgaatatgaagatgaagttgattcaactaaagcaaaaagaaaaagggattctgaaaatgaggaggaatctgaaggaacaaaaaaaaggaaggataatgaaggtgcgcccctacgcacaaccgccgataatgacagtaacccatcgattacaaatgctacggttgttgaaccgccttctattcctctcactgaacaacaacgcactctcaatgatgaagaaacaaatccaagctacaaacactcaccaatcaagttaccttgtggccacatttttgggagggaatgtatctacaaatggtcaagattagaaaattcttgtcccctttgtagacaaaagatcagcgaatctgtaggtgttcaacgtgcagcccaacaagatacggatgaagtagcagctaacgaagctgcttttgaacgtattagacgagttttatacgacccaactgcagtgaatagcactaacgaaaatagttccgccccatccgaaaacacgtccaatacaacggttcccactatcggaaatgcaagttctggcgaacagatgttatcaagaacaggcttttttttagtgcctcaaaacggccaacctttacacaatccagtccgtttaccgcctaatgatagcgatagaaacggtgtcaacgggccgagctcaactactcaaaatccaccctctaattctggtggttcgaataacaatcaaagtccgcgctgggttcccatccctttgactttgttccaattccacagtccaaatccgaatccttccgcttctgattcttcggcaagcccatcagcagcgaacggtccaaactcaaataacactagtagtgacgctacagaccctcaccacaacagactaagagccgttttggatcacatattcaacgttgctcagaggggaacttctgatacctctgcaacaacagcacccggagcacaaactgttcacaaccaaggacgtaatgactcatcgtcctctgatacaacgcaaggaagttcctttttggaaaatatttcacgattaacaggccattttacgaatggctcaagagacaacaataacgacaataaccatagcaatgatcaacaacgaggtggaagtactggtgagaacaacagaaataacttgttttcctccggtgttgccagttatagaaatcaaaatggtgatgttactaccgtcgaactacgcaacaacaattctgctgcctttcctcctacagacgaaaatccctctcaaggccaaggttcaagcagttcggacaccaccattcataacgacgtccctaatgataacaatgagcaacgatcatcacaataa

SEQ ID NO: 2074 - DNA, 1833 bp, Artificial Sequence
  Description of Artificial Sequence: Synthetic polynucleotide
atgagtgaaagtggtcaagaacaaaacagaggcacaaatacatctccaaataatgctgaaaataataataatagtaatgcagcttccggtccactcaatggtggtgctgagcaaacaagaaacataaccgtttccattcagtattcctatttcactccggagagattagcacatttgagcaatatatctaataatgataataacgaaaacaacagcgcagcatccggtagcacgattgccaacggtactgggcccagctttggcatcggaaatgggggccatcaacccgacggtgctcttgttttatcttttcgtgatgttcctgcgtctactccacaagaccgtttgaacagcttcatatctgttgctgctcagcttgcaatggagagattcaacagattattaaatagaccaaaaggaatatccaaggatgagtttgataagctccccgttttgcaagtttctgatttgcccaaggccgaagggcccttatgtagtatatgttatgacgaatatgaagatgaagttgattctactaaagcaaaaagaaaaagggattctgaaaatgaggaggaatctgaaggaacaaaaaaaaggaaggataatgaaggtgcgcccttgcgcacaaccgccgataatgacagtaacccatctattacaaatgctacggttgttgaaccgccttctattcctctcactgaacaacaacgcactctcaatgatgaagaaacaaatccaagctacaaacactctccaatcaagttaccttgtggccacatttttgggagggaatgtatctacaaatggtccagattagaaaattcttgtcccctttgtagacaaaagatcagcgaatctgtaggtgttcaacgtgcagcccaacaagatacggatgaagtagcagctaacgaagctgcttttgaacgtattagaagagttttatacgacccaactgcagtgaatagcactaacgaaaatagttccgccccatccgaaaacacgtccaatacaacggttcccactatcggaaatgcaagttctggcgaacagatgttatctagaacaggcttttttttagtgcctcaaaacggccaacctttacacaatccagtccgtttaccgcctaatgatagcgatagaaacggtgtcaacgggccgagctctactactcaaaatccaccctctaattctggtggtagtaataacaatcaaagtccgcgctgggttcccatccctttgactttgttccaattccacagtccaaatccgaatccttccgcttctgattcttctgcaagcccatctgcagcgaacggtccaaacagtaataacactagtagtgacgctacagaccctcaccacaacagattgagagccgttttggatcacatattcaacgttgctcagaggggaacttctgatacctctgcaacaacagcacccggagcacaaactgttcacaaccaaggacgtaatgactcctcctcctctgatacaacgcaaggaagttcctttttggaaaatatttctagattaacaggccattttacgaatggctccagagacaacaataacgacaataaccatagcaatgatcaacaaagaggtggaagtactggtgagaacaacagaaataacttgttttcctccggtgttgccagttatagaaatcaaaatggtgatgttactaccgtcgaattacgcaacaacaattctgctgcctttcctcctacagacgaaaatccctctcaaggccaaggttccagcagtagtgacaccaccattcataacgacgtccctaatgataacaatgagcaaagaagttctcaatga

SEQ ID NO: 2075 - DNA, 1791 bp, Saccharomyces cerevisiae
atgaaattatctgtcctcacatttgtcgtagatgcattacttgtctgcagctcaatagtagatgccggtgttacagattttccatccttaccaagtaatgaagtctatgtcaaaatgaattttcagaagaaatacggcagttcatttgaaaacgctttggatgatacaaaaggtagaacgcgtttgatgacaagagatgatgattacgagctggtggaactgactaatcaaaacagtttttattcggtggaattagatattggcacccctcctcaaaaagttactgtgcttgtcgacactggttcttctgatctatgggtcacgggttcagacaacccatactgttccactaaaaagaaggataccactggctcatcctttaaacaagtaaacaaggatgctttggctagcgtggttgagagtgtgtttactgaaattagctacgacaccactatagttaccagcgaagccactgctacttttgatagtacagcttctacatcacagttaattgactgcgctacatacgggacatttaatacctctaagtcgtctacattcaactccaataatacagaattttcgatcgcctatggtgatacgacttttgcatctggtacctggggccatgatcaattgagcttgaacgatttgaacattacgggtttatcatttgctgtagcaaacgaaacaaactcaacagttggtgtcttgggtattggtttgcctggcttggagtcaacttattctggtgtttctctcagctctgtacaaaaaagctacacttacaataactttccgatggtgctaaagaattcgggtgtaataaaatcaacagcttattctttattcgcaaatgattctgattcgaaacatggtaccattttgtttggcgctgtggatcatggaaaatatgcgggcgacctatacacaattcccatcattaatactttgcagcatcgcggctacaaggatccaattcaattccaagtcactttacaaggattaggtacgtcgaaaggggataaagaagacaatctgacaaccctaaccactacaaagatcccagtcctgctagattcaggtacgaccatatcgtatatgccaactgagctggtaaaaatgcttgccgaccaggtcggagctacttactcttctgcatatggttactacataatggattgtatcaaagagatggaagaagagagtagcatcatctttgattttggtggattctatctttctaattggttaagcgattttcagctagtcacagatagtcgttcaaacatttgtatactaggtattgcaccgcagtcagatccgaccattattttgggtgataacttcttagctaatacttacgtggtatatgatctggacaatatggagatatcaatggctcaggctaacttcagcgacgacggtgaatacattgagattatagagagcgcggttccaagtgctcttaaagcacctggttactcaagcacttggtctacatatgaaagtattgtctccggcggcaacatgttttccacggcagctaactccagtatatcgtactttgcttccacgtctcattcggcaacaagttcttccagctccaaaggccaaaaaacccaaacaagtacgacagctctctctatttcaaaatctacctcaagtacttcctcaacaggaatgttatctcccacctcaagttcatctacgagaaaagaaaacggaggacacaatctgaatcctccatttttcgccaggttcattacagctatttttcatcacatttga

SEQ ID NO: 2076 - DNA, 1791 bp, Artificial Sequence
  Description of Artificial Sequence: Synthetic polynucleotide
atgaaattatctgtcctcacatttgtcgtagatgcattacttgtctgcagcagtatagtagatgccggtgttacagattttccatccttaccaagtaatgaagtctatgtcaaaatgaattttcagaagaaatacggcagttcttttgaaaacgctttggatgatacaaaaggtagaacgcgtttgatgacaagagatgatgattacgagttggtggaattgactaatcaaaacagtttttattctgtggaattagatattggcacccctcctcaaaaagttactgtgcttgtcgacactggttcttctgatttatgggtcacgggttctgacaacccatactgttccactaaaaagaaggataccactggcagctcctttaaacaagtaaacaaggatgctttggctagcgtggttgagagtgtgtttactgaaattagctacgacaccactatagttaccagcgaagccactgctacttttgatagtacagcttctacatctcagttaattgactgcgctacatacgggacatttaatacctctaagtcttctacattcaactccaataatacagaattttctatcgcctatggtgatacgacttttgcatctggtacctggggccatgatcaattgagcttgaacgatttgaacattacgggtttatcttttgctgtagcaaacgaaacaaactccacagttggtgtcttgggtattggtttgcctggcttggagtctacttattctggtgtttctctcagctctgtacaaaaaagctacacttacaataactttccgatggtgttgaagaattctggtgtaataaaatctacagcttattctttattcgcaaatgattctgattctaaacatggtaccattttgtttggcgctgtggatcatggaaaatatgcgggcgacttgtacacaattcccatcattaatactttgcagcatcgcggctacaaggatccaattcaattccaagtcactttacaaggattaggtacgtccaaaggggataaagaagacaatttgacaaccttaaccactacaaagatcccagtcttgttggattctggtacgaccatatcttatatgccaactgagttggtaaaaatgcttgccgaccaggtcggagctacttactcttctgcatatggttactacataatggattgtatcaaagagatggaagaagagagtagcatcatctttgattttggtggattctatctttctaattggttaagcgattttcagttggtcacagatagtcgttctaacatttgtatattaggtattgcaccgcagagcgatccgaccattattttgggtgataacttcttagctaatacttacgtggtatatgatttggacaatatggagatatccatggctcaggctaacttcagcgacgacggtgaatacattgagattatagagagcgcggttccaagtgctcttaaagcacctggttactccagcacttggtctacatatgaaagtattgtctccggcggcaacatgttttccacggcagctaactccagtatatcttactttgcttccacgtctcattctgcaacaagttcttccagctccaaaggccaaaaaacccaaacaagtacgacagctctctctatttccaaatctacctctagtacttcctctacaggaatgttatctcccacctctagttcttctacgagaaaagaaaacggaggacacaatttgaatcctccatttttcgccaggttcattacagctatttttcatcacatttga

SEQ ID NO: 2077 - DNA, 1620 bp, Saccharomyces cerevisiae
atgtcttccaatccagaaaattctggtgttaatgcgaataataatacgggcactggtaacgctgatgcgatcacaggagctcagcaaaatatggtactgcaaccgagacagttgcaagaaatggccgctaagttcaggacattactgactgaagcaagaaatgtaggtgaaactactcctaggggcaaggaattgatgttccaagccgcaaagatcaaacaggtatatgatgcccttacactgaataggagaagacaacaggctgcgcaagcctacaataatacttcaaattcaaattcaagcaatccagcttctattcctactgaaaatgtccctaattcatcacagcaacaacaacaacaacaacaacagacaagaaacaacagtaacaaatttagcaatatgataaaacaggttctcaccccggaagagaaccaagaatatgaaaagctatggcagaatttccaagtccgtcatacgagtataaaggagaaagagacctacttgaaacaaaatattgataggttagaacaagaaataaataaacagacggacgaagggcccaagcagcagctacaagaaaagaaaattgaactgcttaacgattggaaggtgctaaaaattgagtataccaagctgttcaataattatcaaaacagtaaaaaaacattctatgtagagtgtgcaagacacaatccggctttacataaattcttgcaagaaagcactcaacagcaacgagtgcagcaacaaagggtacaacaacaacaacaacaacagcagcagcagcagcaacagcagcaacagcaacagcaacagcaacagcaacgccagggtcaaaaccaaagaaagatttctagttctaattctactgaaataccctctgtaaccggccctgatgcactgaaatcgcagcagcagcagcagaatacaataactgccaccaataatcccaggggcaatgttaacacttcacagactgaacaatcgaaagctaaggtaaccaatgtaaatgcaacggcatctatgttgaataatataagttcgagcaaatcggcaatattcaaacaaacagagcctgccatacccatatcggaaaatatatctaccaaaacaccagcaccggtagcttatagatccaacagacctacaataactggaggttctgctatgaatgccagtgctttgaatacaccagcaacaactaaattaccaccctatgaaatggatactcagagagttatgtcaaagcgtaaattaagagagttagtgaagactgtcggaattgatgagggtgacggtgaaactgtcattgacggtgatgttgaggaattactattggatcttgccgacgattttgttactaatgttacagctttttcttgtagattggcaaaacacagaaaatcggacaatttggaggcaagagacattcagttacatttggagagaaattggaatattaggattcctggttattccgcagacgaaataagaagtacaagaaaatggaatccctctcaaaattataaccagaaattgcagagtatcacatcagataaggtagcagctgcaaaaaacaatggaaacaatgttgcaagcttgaatacaaaaaaataa

SEQ ID NO: 2078 - DNA, 1620 bp, Artificial Sequence
  Description of Artificial Sequence: Synthetic polynucleotide
atgtcttccaatccagaaaattctggtgttaatgcgaataataatacgggcactggtaacgctgatgcgatcacaggagctcagcaaaatatggtattacaaccgagacagttgcaagaaatggccgctaagttcaggacattattaactgaagcaagaaatgtaggtgaaactactcctaggggcaaggaattgatgttccaagccgcaaagatcaaacaggtatatgatgcccttacattaaataggagaagacaacaggctgcgcaagcctacaataatacttccaatagtaatagtagcaatccagcttctattcctactgaaaatgtccctaattcttctcagcaacaacaacaacaacaacaacagacaagaaacaacagtaacaaatttagcaatatgataaaacaggttctcaccccggaagagaaccaagaatatgaaaagttatggcagaatttccaagtccgtcatacgagtataaaggagaaagagacctacttgaaacaaaatattgataggttagaacaagaaataaataaacagacggacgaagggcccaagcagcagttacaagaaaagaaaattgaattgcttaacgattggaaggtgttgaaaattgagtataccaagcttttcaataattatcaaaacagtaaaaaaacattctatgtagagtgtgcaagacacaatccggctttacataaattcttgcaagaaagcactcaacagcaaagagtgcagcaacaaagggtacaacaacaacaacaacaacagcagcagcagcagcaacagcagcaacagcaacagcaacagcaacagcaacgccagggtcaaaaccaaagaaagatttctagttctaattctactgaaataccctctgtaaccggccctgatgcattgaaatctcagcagcagcagcagaatacaataactgccaccaataatcccaggggcaatgttaacacttctcagactgaacaaagtaaagctaaggtaaccaatgtaaatgcaacggcatctatgttgaataatataagtagtagcaaatctgcaatattcaaacaaacagagcctgccatacccatatctgaaaatatatctaccaaaacaccagcaccggtagcttatagatccaacagacctacaataactggaggttctgctatgaatgccagtgctttgaatacaccagcaacaactaaattaccaccctatgaaatggatactcagagagttatgtccaagcgtaaattaagagagttagtgaagactgtcggaattgatgagggtgacggtgaaactgtcattgacggtgatgttgaggaattattattggatcttgccgacgattttgttactaatgttacagctttttcttgtagattggcaaaacacagaaaaagtgacaatttggaggcaagagacattcagttacatttggagagaaattggaatattaggattcctggttattccgcagacgaaataagaagtacaagaaaatggaatccctctcaaaattataaccagaaattgcagagtatcacatctgataaggtagcagctgcaaaaaacaatggaaacaatgttgcaagcttgaatacaaaaaaatga

SEQ ID NO: 2079 - DNA, 2130 bp, Saccharomyces cerevisiae
atggatacatcaaactcttggtttgatgcctcaaaagtacaaagcctaaattttgacctacaaaccaactcttattactcaaatgctagaggcagtgacccttcgagttatgcaatagaaggcgaatataaaacactagcaacagatgatttaggcaatatattgaacctaaactatggtgaaaccaacgaagttataatgaatgaaataaatgacttaaaccttccgctgggaccactttctgatgaaaaatctgtcaaggtttctactttctccgagttaataggaaatgattggcaaagtatgaactttgacttagaaaataattcaagagaagtgactctaaatgcaactagcttgttgaatgaaaatagattaaatcaagacagtggtatgactgtttatcaaaaaacaatgagtgataagccccacgatgaaaagaagatttccatggcggataatttattgtcgactataaacaaaagtgaaattaataaaggcttcgatagaaacctcggggaattactgttacagcaacaacaagagttgcgcgagcaattgagagcacaacaagaggctaataagaagttagagttagaactcaaacaaacacaatacaagcaacaacaactacaggctaccttagagaactctgatggtccacagtttttatctcccaaaaggaagatctctcctgcttcagaaaatgtggaggatgtatacgcaaatagcctttcaccaatgatttccccaccaatgtctaatacttcgttcactgggtcaccttctaggagaaacaatagacaaaagtactgcctgcagagaaaaaactctagtggtactgtaggaccactatgtttccaggaattgaacgaaggtttcaatgactccctcatttcaccaaagaaaattcgctcgaatccaaatgaaaacctcagttcaaaaaccaaatttattacgcccttcactccaaagagtagagttagttcagctacgtccaactctgctaacattacccctaataacttaaggttagatttcaagattaatgttgaagatcaggaaagcgaatattcagagaaacctttgggcctgggtattgaacttcttggaaaaccaggtccttctcctacaaaatcagtgtctttaaagagtgcttctgtggatattatgcctacaattcctgggtctgtaaataatactccatcagtcaataaagtatccctttcctccagttatatagaccaatatacaccaagaggtaagcagttacactttagctctatcagtgagaatgcattgggtatcaatgctgcgacaccacatctaaagccgccgagccagcaagcacgacatcgggaaggcgttttcaatgatttagaccctaatgtacttacgaaaaatacagacaatgaaggagatgataatgaggaaaatgagcctgaaagtagatttgttatttccgaaacgccttctcccgttcttaagtcacaaagtaagtacgaaggaagatctcctcaattcggcacacacattaaggaaatcaacacatataccacaaatagtccctcaaaaatcacaagaaaactcacaacactgcccagaggttcaatcgataaatatgtgaaggaaatgcctgataaaacatttgaatgtttatttcctggatgtacaaaaacattcaagagaaggtataacatcagatctcatattcaaacacatttggaagatcggccatattcctgtgatcaccctggatgtgataaggcatttgtacgaaatcatgacttgataagacacaaaaaatcgcaccaagaaaaggcgtatgcatgtccctgtggtaagaaattcaatagagaagacgctttggttgtgcacagaagtagaatgatttgcagcggtggtaaaaagtatgaaaacgtggtaattaaaaggtctccaagaaaaagaggaagaccaagaaaagatggaacttcaagtgtttctagtagtccaatcaaagaaaatattaacaaggatcataatggacagttgatgttcaagcttgaagatcaactcagaagagagcgtagttatgatgggaatggaacggggattatggtttcgccaatgaaaactaatcaaaggtaa

SEQ ID NO: 2080 - DNA, 2130 bp, Artificial Sequence
  Description of Artificial Sequence: Synthetic polynucleotide
atggatacaagtaactcttggtttgatgcctccaaagtacaaagcttgaattttgacttgcaaaccaactcttattactctaatgctagaggcagtgacccttctagttatgcaatagaaggcgaatataaaacattagcaacagatgatttaggcaatatattgaacttgaactatggtgaaaccaacgaagttataatgaatgaaataaatgacttaaaccttccgttgggaccactttctgatgaaaaatctgtcaaggtttctactttctccgagttaataggaaatgattggcaaagtatgaactttgacttagaaaataattctagagaagtgactttgaatgcaactagcttgttgaatgaaaatagattaaatcaagacagtggtatgactgtttatcaaaaaacaatgagtgataagccccacgatgaaaagaagatttccatggcggataatttattgtctactataaacaaaagtgaaattaataaaggcttcgatagaaacctcggggaattattattacagcaacaacaagagttgcgcgagcaattgagagcacaacaagaggctaataagaagttagagttagaactcaaacaaacacaatacaagcaacaacaattgcaggctaccttagagaactctgatggtccacagtttttatctcccaaaaggaagatctctcctgcttctgaaaatgtggaggatgtatacgcaaatagcctttctccaatgatttccccaccaatgtctaatacttctttcactgggagcccttctaggagaaacaatagacaaaagtactgcttacagagaaaaaactctagtggtactgtaggaccattatgtttccaggaattgaacgaaggtttcaatgactccctcatttctccaaagaaaattcgcagtaatccaaatgaaaacctcagttctaaaaccaaatttattacgcccttcactccaaagagtagagttagttctgctacgtccaactctgctaacattacccctaataacttaaggttagatttcaagattaatgttgaagatcaggaaagcgaatattctgagaaacctttgggcttgggtattgaacttcttggaaaaccaggtccttctcctacaaaatctgtgtctttaaagagtgcttctgtggatattatgcctacaattcctgggtctgtaaataatactccaagtgtcaataaagtatccctttcctccagttatatagaccaatatacaccaagaggtaagcagttacactttagctctatcagtgagaatgcattgggtatcaatgctgcgacaccacatttgaagccgccgagccagcaagcaagacatagagaaggcgttttcaatgatttagaccctaatgtacttacgaaaaatacagacaatgaaggagatgataatgaggaaaatgagcctgaaagtagatttgttatttccgaaacgccttctcccgttcttaagtctcaaagtaagtacgaaggaagatctcctcaattcggcacacacattaaggaaatcaacacatataccacaaatagtccctctaaaatcacaagaaaactcacaacattacccagaggttctatcgataaatatgtgaaggaaatgcctgataaaacatttgaatgtttatttcctggatgtacaaaaacattcaagagaaggtataacatcagatctcatattcaaacacatttggaagatagaccatattcctgtgatcaccctggatgtgataaggcatttgtaagaaatcatgacttgataagacacaaaaaatctcaccaagaaaaggcgtatgcatgtccctgtggtaagaaattcaatagagaagacgctttggttgtgcacagaagtagaatgatttgcagcggtggtaaaaagtatgaaaacgtggtaattaaaaggtctccaagaaaaagaggaagaccaagaaaagatggaacttctagtgtttctagtagtccaatcaaagaaaatattaacaaggatcataatggacagttgatgttcaagcttgaagatcaactcagaagagagcgtagttatgatgggaatggaacggggattatggtttctccaatgaaaactaatcaaaggtga

SEQ ID NO: 2081 - DNA, 1605 bp, Saccharomyces cerevisiae
atgtacaccaattattcacttacaagcagtgacgcaatgccccgaacttacttggtcggcacagcctcaccagaaatgtctaagaaaaagcgccagtctgcaaattgtgacaagccaacgaggagggtgatccacatcatcgatactaatgagcactcagaagtcgacttgaaaaatgaactgccaataacatgcacgaatgaagacggtgagatgacatcaagctcatggacttcacaaaccgctaatgattttctcaaactggcatacgtaaacgcgaaattagacccgtctttgccatctcaatatttcaaacaagatatcataaatgttttacaaagcttggagattcctggatggtctgtgcccggctctaaagaatcctcgttgaataagaatttattaactttgacacaaatcaagggggcccttacaaatgttatttataagattcactatccaaacttaccccctttactgatgagaatttttggtgatagcatagattctgtaattgatagagagtatgaattaaaggttattgcgagattatcattttatgatttaggacccaaactagaagggttttttgaaaatggcagatttgaaaaatacattgagggttcgaggacatctactcaagccgactttatagatcgggatacttcaataaaaattgctaaaaaattgaaagagttgcattgtactgttccattaacgcataaagaaataacggatcaaccgtcatgctggacaacctttgatcagtggatcaaattaatagactcgcataaagagtgggtttccaataatgtaaatataagtgaaaatttacgctgttcaagttggaatttttttttaaagagtttcaaaaattataagcgttggttgtataatgattctgcttttacctcaaaattattaagagaggatgataaagatagtatgataaattctgggctaaaaatggtattttgccataacgacttacagcatggtaatttactttttaaaagtaagggtaaggatgacatctcagtgggcgatttaacaattattgactttgagtacgcaggccctaaccccgttgtatttgatttatcaaatcatttgaatgaatggatgcaagactataatgatgtgcagtctttcaagtctcatattgataagtatccaaaagaagaagatattttagtttttgcacaaagttatataaatcacatgaatgagaaccatgtcaaaattgcttctcaagaggttaggattctttacaatctaatcatcgaatggaggccttgtacacaattattctggtgcctttgggctcttttgcaaagcggaaggctaccacaacgaccactgatagaaggtgaaaaactaatgagcgaaaaggctggactaggtgatgaaacgcaccttatggagcacaaaaataaagagaatggaaaatacgattgttctgaagatgattcgttcaactatttaggattttgtaaagaaaaaatgtctgtcttttggggcgatttaattacattgggagttatcgacaaagactgcccagatattggaaaaacagattacttagacactaaacttattttttaa

SEQ ID NO: 2082 - DNA, 1605 bp, Artificial Sequence
  Description of Artificial Sequence: Synthetic polynucleotide
atgtacaccaattattctcttacaagcagtgacgcaatgcccagaacttacttggtcggcacagcctctccagaaatgtctaagaaaaagcgccagtctgcaaattgtgacaagccaacgaggagggtgatccacatcatcgatactaatgagcacagtgaagtcgacttgaaaaatgaattaccaataacatgcacgaatgaagacggtgagatgacatctagctcctggacttctcaaaccgctaatgattttctcaaattggcatacgtaaacgcgaaattagacccgtctttgccatctcaatatttcaaacaagatatcataaatgttttacaaagcttggagattcctggatggtctgtgcccggctctaaagaatcctctttgaataagaatttattaactttgacacaaatcaagggggcccttacaaatgttatttataagattcactatccaaacttaccccctttattgatgagaatttttggtgatagcatagattctgtaattgatagagagtatgaattaaaggttattgcgagattatctttttatgatttaggacccaaattagaagggttttttgaaaatggcagatttgaaaaatacattgagggttctaggacatctactcaagccgactttatagatagagatacttccataaaaattgctaaaaaattgaaagagttgcattgtactgttccattaacgcataaagaaataacggatcaaccgtcttgctggacaacctttgatcagtggatcaaattaatagactctcataaagagtgggtttccaataatgtaaatataagtgaaaatttacgctgtagtagttggaatttttttttaaagagtttcaaaaattataagcgttggttgtataatgattctgcttttacctccaaattattaagagaggatgataaagatagtatgataaattctgggttgaaaatggtattttgccataacgacttacagcatggtaatttactttttaaaagtaagggtaaggatgacatcagtgtgggcgatttaacaattattgactttgagtacgcaggccctaaccccgttgtatttgatttatccaatcatttgaatgaatggatgcaagactataatgatgtgcagtctttcaagtctcatattgataagtatccaaaagaagaagatattttagtttttgcacaaagttatataaatcacatgaatgagaaccatgtcaaaattgcttctcaagaggttaggattctttacaatttgatcatcgaatggaggccttgtacacaattattctggtgcctttgggctcttttgcaaagcggaaggttaccacaaagaccattgatagaaggtgaaaaattaatgagcgaaaaggctggattaggtgatgaaacgcaccttatggagcacaaaaataaagagaatggaaaatacgattgttctgaagatgattctttcaactatttaggattttgtaaagaaaaaatgtctgtcttttggggcgatttaattacattgggagttatcgacaaagactgcccagatattggaaaaacagattacttagacactaaacttattttttga

SEQ ID NO: 2083 - DNA, 1392 bp, Saccharomyces cerevisiae
atgctttccagagcgacgcgtactgcagctgccaaatccttagtaaaatctaaagtggctagaaatgttatggctgcttctttcgtcaagagacatgcttctacaagtttgttcaaacaagctaacaaggtcgaatccttaggttcaatatatttatccggcaagaaaatttcagttgcggcgaatccgttctccataactagcaatcgttttaaatctacctctattgaagttcctccgatggcagagtccctgactgaaggctctttaaaggaatatactaaaaacgttggtgattttattaaggaggacgagctgttggccactattgagaccgataaaattgatattgaggtcaattcgccagtatcaggtactgttacgaagctaaatttcaaaccagaggacactgtcactgttggtgaggagttagctcaggtcgagcctggtgaagcacctgctgagggttctggagaatctaagccagagcctaccgaacaagcggagccatcgcaaggtgtcgccgcaagggaaaactcaagtgaggaaacggcttcaaagaaagaagctgctccaaagaaagaagccgctccaaagaaagaagttacagaaccaaaaaaggctgatcaaccaaagaagaccgtctctaaggcgcaggaacccccagtagcctctaactctttcacaccatttccacgtacagaaaccagggtcaaaatgaaccgtatgagattgaggattgccgaaagattaaaagagtctcaaaacactgctgcttccttaaccacattcaacgaagttgacatgtcagctttgatggaaatgaggaaactgtataaagatgagattattaagaagaccggtactaaattcggattcatgggtcttttctccaaagcatgtaccttggccgccaaggatattccagccgtcaatggtgccattgaaggtgaccagattgtttatcgtgattacacagatatttctgttgctgtggccactccaaagggtttggttacccccgtcgttcgtaatgcagagtcattgagtgttttagatattgagaacgaaattgttcgcttgagtcataaagcgcgtgatggcaaattaaccctagaagatatgacgggtggtactttcaccatatctaatggtggtgtttttggttcattatacggtactcctatcatcaattcaccacaaacagccgtcctaggcttgcatggtgtcaaagagagacctgtcactgttaatggacaaattgtctcaagaccaatgatgtacttggctttgacttatgatcatagattgctagatggtagagaagctgttaccttcttgaagactgttaaagagttgattgaagaccctagaaaaatgttgttatggtga

SEQ ID NO: 2084 - DNA, 1392 bp, Artificial Sequence
  Description of Artificial Sequence: Synthetic polynucleotide
atgctttccagagcgacgcgtactgcagctgccaaatccttagtaaaatctaaagtggctagaaatgttatggctgcttctttcgtcaagagacatgcttctacaagtttgttcaaacaagctaacaaggtcgaatccttaggttccatatatttatccggcaagaaaatttctgttgcggcgaatccgttctccataactagcaatcgttttaaatctacctctattgaagttcctccgatggcagagtccttgactgaaggctctttaaaggaatatactaaaaacgttggtgattttattaaggaggacgagttattggccactattgagaccgataaaattgatattgaggtcaattctccagtatctggtactgttacgaagttgaatttcaaaccagaggacactgtcactgttggtgaggagttagctcaggtcgagcctggtgaagcacctgctgagggttctggagaatctaagccagagcctaccgaacaagcggagccatctcaaggtgtcgccgcaagggaaaacagtagtgaggaaacggcttccaagaaagaagctgctccaaagaaagaagccgctccaaagaaagaagttacagaaccaaaaaaggctgatcaaccaaagaagaccgtctctaaggcgcaggaacccccagtagcctctaactctttcacaccatttccacgtacagaaaccagggtcaaaatgaaccgtatgagattgaggattgccgaaagattaaaagagtctcaaaacactgctgcttccttaaccacattcaacgaagttgacatgtctgctttgatggaaatgaggaaactttataaagatgagattattaagaagaccggtactaaattcggattcatgggtcttttctccaaagcatgtaccttggccgccaaggatattccagccgtcaatggtgccattgaaggtgaccagattgtttatcgtgattacacagatatttctgttgctgtggccactccaaagggtttggttacccccgtcgttcgtaatgcagagtctttgagtgttttagatattgagaacgaaattgttcgcttgagtcataaagcgcgtgatggcaaattaaccttagaagatatgacgggtggtactttcaccatatctaatggtggtgtttttggttctttatacggtactcctatcatcaattctccacaaacagccgtccttggcttgcatggtgtcaaagagagacctgtcactgttaatggacaaattgtctctagaccaatgatgtacttggctttgacttatgatcatagattgttggatggtagagaagctgttaccttcttgaagactgttaaagagttgattgaagaccctagaaaaatgttgttatggtga

SEQ ID NO: 2085 - DNA, 8247 bp, Saccharomyces cerevisiae
atgtcccacaacaacaggcataaaaagaataacgataaagacagctcagcagggcagtatgcaaatagcattgacaattcattaagccaggaaagcgtctcaacgaacggcgtaacaaggatggctaacttaaaggctgatgaatgcggcagtggtgatgaaggagataaaacaaagcggttttcgatttcaagtattttgagtaaaagagagacaaaagacgtgcttccggaatttgcaggcagtagttcccacaatggagtactcacggcgaattcatcaaaggatatgaactttactttggaactaagcgagaatttgttggttgagtgtaggaaattgcaatcctctaatgaagctaaaaatgagcaaatcaagtctctcaagcaaattaaagagtcattaagtgacaagattgaggagctcactaaccaaaaaaagtccttcatgaaagagttggattcaactaaagatttaaactgggatttagaatctaaattaacaaacttgagcatggaatgtaggcaattaaaagaattgaagaaaaagactgaaaaatcttggaatgatgaaaaagaaagcctgaaacttctgaaaacagatttggaaattttaacattaacaaaaaatggcatggaaaatgatcttagctctcaaaaacttcattacgataaagagattagtgaattaaaggaaaggattttagacttaaataatgaaaacgacagattacttattagtgtttctgatctaacaagtgaaattaattccttacagagcaatagaactgaaagaataaaaattcaaaagcaacttgatgacgccaaagcatctatttcttcgttaaaaagaaaagtacaaaagaagtattatcaaaaacagcatacttccgatactacagtaacatctgatcctgattctgaggggaccactagtgaagaagacatttttgatatagtgatcgaaattgaccacatgattgaaacaggcccctctgtcgaggacatttctgaagatcttgtcaagaaatactcagaaaaaaacaatatgatattgttatcgaatgattcatataaaaacttactacaaaaaagtgaaagtgcatccaaaccaaaagacgatgaattaatgaccaaagaggtggctgaaaacctgaatatgatcgcgttaccaaatgatgacaattacagcaaaaaagagttttcgttagaatctcatattaaatatttagaagcttctggctataaagttcttcctctagaggagtttgagaacctaaacgaatccctatcaaatccatcatataactatctcaaggaaaaacttcaggctttgaaaaagatacccatcgatcaaagtacgtttaacttgttaaaagagcctactattgattttttactgcctttaacatccaaaattgattgcctgataatacctaccaaagattataatgacctttttgagagtgtcaagaatccatcaattgaacaaatgaaaaaatgcctggaagcaaagaacgacttacaatcgaatatttgtaaatggctggaggagagaaacggctgtaaatggctaagtaatgatctgtatttttcaatggttaataagatagaaacaccttcgaaacaatacctgtcagataaggcaaaagaatacgaccaagtgctgattgatactaaagccttagaaggtttaaagaacccaacgatagactttctaagagaaaaagcttctgcatcagattatttattactcaaaaaagaagactacgtgagcccatcactggaatacctagttgaacatgccaaggccaccaatcaccatttactatcggatagtgcatacgaagacctagtcaagtgcaaggagaatcctgatatggaattcttgaaggagaagtctgccaaactaggccacactgtggtatccaacgaggcatattctgaattggaaaagaaactagaacaaccatcactggaatacctagttgaacatgccaaggcgaccaatcaccatttactatcggatagtgcatacgaagacctagtcaagtgcaaggagaatcctgatatggaattcttgaaggagaagtctgccaaactaggccatactgtggtatccaacgaggcatattctgaattgcaacgcaaatactcagaattggagaaggaagtagaacaaccatctctagcatacttagttgaacacgccaaggctaccgatcaccatttactatcggatagtgcatacgaagacctagtcaagtgcaaggagaatcctgatgtggaattcttgaaggagaagtctgctaaactaggccatactgtggtatctagcgaggaatattctgaattgcaacgcaaatactcagaattggagaaggaagtagaacaaccatcactagcatacctagtcgaacacgccaaggctaccgatcaccatttactatcggatagtgcatacgaagaactagtcaagtgcaaggagaatcctgatatggaattcttgaaggagaagtctgccaaactaggccacactgtggtatccaacgaggcatattctgaattggaaaagaaactagaacaaccatcactagcatacctagtcgaacatgccaaggctaccgatcaccatctgctatcggatagtgcatacgaagacctagtcaagtgcaaggaaaattctgatgtagaattcttgaaggagaagtctgctaaactaggccatactgtggtatccaacgaagcatattctgaattggaaaagaaactagaacaaccatcactagcatacctagtcgaacatgccaaggctaccgatcaccatctgctatcggatagtgcatacgaagacctagtcaagtgcaaggagaatcctgatatggaattcttgaaggagaagtctgccaaactaggccacactgtggtatccaacgaggcatattctgaattggaaaagaaactagaacaaccatcactggaatacctagttgaacatgccaaggccaccaatcaccatttactatcggatagtgcatacgaagacctagtcaagtgcaaggagaatcctgatatggaattcttgaaggagaagtctgccaaactaggccacactgtggtatccaacgaggcatattctgaattggaaaagaaactagaacaaccatcactggaatacctagttgaacatgccaaggccaccaatcaccatctgctatcggatagtgcatacgaagaactagtcaagtgcaaggaaaatcctgatgtagaattcttgaaggagaagtctgctaaactaggccatactgtggtatccaacgaagcatattctgaattggaaaagaaactagaacaaccatcactggaatacctagttgaacatgccaaggccaccaatcaccatctgctatcggatagtgcatacgaagaactagtcaagtgcaaggaaaatcctgatgtagaattcttgaaggagaagtctgctaaactaggccatactgtggtatccaacgaagcatattctgaattggaaaagaaactagaacaaccatcactagcatacctagtcgaacatgccaaggctaccgatcaccatctgctatcggatagtgcatacgaagacctagtcaagtgcaaggaaaatcctgatgtagaattcttgaaggagaagtctgctaaactaggccatactgtggtatccaacgaagcatattctgaattggaaaagaaactagaacaaccatcactagcatacctagtcgaacatgccaaggctaccgatcaccatctgctatcggatagtgcatacgaagacctagtcaagtgcaaggagaatcctgatatggaattcttgaaggagaagtctgccaaactaggccacactgtggtatccaacgaggcatattctgaattggaaaagaaactagaacaaccatcactggaatacctagttgaacatgccaaggccaccaatcaccatctgctatcggatagtgcatacgaagacctagtcaagtgcaaggagaatcctgatatggaattcttgaaggagaagtctgctaaactgggccatactgtggtatccaacaaggaatattctgaattggaaaagaaactagaacaaccatcactggaatacttagtcaaacatgccgaacaaatacaatcaaaaattatatcgatctcggacttcaacaccttagctaatccatctatggaagatatggcttcaaaattgcaaaagttagaataccagattgtttcgaacgatgagtacattgcattgaaaaatacgatggaaaagccggacgttgagttactaagatccaagttgaaaggttaccatataattgatacaacaacgtacaatgagctagtcagcaatttcaattctcctacgttgaagtttattgaagagaaagccaaaagcaaaggttatagattaatagaacctaatgaataccttgacttgaataggatagccactacaccttctaaagaagagattgataacttctgcaaacaaattgggtgttacgctttggactctaaagaatatgaaagactaaaaaattctctggagaatccctccaagaaatttatagaagaaaatgccgcattacttgatcttgtgctagtggacaaaacggagtaccaagcaatgaaagataatgcaagcaacaagaaatcacttattccttcaaccaaggcacttgatttcgttacaatgcctgccccacagcttgcttctgcagagaagtcatcactacaaaaaagaactttatctgatattgaaaatgagttaaaggccttaggctacgtcgcaattcgtaaagaaaacctgccaaacctagagaaaccaattgttgacaatgcctccaaaaatgatgtcttgaacctatgttcgaaattcagtttagtaccattgtctactgaagaatatgataatatgagaaaggaacacactaaaatcttaaatattctcggtgatccatctattgatttcctgaaggaaaaatgtgaaaaatatcaaatgctcataattagtaaacatgattacgaagaaaagcaagaagccattgaaaatccaggctacgaatttattttagaaaaagcatcagcactgggatatgaattagttagcgaggttgagctggatcgcatgaaacaaatgattgattcaccagatattgactacatgcaagaaaaggctgcccgcaatgaaatggtgttgttgaggaacgaggagaaggaagcattgcaaaagaaaatagaatatccctctttaacatttttaatcgaaaaggctgctggaatgaacaaaatacttgttgaccaaatcgagtatgatgaaactataagaaaatgcaatcatcccactcggatggagctagaggaatcctgtcatcacttgaacttggttttgctcgaccaaaacgagtactcaactctaagagaacctttggaaaatcgaaatgttgaagacttaattaacaccttgagcaaactaaactacattgcaattcctaatactatctaccaagatttaattggaaagtatgagaatccaaactttgattatctaaaggattctttgaacaaaatggattacgtcgcaatctctagacaagattatgaattgatggttgctaaatacgaaaagccacaactggattatttgaaaatttcttcagagaaaatcgaccacattgtagtgcctctgtctgagtacaatttaatggttacaaattatagaaatcccagcttgagctacttaaaagagaaagccgttttgaataatcatattttaataaaagaagatgactataaaaacattttagcagtatcagaacatccgacagtgatccacctctccgaaaaggcatctttattaaataaagtcttggtagacaaggatgattttgcgaccatgtcacgctcgattgagaaaccaactatcgatttcttatccactaaggcgctatcaatggggaaaatactagttaatgaatctacgcataaaagaaacgagaaactattatctgaaccagattctgaatttttgacaatgaaagccaaggagcaagggctaattatcatttcagaaaaggaatattctgaactgcgggatcaaatagatcgtcctagcctagatgttttgaaagaaaaggccgccatttttgatagcatcatagtagaaaacatagaataccaacaactggtaaacactacaagtccctgccctcccattacttatgaagatttgaaagtatatgcccaccaattcggtatggaattatgcctccaaaaacccaacaaactttctggagctgagcgtgcagagcgcattgatgaacaatcaataaatacgaccagcagtaactcgaccacaacatcgagcatgtttacagatgcactagatgataatatcgaagagcttaatcgtgtcgaattgcagaataatgaagattatactgacataatctcgaaatcatccacagtgaaagatgctaccattttcattcccgcctatgaaaacatcaagaattctgctgaaaaattaggctacaaattagttccgttcgaaaaatcaaatatcaatctgaaaaacattgaagctccattattttcgaaggacaacgatgacactagcgttgccagtagcatagatcttgatcacttatctagaaaagcagaaaaatatggtatgaccctcatttctgatcaggaatttgaagaatatcatatactaaaagataacgcggttaatctgaatggtggcatggaagaaatgaataatcccttgtcagaaaatcaaaacttagcagcaaaaaccacaaacacagcgcaagaaggtgccttccaaaacaccgttccccacaatgatatggacaacgaagaagtcgaatatgggccggatgatccaacattcacagtaaggcaactcaagaaacccgctggcgatcgtaatttgattttgactagtagggagaaaacactgttatcaagagatgataatataatgagtcaaaatgaggcggtttatggtgacgatatatctgatagctttgtagatgaaagccaagaaatcaaaaatgatgtagacattattaaaactcaagctatgaaatatggtatgttgtgtattcctgaaagtaattttgtgggtgcatcatatgcaagtgctcaagatatgagcgatatagttgtgctttccgcgtcctattaccataatctaatgtcacctgaagacatgaaatggaactgtgttagtaatgaagaattacaagcggaagttaaaaagcgtgggctccagattgcactaacaacaaaggaagataagaaaggtcaagccacggcatccaaacatgagtatgtgtcgcataagctaaacaataaaacatctactgtgtccacaaagtctggagcaaaaaagggacttgcagaagcagcagcaacaactgcttatgaagattccgaaagtcatccacaaatagaagagcagtctcatcgtactaatcatcataagcaccataaacgtcaacagagtctgaattctaattcaacctcaaaaaccacacattcatcgaggaatacgccagcatctagacgagatatagtagcatcatttatgtcacgtgcaggatctgccagtaggacggcatctttacaaactttagcatcattgaacgaaccaagcataatacccgcgttaacccaaaccgtcattggggaatatttgtttaagtattatccacgcttgggaccttttggattcgaatcacgtcatgaaagattcttctgggttcatccatataccttaactttgtactggtccgcttctaatcccatcctagagaatcctgccaataccaaaacaaaaggtgttgccattctaggagtagaaagtgtcacagacccaaacccatatccaacaggattgtatcacaaaagtattgttgttaccacagaaactaggactattaagtttacttgtcctacaaggcaaagacacaatatttggtataattcattacgttatttacttcaaaggaacatgcaagggataagtttagaggacatcgctgatgatccaacagataatatgtattcaggaaagattttcccattgcccggcgaaaatacaaagagctccagtaaaagacttagcgcatcgagaaggtccgtatctacaaggtctctaagacatagagtaccacaaagccgatcatttggcaatttacgatag

SEQ ID NO: 2086 - DNA, 8247 bp, Artificial Sequence
  Description of Artificial Sequence: Synthetic polynucleotide
atgtcccacaacaacaggcataaaaagaataacgataaagacagcagcgcagggcagtatgcaaatagcattgacaattctttaagccaggaaagcgtctctacgaacggcgtaacaaggatggctaacttaaaggctgatgaatgcggcagtggtgatgaaggagataaaacaaagagattttctatttccagtattttgagtaaaagagagacaaaagacgtgcttccggaatttgcaggcagtagttcccacaatggagtactcacggcgaattcttccaaggatatgaactttactttggaattgagcgagaatttgttggttgagtgtaggaaattgcaatcctctaatgaagctaaaaatgagcaaatcaagtctctcaagcaaattaaagagtctttaagtgacaagattgaggagctcactaaccaaaaaaagtccttcatgaaagagttggattctactaaagatttaaactgggatttagaatctaaattaacaaacttgagcatggaatgtaggcaattaaaagaattgaagaaaaagactgaaaaatcttggaatgatgaaaaagaaagcttgaaacttttgaaaacagatttggaaattttaacattaacaaaaaatggcatggaaaatgatcttagctctcaaaaacttcattacgataaagagattagtgaattaaaggaaaggattttagacttaaataatgaaaacgacagattacttattagtgtttctgatttaacaagtgaaattaattccttacagagcaatagaactgaaagaataaaaattcaaaagcaacttgatgacgccaaagcatctatttcttctttaaaaagaaaagtacaaaagaagtattatcaaaaacagcatacttccgatactacagtaacatctgatcctgattctgaggggaccactagtgaagaagacatttttgatatagtgatcgaaattgaccacatgattgaaacaggcccctctgtcgaggacatttctgaagatcttgtcaagaaatactctgaaaaaaacaatatgatattgttatccaatgattcttataaaaacttattacaaaaaagtgaaagtgcatccaaaccaaaagacgatgaattaatgaccaaagaggtggctgaaaacttgaatatgatcgcgttaccaaatgatgacaattacagcaaaaaagagttttctttagaatctcatattaaatatttagaagcttctggctataaagttcttcctttagaggagtttgagaacttgaacgaatccttatccaatccatcttataactatctcaaggaaaaacttcaggctttgaaaaagatacccatcgatcaaagtacgtttaacttgttaaaagagcctactattgattttttattgcctttaacatccaaaattgattgcttaataatacctaccaaagattataatgacctttttgagagtgtcaagaatccatctattgaacaaatgaaaaaatgcttagaagcaaagaacgacttacaaagcaatatttgtaaatggttggaggagagaaacggctgtaaatggttgagtaatgatttatatttttccatggttaataagatagaaacaccttccaaacaatacctttctgataaggcaaaagaatacgaccaagtgttgattgatactaaagccttagaaggtttaaagaacccaacgatagactttttaagagaaaaagcttctgcatctgattatttattactcaaaaaagaagactacgtgagcccatctttggaatacttggttgaacatgccaaggccaccaatcaccatttattaagtgatagtgcatacgaagacttggtcaagtgcaaggagaatcctgatatggaattcttgaaggagaagtctgccaaattgggccacactgtggtatccaacgaggcatattctgaattggaaaagaaattagaacaaccatctttggaatacttggttgaacatgccaaggcgaccaatcaccatttattaagtgatagtgcatacgaagacttggtcaagtgcaaggagaatcctgatatggaattcttgaaggagaagtctgccaaattgggccatactgtggtatccaacgaggcatattctgaattgcaacgcaaatactctgaattggagaaggaagtagaacaaccatctttggcatacttagttgaacacgccaaggctaccgatcaccatttattaagtgatagtgcatacgaagacttggtcaagtgcaaggagaatcctgatgtggaattcttgaaggagaagtctgctaaattgggccatactgtggtatctagcgaggaatattctgaattgcaacgcaaatactctgaattggagaaggaagtagaacaaccatctttggcatacttagtcgaacacgccaaggctaccgatcaccatttattaagtgatagtgcatacgaagaattggtcaagtgcaaggagaatcctgatatggaattcttgaaggagaagtctgccaaattgggccacactgtggtatccaacgaggcatattctgaattggaaaagaaattagaacaaccatctttggcatacttagtcgaacatgccaaggctaccgatcaccatttattaagtgatagtgcatacgaagacttggtcaagtgcaaggaaaattctgatgtagaattcttgaaggagaagtctgctaaattgggccatactgtggtatccaacgaagcatattctgaattggaaaagaaattagaacaaccatctttggcatacttagtcgaacatgccaaggctaccgatcaccatttattaagtgatagtgcatacgaagacttggtcaagtgcaaggagaatcctgatatggaattcttgaaggagaagtctgccaaattgggccacactgtggtatccaacgaggcatattctgaattggaaaagaaattagaacaaccatctttggaatacttggttgaacatgccaaggccaccaatcaccatttattaagtgatagtgcatacgaagacttggtcaagtgcaaggagaatcctgatatggaattcttgaaggagaagtctgccaaattgggccacactgtggtatccaacgaggcatattctgaattggaaaagaaattagaacaaccatctttggaatacttggttgaacatgccaaggccaccaatcaccatttattaagtgatagtgcatacgaagaattggtcaagtgcaaggaaaatcctgatgtagaattcttgaaggagaagtctgctaaattgggccatactgtggtatccaacgaagcatattctgaattggaaaagaaattagaacaaccatctttggaatacttggttgaacatgccaaggccaccaatcaccatttattaagtgatagtgcatacgaagaattggtcaagtgcaaggaaaatcctgatgtagaattcttgaaggagaagtctgctaaattgggccatactgtggtatccaacgaagcatattctgaattggaaaagaaattagaacaaccatctttggcatacttagtcgaacatgccaaggctaccgatcaccatttattaagtgatagtgcatacgaagacttggtcaagtgcaaggaaaatcctgatgtagaattcttgaaggagaagtctgctaaattgggccatactgtggtatccaacgaagcatattctgaattggaaaagaaattagaacaaccatctttggcatacttagtcgaacatgccaaggctaccgatcaccatttattaagtgatagtgcatacgaagacttggtcaagtgcaaggagaatcctgatatggaattcttgaaggagaagtctgccaaattgggccacactgtggtatccaacgaggcatattctgaattggaaaagaaattagaacaaccatctttggaatacttggttgaacatgccaaggccaccaatcaccatttattaagtgatagtgcatacgaagacttggtcaagtgcaaggagaatcctgatatggaattcttgaaggagaagtctgctaaattgggccatactgtggtatccaacaaggaatattctgaattggaaaagaaattagaacaaccatctttggaatacttagtcaaacatgccgaacaaatacaaagtaaaattatatccatcagtgacttcaacaccttagctaatccatctatggaagatatggcttccaaattgcaaaagttagaataccagattgtttctaacgatgagtacattgcattgaaaaatacgatggaaaagccggacgttgagttattaagatccaagttgaaaggttaccatataattgatacaacaacgtacaatgagttggtcagcaatttcaattctcctacgttgaagtttattgaagagaaagccaaaagcaaaggttatagattaatagaacctaatgaataccttgacttgaataggatagccactacaccttctaaagaagagattgataacttctgcaaacaaattgggtgttacgctttggactctaaagaatatgaaagattgaaaaattctttggagaatccctccaagaaatttatagaagaaaatgccgcattacttgatcttgtgttagtggacaaaacggagtaccaagcaatgaaagataatgcaagcaacaagaaatctcttattccttctaccaaggcacttgatttcgttacaatgcctgccccacagcttgcttctgcagagaagagttctttacaaaaaagaactttatctgatattgaaaatgagttaaaggccttaggctacgtcgcaattcgtaaagaaaacttaccaaacttggagaaaccaattgttgacaatgcctccaaaaatgatgtcttgaacttgtgttctaaattcagtttagtaccattgtctactgaagaatatgataatatgagaaaggaacacactaaaatcttaaatattctcggtgatccatctattgatttcttgaaggaaaaatgtgaaaaatatcaaatgctcataattagtaaacatgattacgaagaaaagcaagaagccattgaaaatccaggctacgaatttattttagaaaaagcatctgcattgggatatgaattagttagcgaggttgagttagatcgcatgaaacaaatgattgattctccagatattgactacatgcaagaaaaggctgcccgcaatgaaatggtgttgttgaggaacgaggagaaggaagcattgcaaaagaaaatagaatatccctctttaacatttttaatcgaaaaggctgctggaatgaacaaaatacttgttgaccaaatcgagtatgatgaaactataagaaaatgcaatcatcccactagaatggagttagaggaatcctgtcatcacttgaacttggttttgctcgaccaaaacgagtactccactttgagagaacctttggaaaatagaaatgttgaagacttaattaacaccttgagcaaattgaactacattgcaattcctaatactatctaccaagatttaattggaaagtatgagaatccaaactttgattatttgaaggattctttgaacaaaatggattacgtcgcaatctctagacaagattatgaattgatggttgctaaatacgaaaagccacaattggattatttgaaaatttcttctgagaaaatcgaccacattgtagtgcctttatctgagtacaatttaatggttacaaattatagaaatcccagcttgagctacttaaaagagaaagccgttttgaataatcatattttaataaaagaagatgactataaaaacattttagcagtatctgaacatccgacagtgatccacctctccgaaaaggcatctttattaaataaagtcttggtagacaaggatgattttgcgaccatgtctcgctccattgagaaaccaactatcgatttcttatccactaaggcgttatctatggggaaaatattagttaatgaatctacgcataaaagaaacgagaaattattatctgaaccagattctgaatttttgacaatgaaagccaaggagcaagggttgattatcatttctgaaaaggaatattctgaattaagagatcaaatagatcgtcctagcttagatgttttgaaagaaaaggccgccatttttgatagcatcatagtagaaaacatagaataccaacaattggtaaacactacaagtccctgccctcccattacttatgaagatttgaaagtatatgcccaccaattcggtatggaattatgcctccaaaaacccaacaaactttctggagctgagcgtgcagagcgcattgatgaacaaagtataaatacgaccagcagtaactctaccacaacatctagcatgtttacagatgcattggatgataatatcgaagagcttaatcgtgtcgaattgcagaataatgaagattatactgacataatctccaaatcttccacagtgaaagatgctaccattttcattcccgcctatgaaaacatcaagaattctgctgaaaaattaggctacaaattagttccgttcgaaaaatctaatatcaatttgaaaaacattgaagctccattattttccaaggacaacgatgacactagcgttgccagtagcatagatcttgatcacttatctagaaaagcagaaaaatatggtatgaccctcatttctgatcaggaatttgaagaatatcatatattgaaagataacgcggttaatttgaatggtggcatggaagaaatgaataatcccttgagtgaaaatcaaaacttagcagcaaaaaccacaaacacagcgcaagaaggtgccttccaaaacaccgttccccacaatgatatggacaacgaagaagtcgaatatgggccggatgatccaacattcacagtaaggcaactcaagaaacccgctggcgatcgtaatttgattttgactagtagggagaaaacattattatctagagatgataatataatgagtcaaaatgaggcggtttatggtgacgatatatctgatagctttgtagatgaaagccaagaaatcaaaaatgatgtagacattattaaaactcaagctatgaaatatggtatgttgtgtattcctgaaagtaattttgtgggtgcaagttatgcaagtgctcaagatatgagcgatatagttgtgctttccgcgtcctattaccataatttaatgtctcctgaagacatgaaatggaactgtgttagtaatgaagaattacaagcggaagttaaaaagcgtgggctccagattgcattaacaacaaaggaagataagaaaggtcaagccacggcatccaaacatgagtatgtgtctcataagttgaacaataaaacatctactgtgtccacaaagtctggagcaaaaaagggacttgcagaagcagcagcaacaactgcttatgaagattccgaaagtcatccacaaatagaagagcagtctcatcgtactaatcatcataagcaccataaacgtcaacagagtttgaattctaattctacctccaaaaccacacattcttccaggaatacgccagcatctagaagagatatagtagcaagttttatgtcccgtgcaggatctgccagtaggacggcatctttacaaactttagcaagtttgaacgaaccaagcataatacccgcgttaacccaaaccgtcattggggaatatttgtttaagtattatccacgcttgggaccttttggattcgaatcccgtcatgaaagattcttctgggttcatccatataccttaactttgtactggtccgcttctaatcccatcttggagaatcctgccaataccaaaacaaaaggtgttgccattttaggagtagaaagtgtcacagacccaaacccatatccaacaggattgtatcacaaaagtattgttgttaccacagaaactaggactattaagtttacttgtcctacaaggcaaagacacaatatttggtataattctttacgttatttacttcaaaggaacatgcaagggataagtttagaggacatcgctgatgatccaacagataatatgtattctggaaagattttcccattgcccggcgaaaatacaaagagctccagtaaaagacttagcgcatctagaaggtccgtatctacaaggtctttgagacatagagtaccacaaagcagatcttttggcaatttacgttga

SEQ ID NO: 2087 - DNA, 978 bp, Saccharomyces cerevisiae
atgatgccgaatgttgctccaaacagctactatttaaacataccgaatgccaattcgacctcaacgactacgtcctcgatcttttctgatctcaacaaggagtacgagtcaaagattaaagaaatcgaagaatattatataaagacactgctcaatgaaaataccgataatgatgacagcagcagctccgaggggcataatataaatgaaacggacattttaagtgaatactcaccaaggccttctccttggttaccatccaaaccaaactgttatcatccgttgggagattttaaagacttgatcatatcagattccagacctacaaatacattacctattaataaccctttcgcaggcaataataacatctcaacacttgctacaactgagaaaaaacgtaagaaaaggtcactcgaagttgagattaaccctacttacacgacaagtgcattttcattacccctgacagcggagaatttacaaaaactatctcaggtggattctcagtctactggacttccatacacacttccaattcagaaaacaacaaaactggaaccttgtagaagggcacctttgcagcttcctcaattagtcaataagaccttatacaaaactgagctctgtgaatcttttactattaaaggctattgtaagtatggaaataaatgccaatttgctcatggtcttaatgaactgaaattcaagaaaaaatcaaacaattatagaactaaaccttgcataaattggtcgaagttaggctactgtccgtacggtaagcgttgctgtttcaaacacggtgatgataaggacgttgaaatatatcaaaatgctaacgatggaagaagtaaggatacggcgttgactccacttcctacttccctagccccaagcaacaacgataatatcactaatttgagtaagcctaggaacttacatactagtgttaaagcattgcaaaggatgacttggtag

SEQ ID NO: 2088 - DNA, 978 bp, Artificial Sequence
  Description of Artificial Sequence: Synthetic polynucleotide
atgatgccgaatgttgctccaaacagctactatttaaacataccgaatgccaattctacctctacgactacgtcctctatcttttctgatctcaacaaggagtacgagtctaagattaaagaaatcgaagaatattatataaagacattactcaatgaaaataccgataatgatgacagcagcagctccgaggggcataatataaatgaaacggacattttaagtgaatactctccaaggccttctccttggttaccatccaaaccaaactgttatcatccgttgggagattttaaagacttgatcatatctgattccagacctacaaatacattacctattaataaccctttcgcaggcaataataacatcagtacacttgctacaactgagaaaaaacgtaagaaaaggtctctcgaagttgagattaaccctacttacacgacaagtgcattttctttacccttgacagcggagaatttacaaaaattatctcaggtggattctcagtctactggacttccatacacacttccaattcagaaaacaacaaaattagaaccttgtagaagggcacctttgcagcttcctcaattagtcaataagaccttatacaaaactgagctctgtgaatcttttactattaaaggctattgtaagtatggaaataaatgccaatttgctcatggtcttaatgaattgaaattcaagaaaaaaagtaacaattatagaactaaaccttgcataaattggtccaagttaggctactgtccgtacggtaagcgttgctgtttcaaacacggtgatgataaggacgttgaaatatatcaaaatgctaacgatggaagaagtaaggatacggcgttgactccacttcctacttccttggccccaagcaacaacgataatatcactaatttgagtaagcctaggaacttacatactagtgttaaagcattgcaaaggatgacttggtga

SEQ ID NO: 2089 - DNA, 798 bp, Saccharomyces cerevisiae
atggattataaggaagaacagaagcaggaactagaagttttagagtccatttatcctgatgaactgaggatcataaacgatgaatacccaaagattaaatttgaagtagccattaaattagagctggatacaggtgattctacttctgttttaaccaaagagcacactataatcgccgaattcaagttaccagaaaactaccctgacgaaccatgcctgatttcattggaagctcaagaagtagccctcaatgacaacgaagaagataacgaggaagatgaagacgaggttgaatatgacgaccatggtaataaagtactgaaaaagtttgaaaacctgccagatttaataagctttaaggggtacttgcctgaattaaccgtacaattagaatcgcaaatcgaaaccgatatgttattgggtatgcaaatgtgttttgcattgatttcatccataaaagaaagatgtgagcaatggtatagtgaacaattgaataagctcgagaagcagtacgagctggaagcacaagaacgtgaaaagaaggaacaggccaagttccatggtactaaagtcacaagagaatcgtacttggaatggaggtctaaatttcgccaagaactgaaactggatgaaagagaccaggtgagaaggatgaaggctcatcatgggaagctaaccggtaagcaaatgtttgaacaaggcgtggtgggcacaggcgacgagtatatggaagaggatgacgcgagtgtagatgacgtagccaagggacttgccaagaccgaaatagcaaatcaataa

SEQ ID NO: 2090 - DNA, 798 bp, Artificial Sequence
  Description of Artificial Sequence: Synthetic polynucleotide
atggattataaggaagaacagaagcaggaattggaagttttagagtccatttatcctgatgaattgaggatcataaacgatgaatacccaaagattaaatttgaagtagccattaaattagagttagatacaggtgattctacttctgttttaaccaaagagcacactataatcgccgaattcaagttaccagaaaactaccctgacgaaccatgcttgatttctttggaagctcaagaagtagccctcaatgacaacgaagaagataacgaggaagatgaagacgaggttgaatatgacgaccatggtaataaagtattgaaaaagtttgaaaacttaccagatttaataagctttaaggggtacttgcctgaattaaccgtacaattagaatctcaaatcgaaaccgatatgttattgggtatgcaaatgtgttttgcattgatttcttccataaaagaaagatgtgagcaatggtatagtgaacaattgaataagctcgagaagcagtacgagttagaagcacaagaacgtgaaaagaaggaacaggccaagttccatggtactaaagtcacaagagaatcttacttggaatggaggtctaaatttcgccaagaattgaaattggatgaaagagaccaggtgagaaggatgaaggctcatcatgggaagttgaccggtaagcaaatgtttgaacaaggcgtggtgggcacaggcgacgagtatatggaagaggatgacgcgagtgtagatgacgtagccaagggacttgccaagaccgaaatagcaaatcaatga

SEQ ID NO: 2091 - DNA, 1236 bp, Saccharomyces cerevisiae
atggactcattatcaaaaaagattcaaaatttaggtatccatgatattagaaatgccgcaaggtttgcccaaaacgtgatagtccaatatgagccttatcagatagatatccgtcgtgctacaaataccgatgcttggggccccacaccgaagcacctcgccaaggttttaaggaacagataccaagtgccgctctacttgatgacagaatacacgttgaaaagattagtcgaccatatcgctaccaggcccaagaacctatacgaaaaggcaagaaaggactacgttaattatgggtccgaatggagggtggtcttaaaatgtctagtagtcattgaattcctattattgaacgtcgacacaggtgacgaactgaatcagattagatcatgtttgctcactcataagcatattttaaccagggagattgcccaattcaaggtaaaattctccaatgatggtaaaatggagattcatgagagaggtattaggaaaaagggagaacttatcttgcaatacttggaagactcacaatttttgaaaaaggaaagagccaagaataagaagaatgccttgaaaattcgacagcaaggagaatcctccatttataatgccaaccagatttcaacgtctgcaagttacgataacatcgacgacgatgaatttgatgcagatgcagatggctttgacagtgaaatggatgctaataatgtgaccaacttcaatgttcctgtggaaacagaagcaaattcgaatactcgcaggcgttctcatatggaagaacaaagaagacaaagaagggagatattaagagagcagatcaaaaataaagaacagcagaggaaaagaaagcaacaacaagatagcatccctgacttaatcgatcttgacgatagtactagcaccacgaataatataacaatagacaatggtaataatgacaacaaaaacaataatatcaacagcaatagtgatgatgatgatgatgagtttggcgacttccaaagcgaaacgagtcccgacacaacagcacctaaaacttccaatagtaaaatagatgatttgcttgactgggatggcccaaagtcagacacagataccaccgctgctgcgcaaacatcattgccctttgcggagaaaaaacagcaaaaagcccgtcctcaggctacaaaggacaagtcgaagggaaatgatgcattttccgacttattctcttactccaagtcgttggtctaa

SEQ ID NO: 2092 - DNA, 1236 bp, Artificial Sequence
  Description of Artificial Sequence: Synthetic polynucleotide
atggactctttatccaaaaagattcaaaatttaggtatccatgatattagaaatgccgcaaggtttgcccaaaacgtgatagtccaatatgagccttatcagatagatatccgtcgtgctacaaataccgatgcttggggccccacaccgaagcacctcgccaaggttttaaggaacagataccaagtgccgctctacttgatgacagaatacacgttgaaaagattagtcgaccatatcgctaccaggcccaagaacctttacgaaaaggcaagaaaggactacgttaattatgggtccgaatggagggtggtcttaaaatgtttggtagtcattgaattcttattattgaacgtcgacacaggtgacgaattgaatcagattagatcttgtttgctcactcataagcatattttaaccagggagattgcccaattcaaggtaaaattctccaatgatggtaaaatggagattcatgagagaggtattaggaaaaagggagaacttatcttgcaatacttggaagactctcaatttttgaaaaaggaaagagccaagaataagaagaatgccttgaaaattagacagcaaggagaatcctccatttataatgccaaccagatttctacgtctgcaagttacgataacatcgacgacgatgaatttgatgcagatgcagatggctttgacagtgaaatggatgctaataatgtgaccaacttcaatgttcctgtggaaacagaagcaaatagtaatactcgcaggcgttctcatatggaagaacaaagaagacaaagaagggagatattaagagagcagatcaaaaataaagaacagcagaggaaaagaaagcaacaacaagatagcatccctgacttaatcgatcttgacgatagtactagcaccacgaataatataacaatagacaatggtaataatgacaacaaaaacaataatatcaacagcaatagtgatgatgatgatgatgagtttggcgacttccaaagcgaaacgagtcccgacacaacagcacctaaaacttccaatagtaaaatagatgatttgcttgactgggatggcccaaagagtgacacagataccaccgctgctgcgcaaacatctttgccctttgcggagaaaaaacagcaaaaagcccgtcctcaggctacaaaggacaagtccaagggaaatgatgcattttccgacttattctcttactccaagtctttggtctga

SEQ ID NO: 2093 - DNA, 489 bp, Saccharomyces cerevisiae
atgtcccaagtctattttgatgtcgaagctgatggccaaccaattggccgtgtcgttttcaagttgtacaacgacatagtcccaaagactgcagaaaacttcagagctctatgtaccggtgaaaagggattcggctacgctggctctccattccacagagttattccagacttcatgttgcaaggtggtgacttcactgctggtaacggtaccggcggtaagtctatctacggtggcaaattcccagatgaaaacttcaagaagcaccacgacagaccaggtttgttgtccatggccaacgccggtccaaacaccaacggttctcaattcttcatcaccaccgttccatgcccatggttggacggtaagcatgttgtctttggtgaagttgttgacggttacgacatcgttaagaaggttgagtccttgggttctccttccggtgccaccaaggctagaattgttgttgccaagtccggtgaattataa

SEQ ID NO: 2094 - DNA, 489 bp, Artificial Sequence
  Description of Artificial Sequence: Synthetic polynucleotide
atgtcccaagtctattttgatgtcgaagctgatggccaaccaattggccgtgtcgttttcaagttgtacaacgacatagtcccaaagactgcagaaaacttcagagctctttgtaccggtgaaaagggattcggctacgctggctctccattccacagagttattccagacttcatgttgcaaggtggtgacttcactgctggtaacggtaccggcggtaagtctatctacggtggcaaattcccagatgaaaacttcaagaagcaccacgacagaccaggtttgttgtccatggccaacgccggtccaaacaccaacggttctcaattcttcatcaccaccgttccatgcccatggttggacggtaagcatgttgtctttggtgaagttgttgacggttacgacatcgttaagaaggttgagtccttgggttctccttccggtgccaccaaggctagaattgttgttgccaagtccggtgaattatga

SEQ ID NO: 2095 - DNA, 414 bp, Saccharomyces cerevisiae
atgatgaaaggttctagaagaacaggtaataacactgctaccacgctaaacacgcctgtggtcattcatgccacgcagctgccccaacatgtctctactgacgaggttcttcaatttctggagagctttatcgatgagaaggagaacattattgatagtactaccatgaataccatcagcggcaacgccgctgacgcggacgctgccgctgtggctaacaccagcctcaacatcgacaccaacctttccagctccatatcgcaattaaagaggattcagagagacttcaagggtctgccacccgcccaagacttttccgccgcgcccattcaggtctccacgacggagaagaaggagacaagcataggtgttagtgccaccggcggcaagaaaactacattcgccgatgagtga

SEQ ID NO: 2096 - DNA, 414 bp, Artificial Sequence
  Description of Artificial Sequence: Synthetic polynucleotide
atgatgaaaggttctagaagaacaggtaataacactgctaccacgttgaacacgcctgtggtcattcatgccacgcagttgccccaacatgtctctactgacgaggttcttcaatttttggagagctttatcgatgagaaggagaacattattgatagtactaccatgaataccatcagcggcaacgccgctgacgcggacgctgccgctgtggctaacaccagcctcaacatcgacaccaacctttccagctccatatctcaattaaagaggattcagagagacttcaagggtttgccacccgcccaagacttttccgccgcgcccattcaggtctccacgacggagaagaaggagacaagcataggtgttagtgccaccggcggcaagaaaactacattcgccgatgagtga

SEQ ID NO: 2097 - DNA, 402 bp, Saccharomyces cerevisiae
atgagtgagacctgtagcagcagccttgcccttttacacaaaatcctacatatccattcacatacgccttctgtatactacaatatatgcatatcagttagaattctgacatctgaacgtcttcagtgcttttttttctctttctttccagatccaaatatcaccggcagcggcctcaaagtacccggttttcttttttttcacactttttttttttccaaatcatgttgtcaagcattgattgactcattttcctctgactactaccagttcaaaatgttagagaaaaatagaaaagcagaaaaaataaataaaagaaccatatttatttgttcattcactttcgagtataaaattaaatcttgtttttcttgttttcacttaagtacacatacaaattaa

SEQ ID NO: 2098 - DNA, 402 bp, Artificial Sequence
  Description of Artificial Sequence: Synthetic polynucleotide
atgagtgagacctgtagcagcagccttgcccttttacacaaaatcttgcatatccattctcatacgccttctgtatactacaatatatgcatatctgttagaattttaacatctgaacgtcttcagtgcttttttttctctttctttccagatccaaatatcaccggcagcggcctcaaagtacccggttttcttttttttcacactttttttttttccaaaagttgttgtcaagcattgattgactctttttcctctgactactaccagttcaaaatgttagagaaaaatagaaaagcagaaaaaataaataaaagaaccatatttatttgttctttcactttcgagtataaaattaaatcttgtttttcttgttttcacttaagtacacatacaaattga

SEQ ID NO: 2099 - DNA, 1098 bp, Saccharomyces cerevisiae
atggctggaaagaaaattgctggtgttttgggtgctactggttccgttggtcaacgtttcattctgttgttggcaaatcaccctcatttcgaactgaaagttcttggtgcctcttctagatcagctggcaagaaatacgttgacgctgtgaactggaagcaaaccgatttgctaccggaatctgctaccgatattattgtttccgaatgtaaatctgaattctttaaagagtgtgacatcgtcttttccggattggatgctgactatgctggcgctatcgaaaaggaattcatggaagctggtatcgccattgtttccaatgccaagaattatagaagagaacaagatgtgccattgattgttcctgttgtcaatcctgagcatttggatattgtagctcaaaagcttgacaccgccaaggctcaaggtaagccaagaccagggttcattatctgtatttccaattgttccactgcaggtttggttgcaccattgaagcctttgattgaaaaattcggtcctattgatgctttgaccactactactttgcaagcaatctcaggtgctggtttctccccaggtgtaccaggtattgatattctagacaatattattccatacattggtggtgaagaagacaagatggaatgggagaccaagaaaatcttggctccattagcagaagacaagacacacgtcaaactattgactccagaagaaatcaaagtctctgctcaatgtaacagagtcgctgtttccgatgggcacaccgaatgtatctctttgaggttcaagaacagacctgctccatccgtcgagcaagtcaagacatgcctaaaagaatacgtctgcgatgcctacaaattaggctgtcattctgctccaaagcaaactattcatgttttggaacaaccagacagacctcaaccaaggttggacaggaacagagacagcggttacggtgtttccgttggtagaatcagagaagacccattgttagatttcaaaatggttgtcctttcccacaacaccattattggtgccgctggttctggtgtcttgattgccgaaatcttactagcaagaaacttgatttaa

SEQ ID NO: 2100 - DNA, 1098 bp, Artificial Sequence
  Description of Artificial Sequence: Synthetic polynucleotide
atggctggaaagaaaattgctggtgttttgggtgctactggttccgttggtcaacgtttcattttattgttggcaaatcaccctcatttcgaattgaaagttcttggtgcctcttctagatctgctggcaagaaatacgttgacgctgtgaactggaagcaaaccgatttgttaccggaatctgctaccgatattattgtttccgaatgtaaatctgaattctttaaagagtgtgacatcgtcttttccggattggatgctgactatgctggcgctatcgaaaaggaattcatggaagctggtatcgccattgtttccaatgccaagaattatagaagagaacaagatgtgccattgattgttcctgttgtcaatcctgagcatttggatattgtagctcaaaagcttgacaccgccaaggctcaaggtaagccaagaccagggttcattatctgtatttccaattgttccactgcaggtttggttgcaccattgaagcctttgattgaaaaattcggtcctattgatgctttgaccactactactttgcaagcaatcagtggtgctggtttctccccaggtgtaccaggtattgatattttggacaatattattccatacattggtggtgaagaagacaagatggaatgggagaccaagaaaatcttggctccattagcagaagacaagacacacgtcaaacttttgactccagaagaaatcaaagtctctgctcaatgtaacagagtcgctgtttccgatgggcacaccgaatgtatctctttgaggttcaagaacagacctgctccatccgtcgagcaagtcaagacatgcttgaaagaatacgtctgcgatgcctacaaattaggctgtcattctgctccaaagcaaactattcatgttttggaacaaccagacagacctcaaccaaggttggacaggaacagagacagcggttacggtgtttccgttggtagaatcagagaagacccattgttagatttcaaaatggttgtcctttcccacaacaccattattggtgccgctggttctggtgtcttgattgccgaaatcttattggcaagaaacttgatttga

SEQ ID NO: 2101 - DNA, 3906 bp, Saccharomyces cerevisiae
atgaacacatcatttggctcagtagtgccttccactaatttcaattttttcaaagggcatggaaataatgataacactagtgccaatagtactgttaacaacagcaatttctttttaaatagcaatgaaacgaaaccttcgaaaaatgtcttcatggtgcactctacctctcaaaagaagtcgcagcaaccgttacaaaatctctcacactcaccttcctacacggaaaataaaccagataaaaagaaaaaatatatgataaacgatgccaagaccattcaacttgtaggtccactgatttcctctcctgataatttgggatttcagaagagatcgcacaaagcaagagaattaccaaggtttttgattaatcaagaacctcaattggagaaaagagcttttgtacaagatccctgggacaaggctaatcaagaaaaaatgatctcattggaagaatccatagatgatctcaatgaattgtatgaaacactaaaaaaaatgagaaatactgagcgatcgataatggaagaaaaagggctagtggataaagctgactcagcaaaggatctttacgatgctatagtatttcaaggtacctgtttagatatgtgtcccacattcgagagatcaagaagaaacgttgaatatactgtgtattcatatgaaaaaaatcaaccaaatgataaaaaagcttctcgaactaaagcattgaaggtcttcgcgaggccagcagcagcagcagctcctcctttaccttctgatgttaggccaccccatattttagtcaagacattggactatattgtagataacttattaacaacattgcctgaaagcgaaggattcttatgggataggatgagatccataaggcaggactttacatatcagaactattcaggacctgaggcggtagattgtaatgagcgtattgttaggatacatcttctgatcttgcatatcatggtgaaatcaaatgtggaattttcgcttcaacaagaactagaacaattgcataaatcccttatcacgttatcagaaatatacgatgacgttcgttccagcggcggaacatgcccaaatgaggctgaatttcgagcttatgctctcctgagtaaaataagagaccctcaatacgatgagaatatccaaagattaccaaaacatattttccaagataaattagttcaaatggctttatgtttcagaagggttatatctaactcagcttatactgaacgcgggtttgttaaaactgagaattgtttaaacttctacgcaaggtttttccagttaatgcaatcacccagcttgccattattaatgggattttttttgcaaatgcatctgacggatattagattttatgcgctaagagctttatcacatactttaaacaaaaagcataaaccaataccatttatttatttggaaaatatgttactctttaataatcggcaagaaataattgaattttgtaattattactcaattgaaatcataaatggggatgcagccgatttgaaaacattgcaacattattctcacaaattgtcagaaacacaacctttaaaaaaaacataccttacctgcttagaaaggagattacagaaaactacttacaagggtttaattaatggcggtgaagataatttggcttcttcggtttatgtgaaggacccaaaaaaggatagaataccttctatcgcagaccaatcttttttaatggaaaattttcaaaacaactataacgaaaagttgaaccaaaactcatccgttaaaccacagatcaatacctctccaaaaagagttgcaacgcggcccaaccactttcctttttcacaggaatctaagcaattacctcaaatatctcaatctcatactttatcaacaaatcctttattaacgccacaggttcatggagacctatcggaacagaaacaacaacaaattaaaaccgtcacagacggaggctccccatttgtttttgatcaatcagcacagaattctacggtggaagcttccaaggctcatatgatatccacgaccagcaatggtgcatatgatgagaagttgagttcagagcaagaagaaatgaggaaaaaagaagaacaacgaatagaagaagagaaaactcaattgaaaaagaagcaagaaaatgcggacaaacaagtaatcactgaacaaattgcaaatgacttagtaaaagaagtggtaaacagtagcgtgattagtattgttaagcgtgaattttcagaggctaattataggaaggacttcattgacacaatgacccgtgaactttatgacgcatttcttcatgaaaggttgtatctgatatatatggattctcgtgctgaattgaaaaggaattccactctaaaaaaaaagttctttgagaaatggcaagcatcttattctcaagcaaagaagaaccgtatattagaagaaaaaaaaagggaagaaattaaactcgtaagccaccaattaggagtaccaggttttaaaaaatctacatgtttgtttagaaccccgtataagggtaacgtaaattcatcatttatgctatcatcttcagataagaatctaatattttcacctgtaaatgacgagtttaataagtttgcgactcatttaaccaagatttcaaaactttggcggccgttagagatgcaatcaatctattatgataaccttacgaaaaagttcccctccaattctcttactccggcaaatttattcatttatgcgaaagattggacatcactctcaaaccgttggatcttaagtaagttcaatctgcaaacagcacaggattcaaaaaagttcagcaataatattatctctagcagaataatttgtattgatgatgaatatgaaccatctgattttagtgatttgcaattattgatatttaatacaggtgttacgaatccagatatattcgatttggagatgaaactgaaagatgatggtgaagaactgataaagctaatcactggtatttctctaaatacaaatatatgcttttcccttttgattatttattgggaatccgcagaaaatactttatcggaaagtaccattaaacacttactaaaattaaaccgaatatctaaaaactatagtagtgttattgaacgcattgacttaatgaatctcaccgaagaatcccctcataagtgtttagaggacaaattatctgaaatatcacattcttatgtgtacaagttgacagaaaggggaaaatatgataaaacacttcgtcagaaaaggtcattggccggcattcactcacgtagcactcaactacaaactacaaaggacattgatcaaaagatgaagaaaatgctggaaaaagagaaaaacaagtaccaacaacaaataggcgaaaggaacacctatgcgcatctagaatcgcatatagatgcatcaccaagaagcaagaaaaggaaattgccaatactcctgtcaacttctcattcgagccaatttaaaactcctctagcttctagattaaacacctctggttcgtctacttcaccacctttaccatctcatttggcgatgaaattcaggaaaaactcgagagttactagtttacataccgtattacccgttagcacaccaagccatagtaataacataccagctgcaagttttagcgggaataacaccaccgatatacagtcccaacaattaatcgaaaaccagaagagtacatctgtatatttgaataacgtttctgaaaggattctgggaaatcaagaaatatgtcaaacaccaattaatcctgttactcctgtgctagatggggccgatcaaggtaaggaggacattcctgatagtatattagagctgaagatcttgatcgattctgtcaagaagaaagtaaataatgattaa

SEQ ID NO: 2102 - DNA, 3906 bp, Artificial Sequence
  Description of Artificial Sequence: Synthetic polynucleotide
atgaacacatcttttggctctgtagtgccttccactaatttcaattttttcaaagggcatggaaataatgataacactagtgccaatagtactgttaacaacagcaatttctttttaaatagcaatgaaacgaaaccttccaaaaatgtcttcatggtgcactctacctctcaaaagaagtctcagcaaccgttacaaaatctcagtcactctccttcctacacggaaaataaaccagataaaaagaaaaaatatatgataaacgatgccaagaccattcaacttgtaggtccattgatttcctctcctgataatttgggatttcagaagagaagtcacaaagcaagagaattaccaaggtttttgattaatcaagaacctcaattggagaaaagagcttttgtacaagatccctgggacaaggctaatcaagaaaaaatgatctctttggaagaatccatagatgatctcaatgaattgtatgaaacattaaaaaaaatgagaaatactgagaggtctataatggaagaaaaagggttagtggataaagctgactctgcaaaggatctttacgatgctatagtatttcaaggtacctgtttagatatgtgtcccacattcgagagatctagaagaaacgttgaatatactgtgtattcttatgaaaaaaatcaaccaaatgataaaaaagcttctagaactaaagcattgaaggtcttcgcgaggccagcagcagcagcagctcctcctttaccttctgatgttaggccaccccatattttagtcaagacattggactatattgtagataacttattaacaacattgcctgaaagcgaaggattcttatgggataggatgagatccataaggcaggactttacatatcagaactattctggacctgaggcggtagattgtaatgagcgtattgttaggatacatcttttgatcttgcatatcatggtgaaatctaatgtggaattttcccttcaacaagaattggaacaattgcataaatcccttatcacgttatctgaaatatacgatgacgttcgttccagcggcggaacatgcccaaatgaggctgaatttagagcttatgctctcttgagtaaaataagagaccctcaatacgatgagaatatccaaagattaccaaaacatattttccaagataaattagttcaaatggctttatgtttcagaagggttatatctaactctgcttatactgaacgcgggtttgttaaaactgagaattgtttaaacttctacgcaaggtttttccagttaatgcaatctcccagcttgccattattaatgggattttttttgcaaatgcatttaacggatattagattttatgcgttaagagctttatctcatactttaaacaaaaagcataaaccaataccatttatttatttggaaaatatgttactctttaataatagacaagaaataattgaattttgtaattattactctattgaaatcataaatggggatgcagccgatttgaaaacattgcaacattattctcacaaattgagtgaaacacaacctttaaaaaaaacataccttacctgcttagaaaggagattacagaaaactacttacaagggtttaattaatggcggtgaagataatttggcttcttctgtttatgtgaaggacccaaaaaaggatagaataccttctatcgcagaccaatcttttttaatggaaaattttcaaaacaactataacgaaaagttgaaccaaaactcttccgttaaaccacagatcaatacctctccaaaaagagttgcaacgaggcccaaccactttcctttttcccaggaatctaagcaattacctcaaatatctcaatctcatactttatctacaaatcctttattaacgccacaggttcatggagacctttctgaacagaaacaacaacaaattaaaaccgtcacagacggaggctccccatttgtttttgatcaaagtgcacagaattctacggtggaagcttccaaggctcatatgatatccacgaccagcaatggtgcatatgatgagaagttgagtagtgagcaagaagaaatgaggaaaaaagaagaacaaagaatagaagaagagaaaactcaattgaaaaagaagcaagaaaatgcggacaaacaagtaatcactgaacaaattgcaaatgacttagtaaaagaagtggtaaacagtagcgtgattagtattgttaagcgtgaattttctgaggctaattataggaaggacttcattgacacaatgacccgtgaactttatgacgcatttcttcatgaaaggttgtatttgatatatatggattctcgtgctgaattgaaaaggaattccactttgaaaaaaaagttctttgagaaatggcaagcatcttattctcaagcaaagaagaaccgtatattagaagaaaaaaaaagggaagaaattaaactcgtaagccaccaattaggagtaccaggttttaaaaaatctacatgtttgtttagaaccccgtataagggtaacgtaaattcttcttttatgctttcttcttctgataagaatttgatattttctcctgtaaatgacgagtttaataagtttgcgactcatttaaccaagatttccaaactttggcgtccgttagagatgcaatccatctattatgataaccttacgaaaaagttcccctccaattctcttactccggcaaatttattcatttatgcgaaagattggacatctctctccaaccgttggatcttaagtaagttcaatttacaaacagcacaggattctaaaaagttcagcaataatattatctctagcagaataatttgtattgatgatgaatatgaaccatctgattttagtgatttgcaattattgatatttaatacaggtgttacgaatccagatatattcgatttggagatgaaattgaaagatgatggtgaagaattgataaagttaatcactggtatttctttgaatacaaatatatgcttttcccttttgattatttattgggaatccgcagaaaatactttatctgaaagtaccattaaacacttattgaaattaaacagaatatctaaaaactatagtagtgttattgaacgcattgacttaatgaatctcaccgaagaatcccctcataagtgtttagaggacaaattatctgaaatatctcattcttatgtgtacaagttgacagaaaggggaaaatatgataaaacacttcgtcagaaaaggtctttggccggcattcacagtcgtagcactcaattacaaactacaaaggacattgatcaaaagatgaagaaaatgttggaaaaagagaaaaacaagtaccaacaacaaataggcgaaaggaacacctatgcgcatttggaaagtcatatagatgcatctccaagaagcaagaaaaggaaattgccaatactcttgtctacttctcattctagccaatttaaaactcctttggcttctagattaaacacctctggttcttctacttctccacctttaccatctcatttggcgatgaaattcaggaaaaactctagagttactagtttacataccgtattacccgttagcacaccaagccatagtaataacataccagctgcaagttttagcgggaataacaccaccgatatacagtcccaacaattaatcgaaaaccagaagagtacatctgtatatttgaataacgtttctgaaaggattttaggaaatcaagaaatatgtcaaacaccaattaatcctgttactcctgtgttggatggggccgatcaaggtaaggaggacattcctgatagtatattagagttgaagatcttgatcgattctgtcaagaagaaagtaaataatgattga

SEQ ID NO: 2103 - DNA, 2559 bp, Saccharomyces cerevisiae
atgagttctgtcaaccaaatatatgacctatttcccaataagcataatatccaatttacagattctcattcacaggagcatgatacttcgtccagccttgctaagaatgatacagacggaactataagtataccaggtagtatagacactggcattttaaagagcattattgaggagcaaggttggaatgacgctgagttatatagaagttcaatacaaaatcaaagattttttttaacggataaatacactaaaaagaagcatttgactatggaggacatgcttagcccagaagaagaacaaatatatcaggaacctattcaagatttccaaacatataacaaacgtgttcaaagggaatatgagctcagggaaaggatggaagaattcttccgtcaaaacaccaaaaatgatttacatattttaaacgaggattcattaaatcagcaatattccccgttaggacctgcagattatgttctgcccctcgatagatactccagaatgaaacacattgcctcaaactttttcagaaaaaaacttggtattcctagaaaactgaaaagaagaagccattataatcccaacgcagagggccacaccaaagggaattcttctatattgagttccactactgatgtaattgataacgccagctacaggaatattgcaatagatgaaaatgttgacataacacataaagaacacgccattgacgaaataaacgagcagggtgcatcaggtagtgaatctgttgtggaaggtggatcgttattgcatgacattgaaaaggttttcaataggtccagggcaactaggaaataccatatccaacggaaattaaaagtgcgccatattcaaatgctttctatcggggcttgctttagtgtcggattatttttaacctcagggaaagccttttctattgccgggccatttggtacactacttgggtttggactcacaggtagcatcattttagccacaatgctgtcatttacagagttatccacccttattcctgtgtcttctgggttctcaggactggcttctagatttgtagaggatgctttcggatttgcattgggctggacgtattggatttcctgtatgcttgctcttcctgcccaagtttcctcaagtacattctatctcagctattataataatgtcaatatatcaaagggagtaacagcagggtttatcacgctgttttctgcatttagcattgtagtaaatttactggatgtcagcataatgggtgaaattgtatatgttgctggaataagcaaagtgataattgcaattttgatggttttcacgatgatcatcctaaatgccggacatggaaatgacattcacgaaggagtcggttttagatattgggatagctctaaatctgtccgaaatttgacctacgggctatatcgtccaacatttgacctggctgatgctggcgaaggaagcaaaaaaggaatttcaggcccaaaaggccgatttttagctacggcatcagtaatgctaatttcaacatttgcgtttagcggtgttgagatgacttttttagctagtggggaagctataaatccaaggaaaacaattccttctgctacaaaaaggacattttccattgtactgatatcttacgtttttttgattttttcggtaggcatcaacatatacagtggcgatccaagactactatcatattttcctggtatttccgaaaagaggtatgaagccattataaaaggcacaggaatggactggagacttaggactaattgtcgcggcggtattgattataggcagatttcagtaggaacaggttattctagtccttgggttgttgcattgcagaactttgggctatgtactttcgcatctgcttttaacgcaatactgatatttttcactgctacagcagggatatcctcgttatttagttgttcaagaacactatacgccatgtctgtacaacggaaggcaccgccagttttcgaaatttgcagcaagagaggtgttccttatgtttcagtgatattctcctctttattttcagtcattgcttatattgcagttgaccaaaccgcgattgaaaacttcgacgtcttggccaatgtttctagtgctagtacgtctattatatggatgggattgaatctttcctttttgcgattctattacgccctaaaacaaaggaaggatattatatcaagaaatgattcatcatacccatataaatcgccattccaaccatatctagcgatttatggtctagttggatgttcattatttgttatatttatgggatatcctaactttatacatcatttctggagtactaaagcttttttttcagcatatggtggcctgatgtttttctttatcagttacacagcttataaggttctcggaacgtcaaagattcaaagactagatcagttagatatggacagtgggaggagggaaatggacagaactgactggaccgaacatagccaatatttgggaacatatagggaaagagcgaagaagttggttacctggctgatttag

SEQ ID NO: 2104 - DNA, 2559 bp, Artificial Sequence
  Description of Artificial Sequence: Synthetic polynucleotide
atgagttctgtcaaccaaatatatgacttatttcccaataagcataatatccaatttacagattctcattctcaggagcatgatacttcttccagccttgctaagaatgatacagacggaactataagtataccaggtagtatagacactggcattttaaagagcattattgaggagcaaggttggaatgacgctgagttatatagaagtagtatacaaaatcaaagattttttttaacggataaatacactaaaaagaagcatttgactatggaggacatgcttagcccagaagaagaacaaatatatcaggaacctattcaagatttccaaacatataacaaacgtgttcaaagggaatatgagctcagggaaaggatggaagaattcttccgtcaaaacaccaaaaatgatttacatattttaaacgaggattctttaaatcagcaatattccccgttaggacctgcagattatgttttgcccctcgatagatactccagaatgaaacacattgcctccaactttttcagaaaaaaacttggtattcctagaaaattgaaaagaagaagccattataatcccaacgcagagggccacaccaaagggaattcttctatattgagttccactactgatgtaattgataacgccagctacaggaatattgcaatagatgaaaatgttgacataacacataaagaacacgccattgacgaaataaacgagcagggtgcatctggtagtgaatctgttgtggaaggtggatctttattgcatgacattgaaaaggttttcaataggtccagggcaactaggaaataccatatccaaagaaaattaaaagtgcgccatattcaaatgctttctatcggggcttgctttagtgtcggattatttttaacctctgggaaagccttttctattgccgggccatttggtacattgcttgggtttggactcacaggtagcatcattttagccacaatgctttcttttacagagttatccacccttattcctgtgtcttctgggttcagtggattggcttctagatttgtagaggatgctttcggatttgcattgggctggacgtattggatttcctgtatgcttgctcttcctgcccaagtttcctccagtacattctatctcagctattataataatgtcaatatatccaagggagtaacagcagggtttatcacgttgttttctgcatttagcattgtagtaaatttattagatgtcagcataatgggtgaaattgtatatgttgctggaataagcaaagtgataattgcaattttgatggttttcacgatgatcatcttgaatgccggacatggaaatgacattcacgaaggagtcggttttagatattgggatagctctaaatctgtcagaaatttgacctacgggttatatcgtccaacatttgacttggctgatgctggcgaaggaagcaaaaaaggaatttctggcccaaaaggcagatttttagctacggcatctgtaatgttgatttctacatttgcgtttagcggtgttgagatgacttttttagctagtggggaagctataaatccaaggaaaacaattccttctgctacaaaaaggacattttccattgtattaatatcttacgtttttttgatttttagcgtaggcatcaacatatacagtggcgatccaagattattatcttattttcctggtatttccgaaaagaggtatgaagccattataaaaggcacaggaatggactggagacttaggactaattgtcgcggcggtattgattataggcagattagtgtaggaacaggttattctagtccttgggttgttgcattgcagaactttgggctttgtactttcgcatctgcttttaacgcaatattaatatttttcactgctacagcagggatatcctctttatttagttgttccagaacattgtacgccatgtctgtacaaagaaaggcaccgccagttttcgaaatttgcagcaagagaggtgttccttatgtttctgtgatattctcctctttattttctgtcattgcttatattgcagttgaccaaaccgcgattgaaaacttcgacgtcttggccaatgtttctagtgctagtacgtctattatatggatgggattgaatctttcctttttgagattctattacgccttgaaacaaaggaaggatattatatctagaaatgattcttcctacccatataaatctccattccaaccatatttggcgatttatggtttagttggatgttctttatttgttatatttatgggatatcctaactttatacatcatttctggagtactaaagcttttttttctgcatatggtggcttaatgtttttctttatcagttacacagcttataaggttctcggaacgtccaagattcaaagattagatcagttagatatggacagtgggaggagggaaatggacagaactgactggaccgaacatagccaatatttgggaacatatagggaaagagcgaagaagttggttacctggttgatttga

SEQ ID NO: 2105 - DNA, 1164 bp, Saccharomyces cerevisiae
atgagtgaacttgaagccacaattaggcaagccaaagaagccctggctgaaaataatgccaaaaaggcgctcaaaatattgaagccgttcaaaagttcactgaaaaaagaaaacgcaaacaatgtaatactgaatgaagtgtttgccgatgcatacctggataatggacaggtagagaaagcctacccaattttagcgcgtgcttgcgaattagatcctgagggacaagttggcggaccggacaaattttttaccatgggtcaaatcatgggtggacaggatggtgtatcgataataactcgcggaataatgaacatctctaatactggaggtgaaatgttaaccaacgttcaggttgaaaagattgtaggtggactgctttctgtgattgaaatttggatgacggatttatgtatggagccaaatgcagaagagcagtgtgaggagttaatacaaaaggcgatggaactcacagagggaaaatctcctgaaacatggtctaccctgggttctatcaaaatctcgcaacaaaaatttggagaagcttatgaagcattctcacaagcctggaatttctttgagttgaaaaaacaagaaattggtagcggtataaatgaaaatggtgacacaactcagaaagctggtttacagtcagagtatgtagatcttttacaacctcttttatctttaacaaagatgtgcctcgaagtgggagcttacgaagtcgcattgaaagttattgccgcagtaagagatatagatgaggataacatagagggttattatctagagggttttacttattatttaatgagtaaattagaaattttcaagttgaacaatcccgaagtaagcctgcgtccggaaaatatatacgagtttaaccaactcattcaagaagttcctttggatttatcccacgaaccaatctcccagttaatctatgactcaagattagcgctaagttttgcattgcaagcaggtgtcaatgctgacagcaaagatgaaattgtgcaagaattattgggcggtgctaatgctttactccaagaaattggtggtcctctagatccaagtgagttaacacaaatcaagaagggtgatttagtgaatgagaatgaagacttggaagagttggacatagaggaagaatattctgactaa

SEQ ID NO: 2106 - DNA, 1164 bp, Artificial Sequence
  Description of Artificial Sequence: Synthetic polynucleotide
atgagtgaacttgaagccacaattaggcaagccaaagaagccttagctgaaaataatgccaaaaaggcgctcaaaatattgaagccgttcaaaagttctttgaaaaaagaaaacgcaaacaatgtaatattgaatgaagtgtttgccgatgcatacttggataatggacaggtagagaaagcctacccaattttagcgcgtgcttgcgaattagatcctgagggacaagttggcggaccggacaaattttttaccatgggtcaaatcatgggtggacaggatggtgtatctataataactcgcggaataatgaacatctctaatactggaggtgaaatgttaaccaacgttcaggttgaaaagattgtaggtggattgctttctgtgattgaaatttggatgacggatttatgtatggagccaaatgcagaagagcagtgtgaggagttaatacaaaaggcgatggaactcacagagggaaaatctcctgaaacatggtctaccttgggttctatcaaaatctctcaacaaaaatttggagaagcttatgaagcattctctcaagcctggaatttctttgagttgaaaaaacaagaaattggtagcggtataaatgaaaatggtgacacaactcagaaagctggtttacagtctgagtatgtagatcttttacaacctcttttatctttaacaaagatgtgcctcgaagtgggagcttacgaagtcgcattgaaagttattgccgcagtaagagatatagatgaggataacatagagggttattatttggagggttttacttattatttaatgagtaaattagaaattttcaagttgaacaatcccgaagtaagccttcgtccggaaaatatatacgagtttaaccaactcattcaagaagttcctttggatttatcccacgaaccaatctcccagttaatctatgacagtagattagcgttaagttttgcattgcaagcaggtgtcaatgctgacagcaaagatgaaattgtgcaagaattattgggcggtgctaatgctttactccaagaaattggtggtcctttggatccaagtgagttaacacaaatcaagaagggtgatttagtgaatgagaatgaagacttggaagagttggacatagaggaagaatattctgactga

SEQ ID NO: 2107 - DNA, 711 bp, Saccharomyces cerevisiae
atggcaacgatggaaacgaccacacaaaaagataccaatattttgaaatctggtctcaaaaaaactataggtgttctcaatgaggcagtattacagaacgggagagaggtggaggcagtgcaggcaggaaatagtgacacaatggaagatacagaaacaaccacaataggttatatatcaatcaaagattatgcgtacgcagattcgaatcctctccattatggttattttgatggagacaatgaggaggatgaaatggtttcagattcttcaaatggagaagacacatacaataaaagacaaagtataacactaccagacgactacatagttaaccaacgtgctgttgccctctacgatttcgaacccgaaaatgataatgaattgagattggctgagggtgacatcgtatttatcagttacaagcatgggcaaggttggctagtagcagaaaatgagtcaggatcaaaaacagggttggtaccggaggagtttgtctcttatatacagccggaagatggtgagaacgaggtggagaataaggctcgacctttctatttgacacatttgattacacagagcgttagtcctaaaaacaatattgataacactaacgaagatgaatacgacgacaacgatgaatgggaagatattgatgatgttgcggaggtcgaagcagatatgaaaacaaaattagatatatcggattga

SEQ ID NO: 2108 - DNA, 711 bp, Artificial Sequence
  Description of Artificial Sequence: Synthetic polynucleotide
atggcaacgatggaaacgaccacacaaaaagataccaatattttgaaatctggtctcaaaaaaactataggtgttctcaatgaggcagtattacagaacgggagagaggtggaggcagtgcaggcaggaaatagtgacacaatggaagatacagaaacaaccacaataggttatatatccatcaaagattatgcgtacgcagattctaatcctctccattatggttattttgatggagacaatgaggaggatgaaatggtttctgattcttccaatggagaagacacatacaataaaagacaaagtataacattaccagacgactacatagttaaccaacgtgctgttgccctctacgatttcgaacccgaaaatgataatgaattgagattggctgagggtgacatcgtatttatcagttacaagcatgggcaaggttggttggtagcagaaaatgagagtggatctaaaacagggttggtaccggaggagtttgtctcttatatacagccggaagatggtgagaacgaggtggagaataaggctagacctttctatttgacacatttgattacacagagcgttagtcctaaaaacaatattgataacactaacgaagatgaatacgacgacaacgatgaatgggaagatattgatgatgttgcggaggtcgaagcagatatgaaaacaaaattagatatatctgattga

SEQ ID NO: 2109 - DNA, 528 bp, Saccharomyces cerevisiae
atgaccacatcacacagaccacagttagaagcaagaagcggtgcaaaagcggccgcttatacaccaacaggcatcgagcatgccagattactaccaggacatacaacattaaaatacaggaaatttaaagaggaggaaaatcttagagcaaactgtgcgcaagaagataggagcaacgataaatctttagaggaggcagtaatgaacgaagagaaacaggatgttgtggggagtgggaacctccaagaaacccgcagtgagaaagaccaaaaagactcgttgcaagagctgctggttactcaaaaaaataaagtggaagataaagcagagcttgaaggaaatgaacaattaaagggaggaaattcgtctaggcgatcgtggagaaagggcacggcgtttggacgccataaagtaaccaaagagacaaatattaaggaacatgcaacaaaaaaatcagcgtccggatacattaacgatatgacaaaatctgaatatcatcaagaatttctccataagcatgttagatag

SEQ ID NO: 2110 - DNA, 528 bp, Artificial Sequence
  Description of Artificial Sequence: Synthetic polynucleotide
atgaccacaagtcacagaccacagttagaagcaagaagcggtgcaaaagcggccgcttatacaccaacaggcatcgagcatgccagattattaccaggacatacaacattaaaatacaggaaatttaaagaggaggaaaatcttagagcaaactgtgcgcaagaagataggagcaacgataaatctttagaggaggcagtaatgaacgaagagaaacaggatgttgtggggagtgggaacctccaagaaacccgcagtgagaaagaccaaaaagactctttgcaagagttattggttactcaaaaaaataaagtggaagataaagcagagcttgaaggaaatgaacaattaaagggaggaaattcttctaggagaagttggagaaagggcacggcgtttggacgccataaagtaaccaaagagacaaatattaaggaacatgcaacaaaaaaatctgcgtccggatacattaacgatatgacaaaatctgaatatcatcaagaatttctccataagcatgttagatga

SEQ ID NO: 2111 - DNA, 2175 bp, Saccharomyces cerevisiae
atgtctgatttaattgaattacagaggaactatttgataggggttttgaatcagattgagacgaaaaataacttgaagtttcttattatcgataaaactgtggagacaatattgagttatcttttcctcacaccccaagaacttttaaataatgtcacatctgttgatttgattgattccccaacaagaaaaggacaatcctccatcgaggcaatttacatattggaaccaacgaaatataacatcaattgtatcgatgctgacttcatggtaagaccacctaagtacagaagatgtcacatcagatttttaccaggattaacaaaccctatatttcagttttttcaatcaaaacgttacattgctcaaaatttggagtcatttaagccgatcgaactagggtttttcgtcaaagaatctcaattcttcgaaactttacaaatggaacactcattacaggtttttttcaacaacaactgtaaggctttgattcctactaacgtgaggaagattgtaggctcactagttagtttgtgtgttattacgggggaatatccgattgttagatattctgtatctaatcctgtggaagaggaagatgcccgcaatggaaacgccgtagtcaacgcaaattctttaacaaggtctattgcaaacgctttccaaatagcgatagatacatacgctcgcaataatccagatttccctcctcaaaacactgaaagaccgcgttccattctaataatcaccgatagaacactggacccttttgcgccaatattacatgattttagctatcaagcaatggcttatgacctggtagctaatgtggacacacaaaaagatatatatcattattctgccgagaatgaagctggtgagcaagaggaaaaggtttcaaaattggtagatttgtatgatcctgactggattgatttgaaacatcagcatattatggatgccaacgaatatattcaaggaagaatcaaggaactgattgctaaaaaccctctgctggttgatagatcgaacgtaaagaatactaccgatctgctgagtgtcgtagcgcacctgaaagattttgatgaagaaagaagaaggctgattttgcataagacactggtagatgaatgcctaggagagaacgcggaaagaaaattagcggatatttctgctattgaacaaaacctatccggatttggaatggattttagtggtgagaagataaagcatattatcgatgatctcttaccagcgttagcaatgaaggaaccgacaatcttagataaattgcgttacattattgcgtatgctcttttcagaggtggaattatcgagttagacttcattaaattattgaactttataggagttactcatgaacatgaaaatttccagcaatatttaaaaatattcagaaattacgatttaattgatttcaaattgatcaaagacaaaccgaaggataaaccatttcaaaaggaatggtttcatgatactttagtgaatgatccaaatatctatcacacttcaaggttcgttcccgctgtagggaatattctttcaaaggttatagcgaatccattgttattgagcgaacaatacttcccatatttaaaggacaagccaattgagttattgaatgaagaagaattccaagcaggcttagcgaatacctctgctaactcctcctcatccttaaggaatccccgtcacaaggcagcttggaccacgaaaagctctaatataaaaaaaaacatacctagacaaagattcttctactatgttattggtggtatatcaattcccgaaattaaagctgcttatgatcaatcaaacttgaagaacagagatatctttattggcagcgacgagatattaacaccaacaaaattcttagatgaagtggaacgtttacaaaatcctagagaatttttcaaattcaaggaagatcagcgccagcaagtaaacccgcctgatttccttctaagggaaatgaaaccggtggcacaaccagtctctcatgttcatttaaaaagccaagacaatagtcctaagtctggtacttctagtcccaaagcagcaggttctctcaagtcagaaccacccgaaaaagagaagaaacgtagcaaattctcgaggttcttgaaaagaaaatctcaccatgataaatga

SEQ ID NO: 2112 - DNA, 2175 bp, Artificial Sequence
  Description of Artificial Sequence: Synthetic polynucleotide
atgtctgatttaattgaattacagaggaactatttgataggggttttgaatcagattgagacgaaaaataacttgaagtttcttattatcgataaaactgtggagacaatattgagttatcttttcctcacaccccaagaacttttaaataatgtcacatctgttgatttgattgattccccaacaagaaaaggacaatcctccatcgaggcaatttacatattggaaccaacgaaatataacatcaattgtatcgatgctgacttcatggtaagaccacctaagtacagaagatgtcacatcagatttttaccaggattaacaaaccctatatttcagttttttcaaagtaaacgttacattgctcaaaatttggagtcttttaagccgatcgaattggggtttttcgtcaaagaatctcaattcttcgaaactttacaaatggaacactctttacaggtttttttcaacaacaactgtaaggctttgattcctactaacgtgaggaagattgtaggctccttggttagtttgtgtgttattacgggggaatatccgattgttagatattctgtatctaatcctgtggaagaggaagatgcccgcaatggaaacgccgtagtcaacgcaaattctttaacaaggtctattgcaaacgctttccaaatagcgatagatacatacgctcgcaataatccagatttccctcctcaaaacactgaaagaccgcgttccattttaataatcaccgatagaacattagacccttttgcgccaatattacatgattttagctatcaagcaatggcttatgacttggtagctaatgtggacacacaaaaagatatatatcattattctgccgagaatgaagctggtgagcaagaggaaaaggtttccaaattggtagatttgtatgatcctgactggattgatttgaaacatcagcatattatggatgccaacgaatatattcaaggaagaatcaaggaattgattgctaaaaaccctttattggttgatagatctaacgtaaagaatactaccgatttattaagtgtcgtagcgcacttgaaagattttgatgaagaaagaagaaggttgattttgcataagacattggtagatgaatgcttaggagagaacgcggaaagaaaattagcggatatttctgctattgaacaaaacctttccggatttggaatggattttagtggtgagaagataaagcatattatcgatgatctcttaccagcgttagcaatgaaggaaccgacaatcttagataaattgcgttacattattgcgtatgctcttttcagaggtggaattatcgagttagacttcattaaattattgaactttataggagttactcatgaacatgaaaatttccagcaatatttaaaaatattcagaaattacgatttaattgatttcaaattgatcaaagacaaaccgaaggataaaccatttcaaaaggaatggtttcatgatactttagtgaatgatccaaatatctatcacacttctaggttcgttcccgctgtagggaatattctttccaaggttatagcgaatccattgttattgagcgaacaatacttcccatatttaaaggacaagccaattgagttattgaatgaagaagaattccaagcaggcttagcgaatacctctgctaactcctcctcctccttaaggaatccccgtcacaaggcagcttggaccacgaaaagctctaatataaaaaaaaacatacctagacaaagattcttctactatgttattggtggtatatctattcccgaaattaaagctgcttatgatcaaagtaacttgaagaacagagatatctttattggcagcgacgagatattaacaccaacaaaattcttagatgaagtggaacgtttacaaaatcctagagaatttttcaaattcaaggaagatcagcgccagcaagtaaacccgcctgatttccttttgagggaaatgaaaccggtggcacaaccagtctctcatgttcatttaaaaagccaagacaatagtcctaagtctggtacttctagtcccaaagcagcaggttctctcaagtctgaaccacccgaaaaagagaagaaacgtagcaaattctctaggttcttgaaaagaaaatctcaccatgataaatga

SEQ ID NO: 2113 - DNA, 1335 bp, Saccharomyces cerevisiae
atgagcgtcattcatcctttgcagaatttactcacctctcgtgatggctcattagttttcgccatcattaagaattgtatcttaagcttcaaatatcaatcgccaaatcattgggaatttgctggaaaatggtctgatgatttcgacaaaattcaagaatcgagaaacaccactgctaaggagcaacaaggacaatccagcgaaaacgaaaacgagaacaaaaaattgaaaagtaataaaggcgattccattaaaaggacagcagccaaggtaccatctccaggtcttggcgccccaccgatatattcgtacataagaaatctgagattaacttcggatgaatcaagactaattgcgtgcgcagattctgacaagtccctcctagttttcgatgtcgacaaaacttccaaaaatgtcttaaagttgagaaaaaggttctgcttctcaaagagaccgaatgctatttctatagccgaagatgatactacagtcataatagctgacaaatttggtgatgtatattctattgatattaattctatcccggaagaaaagtttactcaagaacctattctcggtcatgtctctatgttgactgatgtacacttgattaaagactctgacggtcatcaattcataattacaagtgatagagatgagcatattaaaatttcgcattatccccaatgtttcattgtggacaaatggctctttggtcataagcattttgtttcttccatatgctgtggcaaagactatttattattaagtgcaggtggtgacgataaaatcttcgcttgggattggaaaactggtaagaacttgtctaccttcgattataatagtttgattaaaccttatttgaatgatcagcatttagcaccaccaagatttcaaaatgaaaataatgatattattgaatttgcagttagtaaaattataaagtcaaagaacctaccgtttgttgcgtttttcgtcgaagctacaaaatgcataataattctggaaatgtccgaaaaacaaaaaggggatcttgcactaaagcaaattataacttttccatataatgttatctcattatccgcccataatgatgaattccaagtcaccctagataataaggaatcatctggtgtgcaaaaaaattttgccaaattcattgaatataacttaaatgagaatagttttgtcgtgaataatgaaaaatcaaacgaatttgacagtgccatcatacaatcagtacaaggggattctaacttggtgaccaagaaagaagaaatttacccgttatacaatgtttcctcgttaagaaaacatggagaacattactcgtga

SEQ ID NO: 2114 - DNA, 1335 bp, Artificial Sequence
  Description of Artificial Sequence: Synthetic polynucleotide
atgagcgtcattcatcctttgcagaatttactcacctctcgtgatggctctttagttttcgccatcattaagaattgtatcttaagcttcaaatatcaatctccaaatcattgggaatttgctggaaaatggtctgatgatttcgacaaaattcaagaatctagaaacaccactgctaaggagcaacaaggacaatccagcgaaaacgaaaacgagaacaaaaaattgaaaagtaataaaggcgattccattaaaaggacagcagccaaggtaccatctccaggtcttggcgccccaccgatatattcttacataagaaatttaagattaacttctgatgaatctagattgattgcgtgcgcagattctgacaagtccctcttggttttcgatgtcgacaaaacttccaaaaatgtcttaaagttgagaaaaaggttctgcttctccaagagaccgaatgctatttctatagccgaagatgatactacagtcataatagctgacaaatttggtgatgtatattctattgatattaattctatcccggaagaaaagtttactcaagaacctattctcggtcatgtctctatgttgactgatgtacacttgattaaagactctgacggtcatcaattcataattacaagtgatagagatgagcatattaaaatttctcattatccccaatgtttcattgtggacaaatggctctttggtcataagcattttgtttcttccatatgctgtggcaaagactatttattattaagtgcaggtggtgacgataaaatcttcgcttgggattggaaaactggtaagaacttgtctaccttcgattataatagtttgattaaaccttatttgaatgatcagcatttagcaccaccaagatttcaaaatgaaaataatgatattattgaatttgcagttagtaaaattataaagtccaagaacttaccgtttgttgcgtttttcgtcgaagctacaaaatgcataataattttggaaatgtccgaaaaacaaaaaggggatcttgcattgaagcaaattataacttttccatataatgttatctctttatccgcccataatgatgaattccaagtcaccttggataataaggaaagctctggtgtgcaaaaaaattttgccaaattcattgaatataacttaaatgagaatagttttgtcgtgaataatgaaaaaagtaacgaatttgacagtgccatcatacaaagtgtacaaggggattctaacttggtgaccaagaaagaagaaatttacccgttatacaatgtttcctctttaagaaaacatggagaacattacagttga

SEQ ID NO: 2115 - DNA, 2916 bp, Saccharomyces cerevisiae
atggataggtttcaaattggcgacgagcaactacttcgtttttatcagttgaagactattaatccgacccattcctgggcccaagattcctcaaaattgaataatgaagaggctacaagcaatgaacttggcgttgaaacgtcattcgacatattaaaagacttcaaatatggcaatcaaattagcattgacaaggaatcgagagcatatttaaacgatgagtcgttaagttatattagagatcccttgaatggacaagaaatgtctaaagaattgcaacatctaccaaatgattcaatgcggttgaactatcttgtcaacagtaaacaattcaacgtcaaagcctttctgagagatatgcacaaacaagactctttcaatgatctaaataactcactggacaggttggacagtgatatacaagaccaatctatacatttgaaacaattggttggtaaaaatttcaccaagtatgttaagattaaaaacaagttagaccaaatttacaaagaatttgacgagaaaacgaatgaaaaaaaccaatgtgattcaccaaaagaaaatcaaataaatgtggaaagcttaaataaaaaggtcgacgaggttattagaacaacaactttcaaactgaaaccgctaatggataactatcagaaaattttgaattaccaggccaccaaaaaatttattgaattgaataagttttacttcaacctacccaaatctttaaagagatgtttgactaacaacgatttcaatgagttcattatcgaatattcaaaaggtcttacgctccgtcgccgtttcaaccagagttcagatgcttcacaatctcttgttataaaaagaatttggactcaaatagaaaatttattagtcacgtataaagatctgatttggaacagtttaataaattcaaattttaacattgaccaaccccaagaaacaattttgtccctcttttcaaaattgttgaacttagaaaactttatcaataataatcaaagagaaagtgaaagtggtaacaagaacacaacttcatcatccaatgaaaatccaatcctaagatggatgtccatcaaaatgaatggctttcagaatgaactgaacgagttgtctggccatatgattagtaaaatcattcattctcaaaggcttatattacaaaacaatactaatcaagataaaagtcaagggtgcgtggagctgtcgtattatttgaaaatcaatcaattattccaaataataagtgatacgggcaaggatagtgaaggtttgaaaagtaccgttgaacccaataaagttaacaccatttctggaaccagctatctaaatttgaattgccaacccagctctcaaggactaactgattccccaactatcattgaaatgtggctattaatcttaaaatatattaacgacctgtggaaaatttgtgatcaatttatagaattctgggaacacattgaaaagttcctcgatgggacttaccaaaattccattataaatgaaaaaagaaaagaaaacattttgatcggtgattctaatattattgaatcataccaaaaaagcttgatcttgaaggaagaacagattaacgaggttaggttaaagggcgaggaattcatcacttcagtctcacaaaatttaatatcatttttcacatcttctcaatcatctctaccatcatcattgaaggattctactggagatattacccgcagtaataaagattcggggtcacctttggattatggatttatacctcctaattgtaatggattgagttgtttaagatatctaccgaaaattgtggagcccattttgaaattctctaccgagttagcgcaattaaatatcacaactaacggaatcaccatttgcaggaacactctatcaactataatcaatcgttgcgtaggtgccatatcttccacgaaattaagagatatatctaacttttatcaactggagaactggcaggtctatgaaacggttacattttcaagcaaatcacaggacagtagtaaaaatctaactttcgaatatggtgtgacacaatttccggaaattgtcacctcgtttcaagaagtgagtatcaaaactactagagatctattattcgcatatgaaaaattaccaatcattaacggaatttcagtagtaagttatccgtcaaaacaactgctcacaggtatagaaattcaacagattatatcgatggaagctgtattggaagcgatcttaaaaaatgcggcaaaggataaggacaacccaagaaattctcataccatcttaacattaacaaatctacaatattttagagaatgtgcattcccaaatattttgcagtattttgatgacgcattcgagtggaatttggcttccaaaaacttagaattatttagcctactatctaagatggaatcttcaattttcggtaactatctttctgacttaaagatcaacttaagggatactcttgaagaaaaattccacgaaataaattggcccatgtatacatcaaattcattcagggttggtgactatattatagaagcgttaatgattctgatcgtggttcacagtgagtgctttagaattgggcctcagctcatccataagattttaattgaaacgcagatttttatagccagatacctctttgaggcatttaagccttatgttggtaatctttctaatgatggctcattacaaattatagtggatttggaattctttcagaaggttatgggtcctttacttgaaaaggacaccgaggccacattaagggcgtgcttacaaaactgtttccagaacgacacaaatagactacaaaaatgtatcaatgagattaatcctattgtatctgccaatttaaaaagaactgctattcaattcgccgccttcagctag

SEQ ID NO: 2116 - DNA, 2916 bp, Artificial Sequence
  Description of Artificial Sequence: Synthetic polynucleotide
atggataggtttcaaattggcgacgagcaattacttcgtttttatcagttgaagactattaatccgacccattcctgggcccaagattcctctaaattgaataatgaagaggctacaagcaatgaacttggcgttgaaacgtccttcgacatattaaaagacttcaaatatggcaatcaaattagcattgacaaggaatctagagcatatttaaacgatgagtctttaagttatattagagatcccttgaatggacaagaaatgtctaaagaattgcaacatttaccaaatgattctatgagattgaactatcttgtcaacagtaaacaattcaacgtcaaagcctttttaagagatatgcacaaacaagactctttcaatgatttgaataactctttggacaggttggacagtgatatacaagaccaatctatacatttgaaacaattggttggtaaaaatttcaccaagtatgttaagattaaaaacaagttagaccaaatttacaaagaatttgacgagaaaacgaatgaaaaaaaccaatgtgattctccaaaagaaaatcaaataaatgtggaaagcttaaataaaaaggtcgacgaggttattagaacaacaactttcaaattgaaaccgttaatggataactatcagaaaattttgaattaccaggccaccaaaaaatttattgaattgaataagttttacttcaacttgcccaaatctttaaagagatgtttgactaacaacgatttcaatgagttcattatcgaatattctaaaggtcttacgctccgtcgccgtttcaaccagagttctgatgcttctcaatctcttgttataaaaagaatttggactcaaatagaaaatttattagtcacgtataaagatttgatttggaacagtttaataaatagtaattttaacattgaccaaccccaagaaacaattttgtccctcttttccaaattgttgaacttagaaaactttatcaataataatcaaagagaaagtgaaagtggtaacaagaacacaacttcttcttccaatgaaaatccaatcttaagatggatgtccatcaaaatgaatggctttcagaatgaattgaacgagttgtctggccatatgattagtaaaatcattcattctcaaaggcttatattacaaaacaatactaatcaagataaaagtcaagggtgcgtggagttatcttattatttgaaaatcaatcaattattccaaataataagtgatacgggcaaggatagtgaaggtttgaaaagtaccgttgaacccaataaagttaacaccatttctggaaccagctatttgaatttgaattgccaacccagctctcaaggattaactgattccccaactatcattgaaatgtggttgttaatcttaaaatatattaacgacttatggaaaatttgtgatcaatttatagaattctgggaacacattgaaaagttcctcgatgggacttaccaaaattccattataaatgaaaaaagaaaagaaaacattttgatcggtgattctaatattattgaatcttaccaaaaaagcttgatcttgaaggaagaacagattaacgaggttaggttaaagggcgaggaattcatcactagtgtctctcaaaatttaatatcctttttcacatcttctcaatcttctttaccatcttctttgaaggattctactggagatattacccgcagtaataaagattctgggagccctttggattatggatttatacctcctaattgtaatggattgagttgtttaagatatttaccgaaaattgtggagcccattttgaaattctctaccgagttagcgcaattaaatatcacaactaacggaatcaccatttgcaggaacactttatctactataatcaatcgttgcgtaggtgccatatcttccacgaaattaagagatatatctaacttttatcaattggagaactggcaggtctatgaaacggttacattttctagcaaatctcaggacagtagtaaaaatttaactttcgaatatggtgtgacacaatttccggaaattgtcacctcttttcaagaagtgagtatcaaaactactagagatttattattcgcatatgaaaaattaccaatcattaacggaattagtgtagtaagttatccgtccaaacaattgctcacaggtatagaaattcaacagattatatccatggaagctgtattggaagcgatcttaaaaaatgcggcaaaggataaggacaacccaagaaattctcataccatcttaacattaacaaatttacaatattttagagaatgtgcattcccaaatattttgcagtattttgatgacgcattcgagtggaatttggcttccaaaaacttagaattatttagcttgttatctaagatggaatcttccattttcggtaactatctttctgacttaaagatcaacttaagggatactcttgaagaaaaattccacgaaataaattggcccatgtatacaagtaattctttcagggttggtgactatattatagaagcgttaatgattttgatcgtggttcacagtgagtgctttagaattgggcctcagctcatccataagattttaattgaaacgcagatttttatagccagatacctctttgaggcatttaagccttatgttggtaatctttctaatgatggctctttacaaattatagtggatttggaattctttcagaaggttatgggtcctttacttgaaaaggacaccgaggccacattaagggcgtgcttacaaaactgtttccagaacgacacaaatagattacaaaaatgtatcaatgagattaatcctattgtatctgccaatttaaaaagaactgctattcaattcgccgccttcagctga

SEQ ID NO: 2117 - DNA, 621 bp, Saccharomyces cerevisiae
atggattttgaggaagattacgatgcggagtttgatgataatcaagaaggacaattagaaacaccttttccatcggttgcgggagccgatgatggggacaatgataatgatgactctgtcgcagaaaacatgaagaagaagcaaaagagagaggctgtagtggatgatgggagtgaaaatgcatttggtatacccgaatttacaagaaaagataagactctggaggagattctagagatgatggacagtactcctcctatcattcccgatgcagtaatagactactatttaaccaaaaacgggtttaacgtagcagatgtacgagtgaaacgacttttagcacttgctactcagaaatttgttagtgatatagctaaggatgcctacgaatattccaggatcaggtcttccgtagcggtatctaatgctaacaacagtcaggcgagagctaggcagctattgcaaggacagcaacagcctggcgtgcagcagatttcacaacaacaacatcaacagaatgagaagactacagcaagcaaagttgttctgacggtgaacgatctcagtagcgctgttgctgaatacgggctcaatataggtcgcccagacttttatcgttag

SEQ ID NO: 2118 - DNA, 621 bp, Artificial Sequence
  Description of Artificial Sequence: Synthetic polynucleotide
atggattttgaggaagattacgatgcggagtttgatgataatcaagaaggacaattagaaacaccttttccatctgttgcgggagccgatgatggggacaatgataatgatgactctgtcgcagaaaacatgaagaagaagcaaaagagagaggctgtagtggatgatgggagtgaaaatgcatttggtatacccgaatttacaagaaaagataagactttagaggagattttagagatgatggacagtactcctcctatcattcccgatgcagtaatagactactatttaaccaaaaacgggtttaacgtagcagatgtaagagtgaaaagacttttagcacttgctactcagaaatttgttagtgatatagctaaggatgcctacgaatattccaggatcaggtcttccgtagcggtatctaatgctaacaacagtcaggcgagagctaggcagttattgcaaggacagcaacagcctggcgtgcagcagatttctcaacaacaacatcaacagaatgagaagactacagcaagcaaagttgttttgacggtgaacgatctcagtagcgctgttgctgaatacgggctcaatataggtcgcccagacttttatcgttga

SEQ ID NO: 2119 - DNA, 1521 bp, Saccharomyces cerevisiae
atggccattgattactctaagtgggataaaattgaactatcagatgattctgatgtcgaggtgcatcctaatgtggacaagaaatcgttcattaaatggaaacaacagagtatccatgaacagcgattcaaaaggaaccaagatatcaaaaatttggagacacaagtggatatgtattctcatttgaacaaacgagtggacagaattttgagtaatttacctgaaagttctcttactgatttgccagccgttaccaaattcttgaatgcaaattttgataagatggagaaaagtaaaggggaaaatgttgatcctgagattgcaacatacaatgaaatggttgaagatctttttgaacaattagcaaaagatttagacaaagagggcaaagactcgaagagcccatctctcataagggatgctattttgaaacatagggctaagatcgattcagtaactgtagaggctaagaagaaattagatgaattatacaaggagaaaaatgcacacatttcatctgaagacattcatacaggctttgatagtagctttatgaacaagcaaaaggggggggctaagccactggaagcaactccttcagaagctctttcgagcgctgcagagtctaatattcttaataaactagcaaaatcatcagttccgcaaactttcatcgattttaaagatgatcctatgaaactggccaaggaaactgaagaattcggtaaaatatccattaatgagtactcaaaatctcagaaattcttactggagcacttacctattatttcagaacaacaaaaggacgccttaatgatgaaggcctttgagtatcagttacatggtgacgataagatgactttgcaagtcattcatcaatccgaattgatggcctacattaaggaaatctacgacatgaagaaaattccatatttaaatccaatggaactatcaaatgtcattaatatgtttttcgagaaggttatcttcaacaaggacaagccaatgggtaaagagtcttttttgagatcagttcaagaaaaatttttgcacattcaaaaacgttccaaaattttacaacaagaggaaatggatgaatcgaatgctgaaggagtagagacgattcaattgaaatctctagatgattctacagaattagaagtaaacttgccagacttcaattctaaagatccagaagagatgaaaaaggttaaagttttcaaaactttaataccggaaaaaatgcaagaagccataatgaccaaaaatttggataatattaataaagtctttgaagatataccaattgaagaggctgagaaacttttggaagtgtttaatgacattgacattattggaataaaagcgatcttagaaaacgagaaagactttcaaagtttgaaagatcaatacgaacaggaccatgaagacgccactatggagaatctgtccttaaacgaccgtgatggtggcggagataaccatgaagaggtcaaacatactgccgacactgttgactag

SEQ ID NO: 2120 - DNA, 1521 bp, Artificial Sequence
  Description of Artificial Sequence: Synthetic polynucleotide
atggccattgattactctaagtgggataaaattgaattaagtgatgattctgatgtcgaggtgcatcctaatgtggacaagaaatctttcattaaatggaaacaacagagtatccatgaacagagattcaaaaggaaccaagatatcaaaaatttggagacacaagtggatatgtattctcatttgaacaaaagagtggacagaattttgagtaatttacctgaaagttctcttactgatttgccagccgttaccaaattcttgaatgcaaattttgataagatggagaaaagtaaaggggaaaatgttgatcctgagattgcaacatacaatgaaatggttgaagatctttttgaacaattagcaaaagatttagacaaagagggcaaagactccaagagcccatctctcataagggatgctattttgaaacatagggctaagatcgattctgtaactgtagaggctaagaagaaattagatgaattatacaaggagaaaaatgcacacatttcttctgaagacattcatacaggctttgatagtagctttatgaacaagcaaaaggggggggctaagccattggaagcaactccttctgaagctctttctagcgctgcagagtctaatattcttaataaattggcaaaatcttctgttccgcaaactttcatcgattttaaagatgatcctatgaaattggccaaggaaactgaagaattcggtaaaatatccattaatgagtactctaaatctcagaaattcttattggagcacttacctattatttctgaacaacaaaaggacgccttaatgatgaaggcctttgagtatcagttacatggtgacgataagatgactttgcaagtcattcatcaatccgaattgatggcctacattaaggaaatctacgacatgaagaaaattccatatttaaatccaatggaattatccaatgtcattaatatgtttttcgagaaggttatcttcaacaaggacaagccaatgggtaaagagtcttttttgagatctgttcaagaaaaatttttgcacattcaaaaacgttccaaaattttacaacaagaggaaatggatgaaagtaatgctgaaggagtagagacgattcaattgaaatctttagatgattctacagaattagaagtaaacttgccagacttcaattctaaagatccagaagagatgaaaaaggttaaagttttcaaaactttaataccggaaaaaatgcaagaagccataatgaccaaaaatttggataatattaataaagtctttgaagatataccaattgaagaggctgagaaacttttggaagtgtttaatgacattgacattattggaataaaagcgatcttagaaaacgagaaagactttcaaagtttgaaagatcaatacgaacaggaccatgaagacgccactatggagaatttatccttaaacgaccgtgatggtggcggagataaccatgaagaggtcaaacatactgccgacactgttgactga

SEQ ID NO: 2121 - DNA, 1542 bp, Saccharomyces cerevisiae
atgtcagaaaaccaaaaggaggtatcgcctcctcaagccatatcggtcaaatccgaggcaagctctagtatattttccaaacctatctccacatcatcacccgctgggttagcagccgctcaaagagttacgcccgggaaactgtccactttattactagaaatgggaccattggccattagacacattacacagaccttatgcctagatattccctgttttaaagatttatcatcttccaagcaaagacgacttataatgagtgctatggaaagtggtgataaagaaaaatcagtggtatttgaaaaaattggatggggtcaatggtccgcgaaaagagtagaccctgccaactttgataaggagctggaagcgaccaattttgcaaatgcaaaggtgaaagacttgatttctcaagagagtcaaagaaggaaaagcaacaattcaaattctaattcaggcggcaaagttgaaatgcctatgaaagttgagcataatatcacgaatatcgatggagccaccaccccgcctaccgctgttgcttccaccaccattcctgttaatatcaaacgcagcaaatctccacttgcagcagcaaacgtagtatatatagatgaaaatgcgctagcatcggaagatgaggatgaggagtttgatgaagatgaccatcatttacattaccaaaacaaatcgaggaacagcagtaataattttggaaaatcttcaaatggtgatccctatagtttcggcaggagaaggtctcaagttgtgttcgccgattcaactcccgagaatattgagcatgaaataatagcacaaaagattagaccgctattaagaaatagacgccgttcgagcataaaaccacatacacctttcatttccaaactaaacacacaccaagattcatcctacctttcccccaatacaacctcaacgacaaccccatcaaataacaacagtaactcaaaccaggcgaagatagatttagagaaacttactgcgacaagtgagccaacttcaagaagagcttctcgtctgtctgtatcgaaagaatcaagtattagatcgacacttttcccaaacaaaaactatttgatcgtcactacaaaccctaactctaaagctacgtcggtttccacctcccctaagctagaagaacagatgaatgtaagttcaaatccgatagtattatcggacaaggagaaacatagagtagcttcacaacacctgaatggggaatcgtcgccacaacttgttccccattctcatcatcaacctcactcagatacagacgaagaagactgggaatcaattggtgcagcttctctgagaaataacagtttagcacctaacatagacagcgtagcaagttctactaatggcgtagttagccctaaacctacaaatccaagttttactaactctcagaatggagatattgagcctcccctacaacacgaccaacagaaacatgaacagcagccaagaaatggggaagacaatagtgctgcgtttttattaatgagcttaaaatcttaa

SEQ ID NO: 2122 - DNA, 1542 bp, Artificial Sequence
  Description of Artificial Sequence: Synthetic polynucleotide
atgtctgaaaaccaaaaggaggtatctcctcctcaagccatatctgtcaaatccgaggcaagctctagtatattttccaaacctatctccacatcttctcccgctgggttagcagccgctcaaagagttacgcccgggaaactttccactttattattggaaatgggaccattggccattagacacattacacagaccttatgcttagatattccctgttttaaagatttatcttcttccaagcaaagaagacttataatgagtgctatggaaagtggtgataaagaaaaatctgtggtatttgaaaaaattggatggggtcaatggtccgcgaaaagagtagaccctgccaactttgataaggagttagaagcgaccaattttgcaaatgcaaaggtgaaagacttgatttctcaagagagtcaaagaaggaaaagcaacaatagtaattctaatagtggcggcaaagttgaaatgcctatgaaagttgagcataatatcacgaatatcgatggagccaccaccccgcctaccgctgttgcttccaccaccattcctgttaatatcaaacgcagcaaatctccacttgcagcagcaaacgtagtatatatagatgaaaatgcgttggcatctgaagatgaggatgaggagtttgatgaagatgaccatcatttacattaccaaaacaaatctaggaacagcagtaataattttggaaaatcttccaatggtgatccctatagtttcggcaggagaaggtctcaagttgtgttcgccgattctactcccgagaatattgagcatgaaataatagcacaaaagattagaccgttgttaagaaatagacgccgttccagcataaaaccacatacacctttcatttccaaattgaacacacaccaagattcttcctacctttcccccaatacaacctctacgacaaccccatccaataacaacagtaactccaaccaggcgaagatagatttagagaaacttactgcgacaagtgagccaacttccagaagagcttctcgtttatctgtatccaaagaaagtagtattagatctacacttttcccaaacaaaaactatttgatcgtcactacaaaccctaactctaaagctacgtctgtttccacctcccctaagttggaagaacagatgaatgtaagtagtaatccgatagtattaagtgacaaggagaaacatagagtagcttctcaacacttgaatggggaaagttctccacaacttgttccccattctcatcatcaacctcacagtgatacagacgaagaagactgggaaagtattggtgcagcttctttgagaaataacagtttagcacctaacatagacagcgtagcaagttctactaatggcgtagttagccctaaacctacaaatccaagttttactaactctcagaatggagatattgagcctcccttgcaacacgaccaacagaaacatgaacagcagccaagaaatggggaagacaatagtgctgcgtttttattaatgagcttaaaatcttga

SEQ ID NO: 2123 - DNA, 150 bp, Saccharomyces cerevisiae
atgatgagaatgtctctaaaacaaatgcagtcacagagattttctgcgacttctcgagtgagaatgttgcttattggtgctagtggcttgagatcttcgtcaagcaaattggaatgccccagattctcaaacaagcacggcagaaactga

SEQ ID NO: 2124 - DNA, 150 bp, Artificial Sequence
  Description of Artificial Sequence: Synthetic polynucleotide
atgatgagaatgtctttgaaacaaatgcagtctcagagattttctgcgacttctcgtgtgagaatgttgcttattggtgctagtggcttgagatcttcttctagcaaattggaatgccccagattcagtaacaagcacggcagaaactga

SEQ ID NO: 2125 - DNA, 6030 bp, Saccharomyces cerevisiae
atgtctgaacagaattcagtagtaaatgctgaaaaaggggatggcgaaatatcttcaaatgtagagactgcttcttcagtcaatccgtctgtgaaaccacagaatgctattaaagaagaagctaaagagacaaatggtgaagatcaaaaatgcaaagggccagaaaacgctggcagtacggcagaaacaaaagaaacaagtaacgacgctaccaacggaatgaaaacgcccgaagaaacggaagatacaaatgacaaacgccatgacgatgaaggtgaagatggagatgaagatgaagatgaagatgaagatgaagatgaagacaatggggacgaggatgatgaggacgtggatagcagtagttccgaaaccagttccgaagacggggaagattctgaatcagtctcaggggaaagtactgagagtagctctggagaagatgaagaatctgatgaaagcgatggaaatacatcaaacagctcctctggtgatgaaagcgggtcagaagaagaagaagaagaagaagaagaagaagaagaagaggaaaatgctggcgaaccagctatcgctcatcaagatagtgttcccaccaacgattctactgccccaaggtctacccatacgaggaacatatcactatcttcaaatggttcgaacacaaactcaaccataattttagtgaaaactacgttggagacaattttaaatgataaggacattaaaaagaattcgaatgctcagaaggctatcgaaaggacattacaaaaatttaaggaatttgatccgcaaaccacgaataacccacattacgtggattcaatactagtattcgaagcactaagggcaagctgtcgtaccaaatcctccaaagttcaaagtttggctttagattgcctgtcaaaattgttttcttttagatcgctagacgagaccctgttagtgaatccacccgattctttagcctctaatgatcaacgacaagatgctgccgatggaataacgccgcctccaaaacaaaaaattatagacgctgcaattgatactatttcagactgttttcaaggtgaaggcactgatgaccgtgtggaactacaaatcgttagagctttatctagttgcattttagaagaggattcaagttctttatgccacggtgcttccttgctaaaggctatcagaacaatctacaacgttttcgtcttttcgttgaacccatccaatcaaggtattgcacaggcgaccttgacacaaattattagttcggtgtatgataaaatcgatctcaaacaaagtacctcttcagcagtatccttatcgacaaaaaatcatcaacaacaatccgccatagaactttccgaggcttctgaaaatgcagaaacgccggctcctttaactctggaaaatatggataagttgaatgacgatgaggaaagactaatggacgctcaacagcctgattctatcgccataactaaccaagatctagctgttaaagatgcgttcttagtgtttagagtcatggcgaaaatatgtgctaaacctttggaaacagaactcgacatgaggtcacatgccgtcaggtcaaagcttttatctcttcacatcatttactctattatcaaagatcatattgacgtattcctttcccacaacatttttctaccaggaaaggagcgtgtgtgctttatcgattcaattagacaatatttacgtcttgttttatcaaggaatgctgcctcgcctctagctccagttttcgaggttactttagaaattatgtggctattgattgctaatttgagagcagatttcgtgaaggaaattccagtttttttaacagaaatctacttccccatttcagaattaaccacttccacctcccaacaaaagagatattttttaagtgttattcaacgaatttgtaacgacccaagaactttagttgaattttacttgaattatgattgtaaccctggaatgccaaatgtaatggaaataactgttgattatttgacaagattggctttaactagggtggaaattactcagactcaaagatcatactacgatgaacaaatatcaaaatccctgtccacctacaatttctcacaattgccccttttgacttcttccaacttgtcttctagtcctgatgttggtcaagtcaatttactttttccacttgattttgctctcaaaatggtgtcactaaattgcattgtgtcagttttgcgttccttaagctcatgggctcacaaagctttaaatccaaacacacacactgctaataaggtattactaaacacaacatcttcagctcgtcaagaatctagatcatctttgagtaacgacgtaaggtcttctattatgacaagtaatgatgacttcaaaccaacatatgaagacgaagaaagcagatcattgagcagtcaaaacattgacgcagacgaccccacacaatttgaaaatttgaaactaaggaaaactgctttatcggaatgtattgctattttcaacaataaacccaagaaagctattccagtacttattaaaaaaggatttttgaaagatgattctccaatttccattgccaagtggttattagaaacagaaggcctcgacatggccgctgttggggattatctaggcgaaggagacgacaagaacatcgctataatgcacgcatttgttgatgagtttgacttcactggtatgtccattgttgacgcattaaggtcatttttacaaagtttcagattgcctggagaaggtcaaaaaattgacagattcatgctgaaatttgcggaaagatttgtggaccaaaaccccggagtcttttcaaaggcggatactgcatatgtgctttcgtattctttgatcatgttgaatactgatttacattcgtcacaaatcaaaaataaaatgtctttacaagagtttttagaaaacaacgaaggtattgacaacggaagagatttaccaagagacttcttggaaggtttgttcaacgaaattgctaacaatgaaatcaagttaatttctgaacagcatcaggcaatgctttcaggtgataccaatcttgtccaacaacagcaatctgctttcaacttctttaattctcgtgatttgacaagagaggcatataatcaagtctcaaaagaaatttcatctaaaacggaattagtctttaagaatttaaacaaaaataaaggaggcccagacgtctattatgctgcttcccacgttgagcatgttaaatcaattttcgagacactatggatgtcctttttagcagctctaacccccccatttaaggattatgatgacattgacacaaccaataagtgtttagaaggcttgaaaatatcaattaaaattgcttctacttttagaatcaatgatgctagaacctcctttgtaggtgcgttagtccaattttgtaaccttcaaaaccttgaagaaatcaaagttaaaaatgtcaatgcaatggtaattcttcttgaagtcgcgttatcagaaggaaattacttggagggatcgtggaaggacattttgctggtcgtgtctcaaatggaaagactacaattgatatccaaaggtatcgacagagatacggttccagatgttgcacaagctcgtgttgcaaaccctagagtttcttacgaatcatcaagatccaataatacatctttctttgatgtttggggcaagaaggcaactcccacagaattggctcaagaaaaacaccataatcaaaccttatcacccgaaatctctaaattcatttcctccagtgaattagtcgttttgatggacaatatatttaccaaaagttccgagttatcaggtaatgctatcgttgattttatcaaagctttaaccgctgtatctttagaagaaattgaatcatctgaaaatgcttccacaccaagaatgttttccttgcaaaaaatggtcgatgtatgttactacaatatggatcgtatcaaactagaatggacgccgctttgggctgttatgggaaaagctttcaacaagattgctacaaactctaacttagcagtagtatttttcgctatcgattccctgcgtcaattgtctatgagatttttagatattgaggaattatcaggttttgaatttcaacatgattttttaaaaccttttgaatacacggttcaaaatagtggcaacactgaagttcaagaaatgattattgagtgttttaggaacttcatattgacaaaatcggaaagtatcaaatctggctggaagcctattcttgaatccttacaatatacggctcgctcaagcactgaatccattgtattaaagacgcaattgctggttagcaatgatattgtgacaaatcacttcgaaaacgtattctctcaagaagatgccttttctgagttagttggtgtcttcagagaaatcaccaaaaataagagattccaaaagctatctctacatgctttggagtctctaagaaagatgactcagaacgtcgcagacatctgtttttacaatgaaaataagactgaagaagaaagaaaacataacgatgctttacttcgtgggaaagacatattccaggatgtgtggttccctatgttattctgcttcaatgatacgatcatgacagctgaagacttagaagttagatcacgtgcattaaactatatgttcgatgccctagtggcatatggtggtaaattcaatgatgatttctgggaaaagatttgtaagaagttactatttcctattttcggtgtattatccaaacattgggaagtcaaccaattcaatagtcatgatgatttaagtgtttggctttcgaccacgttaattcaagccttaaggaacttgattgccctttttacgcattactttgaatcgttgaacagaatgctcgatggatttttgggtctgctggtatcctgtatttgtcaagaaaatgacactattgctagaattgggagatcctgcctgcaacaattgatattgcaaaacgtatctaaattcaatgagtaccattggaatcaaataggtgacgtattcgataaattgtttgatttaaccactgctaatgaattgttcgattatgatccgttacagcaaggaagaaaatcatctgtatctcatcaccaaacaactaatgataccagccaacactcagatgatgatagcaacgacagaagggagaacgattctaatatcagtgagacggtcgaaagagcgcatcaagaagaatccagcgaagacgttggtggtgacatggttgaaacactcaatgggcaaactaagcttaataatggcaattccgttccgacggtaaaggacgaattgaatccaaagcccgctagtctaagtatccccaagaaaactaagcacatgaaacgaaacgaaagtaacgaagatatacgtaggagaataaacatcaagaattctattgttgtcaaatgtgttttacagcttttgatgatagagctgctcaacgaattattcgagaacgaagattttgcccactgtatcccttacaaggaagccattagaattacaagattgttggagaaatcgtacgaattttctcgtgactttaatgaagattatgggttaagaacaagactagtagaggctcgtgtagttgataaaataccaaacctgttgaaacaagaaacgagtgctgctgcagttctccttgacattatgtttcagttgtatctgaacgatgatgagaagaaggctgatttaataactcgtctgatcaccatttgcatccaggtcgtagagggttatgtttctttggatgatagaaccatggaacgtagtatcaatgcctggcgttcagtgatagttgaaatattacaaggttactacgaatttgatgatgaagactttagactatactgtcctgctatgtatgctctggtgattcaaatattagataagagcgttccaacggagttgagacatgctataaaacaatttctaagcagagttggtgaattatacctttctactgattaa

SEQ ID NO: 2126 - DNA, 6030 bp, Artificial Sequence
  Description of Artificial Sequence: Synthetic polynucleotide
atgtctgaacagaattctgtagtaaatgctgaaaaaggggatggcgaaatatcttccaatgtagagactgcttcttctgtcaatccgtctgtgaaaccacagaatgctattaaagaagaagctaaagagacaaatggtgaagatcaaaaatgcaaagggccagaaaacgctggcagtacggcagaaacaaaagaaacaagtaacgacgctaccaacggaatgaaaacgcccgaagaaacggaagatacaaatgacaaacgccatgacgatgaaggtgaagatggagatgaagatgaagatgaagatgaagatgaagatgaagacaatggggacgaggatgatgaggacgtggatagcagtagttccgaaaccagttccgaagacggggaagattctgaatctgtcagtggggaaagtactgagagtagctctggagaagatgaagaatctgatgaaagcgatggaaatacaagtaacagctcctctggtgatgaaagcgggagtgaagaagaagaagaagaagaagaagaagaagaagaagaggaaaatgctggcgaaccagctatcgctcatcaagatagtgttcccaccaacgattctactgccccaaggtctacccatacgaggaacatatctttatcttccaatggttccaacacaaactctaccataattttagtgaaaactacgttggagacaattttaaatgataaggacattaaaaagaatagtaatgctcagaaggctatcgaaaggacattacaaaaatttaaggaatttgatccgcaaaccacgaataacccacattacgtggattctatattagtattcgaagcattaagggcaagctgtcgtaccaaatcctccaaagttcaaagtttggctttagattgcttatccaaattgttttcttttagatccttggacgagaccttattagtgaatccacccgattctttagcctctaatgatcaaagacaagatgctgccgatggaataacgccgcctccaaaacaaaaaattatagacgctgcaattgatactatttctgactgttttcaaggtgaaggcactgatgaccgtgtggaattacaaatcgttagagctttatctagttgcattttagaagaggattctagttctttatgccacggtgcttccttgttgaaggctatcagaacaatctacaacgttttcgtcttttctttgaacccatccaatcaaggtattgcacaggcgaccttgacacaaattattagttctgtgtatgataaaatcgatctcaaacaaagtacctcttctgcagtatccttatctacaaaaaatcatcaacaacaatccgccatagaactttccgaggcttctgaaaatgcagaaacgccggctcctttaactttggaaaatatggataagttgaatgacgatgaggaaagattaatggacgctcaacagcctgattctatcgccataactaaccaagatttggctgttaaagatgcgttcttagtgtttagagtcatggcgaaaatatgtgctaaacctttggaaacagaactcgacatgaggagccatgccgtcaggtctaagcttttatctcttcacatcatttactctattatcaaagatcatattgacgtattcctttcccacaacatttttttaccaggaaaggagcgtgtgtgctttatcgattctattagacaatatttacgtcttgttttatctaggaatgctgcctctcctttggctccagttttcgaggttactttagaaattatgtggttattgattgctaatttgagagcagatttcgtgaaggaaattccagtttttttaacagaaatctacttccccatttctgaattaaccacttccacctcccaacaaaagagatattttttaagtgttattcaaagaatttgtaacgacccaagaactttagttgaattttacttgaattatgattgtaaccctggaatgccaaatgtaatggaaataactgttgattatttgacaagattggctttaactagggtggaaattactcagactcaaagatcttactacgatgaacaaatatccaaatccttgtccacctacaatttctctcaattgccccttttgacttcttccaacttgtcttctagtcctgatgttggtcaagtcaatttactttttccacttgattttgctctcaaaatggtgtctttgaattgcattgtgtctgttttgcgttccttaagctcctgggctcacaaagctttaaatccaaacacacacactgctaataaggtattattaaacacaacatcttctgctcgtcaagaatctagatcttctttgagtaacgacgtaaggtcttctattatgacaagtaatgatgacttcaaaccaacatatgaagacgaagaaagcagaagtttgagcagtcaaaacattgacgcagacgaccccacacaatttgaaaatttgaaattgaggaaaactgctttatctgaatgtattgctattttcaacaataaacccaagaaagctattccagtacttattaaaaaaggatttttgaaagatgattctccaatttccattgccaagtggttattagaaacagaaggcctcgacatggccgctgttggggattatttgggcgaaggagacgacaagaacatcgctataatgcacgcatttgttgatgagtttgacttcactggtatgtccattgttgacgcattaaggtcttttttacaaagtttcagattgcctggagaaggtcaaaaaattgacagattcatgttgaaatttgcggaaagatttgtggaccaaaaccccggagtcttttccaaggcggatactgcatatgtgctttcctattctttgatcatgttgaatactgatttacattcttctcaaatcaaaaataaaatgtctttacaagagtttttagaaaacaacgaaggtattgacaacggaagagatttaccaagagacttcttggaaggtttgttcaacgaaattgctaacaatgaaatcaagttaatttctgaacagcatcaggcaatgctttctggtgataccaatcttgtccaacaacagcaatctgctttcaacttctttaattctcgtgatttgacaagagaggcatataatcaagtctccaaagaaatttcttctaaaacggaattagtctttaagaatttaaacaaaaataaaggaggcccagacgtctattatgctgcttcccacgttgagcatgttaaatccattttcgagacattatggatgtcctttttagcagctttgacccccccatttaaggattatgatgacattgacacaaccaataagtgtttagaaggcttgaaaatatctattaaaattgcttctacttttagaatcaatgatgctagaacctcctttgtaggtgcgttagtccaattttgtaaccttcaaaaccttgaagaaatcaaagttaaaaatgtcaatgcaatggtaattcttcttgaagtcgcgttatctgaaggaaattacttggagggatcttggaaggacattttgttggtcgtgtctcaaatggaaagattacaattgatatccaaaggtatcgacagagatacggttccagatgttgcacaagctcgtgttgcaaaccctagagtttcttacgaatcttctagatccaataatacatctttctttgatgtttggggcaagaaggcaactcccacagaattggctcaagaaaaacaccataatcaaaccttatctcccgaaatctctaaattcatttcctccagtgaattagtcgttttgatggacaatatatttaccaaaagttccgagttatctggtaatgctatcgttgattttatcaaagctttaaccgctgtatctttagaagaaattgaaagctctgaaaatgcttccacaccaagaatgttttccttgcaaaaaatggtcgatgtatgttactacaatatggatcgtatcaaattagaatggacgccgctttgggctgttatgggaaaagctttcaacaagattgctacaaactctaacttagcagtagtatttttcgctatcgattccttacgtcaattgtctatgagatttttagatattgaggaattatctggttttgaatttcaacatgattttttaaaaccttttgaatacacggttcaaaatagtggcaacactgaagttcaagaaatgattattgagtgttttaggaacttcatattgacaaaaagtgaaagtatcaaatctggctggaagcctattcttgaatccttacaatatacggctcgcagcagcactgaatccattgtattaaagacgcaattgttggttagcaatgatattgtgacaaatcacttcgaaaacgtattctctcaagaagatgccttttctgagttagttggtgtcttcagagaaatcaccaaaaataagagattccaaaagttatctttgcatgctttggagtctttgagaaagatgactcagaacgtcgcagacatctgtttttacaatgaaaataagactgaagaagaaagaaaacataacgatgctttacttcgtgggaaagacatattccaggatgtgtggttccctatgttattctgcttcaatgatacgatcatgacagctgaagacttagaagttagatctcgtgcattaaactatatgttcgatgccttagtggcatatggtggtaaattcaatgatgatttctgggaaaagatttgtaagaagttactttttcctattttcggtgtattatccaaacattgggaagtcaaccaattcaatagtcatgatgatttaagtgtttggctttctaccacgttaattcaagccttaaggaacttgattgccctttttacgcattactttgaatctttgaacagaatgctcgatggatttttgggtttattggtatcctgtatttgtcaagaaaatgacactattgctagaattgggagatcctgcttacaacaattgatattgcaaaacgtatctaaattcaatgagtaccattggaatcaaataggtgacgtattcgataaattgtttgatttaaccactgctaatgaattgttcgattatgatccgttacagcaaggaagaaaatcttctgtatctcatcaccaaacaactaatgataccagccaacacagtgatgatgatagcaacgacagaagggagaacgattctaatatcagtgagacggtcgaaagagcgcatcaagaagaatccagcgaagacgttggtggtgacatggttgaaacactcaatgggcaaactaagcttaataatggcaattccgttccgacggtaaaggacgaattgaatccaaagcccgctagtttaagtatccccaagaaaactaagcacatgaaaagaaacgaaagtaacgaagatatacgtaggagaataaacatcaagaattctattgttgtcaaatgtgttttacagcttttgatgatagagttactcaacgaattattcgagaacgaagattttgcccactgtatcccttacaaggaagccattagaattacaagattgttggagaaatcttacgaattttctcgtgactttaatgaagattatgggttaagaacaagattggtagaggctcgtgtagttgataaaataccaaaccttttgaaacaagaaacgagtgctgctgcagttctccttgacattatgtttcagttgtatttgaacgatgatgagaagaaggctgatttaataactcgtttgatcaccatttgcatccaggtcgtagagggttatgtttctttggatgatagaaccatggaacgtagtatcaatgcctggcgttctgtgatagttgaaatattacaaggttactacgaatttgatgatgaagactttagattatactgtcctgctatgtatgctttggtgattcaaatattagataagagcgttccaacggagttgagacatgctataaaacaatttttgagcagagttggtgaattatacctttctactgattga

SEQ ID NO: 2127 - DNA, 1128 bp, Saccharomyces cerevisiae
atgagtttttatcaaccatccctatctctttatgacgttttgaacgcattatccaaccaaactggccagagagggcagcaaggatatcctcgccaaccacaaaggccacagagataccatccccattatggacaagtgcacgttggcgggcatcatcctcgtcatcatccattgtatagcagatacaatggtgttcctaatacctattactaccagttccctggacaagcctattactatagtcctgaatacggttatgatgacgaggatggtgaagaagaggaccaagacgaagatatggtgggtgacagcggcactacaagacaggaagatggtggcgaggacagcaactcgagaagatatccatcatattaccattgtaatactgccaggaataataggaccaaccaacaggcaaacagtttaaacgacttattaaccgcgttaataggtgttccaccatatgaaggcactgaaccagaaattgaagcaaataccgaacaggagggcgaaaagggagaagaaaaggataagaaggataagtctgaagcacccaaagaggaagctggcgaaaccaacaaagaaaaacctttgaatcagctggaggaatcgtcgagaccaccattagccaaaaaatcttcatcgttcgctcacctacaagcgccttccccaatacctgacccgttacaagtatccaagcctgaaacgagaatggacttaccattttcaccagaagtgaatgtctatgataccgaggacacttacgtagttgttcttgcgttaccaggtgctaactctagggctttccacattgattaccatccatcttctcatgagatgctcatcaagggtaagatcgaagacagagtgggcattgatgaaaaattcttgaagatcacggaactaaaatatggtgcgtttgagagaaccgttaaattccccgtgctgccacgcattaaggacgaagaaattaaagctacttacaacaacggtctactacaaattaaggtgcctaaaattgtcaatgacactgaaaagccgaagccaaaaaagaggatcgccattgaggaaatacccgacgaagaattggagtttgaagaaaatcccaaccctacggtagaaaattga

SEQ ID NO: 2128 - DNA, 1128 bp, Artificial Sequence
  Description of Artificial Sequence: Synthetic polynucleotide
atgagtttttatcaaccatccttatctctttatgacgttttgaacgcattatccaaccaaactggccagagagggcagcaaggatatcctcgccaaccacaaaggccacagagataccatccccattatggacaagtgcacgttggcgggcatcatcctcgtcatcatccattgtatagcagatacaatggtgttcctaatacctattactaccagttccctggacaagcctattactatagtcctgaatacggttatgatgacgaggatggtgaagaagaggaccaagacgaagatatggtgggtgacagcggcactacaagacaggaagatggtggcgaggacagcaactctagaagatatccatcttattaccattgtaatactgccaggaataataggaccaaccaacaggcaaacagtttaaacgacttattaaccgcgttaataggtgttccaccatatgaaggcactgaaccagaaattgaagcaaataccgaacaggagggcgaaaagggagaagaaaaggataagaaggataagtctgaagcacccaaagaggaagctggcgaaaccaacaaagaaaaacctttgaatcagttggaggaaagtagtagaccaccattagccaaaaaatcttcttctttcgctcacttgcaagcgccttccccaatacctgacccgttacaagtatccaagcctgaaacgagaatggacttaccattttctccagaagtgaatgtctatgataccgaggacacttacgtagttgttcttgcgttaccaggtgctaactctagggctttccacattgattaccatccatcttctcatgagatgctcatcaagggtaagatcgaagacagagtgggcattgatgaaaaattcttgaagatcacggaattgaaatatggtgcgtttgagagaaccgttaaattccccgtgttaccacgcattaaggacgaagaaattaaagctacttacaacaacggtttattacaaattaaggtgcctaaaattgtcaatgacactgaaaagccgaagccaaaaaagaggatcgccattgaggaaatacccgacgaagaattggagtttgaagaaaatcccaaccctacggtagaaaattga

SEQ ID NO: 2129 - DNA, 2058 bp, Saccharomyces cerevisiae
atgtcggattcaaaccaaggcaacaatcagcaaaactaccagcaatacagccagaacggtaaccaacaacaaggtaacaacagataccaaggttatcaagcttacaatgctcaagcccaacctgcaggtgggtactaccaaaattaccaaggttattctgggtaccaacaaggtggctatcaacagtacaatcccgacgccggttaccagcaacagtataatcctcaaggaggctatcaacagtacaatcctcaaggcggttatcagcagcaattcaatccacaaggtggccgtggaaattacaaaaacttcaactacaataacaatttgcaaggatatcaagctggtttccaaccacagtctcaaggtatgtctttgaacgactttcaaaagcaacaaaagcaggccgctcccaaaccaaagaagactttgaagcttgtctccagttccggtatcaagttggccaatgctaccaagaaggttggcacaaaacctgccgaatctgataagaaagaggaagagaagtctgctgaaaccaaagaaccaactaaagagccaacaaaggtcgaagaaccagttaaaaaggaggagaaaccagtccagactgaagaaaagacggaggaaaaatcggaacttccaaaggtagaagaccttaaaatctctgaatcaacacataataccaacaatgccaatgttaccagtgctgatgccttgatcaaggaacaggaagaagaagtggatgacgaagttgttaacgatatgtttggtggtaaagatcacgtttctttaattttcatgggtcatgttgatgccggtaaatctactatgggtggtaatctactatacttgactggctctgtggataagagaactattgagaaatatgaaagagaagccaaggatgcaggcagacaaggttggtacttgtcatgggtcatggataccaacaaagaagaaagaaatgatggtaagactatcgaagttggtaaggcctactttgaaactgaaaaaaggcgttataccatattggatgctcctggtcataaaatgtacgtttccgagatgatcggtggtgcttctcaagctgatgttggtgttttggtcatttccgccagaaagggtgagtacgaaaccggttttgagagaggtggtcaaactcgtgaacacgccctattggccaagacccaaggtgttaataagatggttgtcgtcgtaaataagatggatgacccaaccgttaactggtctaaggaacgttacgaccaatgtgtgagtaatgtcagcaatttcttgagagcaattggttacaacattaagacagacgttgtatttatgccagtatccggctacagtggtgcaaatttgaaagatcacgtagatccaaaagaatgcccatggtacaccggcccaactctgttagaatatctggatacaatgaaccacgtcgaccgtcacatcaatgctccattcatgttgcctattgccgctaagatgaaggatctaggtaccatcgttgaaggtaaaattgaatccggtcatatcaaaaagggtcaatccaccctactgatgcctaacaaaaccgctgtggaaattcaaaatatttacaacgaaactgaaaatgaagttgatatggctatgtgtggtgagcaagttaaactaagaatcaaaggtgttgaagaagaagacatttcaccaggttttgtactaacatcgccaaagaaccctatcaagagtgttaccaagtttgtagctcaaattgctattgtagaattaaaatctatcatagcagccggtttttcatgtgttatgcatgttcatacagcaattgaagaggtacatattgttaagttattgcacaaattagaaaagggtaccaaccgtaagtcaaagaaaccacctgcttttgctaagaagggtatgaaggtcatcgctgttttagaaactgaagctccagtttgtgtggaaacttaccaagattaccctcaattaggtagattcactttgagagatcaaggtaccacaatagcaattggtaaaattgttaaaattgccgagtaa

SEQ ID NO: 2130 - DNA, 2058 bp, Artificial Sequence
  Description of Artificial Sequence: Synthetic polynucleotide
atgagtgattccaaccaaggcaacaatcagcaaaactaccagcaatacagccagaacggtaaccaacaacaaggtaacaacagataccaaggttatcaagcttacaatgctcaagcccaacctgcaggtgggtactaccaaaattaccaaggttattctgggtaccaacaaggtggctatcaacagtacaatcccgacgccggttaccagcaacagtataatcctcaaggaggctatcaacagtacaatcctcaaggcggttatcagcagcaattcaatccacaaggtggccgtggaaattacaaaaacttcaactacaataacaatttgcaaggatatcaagctggtttccaaccacagtctcaaggtatgtctttgaacgactttcaaaagcaacaaaagcaggccgctcccaaaccaaagaagactttgaagcttgtctccagttccggtatcaagttggccaatgctaccaagaaggttggcacaaaacctgccgaatctgataagaaagaggaagagaagtctgctgaaaccaaagaaccaactaaagagccaacaaaggtcgaagaaccagttaaaaaggaggagaaaccagtccagactgaagaaaagacggaggaaaaaagtgaacttccaaaggtagaagaccttaaaatctctgaatctacacataataccaacaatgccaatgttaccagtgctgatgccttgatcaaggaacaggaagaagaagtggatgacgaagttgttaacgatatgtttggtggtaaagatcacgtttctttaattttcatgggtcatgttgatgccggtaaatctactatgggtggtaatttattgtacttgactggctctgtggataagagaactattgagaaatatgaaagagaagccaaggatgcaggcagacaaggttggtacttgtcctgggtcatggataccaacaaagaagaaagaaatgatggtaagactatcgaagttggtaaggcctactttgaaactgaaaaaaggcgttataccatattggatgctcctggtcataaaatgtacgtttccgagatgatcggtggtgcttctcaagctgatgttggtgttttggtcatttccgccagaaagggtgagtacgaaaccggttttgagagaggtggtcaaactcgtgaacacgccttattggccaagacccaaggtgttaataagatggttgtcgtcgtaaataagatggatgacccaaccgttaactggtctaaggaacgttacgaccaatgtgtgagtaatgtcagcaatttcttgagagcaattggttacaacattaagacagacgttgtatttatgccagtatccggctacagtggtgcaaatttgaaagatcacgtagatccaaaagaatgcccatggtacaccggcccaactttattagaatatttggatacaatgaaccacgtcgaccgtcacatcaatgctccattcatgttgcctattgccgctaagatgaaggatttaggtaccatcgttgaaggtaaaattgaatccggtcatatcaaaaagggtcaatccaccttattgatgcctaacaaaaccgctgtggaaattcaaaatatttacaacgaaactgaaaatgaagttgatatggctatgtgtggtgagcaagttaaattgagaatcaaaggtgttgaagaagaagacatttctccaggttttgtattaacatctccaaagaaccctatcaagagtgttaccaagtttgtagctcaaattgctattgtagaattaaaatctatcatagcagccggtttttcttgtgttatgcatgttcatacagcaattgaagaggtacatattgttaagttattgcacaaattagaaaagggtaccaaccgtaagtccaagaaaccacctgcttttgctaagaagggtatgaaggtcatcgctgttttagaaactgaagctccagtttgtgtggaaacttaccaagattaccctcaattaggtagattcactttgagagatcaaggtaccacaatagcaattggtaaaattgttaaaattgccgagtga

SEQ ID NO: 2131 - DNA, 1068 bp, Saccharomyces cerevisiae
atggatacggtaaacaattatagggttttagagcataaagctgctggccacgacggtactctaacagacggtgatggattgctcatctttaaaccggcctttccgcaggaactggaattctacaaagccatacaagtgagagatgtgagtcgaagaaagtcttcggctgatggagatgctcccttgtgctcttggatgcccacgtatcttggagtcttgaatgaaggggcaaaaatcgagcaaagtggcgatgctgcgcttctgaagatagatgagcggttaagtgattccactgataatcttgattcaatacctgtaaagtctgagaagtccaagcaatacctcgttttagaaaatctactatatggatttagtaaacctaatatacttgatataaaattaggcaaaactttgtatgattcgaaggcatcattggaaaaaagagagagaatgaaaagagtcagtgagacgacgacttcaggatctttgggtttcaggatatgtggcatgaaaatacagaaaaatccctctgtgctgaatcagctttcgctcgaatattacgaagaagaagcagacagtgattatatctttataaacaaattgtatggtcgttcaagaaccgatcaaaatgtttcagatgcaattgaactttattttaacaatcctcatctgtcggatgcgagaaagcatcaactgaagaaaacatttttgaaaagattgcagttgttttataatactatgctagaagaagaagttagaatgatatcaagtagtcttttgtttatttacgaaggagacccggagcgatgggaattactaaatgatgttgacaaacttatgcgagatgattttatagacgatgatgacgacgatgatgataatgatgatgatgatgatgatgatgccgagggaagcagcgaaggaccaaaggacaaaaaaacaactggttctttgagttccatgtcactaatagattttgcacattctgaaataacgccggggaagggttatgatgaaaacgtgattgaaggagttgaaaccttgctagatatttttatgaaattctag

SEQ ID NO: 2132 - DNA, 1068 bp, Artificial Sequence
  Description of Artificial Sequence: Synthetic polynucleotide
atggatacggtaaacaattatagggttttagagcataaagctgctggccacgacggtactttgacagacggtgatggattgctcatctttaaaccggcctttccgcaggaattggaattctacaaagccatacaagtgagagatgtgagtagaagaaagtcttctgctgatggagatgctcccttgtgctcttggatgcccacgtatcttggagtcttgaatgaaggggcaaaaatcgagcaaagtggcgatgctgcgcttttgaagatagatgagagattaagtgattccactgataatcttgattctatacctgtaaagtctgagaagtccaagcaatacctcgttttagaaaatttattatatggatttagtaaacctaatatacttgatataaaattaggcaaaactttgtatgattctaaggcaagtttggaaaaaagagagagaatgaaaagagtcagtgagacgacgacttctggatctttgggtttcaggatatgtggcatgaaaatacagaaaaatccctctgtgttgaatcagctttctctcgaatattacgaagaagaagcagacagtgattatatctttataaacaaattgtatggtcgttccagaaccgatcaaaatgtttctgatgcaattgaactttattttaacaatcctcatttaagtgatgcgagaaagcatcaattgaagaaaacatttttgaaaagattgcagttgttttataatactatgttggaagaagaagttagaatgatatctagtagtcttttgtttatttacgaaggagacccggagcgctgggaattattgaatgatgttgacaaacttatgagagatgattttatagacgatgatgacgacgatgatgataatgatgatgatgatgatgatgatgccgagggaagcagcgaaggaccaaaggacaaaaaaacaactggttctttgagttccatgtctttgatagattttgcacattctgaaataacgccggggaagggttatgatgaaaacgtgattgaaggagttgaaaccttgttggatatttttatgaaattctga

SEQ ID NO: 2133 - DNA, 741 bp, Saccharomyces cerevisiae
atgactacagatccttctgtcaaattgaagtccgccaaagactccctcgtctcctccctcttcgagttatcaaaagctgctaatcagacagcctcctctattgttgatttctacaatgccatcggcgacgatgaagaagagaagatagaggctttcaccactttgactgagtctttgcaaacattgacttctggtgtaaaccacttgcacggcatcagctcggagctggttaaccctattgatgatgataaagatgctattatcgctgctccagtcaaggctgtaagaagaaagatcgaacgtgatccaaatgctccaaagaagccactgactgttttctttgcttactctgcgtacgttcgtcaagaacttcgtgaagacagacaaaaggctggcttgccacctttatcctcaactgagattactcaagaaatctccaagaaatggaaggaattgagtgataacgaaaaagaaaaatggaagcaggcttacaacgtcgagttggagaattaccaaagagagaaatccaaatacttagaagcaaagaaaaacggtaccctaccaccagcttccttggaaaacggtccaactcatgcgccggttccaattcctttcagtttacagcacgccgctgaacctcctgtggaaaagagacctcacgatgatgatggatcttcggaaaagaagaagaagaagaagaagaaggataagaagaaggacaaatccaactcttctatttga

SEQ ID NO: 2134 - DNA, 741 bp, Artificial Sequence
  Description of Artificial Sequence: Synthetic polynucleotide
atgactacagatccttctgtcaaattgaagtccgccaaagactccctcgtctcctccctcttcgagttatccaaagctgctaatcagacagcctcctctattgttgatttctacaatgccatcggcgacgatgaagaagagaagatagaggctttcaccactttgactgagtctttgcaaacattgacttctggtgtaaaccacttgcacggcatcagctctgagttagttaaccctattgatgatgataaagatgctattatcgctgctccagtcaaggctgtaagaagaaagatcgaacgtgatccaaatgctccaaagaagccattgactgttttctttgcttactctgcgtacgttcgtcaagaacttcgtgaagacagacaaaaggctggcttgccacctttatccagcactgagattactcaagaaatctccaagaaatggaaggaattgagtgataacgaaaaagaaaaatggaagcaggcttacaacgtcgagttggagaattaccaaagagagaaatccaaatacttagaagcaaagaaaaacggtaccttgccaccagcttccttggaaaacggtccaactcatgcgccggttccaattcctttcagtttacagcacgccgctgaacctcctgtggaaaagagacctcacgatgatgatggatcttctgaaaagaagaagaagaagaagaagaaggataagaagaaggacaaatccaactcttctatttga

SEQ ID NO: 2135 - DNA, 960 bp, Saccharomyces cerevisiae
atgaaagtaccattggggttatggaaagtctctcggggtaatttgtggagcacccagaaaagggttttgacaatgtctagatgtttgaacagtgatgctggtaatgaagctaaaactgtgagagaaggaccagctttttcagcagatctctatatgcatcccgaaaaatggaagggtttacctcctcaaagaattttagagttatattgggagagaatggctagattgggttcagagtataaacctaacaaagacgaactgaatgccttattaaccacttctgagtactcaaatgtacctgttaacgatattaaaaagctatatcacagaggagaacaaggcgctattgatataaaaggtggaaacgtgaatcgcgataacagtcttagaccgtttatgtttgatgaattgccatcgcaagctcaggaattggttgcccaacatcgtgaacaaaggttctataatcgattagccgcatatgagttaccgctattagctcaatatcgccaggaatacaagagaccatctccagaaagtcatccggtcacttatagatacactagttatgttggcgaagagcatcccaattcgaggaaggttgtattaagcgttaaaaccaaggaattgggcctggaggaaaaatcattacataagttcagaatattagccaggtcgcgttatgatcatactacagatatttttaaaatgtctagtgacaaatttgagcatgcatcacaaaatgcacgttatttgcatgatattcttcaaaggctgttagcggagtcaaaagatttgacggaggacgattttagcgatgttccccttgacacaaggcatactatagctaagagtttacgtaaaaagaagcgggattatgagtttcctgaacactggaaacgccctgaagatgcaccaaagaagaaatttgatattgtagatcaattattgagcactctttaa

SEQ ID NO: 2136 - DNA, 960 bp, Artificial Sequence
  Description of Artificial Sequence: Synthetic polynucleotide
atgaaagtaccattggggttatggaaagtctctcgtggtaatttgtggagcacccagaaaagggttttgacaatgtctagatgtttgaacagtgatgctggtaatgaagctaaaactgtgagagaaggaccagctttttctgcagatctctatatgcatcccgaaaaatggaagggtttacctcctcaaagaattttagagttatattgggagagaatggctagattgggttctgagtataaacctaacaaagacgaattgaatgccttattaaccacttctgagtactctaatgtacctgttaacgatattaaaaagctttatcacagaggagaacaaggcgctattgatataaaaggtggaaacgtgaatcgcgataacagtcttagaccgtttatgtttgatgaattgccatctcaagctcaggaattggttgcccaacatcgtgaacaaaggttctataatagattagccgcatatgagttaccgttgttagctcaatatcgccaggaatacaagagaccatctccagaaagtcatccggtcacttatagatacactagttatgttggcgaagagcatcccaattctaggaaggttgtattaagcgttaaaaccaaggaattgggcttagaggaaaaatctttacataagttcagaatattagccaggtctcgttatgatcatactacagatatttttaaaatgtctagtgacaaatttgagcatgcatctcaaaatgcacgttatttgcatgatattcttcaaaggttattagcggagagtaaagatttgacggaggacgattttagcgatgttccccttgacacaaggcatactatagctaagagtttacgtaaaaagaagagagattatgagtttcctgaacactggaaacgccctgaagatgcaccaaagaagaaatttgatattgtagatcaattattgagcactctttga

SEQ ID NO: 2137 - DNA, 2109 bp, Saccharomyces cerevisiae
atgcctagacatggaagaagaggaaaactgccaaaaggcgagaaacttcctaaaaaggagggaggcgacaatactccgtcaaagcttttatcgtcaatgcttaaaactttagatttgaccttcgagcgtgatattggaatgctcaatggcaaaagtgttaggtccatacccaataaaaaaactttacttgaattgcaaagtcaattggatagtctcaatgaaatactgggtacaattgcccgaggtgatcaagagaccattgaagcgcttcggaaaataagagacagtaaaaatgagaagcaagcaaacgatgaaaagcaggaaacttcaaatgcagacgggcagcacgaaagttctactgctactgaagaaacgaatataattgataaaggggtacaaagcccaccaaaacctcctccttctaatgaaatctccggcacaattgagaacgatgtagaaagcatcaaacaagcggctgataatatggctaaagaagaaattaatgaagacaaagatttacaagttcatagagatcaacccagagaaaagaggccgttcgattctgaaactgaaaatagggccactgaaaatgaaaacacacagaggccagacaataagaagcaaaaaattgacgttgacaaaatggaaaacgatccaactgttaaaaatccaaaatcagaatttgtagtatcgcaaacgttacctcgagcagcagcagcactcggcttattcaatgaagagggactagaaagtacaggagaagacttcctaaaaaaaaaatacaatgtagctagttatccaacaaatgatttgaaagatctgttaccaggtgaattaccggatatggacttttcgcatcctaaaccaaccaaccaaattcaattcaatacctttctagcatttgtggaaaattttttcaaagatcttagtgatgacaacttaaagtttttgaagatgaaatatattatacccgatagcttgcaatttgacaaaacttatgaccctgaggtaaacccgtttattataccgaaactaggccctttatacacagatgtttggttcaaagatgaaaacgacaaaaattctgcctataaaaaaccttcaccatattcaaacgatgcatctactatactaccaaaaaaaagtgccaacgaacttgatgataatgctttggaatcgggcagtatatcgtgtgggcccttattatctaggctgttgagtgctgtattaaaagatgacaatgacaaatcagaattgcaatcttctaaaataatacgggatggcggactaccgagaaccggaggggaagacgatatacaatcgtttagaaacaacaacaatgatactgtagacatgacattatctcaggagaacgggcccagtgttcaaacacctgacaatgacattgatgaggaagcatctttccaagcaaaactggcagaaaataaaggcagtaatggcggtactacaagtacgttaccccaacaaattgggtggataacaaatggaattaacctggactatccaacattcgaagaacgattgaaaagagaactaaagtatgtagggatatacatgaatttgcctaaggatgagaacaaccctaactcagatgaccccgattgggtcaccggtagagaagacgacgaaataagcgcagagttaagagaattgcaaggcactttaaaacaagtgaccaagaaaaaccaaaagaggaaagcccaattgattccactagtggaaagacaactagcatggcaggaatactcatctattttagaagatttagacaaacaaatcgaccaggcttatgtcaaacgtattcgcgtacccaagaaaagaaagaagcatcatacagcagcttcaaataatgtgaacacaggaaccacgtctcaaatagcacaacaaaaggctgcaaactcaagtttaaaatcccttctggataaaaggcaaaggtggattaataagattggtccattgtttgataaacctgaaattatgaagagaatccccaatgaaagcgtattcaaggacatggaccaagaagaagatgaggatgaagccgatgtatttgcacaaaacactaataaggacgtggaactaaattaa

SEQ ID NO: 2138 - DNA, 2109 bp, Artificial Sequence
  Description of Artificial Sequence: Synthetic polynucleotide
atgcctagacatggaagaagaggaaaattaccaaaaggcgagaaacttcctaaaaaggagggaggcgacaatactccgtccaagcttttatcttctatgcttaaaactttagatttgaccttcgagcgtgatattggaatgctcaatggcaaaagtgttaggtccatacccaataaaaaaactttacttgaattgcaaagtcaattggatagtctcaatgaaatattaggtacaattgccagaggtgatcaagagaccattgaagcgcttagaaaaataagagacagtaaaaatgagaagcaagcaaacgatgaaaagcaggaaacttccaatgcagacgggcagcacgaaagttctactgctactgaagaaacgaatataattgataaaggggtacaaagcccaccaaaacctcctccttctaatgaaatctccggcacaattgagaacgatgtagaaagcatcaaacaagcggctgataatatggctaaagaagaaattaatgaagacaaagatttacaagttcatagagatcaacccagagaaaagaggccgttcgattctgaaactgaaaatagggccactgaaaatgaaaacacacagaggccagacaataagaagcaaaaaattgacgttgacaaaatggaaaacgatccaactgttaaaaatccaaaaagtgaatttgtagtatctcaaacgttacctagagcagcagcagcactcggcttattcaatgaagagggattagaaagtacaggagaagacttcttgaaaaaaaaatacaatgtagctagttatccaacaaatgatttgaaagatttattaccaggtgaattaccggatatggacttttctcatcctaaaccaaccaaccaaattcaattcaatacctttttggcatttgtggaaaattttttcaaagatcttagtgatgacaacttaaagtttttgaagatgaaatatattatacccgatagcttgcaatttgacaaaacttatgaccctgaggtaaacccgtttattataccgaaattgggccctttatacacagatgtttggttcaaagatgaaaacgacaaaaattctgcctataaaaaaccttctccatattccaacgatgcatctactatattgccaaaaaaaagtgccaacgaacttgatgataatgctttggaaagtggcagtatatcttgtgggcccttattatctaggttattgagtgctgtattaaaagatgacaatgacaaaagtgaattgcaatcttctaaaataataagagatggcggattaccgagaaccggaggggaagacgatatacaaagttttagaaacaacaacaatgatactgtagacatgacattatctcaggagaacgggcccagtgttcaaacacctgacaatgacattgatgaggaagcatctttccaagcaaaattggcagaaaataaaggcagtaatggcggtactacaagtacgttaccccaacaaattgggtggataacaaatggaattaacttggactatccaacattcgaagaaagattgaaaagagaattgaagtatgtagggatatacatgaatttgcctaaggatgagaacaaccctaacagtgatgaccccgattgggtcaccggtagagaagacgacgaaataagcgcagagttaagagaattgcaaggcactttaaaacaagtgaccaagaaaaaccaaaagaggaaagcccaattgattccattggtggaaagacaattggcatggcaggaatactcttctattttagaagatttagacaaacaaatcgaccaggcttatgtcaaacgtattcgcgtacccaagaaaagaaagaagcatcatacagcagcttctaataatgtgaacacaggaaccacgtctcaaatagcacaacaaaaggctgcaaacagtagtttaaaatcccttttagataaaaggcaaaggtggattaataagattggtccattgtttgataaacctgaaattatgaagagaatccccaatgaaagcgtattcaaggacatggaccaagaagaagatgaggatgaagccgatgtatttgcacaaaacactaataaggacgtggaattgaattga

SEQ ID NO: 2139 - DNA, 648 bp, Saccharomyces cerevisiae
atgtctagggctaagagaattatgaaagaaatccaagctgtgaaggatgatcctgcagctcacattactcttgaatttgtgagtgaatctgatatccaccatttaaaaggcacatttttgggcccacctggaacaccttacgagggtggcaaatttgtcgtggatatcgaagtacctatggagtatccattcaaaccaccaaagatgcagttcgacacaaaagtataccatccaaatatatcatcagtgacaggtgccatttgtttagatattcttaagaatgcatggtcgccagtgataacactaaagtctgcattgatttcgctacaggcgctactacaatctccagagcctaacgatcctcaagatgcagaagtagcacaacactatttacgggatagagaatcttttaataagactgctgcactatggacgaggttatacgccagtgaaacttccaatggtcaaaaaggcaatgtagaggagtctgatttatatgggattgaccacgatctgattgacgagtttgaatctcaaggttttgaaaaggacaagattgtggaagtgttgagacgattaggcgtcaagtccttagaccccaatgacaacaacacagccaaccgtatcatcgaggaattgttgaagtga

SEQ ID NO: 2140 - DNA, 648 bp, Artificial Sequence
  Description of Artificial Sequence: Synthetic polynucleotide
atgtctagggctaagagaattatgaaagaaatccaagctgtgaaggatgatcctgcagctcacattactcttgaatttgtgagtgaatctgatatccaccatttaaaaggcacatttttgggcccacctggaacaccttacgagggtggcaaatttgtcgtggatatcgaagtacctatggagtatccattcaaaccaccaaagatgcagttcgacacaaaagtataccatccaaatatatcttctgtgacaggtgccatttgtttagatattcttaagaatgcatggtctccagtgataacattgaagtctgcattgatttctttgcaggcgttattacaatctccagagcctaacgatcctcaagatgcagaagtagcacaacactatttaagagatagagaatcttttaataagactgctgcattatggacgaggttatacgccagtgaaacttccaatggtcaaaaaggcaatgtagaggagtctgatttatatgggattgaccacgatttgattgacgagtttgaatctcaaggttttgaaaaggacaagattgtggaagtgttgagaagattaggcgtcaagtccttagaccccaatgacaacaacacagccaaccgtatcatcgaggaattgttgaagtga

SEQ ID NO: 2141 - DNA, 546 bp, Saccharomyces cerevisiae
atgatgttgccaagatccatgaaatttatgactggaaggagaattttccatactgccacagtaagggccttccagtctaccgctaagaagagcttaactatcccatttttgcccgtattaccccagaaaccaggtggtgttaggggcactcccaatgatgcctacgtccccccccctgagaataaattagagggctcataccactggtatatggaaaaaatctttgccttgtccgtcgttccattggctacgacggctatgctgacaaccggtccgttatccactgcagctgattctttcttttctgtcatgcttttgggatattgttacatggaatttaactcttgtatcaccgattatatttctgaaagagtttatggtgtttggcacaagtacgccatgtatatgttgggccttggttctgcggtctccctttttggaatctataaactagaaaccgagaatgatggtgttgttggtttagtaaaaagtctatgggattcttccgagaaagacaacagtcaaaagattgaagccaagaagtag

SEQ ID NO: 2142 - DNA, 546 bp, Artificial Sequence
  Description of Artificial Sequence: Synthetic polynucleotide
atgatgttgccaagatccatgaaatttatgactggaaggagaattttccatactgccacagtaagggccttccagtctaccgctaagaagagcttaactatcccatttttgcccgtattaccccagaaaccaggtggtgttaggggcactcccaatgatgcctacgtccccccccctgagaataaattagagggctcttaccactggtatatggaaaaaatctttgccttgtccgtcgttccattggctacgacggctatgttaacaaccggtccgttatccactgcagctgattctttcttttctgtcatgcttttgggatattgttacatggaatttaactcttgtatcaccgattatatttctgaaagagtttatggtgtttggcacaagtacgccatgtatatgttgggccttggttctgcggtctccctttttggaatctataaattagaaaccgagaatgatggtgttgttggtttagtaaaaagtttatgggattcttccgagaaagacaacagtcaaaagattgaagccaagaagtga

SEQ ID NO: 2143 - DNA, 489 bp, Saccharomyces cerevisiae
atggtaatgagggaagaaacaataaaatcgctagaagatccttacaaatatcactacaaagaagaatggttaaatactaaagatcccgatgaacaacaattattcgaaatatttgcctttggaaacattaaagatctaccggaaaacataatcctaacatcattaatgcgatcaaaactggagaaattaacattggtaacattaagcgaaatatataatgagttaagttacgagttaattaaagaagaatgtcaaattgaagacgatggtatcatcgaaagccatttaattcagctacagaatatttttaaagcagagatggattcagtcagtaaatctatgaaattttcaagaagatttgactgtagagatgtgtactgtcatgaaaaggaactgactataattaaaaatccgcgagtgacgaaagagtatttagttcaaaatcttcggagctgggaaacaaagctcaaacagaatatattggagtaa

SEQ ID NO: 2144 - DNA, 489 bp, Artificial Sequence
  Description of Artificial Sequence: Synthetic polynucleotide
atggtaatgagggaagaaacaataaaatctttggaagatccttacaaatatcactacaaagaagaatggttaaatactaaagatcccgatgaacaacaattattcgaaatatttgcctttggaaacattaaagatttaccggaaaacataatcttaacaagtttaatgagaagtaaattagagaaattaacattggtaacattaagcgaaatatataatgagttaagttacgagttaattaaagaagaatgtcaaattgaagacgatggtatcatcgaaagccatttaattcagttacagaatatttttaaagcagagatggattctgtcagtaaatctatgaaattttccagaagatttgactgtagagatgtgtactgtcatgaaaaggaattgactataattaaaaatccgagagtgacgaaagagtatttagttcaaaatcttagaagctgggaaacaaagctcaaacagaatatattggagtga

SEQ ID NO: 2145 - DNA, 1392 bp, Saccharomyces cerevisiae
atgcctaccattttatacaacaccaattccagtttaattaccaagtaccgaaggccaaatgcctcaaatcaatataaaggctttctgtcaaaaaaaggacatacacgactgaattctaaatcgagtggagatatttgggagaaagattgtagtcatacgaaaaattctggtaatgatgtttcgtttgagagtgaatttgaaaaagattcggttgagtatctaagggatttatgtttctctatatacccaaattcattacatcagaaaatcagaagcatagaagctttgccagacctacaggtaaatacctttattgccttaattttccaaaatttcgttaagtcttggtatggtatcaaaatacccactgatgattccaagtttttaaccgaactatataacttagttcaagatttaataacatatttgaagagttccaaaatcaattaccatgcccttttactcgattatattccctgcttgctttcgtctcacttgaaagcattaaatgactcatctcaaaataacgatttagtttatgaacagtactgtaagctaactttgtatgattcgaaacgatatccaatgctattcactgaaatcatacaaagtaaaatgagcaccaaatctctactacagagaagctttttggatagctttttaaatgaacttgtgttcgggcatatttttaattcaatagcggaaccatattatcttctggagggcttgaataaaatttgcataagaataaagctaaattctgcaggaaataccagaaacgaggtgactcatggaaagcctaaatgcgatccctggttgtttgtttccaatgtaaagcacaaaatattgcaaatgaccaggcttttagcttattcaacttcaacagaagcagcaaatatgaacactgccgaaattcaagaaacagcatttctacaaagatatatttttacttttttcaccgatgattttttcaaattatctatgaggaagccattcctattctcaatatgcagaacgcttcagcattggatctctaaattaaatgcgttaaacagggtcatgtatagaacatttgacaatattgttcaaactaaaattaccagccctgtgacaattggcaacttattctcattattacgacattctttgtttcctaatgacaatatgatggggccaccaagagtattaccagtgggtgatgcttttctagagttcagagaagagtgtatttccaatttatgggatgtttgtatgacttataaacttgatcatatcctcgctatcaaaaggtctgacatagcggatcttattatctgcatatcgaagaatagggattgcaataaactgctaatttatagaattattgactgtgttattgcgcagttgccgtag

SEQ ID NO: 2146 - DNA, 1392 bp, Artificial Sequence
  Description of Artificial Sequence: Synthetic polynucleotide
atgcctaccattttatacaacaccaattccagtttaattaccaagtacagaaggccaaatgcctctaatcaatataaaggctttttatccaaaaaaggacatacaagattgaattctaaatctagtggagatatttgggagaaagattgtagtcatacgaaaaattctggtaatgatgtttcttttgagagtgaatttgaaaaagattctgttgagtatttgagggatttatgtttctctatatacccaaattctttacatcagaaaatcagaagcatagaagctttgccagacttacaggtaaatacctttattgccttaattttccaaaatttcgttaagtcttggtatggtatcaaaatacccactgatgattccaagtttttaaccgaattgtataacttagttcaagatttaataacatatttgaagagttccaaaatcaattaccatgcccttttactcgattatattccctgcttgctttcttctcacttgaaagcattaaatgactcttctcaaaataacgatttagtttatgaacagtactgtaagttgactttgtatgattctaaaagatatccaatgcttttcactgaaatcatacaaagtaaaatgagcaccaaatctttattgcagagaagctttttggatagctttttaaatgaacttgtgttcgggcatatttttaattctatagcggaaccatattatcttttggagggcttgaataaaatttgcataagaataaagttgaattctgcaggaaataccagaaacgaggtgactcatggaaagcctaaatgcgatccctggttgtttgtttccaatgtaaagcacaaaatattgcaaatgaccaggcttttagcttattctacttctacagaagcagcaaatatgaacactgccgaaattcaagaaacagcatttttgcaaagatatatttttacttttttcaccgatgattttttcaaattatctatgaggaagccattccttttctctatatgcagaacgcttcagcattggatctctaaattaaatgcgttaaacagggtcatgtatagaacatttgacaatattgttcaaactaaaattaccagccctgtgacaattggcaacttattctctttattaagacattctttgtttcctaatgacaatatgatggggccaccaagagtattaccagtgggtgatgcttttttggagttcagagaagagtgtatttccaatttatgggatgtttgtatgacttataaacttgatcatatcctcgctatcaaaaggtctgacatagcggatcttattatctgcatatccaagaatagggattgcaataaattattgatttatagaattattgactgtgttattgcgcagttgccgtga

SEQ ID NO: 2147 - DNA, 4482 bp, Saccharomyces cerevisiae
atgtcgtacccagggaaagacaagaatattcctggaagaataatagaggccctagaagacctgcctttgagttatctggttcctaaggatgggttagccgcgctagtaaatgccccaatgcgggtttctttaccttttgacaagactatctttaccagcgctgatgatggcagagatgttaatataaatgttctaggtacagctaacagcactacttcttccataaagaatgaggccgaaaaagaaaggcttgttttcaaaagacccagtaattttacgtcatcagccaattctgttgattatgtcccaactaactttttggaaggattatcaccgctagcgcagagtgttctatcaacccataaagggttgaatgattccattaacatcgagaaaaaaagtgaaatagtaagcagaccggaggcaaagcataagctcgaaagtgtgacttcgaatgctggtaacttgagtttcaacgacaattcttccaacaagaaaaccaaaacttcaacaggtgtaaccatgacacaagcgaatttagcggaacaatatttgaatgatcttaaaaatattttagatattgttggatttgaccaaaactctgctgaaattggaaatatcgagtactggctccagttgccaaataaaaaattcgttttaactacaaactgcttaaccaaattacaaatgacaattaaaaatattaccgataacccacagctatcgaactcaatcgaaataacatggcttttgagattgcttgatgtgatggtttgtaatataaagttcagtaaaagctctttaaagatgggtttagatgattctatgttacgatatattgctttgctttctacaattgtactattcaatatttttttactgggtaagaatgacagcaacttacatcgggaatcatacatcatggaaccggtgaattttttaagcgacttgatagaatctctaaaaatattaacaattgaatatggttctttgaagatagaatttgacactttccaggaggccctagaattgctaccgaaatacatacgtaacggcccttttctggatgataatgtcacggcaaagcttgtgtacatctttagcgacttgctgatgaataatgacattgaagcaactacgaatatccaatttcaaagtttttgggataatgtgaagagaatcagctctgatattttagtttcattattcggtagttttgatcaacagagaggatttattatagaagaactactatctcatatcgaaaagcttcccactaagagaatacaaaaaaaactaagaaaagttggtaaccaaaacatttatatcactgattttacctttactttaatgtcaatgttagagaatattaattgctactccttctgtaatcagatgaaggatattgcaccagagaatattgatctattaaagaacgaatacaaaaagcaagaagaatttctttttaacattgttgagcatataaatgacacaatactggaaaggtttttcaagaacccgtccgctttaaggtatgtaattgacaactttgtccaagatctattattgctaatttcctcccctcagtggcctgtaacagaaaaaatactaagctctttgttaaagagacttctaagtgtatacagcccatccatgcaagtttctgcaaacattgaaacaatatgtttacaacttatagggaatattggttctacaatttttgatattaaatgctcaactagagaccatgaagataacaacttgattaaaatgattaattaccccgaaactttgccgcatttttttaaatcatttgaagaatgcattgcatataatgaaacgatcaaatgccgtcgttctgcaacaagattcctttggaatttaaggctcggtacgatcttgatattagaagagtatacaaaggatgccaaagaacaaattataaccgttgacaatgaattgaaaaaaatattggagcagataaaagatggtggacttggacccgaattagagaacagagaagcagattttagtacgattaaattggattatttttctattttgcacgcctttgaactactgaatctatacgatccatacttgaagttgatattatcacttctagccaaggataaaatcaaactgagatcgactgctattaaatgtctctcgatgttggcttcaaaagacaaagtgatactttcaaacccaatggttaaagaaactattcaccggcgtttaaacgactcatctgcatctgtcaaggatgccattctagatttggtcagtattaattcttcatacttcgaattttatcaacaaattaacaacaactataacgatgatagcataatggtaagaaaacatgtgttaagaattaatgaaaaaatgtacgacgagacgaacgacatcgtcacgaaggtatacgtaatagcaagaatcctaatgaaaatagaagacgaggaggacaatataattgatatggctaggctgattttattaaatagatggatattaaaggtacatgaagtattggaccagcccgaaaagttgaaagaaatttcttcttcagtcctactagtaatgtcccgtgtggctataatgaatgagaaatgctcccaacttttcgacttgtttctcaacttttatctcctaaacaaagaagcgcattcaaaagaagcatacgataaaatcactcacgttctaaccattcttaccgactttttggtacaaaaaattgtcgagctcaactcagatgacacaaatgaaaagaattcgattgttgataaacaaaattttttaaaccttttggcgaagtttgctgattctactgtgtcatttttgactaaagaccacattacagcattgtatccttatatggtatcggacgaaaaatctgacttccactattatatcttgcaagtctttagatgcacttttgaaaaattggccaactttaaacagaaatttttgtatgacttagagacgacccttttgagtaggctaccaaagatgaatgtaagagagatagatgaagctatgcctcttatctggtctgttgccactcatcgtcatgatactgctagagtagctaaagcatgttcatcctgtctttcccatttacatccatatataaataaggcaaataacgaggaagctgccattgtagttgacggaaaattgcaaaggctgatatatttatccaccggttttgccaggttctgctttcctaaaccctccaatgataaaattgcatttttacaagaaggtgaaaccctgtatgaacatattaccaaatgcctacttgtactatctaaagacaaaattacacacgtaataagaagggttgctgtgaaaaatctcactaaattatgtggaaatcatccaaaactattcaattcaagacacgttctacatttactggacaaagaatttcagagcgatcagctagatattaaactagtaattctagaaagtttatatgatctttttctactggaagaaaggaagtcagtgagaaacactggcgttaatagcactttgtcttcgaactccattttgaaaaagaaattactgaaaacgaatagggtagagtttgcaaatgatggagtatgttcagcgttggctactagatttttagacaatattctccaactatgtctcctacgtgatctaaagaattctctcgtagctattcgattattaaagttgattttgaaatttggttacacaaatccctctcattcaattccaactgtaattgctttatttgcctctactagccagtatattcgtcatgtcgcctatgagttgttagaagatctttttgagaaatacgaaacgctagtattcagtagtttatctcgaggggttacaaaagctatacattattctattcatacagatgagaagtattattacaagcacgatcattttttgtctttacttgaaaaattatgtggaactggaaaaaaaaatggcccaaagttctttaaagttctgaagagaatcatgcaatcctatttagatgatatcaccgatttaacatcaacaaatagtagtgttcaaaagtccattttcgttctctgcactaacatttcgaatatcacatttgtttctcagtacgatttggtgtccctactcaaaaccattgatttaactacagatagattaaaagaggttatcatggatgaaataggtgacaatgtttcatcgctatccgtatcagaagaaaagctcagtggaataattttaatacagttaagcttacaggatttgggtacttatctactgcacttatacgggttaagggatgatgtgcttttattagatattgtagaagaatcagaattgaagaacaaacaactccctgcaaagaagccggatatcagtaagttttccgcacagttggagaatattgaacagtattcatcaaatggcaagcttcttacatattttagaaaacacgtgaaggatacgtaa

SEQ ID NO: 2148 - DNA, 4482 bp, Artificial Sequence
  Description of Artificial Sequence: Synthetic polynucleotide
atgagttacccagggaaagacaagaatattcctggaagaataatagaggccttggaagacttgcctttgagttatttggttcctaaggatgggttagccgcgttggtaaatgccccaatgagagtttctttaccttttgacaagactatctttaccagcgctgatgatggcagagatgttaatataaatgttttaggtacagctaacagcactacttcttccataaagaatgaggccgaaaaagaaaggcttgttttcaaaagacccagtaattttacgtcttctgccaattctgttgattatgtcccaactaactttttggaaggattatctccgttagcgcagagtgttttatctacccataaagggttgaatgattccattaacatcgagaaaaaaagtgaaatagtaagcagaccggaggcaaagcataagctcgaaagtgtgacttccaatgctggtaacttgagtttcaacgacaattcttccaacaagaaaaccaaaacttctacaggtgtaaccatgacacaagcgaatttagcggaacaatatttgaatgatcttaaaaatattttagatattgttggatttgaccaaaactctgctgaaattggaaatatcgagtactggctccagttgccaaataaaaaattcgttttaactacaaactgcttaaccaaattacaaatgacaattaaaaatattaccgataacccacagttatctaactctatcgaaataacatggcttttgagattgcttgatgtgatggtttgtaatataaagttcagtaaaagctctttaaagatgggtttagatgattctatgttaagatatattgctttgctttctacaattgtattattcaatatttttttattgggtaagaatgacagcaacttacatagagaatcttacatcatggaaccggtgaattttttaagcgacttgatagaatctttgaaaatattaacaattgaatatggttctttgaagatagaatttgacactttccaggaggccttggaattgttaccgaaatacatacgtaacggcccttttttggatgataatgtcacggcaaagcttgtgtacatctttagcgacttgttgatgaataatgacattgaagcaactacgaatatccaatttcaaagtttttgggataatgtgaagagaatcagctctgatattttagtttctttattcggtagttttgatcaacagagaggatttattatagaagaattattatctcatatcgaaaagcttcccactaagagaatacaaaaaaaattgagaaaagttggtaaccaaaacatttatatcactgattttacctttactttaatgtccatgttagagaatattaattgctactccttctgtaatcagatgaaggatattgcaccagagaatattgatttattaaagaacgaatacaaaaagcaagaagaatttctttttaacattgttgagcatataaatgacacaatattggaaaggtttttcaagaacccgtccgctttaaggtatgtaattgacaactttgtccaagatttattattgttaatttcctcccctcagtggcctgtaacagaaaaaatattaagctctttgttaaagagacttttaagtgtatacagcccatccatgcaagtttctgcaaacattgaaacaatatgtttacaacttatagggaatattggttctacaatttttgatattaaatgctctactagagaccatgaagataacaacttgattaaaatgattaattaccccgaaactttgccgcatttttttaaaagttttgaagaatgcattgcatataatgaaacgatcaaatgccgtcgttctgcaacaagattcctttggaatttaaggctcggtacgatcttgatattagaagagtatacaaaggatgccaaagaacaaattataaccgttgacaatgaattgaaaaaaatattggagcagataaaagatggtggacttggacccgaattagagaacagagaagcagattttagtacgattaaattggattatttttctattttgcacgcctttgaattattgaatctttacgatccatacttgaagttgatattatctcttttagccaaggataaaatcaaattgagatctactgctattaaatgtctctctatgttggcttccaaagacaaagtgatactttccaacccaatggttaaagaaactattcacagacgtttaaacgactcttctgcatctgtcaaggatgccattttagatttggtcagtattaattcttcctacttcgaattttatcaacaaattaacaacaactataacgatgatagcataatggtaagaaaacatgtgttaagaattaatgaaaaaatgtacgacgagacgaacgacatcgtcacgaaggtatacgtaatagcaagaatcttgatgaaaatagaagacgaggaggacaatataattgatatggctaggttgattttattaaatagatggatattaaaggtacatgaagtattggaccagcccgaaaagttgaaagaaatttcttcttctgtcttgttagtaatgtcccgtgtggctataatgaatgagaaatgctcccaacttttcgacttgtttctcaacttttatctcttgaacaaagaagcgcattctaaagaagcatacgataaaatcactcacgttttaaccattcttaccgactttttggtacaaaaaattgtcgagctcaacagtgatgacacaaatgaaaagaattctattgttgataaacaaaattttttaaaccttttggcgaagtttgctgattctactgtgtcctttttgactaaagaccacattacagcattgtatccttatatggtaagtgacgaaaaatctgacttccactattatatcttgcaagtctttagatgcacttttgaaaaattggccaactttaaacagaaatttttgtatgacttagagacgacccttttgagtaggttaccaaagatgaatgtaagagagatagatgaagctatgcctcttatctggtctgttgccactcatcgtcatgatactgctagagtagctaaagcatgttcttcctgtctttcccatttacatccatatataaataaggcaaataacgaggaagctgccattgtagttgacggaaaattgcaaaggttgatatatttatccaccggttttgccaggttctgctttcctaaaccctccaatgataaaattgcatttttacaagaaggtgaaaccttatatgaacatattaccaaatgcttgcttgtattatctaaagacaaaattacacacgtaataagaagggttgctgtgaaaaatctcactaaattatgtggaaatcatccaaaattattcaattctagacacgttttgcatttattagacaaagaatttcagagcgatcagttagatattaaattagtaattttggaaagtttatatgatctttttttattggaagaaaggaagtctgtgagaaacactggcgttaatagcactttgtcttccaactccattttgaaaaagaaattattgaaaacgaatagggtagagtttgcaaatgatggagtatgttctgcgttggctactagatttttagacaatattctccaattatgtctcttacgtgatttgaagaattctctcgtagctattagattattaaagttgattttgaaatttggttacacaaatccctctcattctattccaactgtaattgctttatttgcctctactagccagtatattcgtcatgtcgcctatgagttgttagaagatctttttgagaaatacgaaacgttggtattcagtagtttatctagaggggttacaaaagctatacattattctattcatacagatgagaagtattattacaagcacgatcattttttgtctttacttgaaaaattatgtggaactggaaaaaaaaatggcccaaagttctttaaagttttgaagagaatcatgcaatcctatttagatgatatcaccgatttaacatctacaaatagtagtgttcaaaagtccattttcgttctctgcactaacatttctaatatcacatttgtttctcagtacgatttggtgtccttactcaaaaccattgatttaactacagatagattaaaagaggttatcatggatgaaataggtgacaatgtttcttctttatccgtatctgaagaaaagctcagtggaataattttaatacagttaagcttacaggatttgggtacttatttattacacttatacgggttaagggatgatgtgcttttattagatattgtagaagaaagtgaattgaagaacaaacaactccctgcaaagaagccggatatcagtaagttttccgcacagttggagaatattgaacagtattcttccaatggcaagcttcttacatattttagaaaacacgtgaaggatacgtga

SEQ ID NO: 2149 - DNA, 1446 bp, Saccharomyces cerevisiae
atgggtatttttcaatcaatagaagaagcaaataatacttctgagagattgctgaggtctgagattaaaaatagtcatggagaatttgaaaaattcgattttgatacagaagaatacgaaattaaccctaaaaggaagttaagattagtcagcaggataaacccaaatgctggacatctaaggaaatctaagtcctgctttactgtagatgagcatgttgacgaaacgcgttgtcagaaacctgtgatgaagtcgccgttcatgagtaatgtcgatgatgagatcaagaaaaagagagagacaattacaaagatgacactagaaattgaacatcatgaattgagccagaatattagaaaaccaactgatgatttgcttcctgatagcacgtatcagccttaccacaagaaaatgttgaagcaagaaaatagaatgattcaatcggacatcgtaaatggtgaaaatgaagcagacaggctttcattaatttcagacagactgggtatgttgaattgggaagtaacattacagaaggttactaaaataaatgaccccactgacgagaatgaaatggagactaaacgttaccaaactaaagagctgattgattcaatgttacataaatttgaatctatgaaaaaaaaaagccgcaatttagctagaaggccagcctcaagtgattcattgttgaaattggttagtggcaaagattggcccaagatatatactcgaatcgatcgaacttttattccagattacgcaagctcctctgacgaagaagaagaaaaaataaccgttgaggaaataagggagagacgcctaaagaagagagagcagcaatgcggtggttccattatagtactgctgagcgatcatcaatcacaaaagggaatgacacggtttgctatcgtagctgagccgctccgaaaaccgtatttgattaaaacctccactaaagagagaaattcatggaaaaacaaagttcccacaaatccaaaaaaattcaagaaagctcctcgaatatcaacgcaaattgctgtgaaaagaagaagggaagtcatcccgttaacgatggaggtggaaccagaagtcattcgggatataaggcaagatacacaaaagtctatgaaactgaatgttaaagcggaggaaatatctgtgacagagactgtcaaatcaaaagaaatgaatgccttaaggaacaatgctgcatctataagtccaactctttcagagaaggcacctttaggttcaatttcatcttgcactgcatctcagatttcacaaaggtcttctgagaatgtgggtgctattattaacaatatcaacccaaacttagcaatagtgccctcttgtaacgaaaagacctttgtaaaaacacacaatggaatgaaaactaactcaggtattaatattttgcctgtccgcaagaaaaaaaaggtttag

SEQ ID NO: 2150 - DNA, 1446 bp, Artificial Sequence
  Description of Artificial Sequence: Synthetic polynucleotide
atgggtatttttcaaagtatagaagaagcaaataatacttctgagagattgttgaggtctgagattaaaaatagtcatggagaatttgaaaaattcgattttgatacagaagaatacgaaattaaccctaaaaggaagttaagattagtcagcaggataaacccaaatgctggacatttaaggaaatctaagtcctgctttactgtagatgagcatgttgacgaaacgcgttgtcagaaacctgtgatgaagagcccgttcatgagtaatgtcgatgatgagatcaagaaaaagagagagacaattacaaagatgacattagaaattgaacatcatgaattgagccagaatattagaaaaccaactgatgatttgcttcctgatagcacgtatcagccttaccacaagaaaatgttgaagcaagaaaatagaatgattcaatctgacatcgtaaatggtgaaaatgaagcagacaggctttctttaatttctgacagattaggtatgttgaattgggaagtaacattacagaaggttactaaaataaatgaccccactgacgagaatgaaatggagactaaacgttaccaaactaaagagttgattgattctatgttacataaatttgaatctatgaaaaaaaaaagccgcaatttagctagaaggccagcctccagtgattctttgttgaaattggttagtggcaaagattggcccaagatatatactagaatcgatagaacttttattccagattacgcaagctcctctgacgaagaagaagaaaaaataaccgttgaggaaataagggagagacgcttgaagaagagagagcagcaatgcggtggttccattatagtattgttgagcgatcatcaatctcaaaagggaatgacaagatttgctatcgtagctgagccgctcagaaaaccgtatttgattaaaacctccactaaagagagaaattcttggaaaaacaaagttcccacaaatccaaaaaaattcaagaaagctcctagaatatctacgcaaattgctgtgaaaagaagaagggaagtcatcccgttaacgatggaggtggaaccagaagtcattagagatataaggcaagatacacaaaagtctatgaaattgaatgttaaagcggaggaaatatctgtgacagagactgtcaaatctaaagaaatgaatgccttaaggaacaatgctgcatctataagtccaactctttctgagaaggcacctttaggttccatttcttcttgcactgcatctcagatttctcaaaggtcttctgagaatgtgggtgctattattaacaatatcaacccaaacttagcaatagtgccctcttgtaacgaaaagacctttgtaaaaacacacaatggaatgaaaactaacagtggtattaatattttgcctgtccgcaagaaaaaaaaggtttga

SEQ ID NO: 2151 - DNA, 1476 bp, Saccharomyces cerevisiae
atggtatatcgtaacaggtcaaagagcgttttatctacacacagcaagaagagcgacgataaggcccactataaatcacgttcgaaaaagaaatcaaaaagcaggagcaagaagaggttaagaatctactggagatacatatctattgtatggatcttatggttaggattaatatcttattatgaatcagtggttgtgaagagagcaatgaagaagtgccaatggtcgacttgggaggattggcctgaaggcgctgaaagtcatagggtgggtttatttgcagacccacaaataatggacgaatattcatatcctgggaggcctcaaatagttaattattttacaagagtgattgttgaccattatcacaggagaaattggaaatatgtccagtattacttggatcctgatagcaattttttcctaggtgatctatttgatggagggagaaactgggatgataagcaatggattaaagagtacacacgattcaaccaaatattccccaagaagccactgagaagaacggtcatgtctttaccaggtaatcacgatattggttttggagacacagttgttgaatcgagtttacagagattttctagttactttggagaaacttcctcctcattagacgctggaaatcatacctttgtacttttagatacaatttcgctttctgataaaacaaatccgaatgtctcgagggttcctagacagtttttggataattttgcaatgggttcacatccgcttcctagaattcttttaactcacgttccattatggagggatccagaacagcaaacgtgcggtcagctacgtgaatccaaagaaccttttcctattcagaaagggcaccagtaccagacagttatagaaaacgatatatcacaagaaattttaacgaaaattcaaccagaaatattattttccggggatgatcatgaccattgtcagatatcacactcatatccgtttcaggggaaaactaaaaatgctcaagaaattacagtaaagtcatgtgcaatgaacatggggatcagtaggcctgctattcaattgctctccttatataatccttcagatttgacaatggtaaatgccggcggagagtatgcatcaaaaacttaccaaacagagctatgctatatgccagatccctataaggcaatcagaatgtacctatggggattattattctctgctgcctttatcgcatacatgcattttttcccaaaatcttttaataatcgcgtagcaaccataatgaacagagtatttacacgacctgatggtaacacctcagatttgccattacctacaagtatttccaaatcgaaatccaaaaaatcattgacacatagtaaatacgctgtgaatgatacgcgttcgatcaaacaatttctagttaatgcaattgtcctttttgtttctgtgatgcccatttttatttatttttatactgtagtctag

SEQ ID NO: 2152 - DNA, 1476 bp, Artificial Sequence
  Description of Artificial Sequence: Synthetic polynucleotide
atggtatatcgtaacaggtctaagagcgttttatctacacacagcaagaagagcgacgataaggcccactataaatctcgttctaaaaagaaatctaaaagcaggagcaagaagaggttaagaatctactggagatacatatctattgtatggatcttatggttaggattaatatcttattatgaatctgtggttgtgaagagagcaatgaagaagtgccaatggtctacttgggaggattggcctgaaggcgctgaaagtcatagggtgggtttatttgcagacccacaaataatggacgaatattcttatcctgggaggcctcaaatagttaattattttacaagagtgattgttgaccattatcacaggagaaattggaaatatgtccagtattacttggatcctgatagcaattttttcttgggtgatttatttgatggagggagaaactgggatgataagcaatggattaaagagtacacaagattcaaccaaatattccccaagaagccattgagaagaacggtcatgtctttaccaggtaatcacgatattggttttggagacacagttgttgaaagtagtttacagagattttctagttactttggagaaacttcctcctctttagacgctggaaatcatacctttgtacttttagatacaatttctctttctgataaaacaaatccgaatgtctccagggttcctagacagtttttggataattttgcaatgggttctcatccgcttcctagaattcttttaactcacgttccattatggagggatccagaacagcaaacgtgcggtcagttgcgtgaatccaaagaaccttttcctattcagaaagggcaccagtaccagacagttatagaaaacgatatatctcaagaaattttaacgaaaattcaaccagaaatattattttccggggatgatcatgaccattgtcagatatctcactcctatccgtttcaggggaaaactaaaaatgctcaagaaattacagtaaagagttgtgcaatgaacatggggatcagtaggcctgctattcaattgctctccttatataatccttctgatttgacaatggtaaatgccggcggagagtatgcatccaaaacttaccaaacagagctctgctatatgccagatccctataaggcaatcagaatgtacttatggggattattattctctgctgcctttatcgcatacatgcattttttcccaaaatcttttaataatcgcgtagcaaccataatgaacagagtatttacaagacctgatggtaacacctctgatttgccattacctacaagtatttccaaatctaaatccaaaaaatctttgacacatagtaaatacgctgtgaatgatacgcgttccatcaaacaatttttggttaatgcaattgtcctttttgtttctgtgatgcccatttttatttatttttatactgtagtctga

SEQ ID NO: 2153 - DNA, 204 bp, Saccharomyces cerevisiae
atgaacaagagatataaattataccgggtgtggtattactatgctcaccaaacagtttgcataacctctactggatttgcattatgttttgtggtccaagctaaaactgcaggactgggcgtaacaccaattacttcactatacggggacaaaaaagaacacctaggtaagttgttggttcctttagttttatatcaaatttag

SEQ ID NO: 2154 - DNA, 204 bp, Artificial Sequence
  Description of Artificial Sequence: Synthetic polynucleotide
atgaacaagagatataaattatacagagtgtggtattactatgctcaccaaacagtttgcataacctctactggatttgcattatgttttgtggtccaagctaaaactgcaggattgggcgtaacaccaattacttctttgtacggggacaaaaaagaacacttgggtaagttgttggttcctttagttttatatcaaatttga

SEQ ID NO: 2155 - DNA, 693 bp, Saccharomyces cerevisiae
atggaagataaattagacagatactacacaaatgtgctttcaaatgctgaaaaggataaacacacaactgtcgatagcgatgacaaaagtagtggcgaggaaaatttagatgaactacttaatgaattggatagagaattagacgaggatcatgaatttttgagtgcttatcggtcggagaggctacaacaaatatcagatcatttaaaacaggtcaagaagaatgttgaggatgacggatacggtagattgcagtgcattgataacgaggcagatgctatccaaatatgtacaaagactactatggtggtcatacattttgaattagaaacattcggtaagtgccagtatatgaatgaaaaactggaaaacttggcaaagaggtatctaaccacgagatttattaaagtaaacgtccaaacatgtccatttttggttaataaactgaatattaaagtacttccgtttgtagttggatacaagaatggcctagaaaaagttcgctacgtaggatttagtaaactgggaaatgaccctaatgggtttgatattaggaggctagagcaatctttagcccattcaggtgttatagaagacacattcgaaataagaaagcattcatctgtgaatacggaacgcttcgcttctacaaatcatgatagaagtgaaagtgatagtgatttagatatataa

SEQ ID NO: 2156 - DNA, 693 bp, Artificial Sequence
  Description of Artificial Sequence: Synthetic polynucleotide
atggaagataaattagacagatactacacaaatgtgctttctaatgctgaaaaggataaacacacaactgtcgatagcgatgacaaaagtagtggcgaggaaaatttagatgaattgcttaatgaattggatagagaattagacgaggatcatgaatttttgagtgcttatagaagtgagaggttacaacaaatatctgatcatttaaaacaggtcaagaagaatgttgaggatgacggatacggtagattgcagtgcattgataacgaggcagatgctatccaaatatgtacaaagactactatggtggtcatacattttgaattagaaacattcggtaagtgccagtatatgaatgaaaaattagaaaacttggcaaagaggtatttgaccacgagatttattaaagtaaacgtccaaacatgtccatttttggttaataaattgaatattaaagtacttccgtttgtagttggatacaagaatggccttgaaaaagttcgctacgtaggatttagtaaattaggaaatgaccctaatgggtttgatattaggaggttagagcaatctttagcccattctggtgttatagaagacacattcgaaataagaaagcattcttctgtgaatacggaacgcttcgcttctacaaatcatgatagaagtgaaagtgatagtgatttagatatatga

SEQ ID NO: 2157 - DNA, 885 bp, Saccharomyces cerevisiae
atgaacacgaatcagtccaatccgaatacagatttaacagatgatgccaatatagaacatacgttgcatcggctgctcactcaggcaaataatcattttgatgatacagtaaagattgatgggcagagtttagatttgggaaaggatctcgaacaagttatgatggataatttagactgcactgatatttttgattccgacatcgcttctcagaaacacctaacattggaatctttatttaacgatgaacacaacaccgattcgagcacacttttggaaatgcagagaagtgctaatgatagcctagttggtattgatctcgataggcataaaaagggttatactggcaaggcatcattagataaaagtacaaaccaaaataacgtacataaacctgataaagaacaaaagaactataagatagataaacccaccatcaagaagaaaaaatcccttttgaaaaccacaaatgaacccatgttatcccctgcatccctatcaccttcatcttcgttagcttcatccgacgctaatgaatcccacctaaaaatagaatccatgattactgatataacatctaaaatagattctgcaagacaagacattgtatctgcaacgaagcctgctaagttcacaaatgagtttacaataagtcaaatttcggaaatgaaggcaagaataattaatactcataaattgctgctcaatttcaattttattaaagaaggttacgcgagatcttgtattcaattgaaaaaatctatggactctttaaaggatagtgaaattcacagagcacatttattggttgagaatgatgacttgaagcaacaaatcctagaacttactcaaaaactcaatgaaaaatcatccaaggaaagttaa

SEQ ID NO: 2158 - DNA, 885 bp, Artificial Sequence
  Description of Artificial Sequence: Synthetic polynucleotide
atgaacacgaatcagtccaatccgaatacagatttaacagatgatgccaatatagaacatacgttgcatcgtttgctcactcaggcaaataatcattttgatgatacagtaaagattgatgggcagagtttagatttgggaaaggatctcgaacaagttatgatggataatttagactgcactgatatttttgattccgacatcgcttctcagaaacacttgacattggaatctttatttaacgatgaacacaacaccgattctagcacacttttggaaatgcagagaagtgctaatgatagcttagttggtattgatctcgataggcataaaaagggttatactggcaaggcatctttagataaaagtacaaaccaaaataacgtacataaacctgataaagaacaaaagaactataagatagataaacccaccatcaagaagaaaaaatcccttttgaaaaccacaaatgaacccatgttatcccctgcatccttatctccttcttcttctttagcttcttccgacgctaatgaatcccacttgaaaatagaatccatgattactgatataacatctaaaatagattctgcaagacaagacattgtatctgcaacgaagcctgctaagttcacaaatgagtttacaataagtcaaatttctgaaatgaaggcaagaataattaatactcataaattgttgctcaatttcaattttattaaagaaggttacgcgagatcttgtattcaattgaaaaaatctatggactctttaaaggatagtgaaattcacagagcacatttattggttgagaatgatgacttgaagcaacaaatcttggaacttactcaaaaactcaatgaaaaatcttccaaggaaagttga

SEQ ID NO: 2159 - DNA, 540 bp, Saccharomyces cerevisiae
atgaaatcatttcaaaaatcttatgaattcgattacccatgggagaaagtcaccacggcgaactggatgaaatatccaaacaagatctccacacacgttattgcagtcgatgtgctccgccgagagctcaaagaacatggcgatgtacttcttacagaacggctgataaccatacgtcagaacacccctcactggatgtccattttagtggggaacactaatttagcatacgtgcgagaggtctccaccgttgatcgaagggacagatctttaactatgaggagttgcaatatgaccttcccgcatattttgaagtgttacgaaaccgtacgttatgttcctcatccgaaaaatccatcgaatgtgactcttttcaagcaggatgcaaagtttctgtctggtgttccgaccaaaacctttagtgagaaagtagaaaactggggcgttaaacgttttagtgataacgcggtgaaggggaaagtcgggtttgatagtattctagcaatgttcaacgatatctggaaaaatgctaacgaataa

SEQ ID NO: 2160 - DNA, 540 bp, Artificial Sequence
  Description of Artificial Sequence: Synthetic polynucleotide
atgaaaagttttcaaaaatcttatgaattcgattacccatgggagaaagtcaccacggcgaactggatgaaatatccaaacaagatctccacacacgttattgcagtcgatgtgctccgcagggagctcaaagaacatggcgatgtacttcttacagaaagattaataaccatacgtcagaacacccctcactggatgtccattttagtggggaacactaatttagcatacgtgagagaggtctccaccgttgatagaagggacagatctttaactatgaggagttgcaatatgaccttcccgcatattttgaagtgttacgaaaccgtacgttatgttcctcatccgaaaaatccatccaatgtgactcttttcaagcaggatgcaaagtttttatctggtgttccgaccaaaacctttagtgagaaagtagaaaactggggcgttaaacgttttagtgataacgcggtgaaggggaaagtcgggtttgatagtattttggcaatgttcaacgatatctggaaaaatgctaacgaatga

SEQ ID NO: 2161 - DNA, 2634 bp, Saccharomyces cerevisiae
atggacactgtcggtacggacgcagcagccgcgagcattaatgagcgtcgctttgcccagtccacttcaccaaaagttagtgtgaagtcacaggactcgctgtttctgatcacttactccaacatgcagcagacagtggtacaagcgtctttggcggaccggtacccttcgctaaagaagcttaacatcctactttacatagatatccctacgatcgactactacaacgatgagatgactcataacaagctttccagactgaataaacggtttaagctgcatcggcttagaaattcgatcgcgcaaagtttttccaacacatctactgcggaagataacgataagttttgggaggagttgaaaagtctgatcagctctcgcagcacaccggaaaacaagtttgatctgaatgtactggtgtcgtcttcggggtctttacgttacgtggagaccataagatttttggttgaaaaattgtttaattctttcaaagacttgtatgttcaaaagaaactaaacctatgtttccagatcaacgtttctcccacctctctcaagtggttttctactttcctgaacgcagaactgcttaatttaaaaatcattaattggcagaatattggttctttcactaagacaatccagaactccaagtcactcccgttcaaagagtactacaccaagttgaacgagaaattcaccggctcaaaccagagcaatggtagcatgcaagaccagactgtcttggattccatagttattgtcacgaatagcacgggggtaaaagcactgctgactttgttgtcagaccaccctctcaccagccttatctcccaggaatcaataaaagcgctacatgaatattcagatgctgttaacgaagataagggcgacgaccagagcaacacaagtttgaaaagaaactcttcgtcgttgttgaattttcaaaactcggttttaacctccaataaagacaagtccgtcagaattaggtcgttgtctatcaacagaaaatccaacagggcacatatgttcaaaacgaacgaatccatcacaactatcccatcaacgtcaatcaacaatcttattggtcaggaatccaacctacgcaagcagccttcgggaactgcactgcatttacaatcgcatctgcatccacattcccgttcacaatcctattctagttctaatatgtccagatcgccttctcccttcccctacggaaagacaccatcaaacgacgaactagtatatgacgagttaaacaaccaaatcaacgaagtgcaagaccgtgctaagaatgaggaaattgtcctgtacaacaataataattatgacgattatacaaaagaacgaggggaacaagagcaggatagaacctcatacgcagatgaatatggctttaattacgatgatgaagaaggtggaaatgaagacaactatgatgatgatgaagacgatgatgacgatgatgacgatgacgatgagagtgacgatgaaggtttgagcttttacgctccaagcattttgtcccgctctggttcgagcacagacgtgttatcctccggaatagattctatggcaaaaaattcgaaggaaacaaggggtaggtttaggtccttgagtttaatggaccctgctctgcaaaagccgttcaaccagaaatttccaaacagccaacaacccgattctgcaggggcttcatcacctaaaagatcgacctcttcaaaccattttactaacgtctacgtgcacgatggtgattttgacgggacagacactatcaacaacaaaaagaatctatcgtctgcaacgcttattaaaaggaaatctttgatgaacagaaacttggctccttctattagtaatggattgatacctccggaatttatttcccgaatatctacgccctctacaagcgcaagtagttcaaactcctcgttgaatgacatgtctacagtatcaaacgcattttccaaattattaaatgacacaagtaagaagcaaaaattcttgaattcaccaattccacaacatacacaacaggcatctccattactaatgagaaataattcaaacagtaacttgctatttgagaagaatttgatcaacaagtcatttgaagaactgagaagacaaccatcagttaacctttttagcaccttgatgaatggtaacatggaaaagaatggtttggcactaaacttcaagtccagaacgcctacagatgcgttgatggcgaatagcattaaaaatagtaacaattccagtcataggttactaaatctcgaggaagaagaccaaatcatgtctggatctctccccaaagaacgcgaggacgataacgattcgactaatagcacaatagtaccgaatcacccagacaatgataactataatgataatgataacgacaataatactggtataaattccaataatttcaatctaaatctctatgatgacaatgatagtgcaggctttacagatgtaacaactgaaggagtgaaatactcaaactcgaattctacagtcaccaaacccgtttataaaaaagccgtcaccctggatttatacggcgaagatgatatggataacatgggaggatgggtattaggaggtaatgcccggtaa

SEQ ID NO: 2162 - DNA, 2634 bp, Artificial Sequence
  Description of Artificial Sequence: Synthetic polynucleotide
atggacactgtcggtacggacgcagcagccgcgagcattaatgagcgtcgctttgcccagtccacttctccaaaagttagtgtgaagtctcaggactctttatttttgatcacttactccaacatgcagcagacagtggtacaagcgtctttggcggacagatacccttctttgaagaagcttaacatcttactttacatagatatccctacgatcgactactacaacgatgagatgactcataacaagctttccagattgaataaaagatttaagttgcatagacttagaaattccatcgcgcaaagtttttccaacacatctactgcggaagataacgataagttttgggaggagttgaaaagtttaatcagctctcgcagcacaccggaaaacaagtttgatttgaatgtattggtgtcttcttctgggtctttacgttacgtggagaccataagatttttggttgaaaaattgtttaattctttcaaagacttgtatgttcaaaagaaattgaacttgtgtttccagatcaacgtttctcccacctctctcaagtggttttctactttcttgaacgcagaattgcttaatttaaaaatcattaattggcagaatattggttctttcactaagacaatccagaactccaagtctctcccgttcaaagagtactacaccaagttgaacgagaaattcaccggctctaaccagagcaatggtagcatgcaagaccagactgtcttggattccatagttattgtcacgaatagcacgggggtaaaagcattattaactttgttgagtgaccaccctctcaccagccttatctcccaggaaagtataaaagcgttgcatgaatattctgatgctgttaacgaagataagggcgacgaccagagcaacacaagtttgaaaagaaactcttcttctttgttgaattttcaaaactctgttttaacctccaataaagacaagtccgtcagaattaggtctttgtctatcaacagaaaatccaacagggcacatatgttcaaaacgaacgaatccatcacaactatcccatctacgtccatcaacaatcttattggtcaggaatccaaccttcgcaagcagccttctggaactgcattgcatttacaatctcatttgcatccacattcccgttctcaatcctattctagttctaatatgtccagatctccttctcccttcccctacggaaagacaccatctaacgacgaattggtatatgacgagttaaacaaccaaatcaacgaagtgcaagaccgtgctaagaatgaggaaattgtcttgtacaacaataataattatgacgattatacaaaagaaagaggggaacaagagcaggatagaacctcttacgcagatgaatatggctttaattacgatgatgaagaaggtggaaatgaagacaactatgatgatgatgaagacgatgatgacgatgatgacgatgacgatgagagtgacgatgaaggtttgagcttttacgctccaagcattttgtcccgctctggttccagcacagacgtgttatcctccggaatagattctatggcaaaaaattctaaggaaacaaggggtaggtttaggtccttgagtttaatggaccctgctttacaaaagccgttcaaccagaaatttccaaacagccaacaacccgattctgcaggggcttcttctcctaaaagatctacctcttccaaccattttactaacgtctacgtgcacgatggtgattttgacgggacagacactatcaacaacaaaaagaatttatcttctgcaacgcttattaaaaggaaatctttgatgaacagaaacttggctccttctattagtaatggattgatacctccggaatttatttccagaatatctacgccctctacaagcgcaagtagtagtaactcctctttgaatgacatgtctacagtatccaacgcattttccaaattattaaatgacacaagtaagaagcaaaaattcttgaattctccaattccacaacatacacaacaggcatctccattattgatgagaaataatagcaacagtaacttgttatttgagaagaatttgatcaacaagagctttgaagaattgagaagacaaccatctgttaacctttttagcaccttgatgaatggtaacatggaaaagaatggtttggcattgaacttcaagtccagaacgcctacagatgcgttgatggcgaatagcattaaaaatagtaacaattccagtcataggttattgaatctcgaggaagaagaccaaatcatgtctggatctctccccaaagaacgcgaggacgataacgattctactaatagcacaatagtaccgaatcacccagacaatgataactataatgataatgataacgacaataatactggtataaattccaataatttcaatttgaatctctatgatgacaatgatagtgcaggctttacagatgtaacaactgaaggagtgaaatactctaacagtaattctacagtcaccaaacccgtttataaaaaagccgtcaccttggatttatacggcgaagatgatatggataacatgggaggatgggtattaggaggtaatgccagatga

SEQ ID NO: 2163 - DNA, 1641 bp, Saccharomyces cerevisiae
atgtcattgcaattgttgaatccgaaggctgaatcgttgagaagggatgcggctttgaaggttaacgtcacatctgctgagggcttacaatccgtcctagagaccaacttgggccctaagggcacgctaaagatgcttgtggatggtgctggtaacatcaagctgaccaaggacggtaaagtgttgctgaccgagatgcagatccagtcgcctacagcggtactgattgctagggcagctgccgcgcaggatgaaatcacgggcgatgggaccacgacggttgtgtgtcttgtgggtgaattgcttagacaagcgcaccgtttcattcaagagggcgtgcatccgcggatcatcactgatgggtttgagattgcgcggaaggagtccatgaaatttttggacgaattcaagatcagtaagacgaacctttccaatgatagagagttccttctgcaagtggcccggtcgtcgctgctaaccaaggtggacgctgacttgacggaggtcttgacgcccattgtaacggatgcggtgctaagcgtgtacgacgcgcaggctgacaatttggatttacacatggttgagatcatgcagatgcagcacttgtctcctaaagataccacttttattaagggtttggtattggaccacggtggtaggcatcctgacatgcccacccgtgtgaagaacgcgtatgttttgattttgaacgtatctttggaatacgagaagactgaagttaactctgggttcttttacagttctgcggaccaaagggacaagttggccgctagtgagaggaagtttgtggatgccaagttgaagaagatcatcgacttgaaaaacgaagtttgtggcatggatccagacaagggttttgttatcattaaccaaaaaggcattgaccccatgtctttagacgtgtttgccaaacacaacatcttggctttgagaagggccaagagacgtaacatggaaagattgcaattggtcactggcggtgaagctcagaactctgtggaagacttgtcgcctcagattcttgggttttctggcttggtctaccaagaaaccataggcgaggaaaaattcacatacgttacagagaacactgaccccaagtcttgcaccatcttaatcaagggctccactcattatgccctcgctcaaacaaaggatgcggtgagagatggtctcagagctgtggcaaacgttctcaaggacaaaaacatcattccaggcgctggtgcgttctacatcgccctttcgagatacctaagatctgccaacatgaacaagttgggtgccaagggtaaaacaaagacaggtattgaggcgttcgcagaagcattgctggtaattccaaagactttggtgaagaactcaggattcgacccattggacgtgctcgcaatggtggaggacgagttggatgacgctcaggattctgacgaaacgagatatgttggtgtggacttgaacataggtgattcttgcgaccctaccatcgagggtatttgggattcctaccgcgtactaagaaatgctattaccggtgctacaggtattgccagcaacttgttattatgcgatgaattgttaagggcaggtagatccactttgaaagaaacaccacagtaa

SEQ ID NO: 2164 - DNA, 1641 bp, Artificial Sequence
  Description of Artificial Sequence: Synthetic polynucleotide
atgtctttgcaattgttgaatccgaaggctgaatctttgagaagggatgcggctttgaaggttaacgtcacatctgctgagggcttacaatccgtcttggagaccaacttgggccctaagggcacgttgaagatgcttgtggatggtgctggtaacatcaagttgaccaaggacggtaaagtgttgttgaccgagatgcagatccagtctcctacagcggtacttattgctagggcagctgccgcgcaggatgaaatcacgggcgatgggaccacgacggttgtgtgtcttgtgggtgaattgcttagacaagcgcaccgtttcattcaagagggcgtgcatccgagaatcatcactgatgggtttgagattgcgagaaaggagtccatgaaatttttggacgaattcaagatcagtaagacgaacctttccaatgatagagagttccttttacaagtggccagatcttctttattaaccaaggtggacgctgacttgacggaggtcttgacgcccattgtaacggatgcggtgttgagcgtgtacgacgcgcaggctgacaatttggatttacacatggttgagatcatgcagatgcagcacttgtctcctaaagataccacttttattaagggtttggtattggaccacggtggtaggcatcctgacatgcccacccgtgtgaagaacgcgtatgttttgattttgaacgtatctttggaatacgagaagactgaagttaactctgggttcttttacagttctgcggaccaaagggacaagttggccgctagtgagaggaagtttgtggatgccaagttgaagaagatcatcgacttgaaaaacgaagtttgtggcatggatccagacaagggttttgttatcattaaccaaaaaggcattgaccccatgtctttagacgtgtttgccaaacacaacatcttggctttgagaagggccaagagacgtaacatggaaagattgcaattggtcactggcggtgaagctcagaactctgtggaagacttgtctcctcagattcttgggttttctggcttggtctaccaagaaaccataggcgaggaaaaattcacatacgttacagagaacactgaccccaagtcttgcaccatcttaatcaagggctccactcattatgccctcgctcaaacaaaggatgcggtgagagatggtctcagagctgtggcaaacgttctcaaggacaaaaacatcattccaggcgctggtgcgttctacatcgccctttctagatacttgagatctgccaacatgaacaagttgggtgccaagggtaaaacaaagacaggtattgaggcgttcgcagaagcattgttagtaattccaaagactttggtgaagaactctggattcgacccattggacgtgctcgcaatggtggaggacgagttggatgacgctcaggattctgacgaaacgagatatgttggtgtggacttgaacataggtgattcttgcgaccctaccatcgagggtatttgggattcctaccgcgtattaagaaatgctattaccggtgctacaggtattgccagcaacttgttattatgcgatgaattgttaagggcaggtagatccactttgaaagaaacaccacagtga

SEQ ID NO: 2165 - DNA, 2001 bp, Saccharomyces cerevisiae
atggctgtggaggaaattgcgtcccgcaaggacattagtttaagagatatgcaaatctctgccatattaaaaatgctgtttttaaataaggatttgaacaacaacgacaacatcaccaccatcacagacgatatttttaaccagcaggagatcatctggaaggtgttgatactggacatcaagagcactgctaccatatcttctgttctcagagtcaatgacctgctgaaagctggtatcaccgttcattccttgattaaacaagacagatctcccttgccagatgtccctgccatatatttcgtctcccccacaaaggaaaacattgacattatagtcaatgacttgaaaagcgacaagtattctgaattttacatcaactttacctcatctctgcccagaaacctcctggaagatttggctcaacaagtctccatcacgggtaaatctgataaaatcaaacaagtttacgaccaatacctggacttcattgtaactgaaccggaactgttctcactagaaatttcaaacgcatacttgacattgaatgacccgaaaaccacagaagaggaaatcacgggcttatgcgccaacatcgcggacggtttattcaacactgtcttaacgatcaattctatccccattataagagcagctaagggtgggcctgctgagatcatcgctgagaaactgggtacaaaattacgtgatttcgtcatcaataccaattcctcctccacttccactttgcagggaaatgattctctggaaagaggagtgttgattattttggatagaaacatagattttgcctccatgttttcacattcgtggatttatcagtgcatggtctttgatattttcaaattatcaagaaacaccgttactattccacttgaaagtaaggaaaacggaactgacaataccaccgcaaaaccattagccacgaaaaaatatgatatagagccaaacgattttttttggatggaaaactctcatttgccattcccagaagctgcagagaacgttgaagcggcattgaatacgtacaaggaggaagccgcagaaattactaggaaaactggtgttaccaacatatcagatttggacccaaactcgaataatgatacggttcaaattcaggaagtcgtaaagaaactgccagagttaacagctaagaaaaatactattgatacacatatgaatatttttgctgcattgttgtcacaattggaaagtaaaagtcttgatactttctttgaagttgaacaagaccctggaagcaccaaaacaagatctaggtttttggatatactaaaagatggtaagacaaacaatcttgaggacaaactgagatcgtttattgttctttacttgacatcaacgacaggcttaccaaaggattttgtccaaaatgtggaaaactatttcaaggaaaacgattacgatatcaatgctttaaaatatgtttataagctaagagagttcatgcaattatcaaatatgtcgttacaaaataaatctttggaagatggatccgattccgctttcaaaccaagcaacttaacattatccggtatctatggcttaactgaaggcaaattacaaggaggtgtaggaagtttaatatcaggtattaagaagttactgcctgaaaagaaaaccatcccgataacaaatgttgttgatgcgataatggaccctttaaacagctctcaaaaaaatttggagactactgacagttacctatacatcgacccaaaaattacaaggggttcccataccagaaagccaaaaagacaatcttataataagtcactagtgtttgtagttggtggcggtaactacctagaatatcaaaacctccaagaatgggcacattcccagttgcataatcccaaaaaagtcatgtatggtagcacagccattaccacaccagctgaattcttaaatgagatttctcgccttggcgcaagtaatagcagcaacaacgatgcataa

SEQ ID NO: 2166 - DNA, 2001 bp, Artificial Sequence
  Description of Artificial Sequence: Synthetic polynucleotide
atggctgtggaggaaattgcgtcccgcaaggacattagtttaagagatatgcaaatctctgccatattaaaaatgttatttttaaataaggatttgaacaacaacgacaacatcaccaccatcacagacgatatttttaaccagcaggagatcatctggaaggtgttgatattggacatcaagagcactgctaccatatcttctgttctcagagtcaatgacttattgaaagctggtatcaccgttcattccttgattaaacaagacagatctcccttgccagatgtccctgccatatatttcgtctcccccacaaaggaaaacattgacattatagtcaatgacttgaaaagcgacaagtattctgaattttacatcaactttacctcttctttacccagaaacctcttggaagatttggctcaacaagtctccatcacgggtaaatctgataaaatcaaacaagtttacgaccaatacttggacttcattgtaactgaaccggaattattctctttggaaatttccaacgcatacttgacattgaatgacccgaaaaccacagaagaggaaatcacgggcttatgcgccaacatcgcggacggtttattcaacactgtcttaacgatcaattctatccccattataagagcagctaagggtgggcctgctgagatcatcgctgagaaattgggtacaaaattacgtgatttcgtcatcaataccaattcctcctccacttccactttgcagggaaatgattctttggaaagaggagtgttgattattttggatagaaacatagattttgcctccatgttttctcattcttggatttatcagtgcatggtctttgatattttcaaattatctagaaacaccgttactattccacttgaaagtaaggaaaacggaactgacaataccaccgcaaaaccattagccacgaaaaaatatgatatagagccaaacgattttttttggatggaaaactctcatttgccattcccagaagctgcagagaacgttgaagcggcattgaatacgtacaaggaggaagccgcagaaattactaggaaaactggtgttaccaacatatctgatttggacccaaacagtaataatgatacggttcaaattcaggaagtcgtaaagaaattaccagagttaacagctaagaaaaatactattgatacacatatgaatatttttgctgcattgttgtctcaattggaaagtaaaagtcttgatactttctttgaagttgaacaagaccctggaagcaccaaaacaagatctaggtttttggatatattgaaagatggtaagacaaacaatcttgaggacaaattgagatcttttattgttctttacttgacaagtacgacaggcttaccaaaggattttgtccaaaatgtggaaaactatttcaaggaaaacgattacgatatcaatgctttaaaatatgtttataagttgagagagttcatgcaattatccaatatgtctttacaaaataaatctttggaagatggatccgattccgctttcaaaccaagcaacttaacattatccggtatctatggcttaactgaaggcaaattacaaggaggtgtaggaagtttaatatctggtattaagaagttattgcctgaaaagaaaaccatcccgataacaaatgttgttgatgcgataatggaccctttaaacagctctcaaaaaaatttggagactactgacagttacttgtacatcgacccaaaaattacaaggggttcccataccagaaagccaaaaagacaatcttataataagtctttggtgtttgtagttggtggcggtaactacttggaatatcaaaacctccaagaatgggcacattcccagttgcataatcccaaaaaagtcatgtatggtagcacagccattaccacaccagctgaattcttaaatgagatttctcgccttggcgcaagtaatagcagcaacaacgatgcatga

SEQ ID NO: 2167 - DNA, 1392 bp, Saccharomyces cerevisiae
atggtcgctatcagtgaagtcaaagaaaatcctggcgtaaacagcagtaattctggtgcagttacgagaactgcggcacatacacatattaaaggtttaggtctggatgaaagtggtgtggccaagagggttgaaggagggtttgttggacaaatagaagctcgtgaagcgtgcggtgtaattgtagatttaatcaaggctaaaaaaatgtcaggtagagctatcctattagctggtggtccttctacaggtaagacagcattggctctcgccatttcacaagagttaggcccaaaagttccattctgtcctcttgttggtagcgaattatattccgtggaggtcaaaaaaacagaaaccctaatggaaaattttagaagagcaattgggttaagaatcaaagaaactaaggaagtttatgagggtgaagtgacagaactaacccctgaagacgcagagaatccgttgggcggatatggtaaaactatctcacatgtaattgtcgggctcaagtctgccaagggtaccaagacactaagattagacccaacgatatatgaaagtattcaaagagaaaaggttagtattggtgatgtcatttatatagaggccaacaccggtgcagttaagcgagttggcagatctgatgcatacgctactgaatttgatttggaaactgaggaatacgtaccattgccaaaaggcgaagtgcataagaaaaaggaaattgtacaagatgttaccttgcacgatttggatgttgcaaacgcaagaccacaaggtggtcaagatgtcatatcaatgatgggccagttgctcaaacctaagaagactgaaataaccgagaaattaagacaagaggtgaataaagttgttgctaaatatattgatcaaggtgtcgcagaacttattccaggtgttttgttcattgatgaagttaatatgctagacattgaaatattcacgtatttgaacaaagcgcttgaatctaatatcgcccccgttgttgtattggcttctaataggggcatgactacagtccgtggcactgaggatgtgatatcaccacatggtgtgccacctgatttgatcgatagattgttaattgttcgtacattaccatatgacaaggacgagatccgtaccattatagagagaagagctaccgttgaaagattgcaagtagaaagtagcgcattggaccttttagccacgatgggtacagaaacttcgttacgttacgctttacaattattggcaccatgtggtatcctagcacaaacaagcaatcgtaaggaaattgttgttaatgacgttaatgaagccaaattgctgtttttggatgccaaaaggtcaacaaagattttagaaacttccgcaaattatttgtaa

SEQ ID NO: 2168 - DNA, 1392 bp, Artificial Sequence
  Description of Artificial Sequence: Synthetic polynucleotide
atggtcgctatcagtgaagtcaaagaaaatcctggcgtaaacagcagtaattctggtgcagttacgagaactgcggcacatacacatattaaaggtttaggtttggatgaaagtggtgtggccaagagggttgaaggagggtttgttggacaaatagaagctcgtgaagcgtgcggtgtaattgtagatttaatcaaggctaaaaaaatgagtggtagagctatcttattagctggtggtccttctacaggtaagacagcattggctctcgccatttctcaagagttaggcccaaaagttccattctgtcctcttgttggtagcgaattatattccgtggaggtcaaaaaaacagaaaccttgatggaaaattttagaagagcaattgggttaagaatcaaagaaactaaggaagtttatgagggtgaagtgacagaattgacccctgaagacgcagagaatccgttgggcggatatggtaaaactatctctcatgtaattgtcgggctcaagtctgccaagggtaccaagacattaagattagacccaacgatatatgaaagtattcaaagagaaaaggttagtattggtgatgtcatttatatagaggccaacaccggtgcagttaagagagttggcagatctgatgcatacgctactgaatttgatttggaaactgaggaatacgtaccattgccaaaaggcgaagtgcataagaaaaaggaaattgtacaagatgttaccttgcacgatttggatgttgcaaacgcaagaccacaaggtggtcaagatgtcatatccatgatgggccagttgctcaaacctaagaagactgaaataaccgagaaattaagacaagaggtgaataaagttgttgctaaatatattgatcaaggtgtcgcagaacttattccaggtgttttgttcattgatgaagttaatatgttggacattgaaatattcacgtatttgaacaaagcgcttgaatctaatatcgcccccgttgttgtattggcttctaataggggcatgactacagtccgtggcactgaggatgtgatatctccacatggtgtgccacctgatttgatcgatagattgttaattgttcgtacattaccatatgacaaggacgagatccgtaccattatagagagaagagctaccgttgaaagattgcaagtagaaagtagcgcattggaccttttagccacgatgggtacagaaacttctttacgttacgctttacaattattggcaccatgtggtatcttggcacaaacaagcaatcgtaaggaaattgttgttaatgacgttaatgaagccaaattgttatttttggatgccaaaaggtctacaaagattttagaaacttccgcaaattatttgtga

SEQ ID NO: 2169 - DNA, 1113 bp, Saccharomyces cerevisiae
atgaagcaaaaatttgtactaccgatcaccccaccaagtacggcggaaaagaagcctcaaacagaaaaccgttgcaatgagaatttgaagcctagaagattgctaccgcaattgaaaaaaagtgtccgtaacaggaaacctagactgtcatataggcctgagttaaactctgtgtttgatctggatgcgtacgtggattcgacacacttgtccaaatcccaacgccatcatatggaccgcgacgccggttttattagctatgctctgaattatagcaaaagaatggttgtagtcagcggggcaggtatatctgttgccgctggtataccggattttagatccagtgaagggattttctctactgtgaacggcggctctgggaaagatttgtttgactacaatcgtgtgtatggcgacgaatcaatgagtttgaaatttaatcagttaatggtgtcattgttcagattatccaagaattgccaacctacaaaatttcatgaaatgctcaatgagtttgctagggatggcaggctattgagactgtacacgcagaatattgacggtttagatacacaattacctcatttatcaactaatgtgcctctggcgaagccaatacccagtacagtacaattacacggaagcataaaacacatggaatgcaataaatgtctgaatatcaaaccttttgaccctgaactgttcaaatgcgacgacaaatttgattctcggactgaaatcataccgtcatgtccacaatgtgaagaatatgaaacagttagaaaaatggcaggcttaagatctactggtgtgggcaagttgcgtccaagagtaattttatacaatgaggtccaccctgaaggtgattttatcggtgaaattgccaataatgacttaaagaaaagaattgattgtttgattattgttggaacgagtttgaagattcccggagtgaaaaatatttgcaggcagtttgcggccaaagtccatgcaaacaggggtattgtgttatatttaaacaccagtatgccgcctaagaatgtgctagactctttgaaatttgtagacctagttgtactgggagattgtcagcatgttacctcattattatag

SEQ ID NO: 2170 - DNA, 1113 bp, Artificial Sequence
  Description of Artificial Sequence: Synthetic polynucleotide
atgaagcaaaaatttgtattaccgatcaccccaccaagtacggcggaaaagaagcctcaaacagaaaaccgttgcaatgagaatttgaagcctagaagattgttaccgcaattgaaaaaaagtgtccgtaacaggaaacctagattatcttataggcctgagttaaactctgtgtttgatttggatgcgtacgtggattctacacacttgtccaaatcccaacgccatcatatggaccgcgacgccggttttattagctatgctttgaattatagcaaaagaatggttgtagtcagcggggcaggtatatctgttgccgctggtataccggattttagatccagtgaagggattttctctactgtgaacggcggctctgggaaagatttgtttgactacaatcgtgtgtatggcgacgaaagtatgagtttgaaatttaatcagttaatggtgtctttgttcagattatccaagaattgccaacctacaaaatttcatgaaatgctcaatgagtttgctagggatggcaggttattgagattatacacgcagaatattgacggtttagatacacaattacctcatttatctactaatgtgcctttagcgaagccaatacccagtacagtacaattacacggaagcataaaacacatggaatgcaataaatgtttgaatatcaaaccttttgaccctgaattattcaaatgcgacgacaaatttgattctagaactgaaatcataccgtcttgtccacaatgtgaagaatatgaaacagttagaaaaatggcaggcttaagatctactggtgtgggcaagttgcgtccaagagtaattttatacaatgaggtccaccctgaaggtgattttatcggtgaaattgccaataatgacttaaagaaaagaattgattgtttgattattgttggaacgagtttgaagattcccggagtgaaaaatatttgcaggcagtttgcggccaaagtccatgcaaacaggggtattgtgttatatttaaacaccagtatgccgcctaagaatgtgcttgactctttgaaatttgtagacttggttgtattgggagattgtcagcatgttaccagtttattatga

SEQ ID NO: 2171 - DNA, 1293 bp, Saccharomyces cerevisiae
atgtcagctttcggtaacccattcacgtcgggtgctaagcctaatctttctaatacaagtggtatcaaccctttcacaaataatgctgctagtaccaataacatgggaggaagtgcatttggaagacctagttttggaacagcaaacacaatgacaggaggaaccaccacttcagcatttggaatgccccagtttggtaccaatacaggcaatactggcaatacgtcaattagcgcttttgggaacaccagtaatgcggctaaaccgtcagcatttggagcaccagcatttggttctagcgcccccatcaatgttaatccgccttctactacgtcagcatttggagcaccgtcatttggatcaacaggttttggtgctatggcggcgacaagtaatccttttggtaaaagtcctggctcaatgggctctgcatttggtcaaccagcttttggagcgaacaaaactgctatcccttctagttcggttagtaatagtaataactccgcatttggtgctgcgtcaaacacgcccttgaccacaacttctccttttggttcactgcaacaaaacgcatcacaaaatgcatcatctacatcgtcagcgtttggcaaaccgactttcggcgcagctactaatacccagtcgccatttggtactattcaaaatacaagtacaagcagtgggacaggagtatccccatttggcacatttggaactaatagtaataacaaatcaccttttagtaatctacagagcggagcaggcgctggttcttcgccgtttggtactacaacctccaaagctaacaacaacaataacgtgggcagtagcgcattcggaacgacgaataatcaatctccttttagcggaggttctgggggcacctttggttctgcttctaacctcaataaaaataccaatggcaactttcaatcttcttttggtaataaagggttttcattcggaattacaccacaaaacgatgccaacaaagtctcgcaatcgaacccttcatttgggcaaacaatgccaaacacagatccgaacataagtttgaagagcaatggtaacgcaacctcttttggatttggacaacaacagatgaatgctactaatgtcaacgctaatacggccaccggaaaaattagatttgttcaagggttatcttctgaaaaggacggtattctagaattggccgatctcgcagaggaaacactgaaaatattcagagcaaacaagtttgaactaggccttgtccctgatatacctccaccacctgcattggttgcatag

SEQ ID NO: 2172 - DNA, 1293 bp, Artificial Sequence
  Description of Artificial Sequence: Synthetic polynucleotide
atgtctgctttcggtaacccattcacgtctggtgctaagcctaatctttctaatacaagtggtatcaaccctttcacaaataatgctgctagtaccaataacatgggaggaagtgcatttggaagacctagttttggaacagcaaacacaatgacaggaggaaccaccacttctgcatttggaatgccccagtttggtaccaatacaggcaatactggcaatacgtccattagcgcttttgggaacaccagtaatgcggctaaaccgagtgcatttggagcaccagcatttggttctagcgcccccatcaatgttaatccgccttctactacgtctgcatttggagcaccgtcctttggaagtacaggttttggtgctatggcggcgacaagtaatccttttggtaaaagtcctggctctatgggctctgcatttggtcaaccagcttttggagcgaacaaaactgctatcccttctagttctgttagtaatagtaataactccgcatttggtgctgcgtccaacacgcccttgaccacaacttctccttttggttctttacaacaaaacgcatctcaaaatgcatcttctacatcttctgcgtttggcaaaccgactttcggcgcagctactaatacccagtctccatttggtactattcaaaatacaagtacaagcagtgggacaggagtatccccatttggcacatttggaactaatagtaataacaaatctccttttagtaatttacagagcggagcaggcgctggttcttctccgtttggtactacaacctccaaagctaacaacaacaataacgtgggcagtagcgcattcggaacgacgaataatcaatctccttttagcggaggttctgggggcacctttggttctgcttctaacctcaataaaaataccaatggcaactttcaatcttcttttggtaataaagggttttctttcggaattacaccacaaaacgatgccaacaaagtctctcaaagtaacccttcttttgggcaaacaatgccaaacacagatccgaacataagtttgaagagcaatggtaacgcaacctcttttggatttggacaacaacagatgaatgctactaatgtcaacgctaatacggccaccggaaaaattagatttgttcaagggttatcttctgaaaaggacggtattttggaattggccgatctcgcagaggaaacattaaaaatattcagagcaaacaagtttgaattaggccttgtccctgatatacctccaccacctgcattggttgcatga

SEQ ID NO: 2173 - DNA, 1995 bp, Saccharomyces cerevisiae
atgttgacctctatattgataaaaggtcgcacacctgttcttgcaagcagaaatttattagcagctctctcgaattgcaaccatattacttgggctgtttcaagaagattatacaatgatggaaacagagatcaaagaaattttggtaggaatcagagaaacaacaacagtaacaggtatagaaactcccgtttcaattctcgcccaaggacaaggtctagagaagacgatgatgaagtgcactttgataagaccactttttccaaactaattcacgtcccaaaagaagataatagtaaagaagtaacgctggactctttactggaggaaggagtccttgataaagaaatacataaagccattaccaggatggaatttcccggtttaactcctgtacagcaaaagactatcaaaccaatattatccagtgaagaccatgatgttatcgcaagagctaaaaccggtacaggtaagacatttgccttcttgattccaattttccagcatttgataaatacgaagttcgattctcaatatatggtaaaagctgttattgtcgcaccaacaagagatttggccttgcaaatcgaagcagaggtgaaaaaaatccacgatatgaattatggcttgaaaaagtacgcttgtgtctctttagttggtggtactgacttcagggcagctatgaataaaatgaataagttgagaccaaacattgtaattgccactccagggagattgattgatgttttggaaaaatactccaacaaattttttaggttcgtagattacaaagtgctagatgaagctgacagattgctagaaattggattcagggatgatttagaaactatttctggtattttaaatgaaaagaactccaaatcagccgataatatcaagactttgttgttctctgctactctggacgacaaagtacaaaagttggcaaacaatatcatgaataaaaaagaatgtctctttttagacacagtagataagaatgaacctgaagcacatgaaagaattgatcagtctgtcgtcatttcagaaaagtttgccaatagtatatttgctgctgtggagcatataaagaaacaaataaaggaaagagattctaattacaaagccattatttttgcaccaactgttaaattcacatcctttttgtgcagtattttaaagaatgaatttaagaaagatttaccaattttggaatttcatggtaaaattactcaaaataaaagaacaagtttagttaaaagattcaaaaaagatgaatccggtattttggtttgtacggatgtgggagcccgtggtatggatttcccaaacgtccacgaagttttgcaaattggtgttccatctgagttggctaattatattcatagaattggtagaacagccagaagtgggaaagaaggatcttctgtgctattcatttgtaaagatgaattgccatttgttagagagttggaagatgcaaaaaatatagtcattgccaaacaagaaaaatatgagcccagtgaagaaataaaatctgaggtcctagaggcagtgaccgaagaaccggaagacatatcagatattgtaataagtttaatctcatcctacagatcctgtatcaaggaatacaggttttctgaaaggcgcatacttcctgaaattgcttccacttatggtgtactgttaaatgatcctcaattaaagattccagtatccagaaggtttttagataaattaggtttgagccgtagtccaattggtaaggcaatgtttgaaattagagactatagtagtagagatggaaataacaagtcctacgattatgatgatgattcagaaatttctttcagaggcaacaaaaactataataataggagccaaaatagagattacgatgacgaaccgtttagacgcagcaacaacaatagacgctcattctcccgtagtaatgataaaaataattactccagtagaaacagcaacatatattag

SEQ ID NO: 2174 - DNA, 1995 bp, Artificial Sequence
  Description of Artificial Sequence: Synthetic polynucleotide
atgttgacctctatattgataaaaggtcgcacacctgttcttgcaagcagaaatttattagcagctctctctaattgcaaccatattacttgggctgtttctagaagattatacaatgatggaaacagagatcaaagaaattttggtaggaatcagagaaacaacaacagtaacaggtatagaaactcccgtttcaattctcgcccaaggacaaggtctagagaagacgatgatgaagtgcactttgataagaccactttttccaaattgattcacgtcccaaaagaagataatagtaaagaagtaacgcttgactctttattggaggaaggagtccttgataaagaaatacataaagccattaccaggatggaatttcccggtttaactcctgtacagcaaaagactatcaaaccaatattatccagtgaagaccatgatgttatcgcaagagctaaaaccggtacaggtaagacatttgccttcttgattccaattttccagcatttgataaatacgaagttcgattctcaatatatggtaaaagctgttattgtcgcaccaacaagagatttggccttgcaaatcgaagcagaggtgaaaaaaatccacgatatgaattatggcttgaaaaagtacgcttgtgtctctttagttggtggtactgacttcagggcagctatgaataaaatgaataagttgagaccaaacattgtaattgccactccagggagattgattgatgttttggaaaaatactccaacaaattttttaggttcgtagattacaaagtgttggatgaagctgacagattgttggaaattggattcagggatgatttagaaactatttctggtattttaaatgaaaagaactccaaaagtgccgataatatcaagactttgttgttctctgctactttggacgacaaagtacaaaagttggcaaacaatatcatgaataaaaaagaatgtctctttttagacacagtagataagaatgaacctgaagcacatgaaagaattgatcagtctgtcgtcatttctgaaaagtttgccaatagtatatttgctgctgtggagcatataaagaaacaaataaaggaaagagattctaattacaaagccattatttttgcaccaactgttaaattcacatcctttttgtgcagtattttaaagaatgaatttaagaaagatttaccaattttggaatttcatggtaaaattactcaaaataaaagaacaagtttagttaaaagattcaaaaaagatgaatccggtattttggtttgtacggatgtgggagcccgtggtatggatttcccaaacgtccacgaagttttgcaaattggtgttccatctgagttggctaattatattcatagaattggtagaacagccagaagtgggaaagaaggatcttctgtgcttttcatttgtaaagatgaattgccatttgttagagagttggaagatgcaaaaaatatagtcattgccaaacaagaaaaatatgagcccagtgaagaaataaaatctgaggtcttggaggcagtgaccgaagaaccggaagacatatctgatattgtaataagtttaatctcttcctacagatcctgtatcaaggaatacaggttttctgaaaggcgcatacttcctgaaattgcttccacttatggtgtattgttaaatgatcctcaattaaagattccagtatccagaaggtttttagataaattaggtttgagccgtagtccaattggtaaggcaatgtttgaaattagagactatagtagtagagatggaaataacaagtcctacgattatgatgatgattctgaaatttctttcagaggcaacaaaaactataataataggagccaaaatagagattacgatgacgaaccgtttagacgcagcaacaacaatagacgctctttctcccgtagtaatgataaaaataattactccagtagaaacagcaacatatattga

SEQ ID NO: 2175 - DNA, 153 bp, Saccharomyces cerevisiae
atgaaacagatgatgattgaagcatccataagtaaagacactttgaggttgctaatttgcttttttgaaataaaacagtgccatatatcactccagcctacttgttattatcagaattgggtacggtattcatctatatattaccagttgtaa

SEQ ID NO: 2176 - DNA, 153 bp, Artificial Sequence
  Description of Artificial Sequence: Synthetic polynucleotide
atgaaacagatgatgattgaagcatccataagtaaagacactttgaggttgttaatttgcttttttgaaataaaacagtgccatatatctctccagcctacttgttattatcagaattgggtaagatattcttctatatattaccagttgtga

SEQ ID NO: 2177 - DNA, 1602 bp, Saccharomyces cerevisiae
atgtcagcacctgttcctcaattagtaaatatttctcatgccttgcaagcttccactatccagcaaattcgtttggatatggtagattttaataaagattgcaaattatcttccattcaactggcaagaattgacaagtatatcgattctttgcaagcggctttgaatcagtttaccaaagataacttgcacatagaacggaaggaaaagaacgtgactgaagcagatatacagctgtattctggcttaaaatcaatgtatctagattatttgaaccagctaattaaactaaagcatgagaaacaacaccactctacaccgcccatcgctaatgatgtctccctggacttcttcgttaaccaattgcctaagttttctcccgaggaaaggaaaaattacattgacaatttaatcctgaataaaaatagccataatcgattatctaaaatggatggtctggtagatgcagtcatcaatttatgcgtcttggatacttccgttgctgaaaatgtacgatcctatatgaaattattagatacattgggtttccaaaagggttcgaatagtactggtacaaaggccaacctcaaaaagaaattggctagttcgaaagcaaagataaaggattcagaaaaagaaaaggagaaggagaaggataaatcaaaagtcaagatgaaaactaaattaaaaccttctcctttgctcaataacgatgacaaaaattcttctccatcgcctactgcatctacctcttcaatgaagaaattgaagtcgggtttattcaataaaaatgaagctaagtctacagaatctctacctacttcttccaagaaaaaactatcattttctaaatatctgaacaaggatgacgcagatatgaccaagcttgggactaaacggtcaatagatgtggatttcaaagtcaaccccgaagcatccacggtggcttctaatatcatatcttcgtcaacgtcaggatcgtcaaccacaacggtagcgactcctgcttcttcagaagagcccttaaaaaaaaaaaccaaaatatccgtgcaagactctaatgtacaatcgattttgagaaatggtaaaccgaaaaaagcacgcataagtagcatcaaatttttggatgattcccaactaataaaagtttacggtgacgatctaccgaaccaagggctacaagtttctcctactcaattgaaaaaaattctgaaaccattcaaggagggggaaccgaaggaaattatattgttcgaggatatgtcaatcaaattaaaacctcttgatttgatgtttctgaagaacacaaacagtgatgactatatggatatatccgagactaaaggtggcccaatacattgtgaaacaaggaccccgttgatctatagaaaaaatttcaatcatttcaacccggacttgaataaaaggccgccaagagaacccatagaattcgacttaaatggaaatacgaactcaaccccgactatagcaaaggctttcggtaaaaatagtttattactaaggaaggacagaggtggtttgccatacaagcatgtccccatagtaaaaagaaataaatatcctccaagaccagtacactaa

SEQ ID NO: 2178 - DNA, 1602 bp, Artificial Sequence
  Description of Artificial Sequence: Synthetic polynucleotide
atgtctgcacctgttcctcaattagtaaatatttctcatgccttgcaagcttccactatccagcaaattcgtttggatatggtagattttaataaagattgcaaattatcttccattcaattggcaagaattgacaagtatatcgattctttgcaagcggctttgaatcagtttaccaaagataacttgcacatagaaagaaaggaaaagaacgtgactgaagcagatatacagttatattctggcttaaaatctatgtatttggattatttgaaccagttgattaaattgaagcatgagaaacaacaccactctacaccgcccatcgctaatgatgtctccttggacttcttcgttaaccaattgcctaagttttctcccgaggaaaggaaaaattacattgacaatttaatcttgaataaaaatagccataatagattatctaaaatggatggtttagtagatgcagtcatcaatttatgcgtcttggatacttccgttgctgaaaatgtacgttcctatatgaaattattagatacattgggtttccaaaagggtagtaatagtactggtacaaaggccaacctcaaaaagaaattggctagttctaaagcaaagataaaggattctgaaaaagaaaaggagaaggagaaggataaatctaaagtcaagatgaaaactaaattaaaaccttctcctttgctcaataacgatgacaaaaattcttctccatctcctactgcatctacctcttctatgaagaaattgaagtctggtttattcaataaaaatgaagctaagtctacagaatctttgcctacttcttccaagaaaaaattatctttttctaaatatttgaacaaggatgacgcagatatgaccaagcttgggactaaaagaagtatagatgtggatttcaaagtcaaccccgaagcatccacggtggcttctaatatcatatcttcttctacgtctggaagttctaccacaacggtagcgactcctgcttcttctgaagagcccttaaaaaaaaaaaccaaaatatccgtgcaagactctaatgtacaatctattttgagaaatggtaaaccgaaaaaagcacgcataagtagcatcaaatttttggatgattcccaattgataaaagtttacggtgacgatttaccgaaccaagggttgcaagtttctcctactcaattgaaaaaaattttgaaaccattcaaggagggggaaccgaaggaaattatattgttcgaggatatgtccatcaaattaaaacctcttgatttgatgtttttgaagaacacaaacagtgatgactatatggatatatccgagactaaaggtggcccaatacattgtgaaacaaggaccccgttgatctatagaaaaaatttcaatcatttcaacccggacttgaataaaaggccgccaagagaacccatagaattcgacttaaatggaaatacgaactctaccccgactatagcaaaggctttcggtaaaaatagtttattattgaggaaggacagaggtggtttgccatacaagcatgtccccatagtaaaaagaaataaatatcctccaagaccagtacactga

SEQ ID NO: 2179 - DNA, 726 bp, Saccharomyces cerevisiae
atgctggtagtgggattgacaggtgggatcgcttgtggtaagagcacagtgtcgagaagactcagagacaaatacaaactacccattgttgatgcggacaagattgctagacaagtggtcgaaccaggacagaatgcttatgatcaaattgtgttatacttcaaggacaaaataccgaatttattattggaggatgggcatttaaatcgtgaagccctagggaaatgggtttttagtcataaagaagatttgcaagccttgaatgggataacacatcctgcaatcaggtatgcaatgttcaaagaaattggctactattacttgaagggatatagaatgtgtgtattggatgtgccactcttatttgaaggaaatctggattcaatatgcggagtgactgtaagcgtaatttgtacgcaagaattgcaactagaaagattaatgacaagaaatcctgaacttagtgaagaagatgcaaaaaacaggctaaatagtcaaatgagcactgaagaaaggatggcaagatctgactatatcctacaaaataacagcacattggttgacttatacgaacagattgaaagtgttgtaaaaaaaatccaacctagtaaattaagaactgttttggagtatttcccaccttttggggccgtaagtgccagtagcatcgtcatgtccagattactgatgaaaaaacttcaaaataaaaagtcttcagcggtataa

SEQ ID NO: 2180 - DNA, 726 bp, Artificial Sequence
  Description of Artificial Sequence: Synthetic polynucleotide
atgttggtagtgggattgacaggtgggatcgcttgtggtaagagcacagtgtccagaagactcagagacaaatacaaattgcccattgttgatgcggacaagattgctagacaagtggtcgaaccaggacagaatgcttatgatcaaattgtgttatacttcaaggacaaaataccgaatttattattggaggatgggcatttaaatcgtgaagccttggggaaatgggtttttagtcataaagaagatttgcaagccttgaatgggataacacatcctgcaatcaggtatgcaatgttcaaagaaattggctactattacttgaagggatatagaatgtgtgtattggatgtgccactcttatttgaaggaaatttggattctatatgcggagtgactgtaagcgtaatttgtacgcaagaattgcaattggaaagattaatgacaagaaatcctgaacttagtgaagaagatgcaaaaaacaggttgaatagtcaaatgagcactgaagaaaggatggcaagatctgactatatcttgcaaaataacagcacattggttgacttatacgaacagattgaaagtgttgtaaaaaaaatccaacctagtaaattaagaactgttttggagtatttcccaccttttggggccgtaagtgccagtagcatcgtcatgtccagattattgatgaaaaaacttcaaaataaaaagtcttctgcggtatga

SEQ ID NO: 2181 - DNA, 1170 bp, Saccharomyces cerevisiae
atgtcaagctcaatacctagagtttactctctagggaactcagccatgacgtacttactagcattgagaattgcacaactcccgagtcaaccaaaggttccatcagttgttcttcttttaaacgaccagaagaaactgaatagattcctcaataatgactctaaaattattgttaaatcgagtaacaacaataaagaaacttatcatagacagtttatggcatcttgtgtcccgcccattctaagcaatggtgaaattgcaccaattgaaaatttaattgtctcagatccctcttcgaaatttatcactgcccaactttctaaatacaataaatctttgagacccgaaaccaacattctgtttttgaatccaagcttaaatctattggaacatttgcatagatatcgatggcgctttgatgaggcaagaccaaacttgttcatgggctttacaacaccagttgacgttgggaccatacatcaagaatttcaactgtctctcaaagtgaaaggaaggatacaatttcatattgcaaagattgatggttttcctcgaatgagtagtactggtaaaagtgcgagtctttctctaagaggtgacaggcagaaaaatgaaaaagaaaataatgcgttttataagttgtttagagaaatttccaggctacgatctggaataggttccgatctagttagttttgatctgcatgttcatggtttccaggatttgttcttcactgaactggagaaattgatattggagagttgtaccgagccattattggcagtatatgattgcgtatataaaaaggaacttttgaaaatccccggagcacaagatataataaaaaagttgattagtgagcagctgtcaattatcgatcgatcctacccgtcactaaacaccaacccaaactattctgtaatctttgacaaggagagaatatttagcttggtgatgagagatctagaagttaatgggcacaagcgcgctaagttggcccaatctttaaatcaattgaatcaaacgaacattaatgaacttaacggattttttgtttctcttggtaagtacaaaaaatgtaactgcaagtggaatgatatacttctgactttaataaaagggaaacagtttattactaagcaaaaagcactagattatcattacctgtga

SEQ ID NO: 2182 - DNA, 1170 bp, Artificial Sequence
  Description of Artificial Sequence: Synthetic polynucleotide
atgtctagcagtatacctagagtttactctttagggaactctgccatgacgtacttattggcattgagaattgcacaactcccgagtcaaccaaaggttccatctgttgttcttcttttaaacgaccagaagaaattgaatagattcctcaataatgactctaaaattattgttaaatctagtaacaacaataaagaaacttatcatagacagtttatggcatcttgtgtcccgcccattttgagcaatggtgaaattgcaccaattgaaaatttaattgtctctgatccctcttctaaatttatcactgcccaactttctaaatacaataaatctttgagacccgaaaccaacattttatttttgaatccaagcttaaatttattggaacatttgcatagatatagatggcgctttgatgaggcaagaccaaacttgttcatgggctttacaacaccagttgacgttgggaccatacatcaagaatttcaattatctctcaaagtgaaaggaaggatacaatttcatattgcaaagattgatggttttcctagaatgagtagtactggtaaaagtgcgagtctttctttgagaggtgacaggcagaaaaatgaaaaagaaaataatgcgttttataagttgtttagagaaatttccaggcttagatctggaataggttccgatttggttagttttgatttgcatgttcatggtttccaggatttgttcttcactgaattagagaaattgatattggagagttgtaccgagccattattggcagtatatgattgcgtatataaaaaggaacttttgaaaatccccggagcacaagatataataaaaaagttgattagtgagcagttatccattatcgatagatcctacccgtctttgaacaccaacccaaactattctgtaatctttgacaaggagagaatatttagcttggtgatgagagatttggaagttaatgggcacaagcgcgctaagttggcccaatctttaaatcaattgaatcaaacgaacattaatgaacttaacggattttttgtttctcttggtaagtacaaaaaatgtaactgcaagtggaatgatatacttttgactttaataaaagggaaacagtttattactaagcaaaaagcattggattatcattacttgtga

SEQ ID NO: 2183 - DNA, 1440 bp, Saccharomyces cerevisiae
atggaaggaaaggttgatgtcttgctaacatggctgaaaaaatcagataagttttatatagcaccaaacatcagcatctgtgaatcgccagaaactggcagagggatcgtcctcagtcacggttcgataagaaaaaacgatatcattgtatcagtaccgagctcgaagcaactaaattttcacactatcctctatcatatttcaaagtttaataaagagctgaatattcctggtatcacaatcgatagaaagccaatcaattatgaggacaatattattgaagcggaaaataaagcctgggccgatcctagatatggattatattccgaattatcgaaagagtttttgttaagtttatcatcatttcaattggtatcattttatatattggttgaaaattttctattgccaaaatggactcacaatgaaatctactcagattggaaaccattctttgatgtatggccctcaatggaggagctgcgatcaatcccagccatttggaactgtgatcccaattcacgttaccattcactgattgaatatctccctgctgcctcacgaaagcatatggcaagaattagtggccttgtcagagaagattgggaaaccatttcagaggtggttttgaaatggaatgaaatttacggctccttaagctgtacgaaaaattctgataaatttactagtgatgagttattctccctttttgtacatgtttattttattataaactcaagatgtctttatgcgaagattccgttgaaaatagaggactccccaagcaatttcactttagtgccgtatgtcgatttcatgaaccacatttgtgagtcggatttgcactgctatcctcagttaagtcctcagttgaggtcagaaggagaaaacatcattggaattggacaatttaccattagatgcggcgatcacctctatgacaacattaacgaggagctctttttgaattatggtgcacactcaaatgattttttactgaacgagtatggatttgtggtagacggaaacaaatggaactacttagacatatctgacgaaattattgaactaatagacgacgacaaaaaggaggtaaaaacgtttctattggaacatgattattggggagattacactatcaatgagactgatatcagttataggatattcgtagcattgaactattatgtgacgagggatgaaaggagggttcgaaaattcattgaaggttacatatcagaagattacttcaagccaaaaatctcttcagttttaaaagaattattggtctccttaactgcaaaatatacaaagacgcttagcgagttgacagaaaaagtatctaatcttgagaataacctctgcttacaaaacttaattaccatatacaaagggtatataaaaatacttacacaacacttacaagacctgcaatcatag

SEQ ID NO: 2184 - DNA, 1440 bp, Artificial Sequence
  Description of Artificial Sequence: Synthetic polynucleotide
atggaaggaaaggttgatgtcttgttgacatggttgaaaaaatctgataagttttatatagcaccaaacatcagcatctgtgaatctccagaaactggcagagggatcgtcctcagtcacggttccataagaaaaaacgatatcattgtatctgtaccgagctctaagcaattgaattttcacactatcctctatcatatttccaagtttaataaagagttgaatattcctggtatcacaatcgatagaaagccaatcaattatgaggacaatattattgaagcggaaaataaagcctgggccgatcctagatatggattatattccgaattatccaaagagtttttgttaagtttatcttcttttcaattggtatccttttatatattggttgaaaattttttattgccaaaatggactcacaatgaaatctactctgattggaaaccattctttgatgtatggccctctatggaggagttaagatctatcccagccatttggaactgtgatcccaattctcgttaccattctttgattgaatatctccctgctgccagtaggaagcatatggcaagaattagtggccttgtcagagaagattgggaaaccatttctgaggtggttttgaaatggaatgaaatttacggctccttaagctgtacgaaaaattctgataaatttactagtgatgagttattctccctttttgtacatgtttattttattataaactctagatgtctttatgcgaagattccgttgaaaatagaggactccccaagcaatttcactttagtgccgtatgtcgatttcatgaaccacatttgtgagtctgatttgcactgctatcctcagttaagtcctcagttgaggtctgaaggagaaaacatcattggaattggacaatttaccattagatgcggcgatcacctctatgacaacattaacgaggagctctttttgaattatggtgcacactctaatgattttttattaaacgagtatggatttgtggtagacggaaacaaatggaactacttagacatatctgacgaaattattgaattgatagacgacgacaaaaaggaggtaaaaacgtttttattggaacatgattattggggagattacactatcaatgagactgatatcagttataggatattcgtagcattgaactattatgtgacgagggatgaaaggagggttagaaaattcattgaaggttacatatctgaagattacttcaagccaaaaatctcttctgttttaaaagaattattggtctccttaactgcaaaatatacaaagacgcttagcgagttgacagaaaaagtatctaatcttgagaataacctctgcttacaaaacttaattaccatatacaaagggtatataaaaatacttacacaacacttacaagacttgcaatcctga

SEQ ID NO: 2185 - DNA, 1815 bp, Saccharomyces cerevisiae
atggtagaactggaaaaaagaagacggccccctccgcaactgcaacattctccctatgttagggatcaatcgaattcgcagggaatgacaaagacgccagaaacgtcaccgcctaagaggcccatgggaagagctagatcaaactcgagaagcagtggatcccgttcaaatgtcgatatagatcagtataccataccaccaggcttagatttgttgcctaccgcttcatctccaccttccgtccatcaagtttcacaacagcaacaattatccccaatattagccaacaaaatccgttctccatttgaaaatcaaagtcaggatcaaaatgacaattcaatagacccaacaccggctggacaagtaacaattcctgtagaagccgtatctccaccggcactggacgaattatcgaaattccaaaatggttcaactgagacattatttagaactggatcaccccgtaagaagcatacacatattattatactcaaatccttaaatgcaacttttgagaccaagtttcttgttgtaccatttaaacctgacggacttaaattaggtcgaccagttaccaatagcgtaaacaagaataattcaggatcgaaaagagatttattttcgcaacaagttagaccagataacggaaattttgactcaagagttctttccagaaatcacgcttgtctcagttgtgatcctacatcaggaaagatatatattcgcgatctaaagtccagcaatgggacatttgttaatggggttaaaatacgccaaaatgatgtagaattaaaagttggtgatactgtggatttgggaactgatattgactcaaagtttgaacatagaaaaatcagtgcgtatgtggaagagatttcagtaattcccttaatgaacactgtatctgatcccacaaatttggtgatgaaaaaacaagatcatactaataagaataatgggaactccactaatataaacggaataaagatagacagaggtcatcataatcaacacattccaatacgatctcatttaaaggaaaattataccgaagctggtgtaacatctgcaacaacggctcaaagggcagcctttgaggcagctatgtttggagatattaataactcagaattagatgatgatattttaggtccagaaactgaggttctcagtggaatttttatcaacaattcagcaggtacaagcataaatttgataaatatgataaaaactttgactactgagctgtccttagaaaaacaagagctggaaaaattacattccatgcaaaactttatgcaaaactatacgataaaccttgatttcatcaataagcacatgattgatatgaatgaaaagcatttactgaaactgagcacggctttacaaaaaactctatcagaaaataatgatgcgctactcaaagaatcggaagatcaattaaaagaaatcaaacaacaaaataataaagtaaaatctgcatgtagcttgaaggaaaaacaaaaccatgaaaagctacaggagctcgaaagtgaattaagagagctgaaccttcaaatagaagaagagaggggaaaaaatttagttttaacacaaagcaattttaatggtggtattaacaatgacaataacgctaaagtaaaacaaaatgattcaagagaagaaaaaaaggataccgaagatacattaataagcactgaagaactaggagtcgtcgaaggcaagagaacaagagttagtaagggaatgctctttggagtagttgccatttcattcggtttagttgcgacggccgttaagcaattgccacaataa

SEQ ID NO: 2186 - DNA, 1815 bp, Artificial Sequence
  Description of Artificial Sequence: Synthetic polynucleotide
atggtagaattggaaaaaagaagaagaccccctccgcaattacaacattctccctatgttagggatcaaagcaattctcagggaatgacaaagacgccagaaacgtctccgcctaagaggcccatgggaagagctagatctaactctagaagcagtggatcccgttccaatgtcgatatagatcagtataccataccaccaggcttagatttgttgcctaccgcttcttctccaccttccgtccatcaagtttctcaacagcaacaattatccccaatattagccaacaaaatccgttctccatttgaaaatcaaagtcaggatcaaaatgacaattctatagacccaacaccggctggacaagtaacaattcctgtagaagccgtatctccaccggcattggacgaattatccaaattccaaaatggttctactgagacattatttagaactggaagtccccgtaagaagcatacacatattattatactcaaatccttaaatgcaacttttgagaccaagtttcttgttgtaccatttaaacctgacggacttaaattaggtagaccagttaccaatagcgtaaacaagaataattctggatctaaaagagatttattttctcaacaagttagaccagataacggaaattttgacagtagagttctttccagaaatcacgcttgtctcagttgtgatcctacatctggaaagatatatattcgcgatttgaagtccagcaatgggacatttgttaatggggttaaaatacgccaaaatgatgtagaattaaaagttggtgatactgtggatttgggaactgatattgactccaagtttgaacatagaaaaatcagtgcgtatgtggaagagattagtgtaattcccttaatgaacactgtatctgatcccacaaatttggtgatgaaaaaacaagatcatactaataagaataatgggaactccactaatataaacggaataaagatagacagaggtcatcataatcaacacattccaataagatctcatttaaaggaaaattataccgaagctggtgtaacatctgcaacaacggctcaaagggcagcctttgaggcagctatgtttggagatattaataactctgaattagatgatgatattttaggtccagaaactgaggttctcagtggaatttttatcaacaattctgcaggtacaagcataaatttgataaatatgataaaaactttgactactgagctttccttagaaaaacaagagttagaaaaattacattccatgcaaaactttatgcaaaactatacgataaaccttgatttcatcaataagcacatgattgatatgaatgaaaagcatttattgaaattaagcacggctttacaaaaaactttatctgaaaataatgatgcgttgctcaaagaaagtgaagatcaattaaaagaaatcaaacaacaaaataataaagtaaaatctgcatgtagcttgaaggaaaaacaaaaccatgaaaagttacaggagctcgaaagtgaattaagagagttgaaccttcaaatagaagaagagaggggaaaaaatttagttttaacacaaagcaattttaatggtggtattaacaatgacaataacgctaaagtaaaacaaaatgattccagagaagaaaaaaaggataccgaagatacattaataagcactgaagaattaggagtcgtcgaaggcaagagaacaagagttagtaagggaatgctctttggagtagttgccatttctttcggtttagttgcgacggccgttaagcaattgccacaatga

SEQ ID NO: 2187 - DNA, 498 bp, Saccharomyces cerevisiae
atgacagatgctttggaacagagcgtccttgcgttggagggaacagtttcagtattgaaggattctgtggagtctttaaaatgtgcaaatgagccaagcacgaaccttgcatcgacaatgttgcaaaccaaaagggttttccgtttagttcccgaatatgatgttgaaagatcaaaattagatttgattgaagaggtagaaccgctggttaggactctgggcgataagttacgtaaatctatgggtagaatgcaaagggaactcgatactttgcagcaaacttatgaattaaacgatttaaggctaaagaagaacattagtatggatgacgatgatgctctgaatagtccagacatgggtcaagaatacgaaggcagagacgcggacgacgtggttatgatggcatcttctactaatgaggaattggaagaattgaagaaactaaaggaaaagaagaagcaactggagaataagttggaaatactcaaacagaaatag

SEQ ID NO: 2188 - DNA, 498 bp, Artificial Sequence
  Description of Artificial Sequence: Synthetic polynucleotide
atgacagatgctttggaacagagcgtccttgcgttggagggaacagtttctgtattgaaggattctgtggagtctttaaaatgtgcaaatgagccaagcacgaaccttgcaagcacaatgttgcaaaccaaaagggttttccgtttagttcccgaatatgatgttgaaagaagtaaattagatttgattgaagaggtagaaccgttggttaggactttgggcgataagttacgtaaatctatgggtagaatgcaaagggaactcgatactttgcagcaaacttatgaattaaacgatttaaggttaaagaagaacattagtatggatgacgatgatgctttgaatagtccagacatgggtcaagaatacgaaggcagagacgcggacgacgtggttatgatggcatcttctactaatgaggaattggaagaattgaagaaattgaaggaaaagaagaagcaattggagaataagttggaaatactcaaacagaaatga

SEQ ID NO: 2189 - DNA, 1056 bp, Saccharomyces cerevisiae
atgagtgttgatttgtttccaaatgatagatttggtgcagaagataaatacgacaactttaaggatgccgtaaaagaatgctcctggctcatcgaagaaatcgtcaaaccgcaattacccaacattattgacaacttttctaaatgcctagagatgctagagagtgaccaaatattcaaaatgcctgtatctaatggtattcccaacgaaagtaacaaacaaaacgactctccgacggtaaagggtgttatcacaagacaaggccaatacattgttgactttcacattgttgtcagattcccacaatttcaaaggggtaaacaagttatgttccgaatgaatacgggactgaatttcttacttattcaattcagtaagataatgacgcacttgaaaaatattttggaaatactgaatcaacttcaagtagctacagatgtcagcgaattcgtatccaaatttggcgtggccatggaacttttgaaccattctctaatacttttacaaaatcctcctagagacctggtattcccagaagataacaactttgctatgaaggaaatgttccaggattgttactcagtctgcgaatccacagctcacatcctaggactggaacttacgctttgtaggaatgagctttgcatagaactacgaaatctaattaaggtgactaaaaaaccttggtgcgagattgatagtaaaactggcaggtcattttgcgaccaaataagaaatcaagtgacaaatgaaagaaacaaaactttatctaagatcctctcagaaaacggtgtacaagtccaggattccacattacttaaccacataatttcttcttttcaaagtgaagctataacacttccagaagctcaggaattattaagaaggggcgttactttcgataatagggtagtcatggaatgtgaaaagttaatagtatctacaagtgatccaactttgatcagtataagcgccaaattgaacagtctcaaagcttcgatggcgaaccatcaagcaaatttggtagctagcaaacagttaagtacatataagtaa

SEQ ID NO: 2190 - DNA, 1056 bp, Artificial Sequence
  Description of Artificial Sequence: Synthetic polynucleotide
atgagtgttgatttgtttccaaatgatagatttggtgcagaagataaatacgacaactttaaggatgccgtaaaagaatgctcctggctcatcgaagaaatcgtcaaaccgcaattacccaacattattgacaacttttctaaatgcttagagatgttagagagtgaccaaatattcaaaatgcctgtatctaatggtattcccaacgaaagtaacaaacaaaacgactctccgacggtaaagggtgttatcacaagacaaggccaatacattgttgactttcacattgttgtcagattcccacaatttcaaaggggtaaacaagttatgttccgcatgaatacgggattgaatttcttacttattcaattcagtaagataatgacgcacttgaaaaatattttggaaatattgaatcaacttcaagtagctacagatgtcagcgaattcgtatccaaatttggcgtggccatggaacttttgaaccattctttgatacttttacaaaatcctcctagagacttggtattcccagaagataacaactttgctatgaaggaaatgttccaggattgttactctgtctgcgaatccacagctcacatcttgggattagaacttacgctttgtaggaatgagctttgcatagaattaagaaatttaattaaggtgactaaaaaaccttggtgcgagattgatagtaaaactggcaggtctttttgcgaccaaataagaaatcaagtgacaaatgaaagaaacaaaactttatctaagatcctctctgaaaacggtgtacaagtccaggattccacattacttaaccacataatttcttcttttcaaagtgaagctataacacttccagaagctcaggaattattaagaaggggcgttactttcgataatagggtagtcatggaatgtgaaaagttaatagtatctacaagtgatccaactttgatcagtataagcgccaaattgaacagtctcaaagcttccatggcgaaccatcaagcaaatttggtagctagcaaacagttaagtacatataagtga

SEQ ID NO: 2191 - DNA, 1008 bp, Saccharomyces cerevisiae
atgttgaggttatctttactgagatcaacagctactttgccagtgaaatgccaacgtcgtgggctaatattacctgcggcggcaatgtacaccttaggctcattaatatttggtaaggaagcaaggttggcggatgccatggaacgtggtgagttacataacaagaacgttgattatgcgaaagaagctgaagagcgtaccgagttacgtattagggccctggctaatactcggccaatggaacctcggtacaacggccatgttccccttcatcggtacgagaaattgctgctgtttgcaatttccggttggaattcatttttccatcctgaagatggttataatattgtacaattgggtgaggcaactgcattgccggtcttcttggagaatttgaagcaaacaatgttaagtgattcctctgggaggcgcattttgaaggaacaacccaatatcacaacagagattttgcatatggacaaactagctaaattgccacataacacgtttgggtatgtatattaccaatggttgaaaagagaaaacgtttctccggacactagagcacctgtcaaatttatcgacgatcctatgcatgcatatatctttaagaggtatagacaatgccacgatttctatcacgctataaccaacatgcctattatcattgagggggagatcaccataaaggctcttgaaggtgccaacctgggcgtcccaatggccattctcggtggtatccttgcacctttacgtttgaaaaaggtgcaaagaaaaagattatataatatatatctcccttgggctgtcagaacaggtttaagctgcaagccattgatcaacgtgtattgggaggaaatgctggagaaggatgttactgctttgaggaaagagctaaagataacactccctccggatctaaggacaatgaggaaggagcgtgcagcccttaggaaggagattgacgcaaaatacaactcacagaaacgagccacgactccagcatga

SEQ ID NO: 2192 - DNA, 1008 bp, Artificial Sequence
  Description of Artificial Sequence: Synthetic polynucleotide
atgttgaggttatctttattaagatctacagctactttgccagtgaaatgccaacgtcgtgggttgatattacctgcggcggcaatgtacaccttaggctctttaatatttggtaaggaagcaaggttggcggatgccatggaacgtggtgagttacataacaagaacgttgattatgcgaaagaagctgaagagcgtaccgagttacgtattagggccttagctaatactagaccaatggaacctcgttacaacggccatgttccccttcatcgttacgagaaattgttgttatttgcaatttccggttggaattcttttttccatcctgaagatggttataatattgtacaattgggtgaggcaactgcattgccggtcttcttggagaatttgaagcaaacaatgttaagtgattcctctgggaggcgcattttgaaggaacaacccaatatcacaacagagattttgcatatggacaaattggctaaattgccacataacacgtttgggtatgtatattaccaatggttgaaaagagaaaacgtttctccggacactagagcacctgtcaaatttatcgacgatcctatgcatgcatatatctttaagaggtatagacaatgccacgatttctatcacgctataaccaacatgcctattatcattgagggggagatcaccataaaggctcttgaaggtgccaacttgggcgtcccaatggccattctcggtggtatccttgcacctttacgtttgaaaaaggtgcaaagaaaaagattatataatatatatctcccttgggctgtcagaacaggtttaagctgcaagccattgatcaacgtgtattgggaggaaatgttagagaaggatgttactgctttgaggaaagagttgaagataacactccctccggatttaaggacaatgaggaaggagcgtgcagcccttaggaaggagattgacgcaaaatacaactctcagaaaagagccacgactccagcatga

SEQ ID NO: 2193 - DNA, 2175 bp, Saccharomyces cerevisiae
atgaatctgcaagaactattagcgaaagtaccgctgttgttatcgtatccgaccattattctatccagtaatctgatcgtaccttcccataatgatctcatatcacgagcagcctctacatcagcagcagagtatgctgacgaaaagctaatatttttcagtacagatcatgccatcagactgatttttctgccaaccttcgtagcttcttcctttaacctatttgcgcactattttaacttcatcaattactctagccgaaggaagtattatgttttatttactgcaatttatttcctatccatattgactgcgattttccatccaattcagtcaacatgcatcactctattgattatcaagctcctgactaccgctgatgagtcttcgccaaaaattgccctcaatttcaagaccattttgaaaacatttgttccctttattactttaacattagttatattgcgttgggatccttcttttgatgccagctcaggagatgtgaacaaaatttctacgtctttggccgcatatgctctcttaatattaacgctaagatatgcatcaccgctgatattatcgacgttatcaagtagcataggtgttgtttccaaagacaccagcgtcgcacagcattcgataagtagaaataagagatttccgctaattctcgtgttaccgattttttcctttgttcttttgtatctaatgactatagttaacaagacttacaatatccagttattaatggtatttgtgttttttggatgtctgtccattttctttttatcgttaaaagatttgttcacagaggatggaaatcaaaagaagggaggccaggaggatgaatattgtcgtatgtttgacataaagtacatgatttcctatttatggctgacaaggttcaccattttattgacaggcataatggctattgtagtacattttttatcgtttaatgaaattacttcttccatcaaaactgatttgttaagtttacttttcgtcgtagtggcagaatatgtttccagtttctctaacaaacaacctgattcgcactcccataatcatgcacatcaccattcccatctaaccgattcattgcctctcgaaaatgaaagtatgttcaaacaaatggcattgaataaggacaccaggtccattttttcgtttttattgttgaataccgctttcatgtttgtacaacttttatattcctttcgttccaaatcattgggcttattatctgattcgttgcatatggccttagattgcacatctttgctcttaggtctaattgctggtgtattgaccaagaaaccagcaagtgataaattccctttcggtctaaattatcttggtaccttggcaggtttcaccaatggtgttctgttactcggcatagtgtgcggtatctttgtggaggcaattgagagaattttcaaccccattcatcttcatgcaacaaatgagttgttggttgttgctacgttaggcttattagtgaaccttgtaggtttgtttgccttcgaccatggtgcacatgatcatggtggtactgataatgaaaacatgaaggggatttttttacatatattggcagatacattaggttctgttggcgttgttatttcgacgttattaatcaagttaacacactggccaatttttgatccgatcgcctctttattaattggttccttgattttacttagcgctctgcccctgctaaaatctacttccgcaaatattttactaagactggatgacaagaagcataatctagtaaagagtgcgctaaaccagatttcaacgacgccaggaatcacaggttatacaactcctagattttggccgacagagtcaggcagttccgggcattcacatgcacacacgcattctcatgcagagaatcatagccatgagcatcatcatgatcagaaaaacggttcacaagaacacccgagcttggtgggctatattcatgtacagtatgtagacggcgagaattcgacaattatcaagaaaagagttgaaaaaatattcgaaaatgtgtcgattaaagcgtgggtacaagttgagcctcaaaattccacttgttggtgccgggctacttctatgaacacaatttcagctaacccgaattctttaccgctacagcctatagcaaattga

SEQ ID NO: 2194 - DNA, 2175 bp, Artificial Sequence
  Description of Artificial Sequence: Synthetic polynucleotide
atgaatttacaagaattattagcgaaagtaccgttattgttatcttatccgaccattattttatccagtaatttgatcgtaccttcccataatgatctcatatctagagcagcctctacaagtgcagcagagtatgctgacgaaaagttaatatttttcagtacagatcatgccatcagattgatttttttaccaaccttcgtagcttcttcctttaacttgtttgcgcactattttaacttcatcaattactctagcagaaggaagtattatgttttatttactgcaatttatttcttatccatattgactgcgattttccatccaattcagagtacatgcatcactttattgattatcaagctcttaactaccgctgatgagtcttctccaaaaattgccctcaatttcaagaccattttgaaaacatttgttccctttattactttaacattagttatattgcgttgggatccttcttttgatgccagcagtggagatgtgaacaaaatttctacgtctttggccgcatatgctctcttaatattaacgttgagatatgcaagtccgttgatattatctacgttatccagtagcataggtgttgtttccaaagacaccagcgtcgcacagcattccataagtagaaataagagatttccgttgattctcgtgttaccgattttttcctttgttcttttgtatttaatgactatagttaacaagacttacaatatccagttattaatggtatttgtgttttttggatgtttatccattttctttttatctttaaaagatttgttcacagaggatggaaatcaaaagaagggaggccaggaggatgaatattgtcgtatgtttgacataaagtacatgatttcctatttatggttgacaaggttcaccattttattgacaggcataatggctattgtagtacattttttatcttttaatgaaattacttcttccatcaaaactgatttgttaagtttacttttcgtcgtagtggcagaatatgtttccagtttctctaacaaacaacctgattctcactcccataatcatgcacatcaccattcccatttgaccgattctttgcctctcgaaaatgaaagtatgttcaaacaaatggcattgaataaggacaccaggtccattttttcttttttattgttgaataccgctttcatgtttgtacaacttttatattcctttcgttccaaatctttgggcttattatctgattctttgcatatggccttagattgcacatctttgctcttaggtttgattgctggtgtattgaccaagaaaccagcaagtgataaattccctttcggtttgaattatcttggtaccttggcaggtttcaccaatggtgttttattactcggcatagtgtgcggtatctttgtggaggcaattgagagaattttcaaccccattcatcttcatgcaacaaatgagttgttggttgttgctacgttaggcttattagtgaaccttgtaggtttgtttgccttcgaccatggtgcacatgatcatggtggtactgataatgaaaacatgaaggggatttttttacatatattggcagatacattaggttctgttggcgttgttatttctacgttattaatcaagttaacacactggccaatttttgatccgatcgcctctttattaattggttccttgattttacttagcgctcttcccttattgaaatctacttccgcaaatattttattaagattagatgacaagaagcataatttggtaaagagtgcgttgaaccagatttctacgacgccaggaatcacaggttatacaactcctagattttggccgacagagagtggcagttccgggcattctcatgcacacacgcattctcatgcagagaatcatagccatgagcatcatcatgatcagaaaaacggttctcaagaacacccgagcttggtgggctatattcatgtacagtatgtagacggcgagaattctacaattatcaagaaaagagttgaaaaaatattcgaaaatgtgtccattaaagcgtgggtacaagttgagcctcaaaattccacttgttggtgcagagctacttctatgaacacaatttctgctaacccgaattctttaccgttgcagcctatagcaaattga

SEQ ID NO: 2195 - DNA, 2655 bp, Saccharomyces cerevisiae
atggaaccatcgaatacccaaaaagaagatcttcctaccgcttttaatggtataaaaagtcaattaaacagcatattaaaatcgaatcaattatttcaagattatgcgctattaaatgggttcttggcatttgttcattccaaattgaatgccgcaatccttacatctatagaatcacaatgtgggaaatcctttgcggctgatcttgattcttttgatcagagcagtatctcttcgattttagatttttcttgggaaagcgttcactatccaatattcaaatggtttcagatgtggaggaattatattctttttgagaaggagaataaaaaacagcagaccaaatttatcgactttagaaagatgaattcgaagatgttaaaattcttcaaaacggtgcaaaacttctatgtcaacgttatcaacacggtttataagaaatatgatatatctgtacttttgccgaaaaggattatccaagacttaaagttaagtgacatcgaaaataccactaatgttggagacattcttgcggtgaagacatttaatagtagtagcccactcgcacatctcatcccaacgcttttccatcgctgtctcttattcttaggaacagcgtatcgttataaaactctcctcgaagaaatttccaataaatacagcatatccaattttaaaaaatctctggacttctttcgtttagcttcgttggtgttaccaagtgctggtgagacgtattcgcaagcaggagcgatattccttcaaacaggaaatttggggattgcagtattcaattttgttaaaggtatgatgacgaagatgccaagccctgtttcaatcaaaaattttggggcattaatggtggacaataaaagttcattaaatcgtagcttgcatactactatcatgaacacttacttacaagaatctaaaggacccaggacacctgctaaagagatactagaattttatttcctgggcctttttgggtctgtttggtcacctaccagttggagagatgatacaaaacctaaccaattaaataacggtatcaagttaaggcatttggaaaatgcactctacgagacgatgtcagcaagatacctgaataatattaagaccatctttcacaatttgatcattacaattggtgggttccatctattattaaaaaggcgttccgatgtaagtgcaaaaaccttgaaggatttacgtagcaatgaattggattacctaaattttgcattcaagtatattgctcacattttaaatgatatcgttaaggaatcatggagcgaaaatcctgaggtttcagaaattctaggtatggtaagaattatcaattgttggataaaagcaaatcccatggttcttcaatattcacaaagtaatctagagtttgttaatgccttggcatacttgataaatgatattgtgaaaaaaaaaccaagtccttcttttagtataacagaacatattcctaaaaggacatactggttcgaagaagacttaatggtgaagggtttatcattcgttaactttcaactatctgattttgacgattatgaaaaaattcttgaaatggatcatagtctcgatagattaattggtaatccgccattatgcgacaagttatcggcatcatctgaaatgctgttaaggttgcaggctgttgtgaatataagttcgcaattattgcagaacaacaactgcggagtagaatggtcagataataaatcacgttatatctttaataagaaaattggatttaaggagaccgttaaaaatagtatgaagacatcgaagcaatccaatgaaaaggccaagttacaaagaaaaaacaaaccttcgaccactaatggctcaatatccatggcggatttggagagacaaatgagaagtagctctttggattctttttctccaactatgggttatagtggttcgtctgtacctatggccccagatacgttcaatgttaagcccagcggtacaataacggggaacaaagtaaatgtagaactgttaaaaatcgaactaagcggtcaaaacgccgatggcgctattacgaatatatctcctggttacagtaacgcagcgatctcttcttcaaattcgacagatgaatcatccttcgatttgaacaacatcctatcttcaatgcaacaaaagcacgcggaaaaatcatttgccaaatccatgcaaggggtgaatgaacaaattccagcgaatgacgtctgccatcaagcccagaggccaatgcaaggtggtctgtattcatcacagcaaccttcatcgatgtcttcattaaactccgcgtatcagaatgcctcgatgcctccatctgcctccatggtatcctatccctatccttttttgaaccagcaggggcaaggggtctttccgccttataatgcacaaaatttacaatggcagagcgaagcttactcattaaagtcaatgaattttgcaaatccaacgtggctaggtgaccagtaccagacatctgcgccgtcgtcagcatatgcgcaagcgcaacggcaaatgtttcaacaacctatgcagcaagatgtggggaagtacatgcaatttccttttgacgcccaaagcaacacggacagcatgaggggaaacagtcggaataatatgttttaa

SEQ ID NO: 2196 - DNA, 2655 bp, Artificial Sequence
  Description of Artificial Sequence: Synthetic polynucleotide
atggaaccatccaatacccaaaaagaagatcttcctaccgcttttaatggtataaaaagtcaattaaacagcatattaaaatctaatcaattatttcaagattatgcgttattaaatgggttcttggcatttgttcattccaaattgaatgccgcaatccttacatctatagaatctcaatgtgggaaatcctttgcggctgatcttgattcttttgatcagagcagtatctcttccattttagatttttcttgggaaagcgttcactatccaatattcaaatggtttcagatgtggaggaattatattctttttgagaaggagaataaaaaacagcagaccaaatttatcgactttagaaagatgaattctaagatgttaaaattcttcaaaacggtgcaaaacttctatgtcaacgttatcaacacggtttataagaaatatgatatatctgtacttttgccgaaaaggattatccaagacttaaagttaagtgacatcgaaaataccactaatgttggagacattcttgcggtgaagacatttaatagtagtagcccactcgcacatctcatcccaacgcttttccatcgctgtctcttattcttaggaacagcgtatcgttataaaactctcctcgaagaaatttccaataaatacagcatatccaattttaaaaaatctttggacttctttcgtttagcttctttggtgttaccaagtgctggtgagacgtattctcaagcaggagcgatattccttcaaacaggaaatttggggattgcagtattcaattttgttaaaggtatgatgacgaagatgccaagccctgtttccatcaaaaattttggggcattaatggtggacaataaaagttctttaaatcgtagcttgcatactactatcatgaacacttacttacaagaatctaaaggacccaggacacctgctaaagagatattggaattttatttcttgggcctttttgggtctgtttggtctcctaccagttggagagatgatacaaaacctaaccaattaaataacggtatcaagttaaggcatttggaaaatgcactctacgagacgatgtctgcaagatacttgaataatattaagaccatctttcacaatttgatcattacaattggtgggttccatcttttattaaaaaggcgttccgatgtaagtgcaaaaaccttgaaggatttacgtagcaatgaattggattacttgaattttgcattcaagtatattgctcacattttaaatgatatcgttaaggaaagttggagcgaaaatcctgaggtttctgaaattttgggtatggtaagaattatcaattgttggataaaagcaaatcccatggttcttcaatattctcaaagtaatttggagtttgttaatgccttggcatacttgataaatgatattgtgaaaaaaaaaccaagtccttcttttagtataacagaacatattcctaaaaggacatactggttcgaagaagacttaatggtgaagggtttatctttcgttaactttcaattatctgattttgacgattatgaaaaaattcttgaaatggatcatagtctcgatagattaattggtaatccgccattatgcgacaagttaagtgcatcttctgaaatgcttttaaggttgcaggctgttgtgaatataagttctcaattattgcagaacaacaactgcggagtagaatggtctgataataaatctcgttatatctttaataagaaaattggatttaaggagaccgttaaaaatagtatgaagacatccaagcaatccaatgaaaaggccaagttacaaagaaaaaacaaaccttctaccactaatggctctatatccatggcggatttggagagacaaatgagaagtagctctttggattctttttctccaactatgggttatagtggttcttctgtacctatggccccagatacgttcaatgttaagcccagcggtacaataacggggaacaaagtaaatgtagaattattaaaaatcgaattgagcggtcaaaacgccgatggcgctattacgaatatatctcctggttacagtaacgcagcgatctcttcttccaattctacagatgaatcttccttcgatttgaacaacatcctttcttctatgcaacaaaagcacgcggaaaaaagttttgccaaatccatgcaaggggtgaatgaacaaattccagcgaatgacgtctgccatcaagcccagaggccaatgcaaggtggtttatattcttctcagcaaccttcttctatgtcttctttaaactccgcgtatcagaatgcctctatgcctccatctgcctccatggtatcctatccctatccttttttgaaccagcaggggcaaggggtctttccgccttataatgcacaaaatttacaatggcagagcgaagcttactctttaaagtctatgaattttgcaaatccaacgtggttaggtgaccagtaccagacatctgcgccgtcttctgcatatgcgcaagcgcaaagacaaatgtttcaacaacctatgcagcaagatgtggggaagtacatgcaatttccttttgacgcccaaagcaacacggacagcatgaggggaaacagtagaaataatatgttttga

SEQ ID NO: 2197 - DNA, 2511 bp, Saccharomyces cerevisiae
atgctagacaaggcgcgctctcaaagcaaacacatggacgaatctaatgcggctgcctctctgctttcgatggaaacaaccgccaacaatcatcactatttgcacaataaaacatctcgtgccacgctgatgaatagcagccaagacggcaaaaaacatgcagaagatgaagttagtgatggagctaactcccgccatcctacaatttccagtgctagcatcgaatctctcaagacaacctacgatgaaaaccctttgctttctattatgaaatcgacatgtgcgcccaacaacactcccgtgcatactccgtctggttcgccgagtttgaaagtccaaagtggcggagatatcaaagacgatcctaaggaaaacgatactactactacgaccaatactacacttcaagatcgccgtgacagcgataacgctgtgcatgctgccgccagcccactcgcgccttccaatacaccttcggatcctaagtcattgtgcaatggccatgtcgcacaggctacagacccacaaatttccggtgctattcagccgcagtatactgcaaccaacgaggatgttttcccttactcctccacctccactaatagtaacactgccactactactatcgtcgccggcgccaaaaaaaaaatacatttgccgccaccacaagctccagcggtttcttcccccggtaccaccgcagcaggctcgggcgcgggcacgggctcgggcatccgttcccgcacaggatcggatttgccgctcatcattaccagcgccaacaagaacaacggtaagactaccaattcgcctatgtcgatactgagcagaaacaacagtaccaacaacaacgacaataattcgatacaaagctcagattcgagagaatcctctaataacaatgagattggcgggtatttgcgcggcggaactaagcgcggcggcagtccatctaacgactctcaggtccagcataatgtgcatgatgaccaatgtgccgtgggcgtggcgcccaggaacttctatttcaacaaggatagagagataacagacccaaatgtaaaactggacgagaacgaatcaaaaatcaacatatcgttctggctaaattcgaaatacagagatgaggcttattctttgaatgaatcatcctccaacaatgctagttcaaacacggatacgcctacaaactctcgacatgcgaacaccagctcttccattaccagcagaaacaatttccagcattttaggttcaaccaaataccttctcaacctccaacttccgcatcttcgtttacaagcacaaacaacaacaaccctcaacggaacaatatcaatcgcggtgaagacccgtttgccacttcgtcaagaccttctactgggtttttttacggcgatttgccgaatcgtaacaatagaaatagtcccttccatacaaatgaacaatacatcccaccacctccaccgaaatacatcaattctaaattggatggattgagatcaagattattgctcggtccgaattctgcatcttcatctaccaaactagacgacgacttgggtacagcagcagcagtgctatcaaacatgagatcatccccatatagaactcatgataaacccatttccaatgtcaatgacatgaataacacaaatgcgctcggtgtgccggctagtaggcctcattcgtcatcttttccatcaaagggtgtcttaagaccaattctgttacgtatccataattccgaacaacaacccattttcgaaagcaacaattctacagctgtttttgatgaagaccaggaccaaaatcaagacttgtctccttaccatttaaatctaaactctaaaaaggttttagatcccacttttgagtcaaggacaaggcaagttacttggaataagaatggtaagcgaatagacagacgcctttctgctccagaacaacaacagcaactggaagttccaccattgaaaaaatcgagaaggtcagttggaaacgcaagagtagcaagccaaaccaatagcgattataattctcttggcgaatcctcaacttcgtcagctccatcgtctccatctttgaaggcttcttctggcttggcatataccgctgattatcctaacgctacttcgccggatttcgctaaatctaaaggaaaaaatgtcaagcctaaggcaaaatcaaaggcgaaacagtcatcaaagaaaagaccaaataatactacttcgaaatcaaaagcaaacaattctcaagaatcgaataatgctacttcctcaacgtctcaaggtacaaggtcccgtactggttgctggatttgtagattaaggaaaaagaagtgtaccgaggaaagaccgcactgtttcaactgtgaaaggttgaaattggactgtcactatgacgcgttcaaaccagattttgtatctgatccaaagaaaaaacagatgaaactggaggaaatcaagaaaaaaacaaaagaggccaaaagaagagcaatgaaaaaaaaataa

SEQ ID NO: 2198 - DNA, 2511 bp, Artificial Sequence
  Description of Artificial Sequence: Synthetic polynucleotide
atgttggacaaggcgcgctctcaaagcaaacacatggacgaatctaatgcggctgcctctttactttctatggaaacaaccgccaacaatcatcactatttgcacaataaaacatctcgtgccacgttgatgaatagcagccaagacggcaaaaaacatgcagaagatgaagttagtgatggagctaactcccgccatcctacaatttccagtgctagcatcgaatctctcaagacaacctacgatgaaaaccctttgctttctattatgaaatctacatgtgcgcccaacaacactcccgtgcatactccgtctggttctccgagtttgaaagtccaaagtggcggagatatcaaagacgatcctaaggaaaacgatactactactacgaccaatactacacttcaagatcgccgtgacagcgataacgctgtgcatgctgccgccagcccactcgcgccttccaatacaccttctgatcctaagtctttgtgcaatggccatgtcgcacaggctacagacccacaaatttccggtgctattcagccgcagtatactgcaaccaacgaggatgttttcccttactcctccacctccactaatagtaacactgccactactactatcgtcgccggcgccaaaaaaaaaatacatttgccgccaccacaagctccagcggtttcttcccccggtaccaccgcagcaggcagtggcgcgggcacgggcagtggcatccgttcccgcacaggaagtgatttgccgctcatcattaccagcgccaacaagaacaacggtaagactaccaattctcctatgagtatattaagcagaaacaacagtaccaacaacaacgacaataattctatacaaagcagtgattccagagaatcctctaataacaatgagattggcgggtatttgcgcggcggaactaagcgcggcggcagtccatctaacgactctcaggtccagcataatgtgcatgatgaccaatgtgccgtgggcgtggcgcccaggaacttctatttcaacaaggatagagagataacagacccaaatgtaaaattagacgagaacgaaagtaaaatcaacatatctttctggttaaattctaaatacagagatgaggcttattctttgaatgaatcttcctccaacaatgctagtagtaacacggatacgcctacaaactctagacatgcgaacaccagctcttccattaccagcagaaacaatttccagcattttaggttcaaccaaataccttctcaacctccaacttccgcatcttcttttacaagcacaaacaacaacaaccctcaaagaaacaatatcaatcgcggtgaagacccgtttgccacttcttctagaccttctactgggtttttttacggcgatttgccgaatcgtaacaatagaaatagtcccttccatacaaatgaacaatacatcccaccacctccaccgaaatacatcaattctaaattggatggattgagatctagattattgctcggtccgaattctgcatcttcttctaccaaattagacgacgacttgggtacagcagcagcagtgctttccaacatgagaagttccccatatagaactcatgataaacccatttccaatgtcaatgacatgaataacacaaatgcgctcggtgtgccggctagtaggcctcattcttcttcttttccatctaagggtgtcttaagaccaattttattacgtatccataattccgaacaacaacccattttcgaaagcaacaattctacagctgtttttgatgaagaccaggaccaaaatcaagacttgtctccttaccatttaaatttgaactctaaaaaggttttagatcccacttttgagtccaggacaaggcaagttacttggaataagaatggtaagagaatagacagacgcctttctgctccagaacaacaacagcaattggaagttccaccattgaaaaaatctagaaggtctgttggaaacgcaagagtagcaagccaaaccaatagcgattataattctcttggcgaatccagcacttcttctgctccatcttctccatctttgaaggcttcttctggcttggcatataccgctgattatcctaacgctacttctccggatttcgctaaatctaaaggaaaaaatgtcaagcctaaggcaaaatccaaggcgaaacagtcttccaagaaaagaccaaataatactacttctaaatctaaagcaaacaattctcaagaaagtaataatgctacttcctctacgtctcaaggtacaaggtcccgtactggttgctggatttgtagattaaggaaaaagaagtgtaccgaggaaagaccgcactgtttcaactgtgaaaggttgaaattggactgtcactatgacgcgttcaaaccagattttgtatctgatccaaagaaaaaacagatgaaattagaggaaatcaagaaaaaaacaaaagaggccaaaagaagagcaatgaaaaaaaaatga

SEQ ID NO: 2199 - DNA, 2340 bp, Saccharomyces cerevisiae
atgtcagtcttgcgatcacaacctccttcagttgtaccgctacatctgacaacatccaccagtcgcaaaacagaacaggaaccatcgctattgcactctgcaataattgagcgacatcaagaccgttcggtgccgaattcgaattcgaatccggattcgaaccatcgaataaaaaaggatcgcaataatcacactagctaccattcttcatcgaattcggagtcaaacatggaaagtcctcgcttgtcagatggtgagtcttccactccgacctctattgaagagttaaacccaacaataaataattcgaggctggtgaagagaaactactcaatatcaattgatcctttgcatgacaacagcaataataatacggatgatgatcatccaaacaccataacttctccccgaccaaatagcactagtaacaaggaaatgcagaaatatagttttcccgaaggtaaggagtcgaagaaaataacaacaccctcgttaaactcgaataattgtttggatttggacaattccagtcttgttcacacagattcgtatatacaagacttaaatgacgatcatattttactaaacaagcgcgtttcgaggcgatcttccagaatatcggcagtaacagcaacttccacgacaattaagcaaagaagaaatactcaggattcaaacctgcccaatattccctttcacgcttccaagcattctcaaattctacctatggatgattcagatgtaataaaattggccaatggagataccagcatgaaaccaaattctgctactaaaattagtcactcaatgacttctttgcctcttcacccacttccacaaccttctcaaaagtcaaagcaatatcatatgatatccaaatcaaccacttctttgccgccagagaatgaccactactatcaacacagtcgtggcaccaaccataatcacgctgctaatgctgctgctgttaataataatactactactactaccgctgctacgggtctgaaaagatcagagtctgcaacggcagaaattaagaagatgagacaatctttgctgcataaaagagaaatgaaaaggaaaagaaaaacatttttggtggatgacgatcgtgttttgatcggtaataaagtcagtgaaggccatgtcaactttattatagcttataacatgctaactggtattcgtgtcgcagtgtcacgttgttctggcataatgaaacctttaactccggcagactttagatttacgaagaagcttgcctttgattatcacggaaatgaattgaccccttcttctcagtatgcatttaagtttaaggactactgtcccgaagtctttagggaacttcgtgcattattcggcttagaccctgctgattatttggtttcgttaacttccaagtacattttgagtgagttgaactcgccaggtaaaagtggttcatttttttattattcgagagattacaaatatattatcaagaccatacatcattctgagcatattcatctgagaaagcacatacaagaatactataaccatgtaagagacaatccaaacactttgatttgtcaattttatggtttgcatagagtgaaaatgcctatatcgtttcaaaataaaattaagcatcggaaaatttacttcctagtcatgaataacttatttccaccacacttagacattcacattacttatgatttaaaaggttccacatggggccgttttaccaatttggataaagaaaggttggcgaaagatagatcatataggcctgtgatgaaagatttaaattggcttgaagaaggtcagaaaattaaattcggtccattgaagaagaagacttttttgacacagctgaaaaaagatgtggaattgcttgctaaattgaatacaatggactattccttgttaattggcattcatgacatcaataaagctaaagaagacgacttacaattggcggatacggcatctattgaggagcaaccacagactcaaggacccataagaaccggtaccggaacggtagtacgacatttttttagagagtttgaaggtggaattcgagcatctgatcaattcaacaatgatgtggatttgatttattacgtggggataatcgatttcttgactaattactcagttatgaagaaattagaaacgttttggagaagtctacgccatgataccaagttggtgagtgccatacctccaagagactacgccaataggttttacgaattcatagaagattctgtagatcctctgccccagaaaaaaactcaatcgtcgtatagagacgaccctaaccagaaaaattataaagactga

SEQ ID NO: 2200 - DNA, 2340 bp, Artificial Sequence
  Description of Artificial Sequence: Synthetic polynucleotide
atgtctgtcttgagatctcaacctccttctgttgtaccgcttcatttaacaacatccaccagtcgcaaaacagaacaggaaccatctttgttgcactctgcaataattgagagacatcaagaccgttctgtgccgaatagtaatagtaatccggattccaaccatagaataaaaaaggatcgcaataatcacactagctaccattcttcttccaattctgagagcaacatggaaagtcctcgcttgagtgatggtgagtcttccactccgacctctattgaagagttaaacccaacaataaataattctaggttggtgaagagaaactactctatatctattgatcctttgcatgacaacagcaataataatacggatgatgatcatccaaacaccataacttctcccagaccaaatagcactagtaacaaggaaatgcagaaatatagttttcccgaaggtaaggagtctaagaaaataacaacaccctctttaaacagtaataattgtttggatttggacaattccagtcttgttcacacagattcttatatacaagacttaaatgacgatcatattttattaaacaagcgcgtttccaggcgttcttccagaatatctgcagtaacagcaacttccacgacaattaagcaaagaagaaatactcaggattccaacttgcccaatattccctttcacgcttccaagcattctcaaattttacctatggatgattctgatgtaataaaattggccaatggagataccagcatgaaaccaaattctgctactaaaattagtcactccatgacttctttgcctcttcacccacttccacaaccttctcaaaagtccaagcaatatcatatgatatccaaatctaccacttctttgccgccagagaatgaccactactatcaacacagtcgtggcaccaaccataatcacgctgctaatgctgctgctgttaataataatactactactactaccgctgctacgggtttgaaaagaagtgagtctgcaacggcagaaattaagaagatgagacaatctttgttgcataaaagagaaatgaaaaggaaaagaaaaacatttttggtggatgacgatcgtgttttgatcggtaataaagtcagtgaaggccatgtcaactttattatagcttataacatgttgactggtattcgtgtcgcagtgtctcgttgttctggcataatgaaacctttaactccggcagactttagatttacgaagaagcttgcctttgattatcacggaaatgaattgaccccttcttctcagtatgcatttaagtttaaggactactgtcccgaagtctttagggaacttcgtgcattattcggcttagaccctgctgattatttggtttctttaacttccaagtacattttgagtgagttgaactctccaggtaaaagtggttcttttttttattattctagagattacaaatatattatcaagaccatacatcattctgagcatattcatttaagaaagcacatacaagaatactataaccatgtaagagacaatccaaacactttgatttgtcaattttatggtttgcatagagtgaaaatgcctatatcctttcaaaataaaattaagcatagaaaaatttacttcttggtcatgaataacttatttccaccacacttagacattcacattacttatgatttaaaaggttccacatggggccgttttaccaatttggataaagaaaggttggcgaaagatagatcttataggcctgtgatgaaagatttaaattggcttgaagaaggtcagaaaattaaattcggtccattgaagaagaagacttttttgacacagttgaaaaaagatgtggaattgcttgctaaattgaatacaatggactattccttgttaattggcattcatgacatcaataaagctaaagaagacgacttacaattggcggatacggcatctattgaggagcaaccacagactcaaggacccataagaaccggtaccggaacggtagtaagacatttttttagagagtttgaaggtggaattagagcatctgatcaattcaacaatgatgtggatttgatttattacgtggggataatcgatttcttgactaattactctgttatgaagaaattagaaacgttttggagaagtttacgccatgataccaagttggtgagtgccatacctccaagagactacgccaataggttttacgaattcatagaagattctgtagatcctttgccccagaaaaaaactcaatcttcttatagagacgaccctaaccagaaaaattataaagactga

SEQ ID NO: 2201 - DNA, 414 bp, Saccharomyces cerevisiae
atgaacgatggtcaattcttgttccaacgtaacgatcccatcatattatatacatttttgcttaaaagtaattatacagtctttcgcagcatagatgaaaggctatgtgatttcgttttttatattgaccacttcttgaacaaacgaatcagttatcgcataccaattctaataagaaacaacaacacaaacattttaaacaactgtccaagcagctttcctcctttggttgaccttgttggacatagactggttgctgctgaggataaccctgttgcggtggaccttgttgataataaccttgttgtggtggaccttgttgataataaccttgctgtgggggtccttgttggtagtaaccttgttgttggctcattagttttcgctcttttgacttgtttcgaagacggatag

SEQ ID NO: 2202 - DNA, 414 bp, Artificial Sequence
  Description of Artificial Sequence: Synthetic polynucleotide
atgaacgatggtcaattcttgttccaacgtaacgatcccatcatattatatacatttttgcttaaaagtaattatacagtctttcgcagcatagatgaaaggttatgtgatttcgttttttatattgaccacttcttgaacaaaagaatcagttatcgcataccaattttaataagaaacaacaacacaaacattttaaacaactgtccaagcagctttcctcctttggttgaccttgttggacatagattggttgctgctgaggataaccctgttgcggtggaccttgttgataataaccttgttgtggtggaccttgttgataataaccttgctgtgggggtccttgttggtagtaaccttgttgttggctctttagttttcgctcttttgacttgtttcgaagacggatga

SEQ ID NO: 2203 - DNA, 228 bp, Saccharomyces cerevisiae
atgagccaacaacaaggttactaccaacaaggacccccacagcaaggttattatcaacaaggtccaccacaacaaggttattatcaacaaggtccaccgcaacagggttatcctcagcagcaaccagtctatgtccaacaaggtcaaccaaaggaggaaagctgcttggacagttgtttaaaatgtttgtgttgttgtttcttattagaattggtatgcgataactga

SEQ ID NO: 2204 - DNA, 228 bp, Artificial Sequence; identical to SEQ ID NO: 2203
  Description of Artificial Sequence: Synthetic polynucleotide

SEQ ID NO: 2205 - DNA, 2139 bp, Saccharomyces cerevisiae
atggctggaaaaaagggacaaaagaaaagtggactaggcaaccatggaaagaactctgatatggatgttgaagatcgtctccaggccgttgtcttgacagactcttatgaaactaggtttatgccactgacagctgtcaagccaaggtgtttgctgccactggctaacgtacctctcattgaatacaccttagaatttttggctaaggctggcgtacatgaagttttcttaatttgctcttctcatgccaaccaaattaatgactatattgagaattctaagtggaacttgccttggtctccatttaaaattaccaccattatgtctccagaagctagatgtacgggtgatgttatgagagatctagataatagaggtatcattactggagattttattttagtcagtggtgatgtattgactaacatcgatttcagcaaaatgctagaatttcacaaaaaaatgcatttgcaagataaagatcacatctcgacaatgtgtttgagcaaagcgagtacctatccaaaaacaagaactattgagcctgccgcatttgtcttagacaaatccaccagtaggtgtatttattaccaagatttaccattaccaagctctagagagaagacttccattcagattgacccagaattgttggataatgtcgatgaatttgtcataaggaatgacctcatcgattgtagaattgacatttgtacatctcatgtacctttgatatttcaagaaaattttgactaccaatcattaaggacagactttgttaaaggtgtcatttcaagcgatatattgggaaagcatatatatgcctatttgacggacgaatatgctgtaagagttgaaagttggcaaacttacgacaccatttctcaagactttttaggtagatggtgttatcccttggtcttagactctaacatacaggacgatcaaacgtattcttatgaatcaagacatatatacaaggaaaaagacgttgttttggcccaatcctgtaaaattggtaagtgcactgcaattggatcaggaacaaaaatcggagagggtacgaaaattgagaattccgtgattggaaggaactgccaaatcggtgaaaatattagaatcaagaacagtttcatttgggatgactgtatcatcggaaataacagtataattgaccattcattaattgcctctaatgccacgttagggagtaatgtacgcctaaatgatggctgtataattggtttcaacgttaaaattgatgataatatggatttagatagaaacacaaaaatatctgccagtccattaaaaaatgccggctcaagaatgtatgataatgaaagcaatgagcagtttgaccaagaccttgatgatcagacactagccgtttctattgttggagataagggtgttggttatatttacgaaagcgaggtgtctgacgatgaagatagttctacagaagcctgcaaagaaataaacactttgagtaaccaattagatgagttatacttaagtgacgattcaatttcttccgccactaaaaagacaaagaaaagaagaacgatgtctgtcaatagtatatacacggatagagaagaaattgattctgaatttgaggacgaagattttgagaaagaaggtattgccaccgtggagcgtgctatggaaaacaatcatgatcttgacacagcattattagaattgaacaccttgagaatgagtatgaacgtgacatatcatgaggtgagaatagcaacaataactgcattattgagaagagtttaccactttattgcaactcaaacattaggtcccaaggacgctgtggtgaaggtttttaatcagtggggactgttgttcaagagacaagcctttgatgaagaagagtatattgatttgatgaacatcataatggaaaaaattgtagaacagagttttgacaaaccggatttgattctatttagtgcattggtttctctatacgataatgacataattgaggaggatgtcatttataaatggtgggataatgtttctactgaccctcgctatgatgaagtcaagaaattaactgtaaagtgggttgagtggttacagaatgctgacgaagaatcttcctcagaagaggaataa

SEQ ID NO: 2206 - DNA, 2139 bp, Artificial Sequence
  Description of Artificial Sequence: Synthetic polynucleotide
atggctggaaaaaagggacaaaagaaaagtggattgggcaaccatggaaagaactctgatatggatgttgaagatcgtctccaggccgttgtcttgacagactcttatgaaactaggtttatgccattaacagctgtcaagccaaggtgtttgttaccattggctaacgtacctctcattgaatacaccttagaatttttggctaaggctggcgtacatgaagttttcttaatttgctcttctcatgccaaccaaattaatgactatattgagaattctaagtggaacttgccttggtctccatttaaaattaccaccattatgtctccagaagctagatgtacgggtgatgttatgagagatttggataatagaggtatcattactggagattttattttagtcagtggtgatgtattgactaacatcgatttcagcaaaatgttggaatttcacaaaaaaatgcatttgcaagataaagatcacatcagtacaatgtgtttgagcaaagcgagtacctatccaaaaacaagaactattgagcctgccgcatttgtcttagacaaatccaccagtaggtgtatttattaccaagatttaccattaccaagctctagagagaagacttccattcagattgacccagaattgttggataatgtcgatgaatttgtcataaggaatgacctcatcgattgtagaattgacatttgtacatctcatgtacctttgatatttcaagaaaattttgactaccaatctttaaggacagactttgttaaaggtgtcatttctagcgatatattgggaaagcatatatatgcctatttgacggacgaatatgctgtaagagttgaaagttggcaaacttacgacaccatttctcaagactttttaggtagatggtgttatcccttggtcttagactctaacatacaggacgatcaaacgtattcttatgaatctagacatatatacaaggaaaaagacgttgttttggcccaatcctgtaaaattggtaagtgcactgcaattggatctggaacaaaaatcggagagggtacgaaaattgagaattccgtgattggaaggaactgccaaatcggtgaaaatattagaatcaagaacagtttcatttgggatgactgtatcatcggaaataacagtataattgaccattctttaattgcctctaatgccacgttagggagtaatgtacgcttgaatgatggctgtataattggtttcaacgttaaaattgatgataatatggatttagatagaaacacaaaaatatctgccagtccattaaaaaatgccggctccagaatgtatgataatgaaagcaatgagcagtttgaccaagaccttgatgatcagacattggccgtttctattgttggagataagggtgttggttatatttacgaaagcgaggtgtctgacgatgaagatagttctacagaagcctgcaaagaaataaacactttgagtaaccaattagatgagttatacttaagtgacgattctatttcttccgccactaaaaagacaaagaaaagaagaacgatgtctgtcaatagtatatacacggatagagaagaaattgattctgaatttgaggacgaagattttgagaaagaaggtattgccaccgtggagcgtgctatggaaaacaatcatgatcttgacacagcattattagaattgaacaccttgagaatgagtatgaacgtgacatatcatgaggtgagaatagcaacaataactgcattattgagaagagtttaccactttattgcaactcaaacattaggtcccaaggacgctgtggtgaaggtttttaatcagtggggattattgttcaagagacaagcctttgatgaagaagagtatattgatttgatgaacatcataatggaaaaaattgtagaacagagttttgacaaaccggatttgattttatttagtgcattggtttctttgtacgataatgacataattgaggaggatgtcatttataaatggtgggataatgtttctactgaccctcgctatgatgaagtcaagaaattaactgtaaagtgggttgagtggttacagaatgctgacgaagaatcttccagtgaagaggaatga

SEQ ID NO: 2207 - DNA, 1680 bp, Saccharomyces cerevisiae
atgtcccaattattcaataactcgcgctcagatacccttttcctaggaggtgaaaaaataagtggtgatgatattcgtaatcagaatgttttggctactatggctgtggctaacgtcgtcaagtcatctttaggccccgttggactggacaaaatgcttgttgatgacattggtgattttaccgtcaccaacgatggtgccactattttgtctttgttagatgttcaacatccagctggaaaaattttagtagaattggctcaacaacaggacagagaaattggtgacggtactactagtgttgttattattgcttctgagttgttgaaaagagctaatgaattagtcaaaaataagattcatccaactaccatcataactggtttcagggttgcattaagagaggctattcgttttataaatgaagttctttccacaagtgttgacactttagggaaagagacgttaattaatatagccaagactagtatgtcctctaagatcattggtgctgactctgattttttcagcaatatggttgtagatgctcttttggctgttaagacgcaaaattccaaaggagaaatcaagtatcccgtaaaggctgtcaatgtgttgaaagctcatggtaaatctgccactgaatcactgttggtgccaggttatgctttgaattgtacagttgcttctcaagcaatgcctaaacgtatcgccggtggcaatgtgaaaatcgcatgtttggatttgaacttgcagaaagctcgtatggcaatgggtgttcaaatcaacattgatgatccggaacaattggagcaaatccgtaaacgtgaagctggtattgttttggaaagagtgaagaagatcattgatgctggtgctcaagttgtgttaaccaccaaaggtattgatgatttatgcttaaaggagttcgttgaagctaagataatgggtgtaagacgctgtaagaaggaagatttgagaagaattgcacgcgctacaggcgccactttggttagttctatgtctaacttagaaggtgaggaaactttcgaaagcagttatttaggtctttgtgatgaagtagttcaagccaaattttctgatgatgagtgtatcttaattaagggtacttctaaacattcatcttcttcgatcattttaagaggtgccaacgattattctttagatgagatggaacgttctttgcacgattctctttctgttgtcaaaagaacgcttgaaagtggaaatgttgtccccggtggaggttgcgttgaagccgcattgaatatctatttggacaattttgccaccacagttggttctcgtgaacagttagctattgctgagtttgcagctgcattattaatcattccaaaaactttagctgttaacgctgccaaggattctagtgaattagttgcaaaattaaggtcctaccatgccgctagtcaaatggccaagccagaggacgttaagaggagaagctacagaaattacggcctagatttgattagaggtaaaattgtggacgagattcacgctggtgttcttgagccaaccataagcaaagtcaaatccttgaaatcagcattggaggcttgtgtagcaattctaagaattgatacaatgattacagtggatccagaaccacccaaagaagatccgcacgatcattga

SEQ ID NO: 2208 - DNA, 1680 bp, Artificial Sequence
  Description of Artificial Sequence: Synthetic polynucleotide
atgtcccaattattcaataactctcgctctgatacccttttcttgggaggtgaaaaaataagtggtgatgatattcgtaatcagaatgttttggctactatggctgtggctaacgtcgtcaagtcttctttaggccccgttggattggacaaaatgcttgttgatgacattggtgattttaccgtcaccaacgatggtgccactattttgtctttgttagatgttcaacatccagctggaaaaattttagtagaattggctcaacaacaggacagagaaattggtgacggtactactagtgttgttattattgcttctgagttgttgaaaagagctaatgaattagtcaaaaataagattcatccaactaccatcataactggtttcagggttgcattaagagaggctattcgttttataaatgaagttctttccacaagtgttgacactttagggaaagagacgttaattaatatagccaagactagtatgtcctctaagatcattggtgctgactctgattttttcagcaatatggttgtagatgctcttttggctgttaagacgcaaaattccaaaggagaaatcaagtatcccgtaaaggctgtcaatgtgttgaaagctcatggtaaatctgccactgaatctttgttggtgccaggttatgctttgaattgtacagttgcttctcaagcaatgcctaaacgtatcgccggtggcaatgtgaaaatcgcatgtttggatttgaacttgcagaaagctcgtatggcaatgggtgttcaaatcaacattgatgatccggaacaattggagcaaatccgtaaacgtgaagctggtattgttttggaaagagtgaagaagatcattgatgctggtgctcaagttgtgttaaccaccaaaggtattgatgatttatgcttaaaggagttcgttgaagctaagataatgggtgtaagacgctgtaagaaggaagatttgagaagaattgcacgcgctacaggcgccactttggttagttctatgtctaacttagaaggtgaggaaactttcgaaagcagttatttaggtctttgtgatgaagtagttcaagccaaattttctgatgatgagtgtatcttaattaagggtacttctaaacattcttcttcttctatcattttaagaggtgccaacgattattctttagatgagatggaacgttctttgcacgattctctttctgttgtcaaaagaacgcttgaaagtggaaatgttgtccccggtggaggttgcgttgaagccgcattgaatatctatttggacaattttgccaccacagttggttctcgtgaacagttagctattgctgagtttgcagctgcattattaatcattccaaaaactttagctgttaacgctgccaaggattctagtgaattagttgcaaaattaaggtcctaccatgccgctagtcaaatggccaagccagaggacgttaagaggagaagctacagaaattacggcttggatttgattagaggtaaaattgtggacgagattcacgctggtgttcttgagccaaccataagcaaagtcaaatccttgaaatctgcattggaggcttgtgtagcaattttaagaattgatacaatgattacagtggatccagaaccacccaaagaagatccgcacgatcattga

SEQ ID NO: 2209 - DNA, 2742 bp, Saccharomyces cerevisiae
atgagcgaagtcggtatacagaatcacaagaaagcggtgacaaaacccagaagaagagaaaaagtcatcgagctaattgaagtggacggcaaaaaggtgagtacgacttcaaccggtaaacgtaaattccataacaaatcaaagaatgggtgcgataactgtaaaagaagaagagttaagtgtgatgaagggaagccagcctgtaggaagtgcacaaatatgaagttggaatgtcagtatacaccaatccatttaaggaaaggtagaggagcaacagtagtgaagtatgtcacgagaaaggcagacggtagcgtggagtctgattcatcggtagatttacctcctacgatcaagaaggagcagacaccgttcaatgatatccaatcagcggtaaaagcttcaggctcatccaatgattcctttccatcaagcgcctctacaactaagagtgagagcgaggaaaagtcatcggcccctatagaggacaaaaacaatatgactcctctaagtatgggcctccagggtaccatcaataagaaagatatgatgaataactttttctctcaaaatggcactattggttttggttctcctgaaagattgaattcaggtatcgatggcttactattaccgccattgccttctggaaatatgggtgcgttccaacttcagcaacagcagcaagtgcagcagcaatctcaaccacagacccaagcgcagcaagcaagtggaactccaaacgagagatatggttcattcgatcttgcgggtagtcctgcattgcaatccacgggaatgagcttatcaaatagtctaagcgggatgttactatgtaacaggattccttccggccaaaactacactcaacaacaattacaatatcaattacaccagcagctgcaattgcaacagcatcagcaagttcagctgcagcagtatcaacaattacgtcaggaacaacaccaacaagttcagcaacaacaacaggaacaactccagcaataccaacaacattttttgcaacagcagcaacaagtactgcttcagcaagagcaacaacctaacgatgaggaaggtggcgttcaggaagaaaacagcaaaaaggtaaaggaagggcctttacaatcacaaacaagcgaaactactttaaacagcgatgctgctacattacaagctgatgcattatctcagttaagtaagatggggctaagcctaaagtcgttaagtacctttccaacagctggtattggtggtgtttcctatgactttcaggaactgttaggtattaagtttccaataaataacggcaattcaagagctactaaggccagcaacgcagaggaagctttggccaatatgcaagagcatcatgaacgtgcagctgcttctgtaaaggagaatgatggtcagctctctgatacgaagagtccagcgccatcgaataacgcccaagggggaagtgctagtattatggaacctcaggcggctgatgcggtttcgacaatggcgcctatatcaatgattgaaagaaacatgaacagaaacagcaacatttctccatcaacgccctctgcagtgttgaatgataggcaagagatgcaagattctataagttctctaggaaatctgacaaaagcagccttggagaacaacgaaccaacgataagtttacaaacatcacagacagagaatgaagacgatgcatcgcggcaagacatgacctcaaaaattaataacgaagctgaccgaagttctgtttctgctggtaccagtaacatcgctaagcttttagatctttctaccaaaggcaatctgaacctgatagacatgaaactgtttcatcattattgcacaaaggtctggcctacgattacagcggccaaagtttctgggcctgaaatatggagggactacataccggagttagcatttgactatccatttttaatgcacgctttgttggcattcagtgccacccatctttcgaggactgaaactggactggagcaatacgtttcatctcaccgcctagacgctctgagattattaagagaagctgttttagaaatatctgagaataacaccgatgcgctagttgccagcgccctgatactaatcatggactcgttagcaaatgctagtggtaacggcactgtaggaaaccaaagtttgaatagcatgtcaccaagcgcttggatctttcatgtcaaaggtgctgcaacaattttaaccgctgtgtggcctttgagtgaaagatctaaatttcataacattatatctgttgatcttagcgatttaggcgatgtcattaaccctgatgttggaacaattactgaattggtatgttttgatgaaagtattgccgatttgtatcctgtcggcttagattcgccatatttgataacactagcttatttagataaattgcaccgtgaaaaaaaccagggtgattttattctgcgggtatttacatttccagcattgctagacaagacattcctggcattactgatgacaggtgatttaggtgcaatgagaattatgagatcatattataaactacttcgaggatttgccacagaggtcaaggataaagtctggtttctcgaaggagtcacgcaggtgctgcctcaagatgttgacgaatacagtggaggtggtggtatgcatatgatgctagatttcctcggtggcggattaccatcgatgacaacaacaaatttctctgatttttcgttatga

SEQ ID NO: 2210 - DNA, 2742 bp, Artificial Sequence
  Description of Artificial Sequence: Synthetic polynucleotide
atgagcgaagtcggtatacagaatcacaagaaagcggtgacaaaacccagaagaagagaaaaagtcatcgagttgattgaagtggacggcaaaaaggtgagtacgacttctaccggtaaacgtaaattccataacaaatccaagaatgggtgcgataactgtaaaagaagaagagttaagtgtgatgaagggaagccagcctgtaggaagtgcacaaatatgaagttggaatgtcagtatacaccaatccatttaaggaaaggtagaggagcaacagtagtgaagtatgtcacgagaaaggcagacggtagcgtggagtctgattcttctgtagatttacctcctacgatcaagaaggagcagacaccgttcaatgatatccaaagtgcggtaaaagcttctggcagctccaatgattcctttccatccagcgcctctacaactaagagtgagagcgaggaaaagtcttctgcccctatagaggacaaaaacaatatgactcctttgagtatgggcctccagggtaccatcaataagaaagatatgatgaataactttttctctcaaaatggcactattggttttggttctcctgaaagattgaattctggtatcgatggcttattattaccgccattgccttctggaaatatgggtgcgttccaacttcagcaacagcagcaagtgcagcagcaatctcaaccacagacccaagcgcagcaagcaagtggaactccaaacgagagatatggttctttcgatcttgcgggtagtcctgcattgcaatccacgggaatgagcttatccaatagtttaagcgggatgttattatgtaacaggattccttccggccaaaactacactcaacaacaattacaatatcaattacaccagcagttacaattgcaacagcatcagcaagttcagttacagcagtatcaacaattacgtcaggaacaacaccaacaagttcagcaacaacaacaggaacaactccagcaataccaacaacattttttgcaacagcagcaacaagtattgcttcagcaagagcaacaacctaacgatgaggaaggtggcgttcaggaagaaaacagcaaaaaggtaaaggaagggcctttacaatctcaaacaagcgaaactactttaaacagcgatgctgctacattacaagctgatgcattatctcagttaagtaagatggggttgagcttgaagtctttaagtacctttccaacagctggtattggtggtgtttcctatgactttcaggaattattaggtattaagtttccaataaataacggcaattctagagctactaaggccagcaacgcagaggaagctttggccaatatgcaagagcatcatgaacgtgcagctgcttctgtaaaggagaatgatggtcagctctctgatacgaagagtccagcgccatccaataacgcccaagggggaagtgctagtattatggaacctcaggcggctgatgcggtttctacaatggcgcctatatccatgattgaaagaaacatgaacagaaacagcaacatttctccatctacgccctctgcagtgttgaatgataggcaagagatgcaagattctataagttctttgggaaatttgacaaaagcagccttggagaacaacgaaccaacgataagtttacaaacatctcagacagagaatgaagacgatgcaagcagacaagacatgacctccaaaattaataacgaagctgacagaagttctgtttctgctggtaccagtaacatcgctaagcttttagatctttctaccaaaggcaatttgaacttgatagacatgaaattatttcatcattattgcacaaaggtctggcctacgattacagcggccaaagtttctgggcctgaaatatggagggactacataccggagttagcatttgactatccatttttaatgcacgctttgttggcattcagtgccacccatctttctaggactgaaactggattggagcaatacgtttcttctcaccgcttggacgctttgagattattaagagaagctgttttagaaatatctgagaataacaccgatgcgttggttgccagcgccttaatattgatcatggactctttagcaaatgctagtggtaacggcactgtaggaaaccaaagtttgaatagcatgtctccaagcgcttggatctttcatgtcaaaggtgctgcaacaattttaaccgctgtgtggcctttgagtgaaagatctaaatttcataacattatatctgttgatcttagcgatttaggcgatgtcattaaccctgatgttggaacaattactgaattggtatgttttgatgaaagtattgccgatttgtatcctgtcggcttagattctccatatttgataacattggcttatttagataaattgcaccgtgaaaaaaaccagggtgattttattttaagagtatttacatttccagcattgttggacaagacattcttggcattattgatgacaggtgatttaggtgcaatgagaattatgagatcttattataaattacttagaggatttgccacagaggtcaaggataaagtctggtttctcgaaggagtcacgcaggtgttgcctcaagatgttgacgaatacagtggaggtggtggtatgcatatgatgcttgatttcctcggtggcggattaccaagcatgacaacaacaaatttctctgatttttctttatga

SEQ ID NO: 2211 - DNA, 1053 bp, Saccharomyces cerevisiae
atggtcgtgaataacccaaataactggcactgggtcgataagaactgcatcggatgggccaaggagtatttcaaacagaaactggttggagtggaggccggttcggtgaaggataaaaagtatgccaaaatcaagtctgtttcgtccattgaaggtgattgtgaagttaatcagcgtaaggggaaggttatatctttgtttgatttgaaaatcacggtgttaatagagggacacgtggactctaaggacggatcggcattgccattcgagggtagcattaacgttcctgaagttgccttcgatagcgaggcctcaagctatcaatttgacatatctatatttaaggagactagcgaattgagtgaagccaagccactaattagatccgagttattgcccaagttgagacaaattttccaacaatttggcaaggatttgctggccacccatggtaatgacattcaggtgcccgaatctcaggtgaaatctaactacacaagaggtaaccaaaaaagtagctttaccgaaatcaaggactccgcttcaaagccaaaaaagaatgcacttccctcttctacttcaacttcagcaccagtctccagcaccaacaaagtcccccaaaacggaagcggcaatagtacatctatttatttagaaccaacttttaatgtgccttcctccgagctctacgaaacgttccttgataagcaacgcatattggcctggaccagatcagcacaatttttcaacagcggaccgaagctggagaccaaagaaaaattcgagctctttggcggcaacgtgatcagcgagttggtttcatgcgaaaaggacaagaaacttgttttccactggaaactcaaggattggtctgcccctttcaactctactatcgaaatgactttccatgagtcgcaagaattccatgaaaccaaattacaggtgaagtggactggcatacccgttggcgaggaagatcgcgtgcgcgctaattttgaagaatactacgtgcgttctattaaattgacattcggctttggtgccgtattataa

SEQ ID NO: 2212 - DNA, 1053 bp, Artificial Sequence
  Description of Artificial Sequence: Synthetic polynucleotide
atggtcgtgaataacccaaataactggcactgggtcgataagaactgcatcggatgggccaaggagtatttcaaacagaaattggttggagtggaggccggttctgtgaaggataaaaagtatgccaaaatcaagtctgtttcttccattgaaggtgattgtgaagttaatcagcgtaaggggaaggttatatctttgtttgatttgaaaatcacggtgttaatagagggacacgtggactctaaggacggaagtgcattgccattcgagggtagcattaacgttcctgaagttgccttcgatagcgaggcctccagctatcaatttgacatatctatatttaaggagactagcgaattgagtgaagccaagccattgattagatccgagttattgcccaagttgagacaaattttccaacaatttggcaaggatttgttagccacccatggtaatgacattcaggtgcccgaatctcaggtgaaatctaactacacaagaggtaaccaaaaaagtagctttaccgaaatcaaggactccgcttccaagccaaaaaagaatgcacttccctcttctacttctacttctgcaccagtctccagcaccaacaaagtcccccaaaacggaagcggcaatagtacatctatttatttagaaccaacttttaatgtgccttcctccgagctctacgaaacgttccttgataagcaacgcatattggcctggaccagaagtgcacaatttttcaacagcggaccgaagttggagaccaaagaaaaattcgagctctttggcggcaacgtgatcagcgagttggtttcttgcgaaaaggacaagaaacttgttttccactggaaactcaaggattggtctgcccctttcaactctactatcgaaatgactttccatgagtctcaagaattccatgaaaccaaattacaggtgaagtggactggcatacccgttggcgaggaagatcgcgtgcgcgctaattttgaagaatactacgtgcgttctattaaattgacattcggctttggtgccgtattatga

SEQ ID NO: 2213 - DNA, 414 bp, Saccharomyces cerevisiae
atgaaaacaccgccaaaccaagaaaagaacaacgaaaaaatatcacttttatttagttcacaacggctaactatcgacgttcacccttcctcagtctatcacatcgtccttagctcgaacaacgccgataggcatcaagttacattgagctttactgcacgttcccgcatgatgccattgactagggcccgccctttcggcaatcattctagcatgttccgcatgttccttgacgccatggtcatccttgccgtcgcctccggcgtttcccttccccctcagctgccagggcgccgttcacacaacgcaagcacacccggcgccaaaaaaccggggaaagaccacggcgctatggtttcggagtttcccgccaatggcgttataactccagtttattttcctcttcgttggtaa

SEQ ID NO: 2214 - DNA, 414 bp, Artificial Sequence
  Description of Artificial Sequence: Synthetic polynucleotide
atgaaaacaccgccaaaccaagaaaagaacaacgaaaaaatatctcttttatttagttctcaaagattaactatcgacgttcacccttcctctgtctatcacatcgtccttagcagtaacaacgccgataggcatcaagttacattgagctttactgcacgttcccgcatgatgccattgactagggcccgccctttcggcaatcattctagcatgttccgcatgttccttgacgccatggtcatccttgccgtcgcctccggcgtttcccttccccctcagttaccagggcgccgttctcacaacgcaagcacacccggcgccaaaaaaccggggaaagaccacggcgctatggtttctgagtttcccgccaatggcgttataactccagtttattttcctcttcgttggtga

SEQ ID NO: 2215 - DNA, 3972 bp, Saccharomyces cerevisiae
atggctaacgtagaaaaaccaaacgattgttcaggctttcccgttgttgacttgaattcgtgcttttctaacggcttcaataatgagaaacaagaaatagaaatggaaacggatgattcaccgattttattaatgtcatcatcagcttccagagaaaactcaaacactttctctgtgatacagaggacgccagatggaaagatcattaccacaaataataatatgaactccaagattaacaagcaactggacaagttgcccgaaaatttaaggcttaatggtagaacccccagtgggaaactaaggtcatttgtttgcgaggtttgtacgagagcgttcgcaagacaagagcacttgaaaagacattacagatcgcatacaaatgaaaaaccttatccctgtggcctctgcaacagatgctttactaggagggacttactgatcaggcatgctcaaaaaatccatagtggtaatttaggggaaacgatttcccataccaagaaagtgtcgagaactataactaaagctcggaaaaattctgcatcctcagtcaagtttcaaactccaacctatggtactccagataatggtaattttttgaatcgcactactgccaatacaagaagaaaagcaagccctgaagctaatgttaaacgtaagtacttgaaaaaactgacgcgcagggcttcatttagcgcacaatcagcatccagctatgctttgcccgaccaatcttcgctagaacaacatccaaaggatcgtgttaaattttctacgcctgaattagttccacttgacttgaagaatcctgaacttgactcttcgtttgacctgaatatgaatctagatttaaacctaaatctagattccaatttcaatatagcattaaaccgttctgattcttctggatcaacaatgaatttggattataaattgcccgaatcagcaaataactacacatattcttccggctcaccaacccgcgcatatgtcggcgctaacacgaattctaagaacgcttcatttaatgacgcagacttattgtcgtcgtcgtactggataaaagcctataatgatcatttgttttcagtatctgaaagtgatgaaacttctccaatgaactctgaattaaacgacactaaattaatcgtcccagattttaaatcgactatacatcatttgaaggattcaaggtcctcctcttggactgttgctatagataataatagcaataacaataaggtatcagacaaccaacctgatttcgtcgattttcaagaactgctggataatgatactttaggtaatgatttgttagagaccactgccgttttaaaagaatttgaacttttacatgatgatagcgtaagtgctaccgccacgtcaaatgagattgacctttcccatttgaacctatcaaactctccaatttctcctcataagttaatttataagaataaagaggggaccaatgacgatatgttgatttctttcggactcgatcatccttccaatcgcgaagatgatctggataagctatgtaatatgaccagagatgttcaagccatattcagtcaatatttgaaaggagaagagtctaaacgatccctggaagactttttatcaacgtcaaacaggaaagaaaagccagatagcggcaactatactttttatgggttagattgtttaacgttatcgaaaatatcaagagctctgccggcctccactgtgaacaacaatcagccatcgcattccatagaatcaaagctatttaatgaaccaatgagaaatatgtgcattaaagtgcttagatactatgaaaagttcagtcatgatagtagtgagagtgtcatggactctaatccaaacttgctgtccaaagaattgttaatgccagctgtgagtgaattgaacgaatatttagatcttttcaagaataatttccttccccatttccctattattcacccaagcttgcttgatttggatttggatagcttgcaacgatatactaatgaggatgggtatgatgacgctgaaaacgcgcagttgtttgatcgattaagtcaagggacagataaagaatatgattacgagcactatcaaatcttgtccatttcgaaaatcgtttgtttacccttatttatggccacatttggttctttgcataagttcggttacaaatctcaaacaatagaattgtatgagatgagtagaagaattctacattcttttttggagactaaaagaaggtgtcgcagtacaacagtaaatgacagttatcagaacatttggttgatgcaatccctaatattgagcttcatgttcgctctagttgctgattatttggagaaaattgactcctctttgatgaaaaggcaattgtccgcattatgttcaacgatcagatcaaactgtttaccgacaatttctgcaaattctgagaagagtatcaataataacaatgaacctttaacatttggttctcctcttcaatacatcatttttgagtcaaaaattagatgcaccttaatggcttatgatttttgtcagttcttgaaatgtttcttccatattaaattcgatttgtctataaaggaaaaagatgttgaaaccatttatattcccgacaatgagtcaaaatgggccagtgaatcgataatatgtaatgggcatgttgtgcaaaagcaaaatttttatgattttagaaacttttattacagtttcacgtatggacacttacactcaataccagaatttttagggtcatctatgatttattatgaatacgatttaagaaaaggaaccaaatcacatgtgtttttggatcgaatcgatacgaaaaggctagagaggagtcttgacacttcttcctatggcaatgataatatggcagcaaccaataaaaatattgcgatcttaattgatgacaccataattttgaaaaataatttaatgtcaatgagattcatcaaacagattgatcgctcgtttactgagaaggttagaaaaggacaaatagcaaagatatatgattcctttttgaactctgtgaggttgaattttttgaagaattattcagttgaagtattgtgtgaatttttagtagcgttgaacttttcaatccgtaatatttcgtctttatacgtagaagaagaaagtgattgctcccaaagaatgaattctccagagctgccaaggatccacctgaataatcaagcgctttctgtcttcaatttacaaggctattactattgcttcatcctaattatcaaatttttattggattttgaagcaactccaaattttaagttactgagaatttttattgagttgagaagccttgcgaattctattttacttcccacactttcaagattgtatccgcaagagttttctggatttcctgatgttgtatttacgcaacaatttataaataaagataatggtatgcttgtccctggtttatccgcaaatgaacaccataatggtgcaagtgcagctgttaagactaagttagccaaaaagatcaatgttgaagggcttgcaatgtttattaatgaaatcctagttaactcttttaacgatacctcttttttgaatatggaggatcctattcgaaatgaattttcctttgataatggggacagggcagtgacagacttgcctcgttcagcacatttcctatcggataccggcctagaaggtattaacttcagcggcttaaatgattcgcatcaaactgtttctactttgaatcttttacgttacggggaaaatcattcatcaaaacataaaaatggtggaaaggggcaaggatttgccgaaaagtaccaattatctctgaaatatgttactattgccaagttatttttcaccaatgttaaagaaaactacattcattgtcacatgttagataagatggcaagtgatttccacactttggaaaatcatctaaagggaaacagttga

SEQ ID NO: 2216 - DNA, 3972 bp, Artificial Sequence
  Description of Artificial Sequence: Synthetic polynucleotide
atggctaacgtagaaaaaccaaacgattgttctggctttcccgttgttgacttgaattcttgcttttctaacggcttcaataatgagaaacaagaaatagaaatggaaacggatgattctccgattttattaatgtcttcttctgcttccagagaaaactccaacactttctctgtgatacagaggacgccagatggaaagatcattaccacaaataataatatgaactccaagattaacaagcaattggacaagttgcccgaaaatttaaggcttaatggtagaacccccagtgggaaattgaggtcttttgtttgcgaggtttgtacgagagcgttcgcaagacaagagcacttgaaaagacattacagaagccatacaaatgaaaaaccttatccctgtggcctctgcaacagatgctttactaggagggacttattgatcaggcatgctcaaaaaatccatagtggtaatttaggggaaacgatttcccataccaagaaagtgtccagaactataactaaagctagaaaaaattctgcatcctctgtcaagtttcaaactccaacctatggtactccagataatggtaattttttgaatcgcactactgccaatacaagaagaaaagcaagccctgaagctaatgttaaacgtaagtacttgaaaaaattaacgcgcagggcttcttttagcgcacaaagtgcatccagctatgctttgcccgaccaatcttctttggaacaacatccaaaggatcgtgttaaattttctacgcctgaattagttccacttgacttgaagaatcctgaacttgactcttcttttgacttgaatatgaatttggatttaaacttgaatttggattccaatttcaatatagcattaaaccgttctgattcttctggaagtacaatgaatttggattataaattgcccgaaagtgcaaataactacacatattcttccggctctccaacccgcgcatatgtcggcgctaacacgaattctaagaacgcttcttttaatgacgcagacttattgtcttcttcctactggataaaagcctataatgatcatttgtttagcgtatctgaaagtgatgaaacttctccaatgaactctgaattaaacgacactaaattaatcgtcccagattttaaatctactatacatcatttgaaggatagtaggtcctcctcttggactgttgctatagataataatagcaataacaataaggtaagtgacaaccaacctgatttcgtcgattttcaagaattattagataatgatactttaggtaatgatttgttagagaccactgccgttttaaaagaatttgaacttttacatgatgatagcgtaagtgctaccgccacgtccaatgagattgacctttcccatttgaacttatctaactctccaatttctcctcataagttaatttataagaataaagaggggaccaatgacgatatgttgatttctttcggactcgatcatccttccaatcgcgaagatgatttggataagttatgtaatatgaccagagatgttcaagccatattcagtcaatatttgaaaggagaagagtctaaaagatccttagaagactttttatctacgtccaacaggaaagaaaagccagatagcggcaactatactttttatgggttagattgtttaacgttatccaaaatatctagagctttaccggcctccactgtgaacaacaatcagccatctcattccatagaatccaagttatttaatgaaccaatgagaaatatgtgcattaaagtgcttagatactatgaaaagttcagtcatgatagtagtgagagtgtcatggactctaatccaaacttgttatccaaagaattgttaatgccagctgtgagtgaattgaacgaatatttagatcttttcaagaataatttccttccccatttccctattattcacccaagcttgcttgatttggatttggatagcttgcaaagatatactaatgaggatgggtatgatgacgctgaaaacgcgcagttgtttgatagattaagtcaagggacagataaagaatatgattacgagcactatcaaatcttgtccatttccaaaatcgtttgtttacccttatttatggccacatttggttctttgcataagttcggttacaaatctcaaacaatagaattgtatgagatgagtagaagaattttgcattcttttttggagactaaaagaaggtgtcgcagtacaacagtaaatgacagttatcagaacatttggttgatgcaatccttgatattgagcttcatgttcgctttggttgctgattatttggagaaaattgactcctctttgatgaaaaggcaattgtccgcattatgttccacgatcagatctaactgtttaccgacaatttctgcaaattctgagaagagtatcaataataacaatgaacctttaacatttggttctcctcttcaatacatcatttttgagagtaaaattagatgcaccttaatggcttatgatttttgtcagttcttgaaatgtttcttccatattaaattcgatttgtctataaaggaaaaagatgttgaaaccatttatattcccgacaatgagagtaaatgggccagtgaaagtataatatgtaatgggcatgttgtgcaaaagcaaaatttttatgattttagaaacttttattacagtttcacgtatggacacttacactccataccagaatttttagggagttctatgatttattatgaatacgatttaagaaaaggaaccaaatctcatgtgtttttggatagaatcgatacgaaaaggttagagaggagtcttgacacttcttcctatggcaatgataatatggcagcaaccaataaaaatattgcgatcttaattgatgacaccataattttgaaaaataatttaatgtccatgagattcatcaaacagattgatcgctcctttactgagaaggttagaaaaggacaaatagcaaagatatatgattcctttttgaactctgtgaggttgaattttttgaagaattattctgttgaagtattgtgtgaatttttagtagcgttgaacttttctatccgtaatatttcttctttatacgtagaagaagaaagtgattgctcccaaagaatgaattctccagagttaccaaggatccacttgaataatcaagcgctttctgtcttcaatttacaaggctattactattgcttcatcttgattatcaaatttttattggattttgaagcaactccaaattttaagttattaagaatttttattgagttgagaagccttgcgaattctattttacttcccacactttctagattgtatccgcaagagttttctggatttcctgatgttgtatttacgcaacaatttataaataaagataatggtatgcttgtccctggtttatccgcaaatgaacaccataatggtgcaagtgcagctgttaagactaagttagccaaaaagatcaatgttgaagggcttgcaatgtttattaatgaaatcttggttaactcttttaacgatacctcttttttgaatatggaggatcctattagaaatgaattttcctttgataatggggacagggcagtgacagacttgcctcgttctgcacatttcttgagtgataccggccttgaaggtattaacttcagcggcttaaatgattctcatcaaactgtttctactttgaatcttttacgttacggggaaaatcattcttctaaacataaaaatggtggaaaggggcaaggatttgccgaaaagtaccaattatctttgaaatatgttactattgccaagttatttttcaccaatgttaaagaaaactacattcattgtcacatgttagataagatggcaagtgatttccacactttggaaaatcatttgaagggaaacagttga

SEQ ID NO: 2217 - DNA, 3930 bp, Saccharomyces cerevisiae
atgtcaggccagttagttcaatggaaaagctctccagatcgagtcacccaaagcgctataaaggaagcactgcattctcccttggctgatggcgacatgaacgaaatgaatgttcccgttgatccgttggaaaacaaggtaaatagcacaaacataatcgaaggaagtcccaaagcaaatccaaatcctgtcaagtttatgaatacaagtgagatatttcaaaaatctctgggattacttgacgagagtccaagacatgatgatgagttaaatattgaagtaggagataatgatcgaccaaatgctaacatattgcataatgaaaggactcctgaccttgaccgaattgctaactttttcaaaagcaatcgaacccctggtaaagaaaatcttttgaccaaatatcaaagctccgatctggaagacactcctctgatgttaagaaaaaaaatgacttttcaaactccaactgatccattggaacagaaaaccttcaaaaagttgaagtcagatactgggttttgctattatggagagcagaatgatggagaagaaaatgcgtcattagaagttacagaggcggatgccacttttgtacagatggctgaacgttctgctgataattatgactgtgcattggaaggaattgttacacctaaaagatataaagacgaattaagtaaaagtggaggaatgcaagatgaacgagttcaaaaaactcaaatcatgatatcagcagaatcacctaattcgataagctcttatgacaagaacaaaattaccgggaatggccggaccacaagaaatgtaaacaaggtttttaacaataacgaagataacataggagctatcgaggaaaaaaatccagtaaaaaagaaaagtgagaactattcatcagatgatctcagagaacggaacaatcaaataatacaaagtaatgaatcagaggagattaacgaattggaaaagaatctgaatgtttcgggtagagagaatgacgtgaacaatttagatatcgatattaatagtgctgtgtctggcaccccttcacgcaacaatgcggaagaagaaatgtattccagtgagagtgtaaacaatcgggaaccatccaagaagtggatattccgatactcaaaagacaaaacggaaaataatagcaatagatctacgcaaatagtcaataatccaagaacacaggaaatgcctttagatagtatttcaatcgatacgcaacccttatctaaaagtttcaataccgaaacaaataatgaattagagacacagataattgtttcatcgctttcccaaggcatatctgctcagaagggacctgtttttcattctactggccagacagaagaaataaaaacccaaataataaattctcctgaacaaaatgctttgaatgcaacctttgaaactcccgttactctttctcggattaattttgaacccatattggaagttcctgagactagttcaccatctaagaatacgatgtcaaaaccctcgaattcttcacctattccgaaggaaaaagatacatttaatatacacgagagagaagtagagacaaacaatgttttttcaaacgatatacaaaattcttcaaatgcagctaccagagatgacattatcatagccggttcatctgatttcaacgaacaaaaggaaataaccgatagaatatacttacaactttcaggaaagcaaatatctgattcaggaagtgatgaaacagaacgtatgtccccaaatgagcttgatacgaaaaaggaaagtacaatcatgagcgaggttgaactaacccaagaactgcctgaagttgaagagcagcaagatcttcaaacgtctccaaaaaagctggtagtcgaggaagaaactttaatggagataaaaaaaagcaaggggaactcacttcagcttcatgatgataataaagaatgcaattcagataaacaagatggcacagagtctttggatgtagctttgattgaacacgaaagcaaaggacagagctcagaacttcagaaaaacctcatgcaattatttccaagtgagtcacaggagattattcagaaccgaagaacaataaagcgacgtcaaaaagatacaatagagatcggtgaagaggaggagaacagaagcactaagacatcaccgacaaaacacctcaaaagaaattcagatttggatgctgcttctatcaaaagggaaccgtcttgcagcattaccatacaaacaggggagacaggttcgggcaaagactctaaagaacagtcttacgtgtttcctgaaggtattagaacggcagataatagtttcttatcgaaagacgacataatttttggaaatgcggtatggtgtcagtatacgtggaattacaaattttatccgggtattttattggaagttgacactaatcaagatggctgttggatttatttcgaaacaggaagatcgctaaccaaagatgaggacatctactacttagatattagaataggggatgctgttacctttgatggaaatgagtacgtagtcgttggtctagaatgtcgtagccatgatctcaacataataagatgtattcgaggatatgatacggttcatttgaaaaaaaaaaatgcaagcggattgttggggaaaaggacgttaattaaagcactaagctcgatcagtcttgacctaagcgagtgggctaaaagagcgaagatcatattagaagataatgagaaaaataaaggcgacgcgtataggtacttgagacatcccattaggggaaggaaatcaatgaccaatgttctgtctccgaagaaacatactgatgacgaaaaggacataaatacgcatactgaagtgtacaataacgaaatagaatcgagctccgaaaagaaggaaattgttaaaaaggattctagagacgcattagctgaacatgcaggagcgccaagcctgcttttttcttctggtgaaatcagaacagggaatgtatttgataaatgtatttttgttttgacaagcctattcgaaaatagagaggaacttcgacagaccattgaatcgcaaggcggcactgtaattgagtcaggattttccactttatttaacttcactcatccgctagctaaatctttagtcaataaaggtaatacagataatattcgagaattggccttgaagctagcctggaaacctcattccctatttgcagactgcagatttgcttgcctaatcacaaaacggcatttaagaagcttaaagtacttagaaactttggcgttggggtggcctacactacactggaaattcataagtgcatgcattgaaaagaaaagaatagtaccacatttaatataccaatacctattaccttcgggtgaaagttttcggttatcgttagattctccatcaaagggaggaatcattaaatccaacaatattttttcattttatacacaattcttacgcggatctaatttaagagatcagatatgtggagtgaagaaaatgttaaatgactacattgttattgtttggggtagatctgagttggacagttttgtcaaatttgcttttgcatgtttgagcgcaggtagaatgcttacaattgatttacccaatattgatgtagatgatacagagccattgttaaatgccttagattctttagtacccagaataggatcagaattatctaatcgaaagttaaagtttctcatatatgctaacgaaaataatggtaaatctcagatgaagcttctcgaaagattgagaagtcaaatatcactgaaatttaagaaatttaattacatatttcacactgaatctaaagaatggctaattcagacaataattaacgaggacactggttttcacgatgatattacggacaatgatatatacaacactatttctgaggttagatga

SEQ ID NO: 2218 - DNA, 3930 bp, Artificial Sequence
  Description of Artificial Sequence: Synthetic polynucleotide
atgagtggccagttagttcaatggaaaagctctccagatagggtcacccaaagcgctataaaggaagcattgcattctcccttggctgatggcgacatgaacgaaatgaatgttcccgttgatccgttggaaaacaaggtaaatagcacaaacataatcgaaggaagtcccaaagcaaatccaaatcctgtcaagtttatgaatacaagtgagatatttcaaaaatctttgggattacttgacgagagtccaagacatgatgatgagttaaatattgaagtaggagataatgatagaccaaatgctaacatattgcataatgaaaggactcctgaccttgacagaattgctaactttttcaaaagcaatagaacccctggtaaagaaaatcttttgaccaaatatcaaagctccgatttggaagacactcctttgatgttaagaaaaaaaatgacttttcaaactccaactgatccattggaacagaaaaccttcaaaaagttgaagagtgatactgggttttgctattatggagagcagaatgatggagaagaaaatgcgtctttagaagttacagaggcggatgccacttttgtacagatggctgaacgttctgctgataattatgactgtgcattggaaggaattgttacacctaaaagatataaagacgaattaagtaaaagtggaggaatgcaagatgaaagagttcaaaaaactcaaatcatgatatctgcagaatctcctaattctataagctcttatgacaagaacaaaattaccgggaatggcagaaccacaagaaatgtaaacaaggtttttaacaataacgaagataacataggagctatcgaggaaaaaaatccagtaaaaaagaaaagtgagaactattcttctgatgatctcagagaaagaaacaatcaaataatacaaagtaatgaaagtgaggagattaacgaattggaaaagaatttgaatgtttctggtagagagaatgacgtgaacaatttagatatcgatattaatagtgctgtgtctggcaccccttcccgcaacaatgcggaagaagaaatgtattccagtgagagtgtaaacaatagagaaccatccaagaagtggatattcaggtactctaaagacaaaacggaaaataatagcaatagatctacgcaaatagtcaataatccaagaacacaggaaatgcctttagatagtatttccatcgatacgcaacccttatctaaaagtttcaataccgaaacaaataatgaattagagacacagataattgtttcttctctttcccaaggcatatctgctcagaagggacctgtttttcattctactggccagacagaagaaataaaaacccaaataataaattctcctgaacaaaatgctttgaatgcaacctttgaaactcccgttactctttctagaattaattttgaacccatattggaagttcctgagactagttctccatctaagaatacgatgtccaaaccctccaattcttctcctattccgaaggaaaaagatacatttaatatacacgagagagaagtagagacaaacaatgttttttccaacgatatacaaaattcttccaatgcagctaccagagatgacattatcatagccggttcttctgatttcaacgaacaaaaggaaataaccgatagaatatacttacaactttctggaaagcaaatatctgattctggaagtgatgaaacagaacgtatgtccccaaatgagcttgatacgaaaaaggaaagtacaatcatgagcgaggttgaattgacccaagaattacctgaagttgaagagcagcaagatcttcaaacgtctccaaaaaagttggtagtcgaggaagaaactttaatggagataaaaaaaagcaaggggaactctcttcagcttcatgatgataataaagaatgcaattctgataaacaagatggcacagagtctttggatgtagctttgattgaacacgaaagcaaaggacagagctctgaacttcagaaaaacctcatgcaattatttccaagtgagagccaggagattattcagaacagaagaacaataaagagacgtcaaaaagatacaatagagatcggtgaagaggaggagaacagaagcactaagacatctccgacaaaacacctcaaaagaaattctgatttggatgctgcttctatcaaaagggaaccgtcttgcagcattaccatacaaacaggggagacaggttctggcaaagactctaaagaacagtcttacgtgtttcctgaaggtattagaacggcagataatagtttcttatccaaagacgacataatttttggaaatgcggtatggtgtcagtatacgtggaattacaaattttatccgggtattttattggaagttgacactaatcaagatggctgttggatttatttcgaaacaggaagatccttgaccaaagatgaggacatctactacttagatattagaataggggatgctgttacctttgatggaaatgagtacgtagtcgttggtttggaatgtcgtagccatgatctcaacataataagatgtattagaggatatgatacggttcatttgaaaaaaaaaaatgcaagcggattgttggggaaaaggacgttaattaaagcattaagctctatcagtcttgacttgagcgagtgggctaaaagagcgaagatcatattagaagataatgagaaaaataaaggcgacgcgtataggtacttgagacatcccattaggggaaggaaatctatgaccaatgttttatctccgaagaaacatactgatgacgaaaaggacataaatacgcatactgaagtgtacaataacgaaatagaaagtagctccgaaaagaaggaaattgttaaaaaggattctagagacgcattagctgaacatgcaggagcgccaagcttgcttttttcttctggtgaaatcagaacagggaatgtatttgataaatgtatttttgttttgacaagcttattcgaaaatagagaggaacttcgtcagaccattgaatctcaaggcggcactgtaattgagagtggattttccactttatttaacttcactcatccgttagctaaatctttagtcaataaaggtaatacagataatattagagaattggccttgaagttggcctggaaacctcattccttatttgcagactgcagatttgcttgcttgatcacaaaaagacatttaagaagcttaaagtacttagaaactttggcgttggggtggcctacattacactggaaattcataagtgcatgcattgaaaagaaaagaatagtaccacatttaatataccaatacttattaccttctggtgaaagttttagattatctttagattctccatctaagggaggaatcattaaatccaacaatattttttctttttatacacaattcttacgcggatctaatttaagagatcagatatgtggagtgaagaaaatgttaaatgactacattgttattgtttggggtagatctgagttggacagttttgtcaaatttgcttttgcatgtttgagcgcaggtagaatgcttacaattgatttacccaatattgatgtagatgatacagagccattgttaaatgccttagattctttagtacccagaataggatctgaattatctaatagaaagttaaagtttctcatatatgctaacgaaaataatggtaaatctcagatgaagcttctcgaaagattgagaagtcaaatatctttgaaatttaagaaatttaattacatatttcacactgaatctaaagaatggttgattcagacaataattaacgaggacactggttttcacgatgatattacggacaatgatatatacaacactatttctgaggttagatga

SEQ ID NO: 2219 - DNA, 1272 bp, Saccharomyces cerevisiae
atgttcccaatgaaagatcactcagctcttgaacaacatactctcagcagagatgagttaagacgtcgcaagggttacaagaaaggactgcagttgtcaattttgttacttggagaaaaaggcagcggcaaatcaacgtttttaaacaatctgtgcggtcaggatatatcgctttctgatggggattatgatgatgatgatgataaagtgacaaataatgtaacaccagaaaatggaaacgccatcgaagatatagatcctggatataaaacagcccatttgagtcctgggctgaagcttgtcaccagaagagtgtatttgaacgatgaactaggcgtacccataacattagatatcatattgtttccaggctgcggtgacaatgtcgacaattcacaaagctctgttgttataaaaaactacttagaccaacagtttgcaaatgttttaaaagaagaggtcagaataaagagaaacacaaaagaaactgatgggaggcctcatgtttgtttatactttctgaagagtactccaagaggagtcaaaaaatttgatattgagttaatgaaaacgatttgtgataaagttaatttaattcccattattccaaaagccgatggtctcacagaaactgaattaaatttacacaaagacattgtgcgccaagaaatctctcagaacaatatacgtgtttttgattttaaaagtgacaccctaggcgaaacattagctctgtacgatatggacatcgattccagttcagcaaaatccaaatacgataatgacacgaagatcaaggaaatatcgccatttgccattgtttgcagcaaaacttttaataaaaattcggaaaatagggttgagcatatcagaacgtacgaatggggtagcttggtggtcgaagaccaaaacacctccgattttatatacttaaaagcaatactgttaggttctcaccttcaggaattaaaagatgtaacaaacaacgtattgtatgaaaattatagggctaaagtgttaactgagaagaaaaacaactatgatattccaaactatagctatatcgacgaaacctcaaggggaagtgtcagcaatgtttccaccagaagaaatagtgcaagtagaacacttgggaatccagatacaaacgatgaaaatgcttatcaaatacacaaagaaatagacgaaaaaaacagaattattgaagactatcaaaggaagattgatttattggagaaaatgttggcagctccccatcaaaataaggtctaa

SEQ ID NO: 2220 - DNA, 1272 bp, Artificial Sequence
  Description of Artificial Sequence: Synthetic polynucleotide
atgttcccaatgaaagatcactctgctcttgaacaacatactctcagcagagatgagttaagacgtcgcaagggttacaagaaaggattacagttgtctattttgttacttggagaaaaaggcagcggcaaatctacgtttttaaacaatttatgcggtcaggatatatctctttctgatggggattatgatgatgatgatgataaagtgacaaataatgtaacaccagaaaatggaaacgccatcgaagatatagatcctggatataaaacagcccatttgagtcctgggttgaagcttgtcaccagaagagtgtatttgaacgatgaattaggcgtacccataacattagatatcatattgtttccaggctgcggtgacaatgtcgacaattctcaaagctctgttgttataaaaaactacttagaccaacagtttgcaaatgttttaaaagaagaggtcagaataaagagaaacacaaaagaaactgatgggaggcctcatgtttgtttatactttttgaagagtactccaagaggagtcaaaaaatttgatattgagttaatgaaaacgatttgtgataaagttaatttaattcccattattccaaaagccgatggtctcacagaaactgaattaaatttacacaaagacattgtgcgccaagaaatctctcagaacaatatacgtgtttttgattttaaaagtgacaccttaggcgaaacattagctttgtacgatatggacatcgattccagttctgcaaaatccaaatacgataatgacacgaagatcaaggaaatatctccatttgccattgtttgcagcaaaacttttaataaaaattctgaaaatagggttgagcatatcagaacgtacgaatggggtagcttggtggtcgaagaccaaaacacctccgattttatatacttaaaagcaatattattaggttctcaccttcaggaattaaaagatgtaacaaacaacgtattgtatgaaaattatagggctaaagtgttaactgagaagaaaaacaactatgatattccaaactatagctatatcgacgaaacctctaggggaagtgtcagcaatgtttccaccagaagaaatagtgcaagtagaacacttgggaatccagatacaaacgatgaaaatgcttatcaaatacacaaagaaatagacgaaaaaaacagaattattgaagactatcaaaggaagattgatttattggagaaaatgttggcagctccccatcaaaataaggtctga

SEQ ID NO: 2221 - DNA, 1398 bp, Saccharomyces cerevisiae
atgacattattttcttgtagtgtacagatgccgctggaggaaaggtccctgacaaacttaccattaaacctattgttccgaatattgtctcacctggatatgaatgatttacaaaacatagggaaaacttgcaccttgctaaggatgctggcgaatgagaacattgtttacagaaatgctgttatcggctcaaacgggaatatgtggtggacaaaaaatgttcttgttgatgtctttgatgttttgaattttaatagaaaggcaatgaaaaccttaaatagtcacaacatatccctggtcgcatcattaagaaatgttcagcggaaatataaactaggcgttattgatccggctagaaagacaataagttatagaacaaatgaagttgagagcaaagaaaagggctctgtgaaagatttaaatatggatttgaacgaacctacagaaataacaagggagcaaatcgctcatactgcaatactacaaggaatgaatcaattcatcgaactcaatgataaagcatttaggacccattcagcggattctgatgatacatacatagaggagaataatggagaaatacattctctccacggattggaaaaaaatacaacatttgaagaagacttagtcaaaaagccaccttttatcccttctccgacattttctaattattctagaagttcaacaaattctgtattttcaagttcatcgcccaaactactggacgatgattggaataatattacaatggatttcactaagtcacgagatcctgattataaagagatgacgcctacatctactgaatcgtctgactcaatcacaagattgagaaaatctaataaagtcaaggataaagccgaactttttgagaagttaatttttagagatagcagaccattaaaaacaaagaaaaaggacaatccaagattgaaattatccagttcgttaagtgctaatgacgaagattttaggaaaatcataagtcccccttctgacatactaccgaaagttggcagaaggagcgtctcaagaggttatttagaggagattgaaaggcattatcccgattttaacggtgaaacaactaatcctctagcaattaaaagagtcaacagtacaaagatagcaaattatgaacaattaattataaaagaaaatagctcgaactgtaaaggaataacagagaaaaatgatgaaaataaatttcaaagaagtcacacttccccagtaatagaattatccaaacctcatcaaagaagcaaattaaaggcggttgttacagacggtaataagatatgctatcgcaaaatcgaattggataaccctagtgggtcgaatacgaatgatcatgtaatcaaacggcttgacgctaataccgattttaatatataa

SEQ ID NO: 2222 - DNA, 1398 bp, Artificial Sequence
  Description of Artificial Sequence: Synthetic polynucleotide
atgacattattttcttgtagtgtacagatgccgttagaggaaaggtccttaacaaacttaccattaaaccttttgttcagaatattgtctcacttggatatgaatgatttacaaaacatagggaaaacttgcaccttgttgaggatgttggcgaatgagaacattgtttacagaaatgctgttatcggctctaacgggaatatgtggtggacaaaaaatgttcttgttgatgtctttgatgttttgaattttaatagaaaggcaatgaaaaccttaaatagtcacaacatatccttggtcgcatctttaagaaatgttcagagaaaatataaattgggcgttattgatccggctagaaagacaataagttatagaacaaatgaagttgagagcaaagaaaagggctctgtgaaagatttaaatatggatttgaacgaacctacagaaataacaagggagcaaatcgctcatactgcaatattgcaaggaatgaatcaattcatcgaactcaatgataaagcatttaggacccattctgcggattctgatgatacatacatagaggagaataatggagaaatacattctctccacggattggaaaaaaatacaacatttgaagaagacttagtcaaaaagccaccttttatcccttctccgacattttctaattattctagaagttctacaaattctgtattttctagttcttctcccaaattattagacgatgattggaataatattacaatggatttcactaagtctagagatcctgattataaagagatgacgcctacatctactgaaagctctgactctatcacaagattgagaaaatctaataaagtcaaggataaagccgaactttttgagaagttaatttttagagatagcagaccattaaaaacaaagaaaaaggacaatccaagattgaaattatccagttctttaagtgctaatgacgaagattttaggaaaatcataagtcccccttctgacatattaccgaaagttggcagaaggagcgtctctagaggttatttagaggagattgaaaggcattatcccgattttaacggtgaaacaactaatcctttggcaattaaaagagtcaacagtacaaagatagcaaattatgaacaattaattataaaagaaaatagcagtaactgtaaaggaataacagagaaaaatgatgaaaataaatttcaaagaagtcacacttccccagtaatagaattatccaaacctcatcaaagaagcaaattaaaggcggttgttacagacggtaataagatatgctatcgcaaaatcgaattggataaccctagtgggtctaatacgaatgatcatgtaatcaaaagacttgacgctaataccgattttaatatatga

SEQ ID NO: 2223 - DNA, 2109 bp, Saccharomyces cerevisiae
atggtgagcatgttctcattatttctgctattaattgagcaatcgccgcttgtagcgtcattgcaacaaagtcaacggcatatagtgggtgttccctgggaaaagcagcacttgtatgactcgaatgaaccagatttgactaaatggcactgtttgaaccacgaagatatcgtattggatataagccagattaatgatggggtttgtgattgtcctgatggttcagatgagcccggcagcgccgcctgcgtggaagatatattcaaaagcgttgcagagggaggtggtaaagtgaataagtatttttattgtgataacaaggggtttattccaagatatatacgaaaatcggaagtcgcagatggtatttgtgactgctgtgactgttctgacgagctactttctggatatgagctctttgatgctggatctaattgttctcagttaaaaaacgaatttgacattatggcctctaaagagttatcaagttaccgggaaggtaaagaggccctagaagaactggaaagaaaatacggtacaaaggaagaggctatcacccgtggtaattgcttagaagaagataaggaaaaagcttctgccgagataaaagtactctccaacaggctctcagaaaatcgagccaaattagagcagttgagaggcgagtactttaaccaattaagccatgatcccattttgtatcaatttgaacaattaaacagtactcgtttgggatcggacatccttacatcgttcactatggtttcaagagtaagtaaaggttaccaggacatattcaagattttaagtgatttatcagaggcctatactccctcgctaaatgataaagttgtcaatgataatattaaaaaattcagaaaagttagaagacgggctgaaaaggctaaaattaatgcagatagcaaaattgatgatgagcaggcagataatctttacttgtactttacagaagaagtacctcaaatttttttgaaaagagaatctgagaacacgttgaggtacgtcataggaaaatccaattttgttcaagcgctagtggagggtaaaattaactataccaacgatatcttggagtatatcagagaattccgtttgattatggatgatatttctcagaattacaatgttaactttcaagatgcaggggtcaaaagtgctgtcgattcgtataaaaactacctaggtgaatacggcgaactggctgaattagaaccagctcacccgtcagagagccttttgagatcgttgagcgaagtaacatcatttgtgaacgagaatgcaccaaaggtattgccaccagacgctgttgagtcagaacaagatacgaacagcgatcatatcggtacttctggagatttgcgcaataaactcaaagagattctatctaagctgaatattttttcatctagaaaagatttggtctcattagagaagagattccgctcttgtgaaagtcaagtcagtctcctggagaatgaattaaagcaaaaaatggactataagaaattattagatgaaactgaagatgaaggaactaattctactgcaggaaatctgactgagcttttagaactaatgggatcacaatcctattgtcttgacgacatactggacaactatgtgtacactatatgctttcaacgtccaatgaccgaaggtgtcatatatcaagctgaggataaggttgacggtaaaaaagttttgatcggtcgttttaagacatcaggttttaatgttgacttaaacatggaaaaatacgcagaacatttaaaggccacatatgatgagaagagtgatttgatttcaaacttagcagctatacaggacgatgacggtaacatgcaacattacgtattcgggaacttaaacgaactgaataatggtctggtactagaatacgaaaatggagaccagtgctggaatggtccgcgcagatcggctactgtatttgttcggtgcagcgacaaattcaagattcggagtgtacatgaagcgactaagtgcaactacatcttcgatgtcgttggtcctctaggctgcaacaagactttcgaatacgagccccctaagttcaatttaagtgaatga

SEQ ID NO: 2224 - DNA, 2109 bp, Artificial Sequence
  Description of Artificial Sequence: Synthetic polynucleotide
atggtgagcatgttctctttatttttattattaattgagcaatctccgcttgtagcgtctttgcaacaaagtcaaagacatatagtgggtgttccctgggaaaagcagcacttgtatgactctaatgaaccagatttgactaaatggcactgtttgaaccacgaagatatcgtattggatataagccagattaatgatggggtttgtgattgtcctgatggttctgatgagcccggcagcgccgcctgcgtggaagatatattcaaaagcgttgcagagggaggtggtaaagtgaataagtatttttattgtgataacaaggggtttattccaagatatataagaaaaagtgaagtcgcagatggtatttgtgactgctgtgactgttctgacgagttgctttctggatatgagctctttgatgctggatctaattgttctcagttaaaaaacgaatttgacattatggcctctaaagagttatccagttacagagaaggtaaagaggccttggaagaattggaaagaaaatacggtacaaaggaagaggctatcacccgtggtaattgcttagaagaagataaggaaaaagcttctgccgagataaaagtactctccaacaggctctctgaaaatagagccaaattagagcagttgagaggcgagtactttaaccaattaagccatgatcccattttgtatcaatttgaacaattaaacagtactcgtttgggatctgacatccttacatctttcactatggtttctagagtaagtaaaggttaccaggacatattcaagattttaagtgatttatctgaggcctatactccctctttgaatgataaagttgtcaatgataatattaaaaaattcagaaaagttagaagaagagctgaaaaggctaaaattaatgcagatagcaaaattgatgatgagcaggcagataatctttacttgtactttacagaagaagtacctcaaatttttttgaaaagagaatctgagaacacgttgaggtacgtcataggaaaatccaattttgttcaagcgttagtggagggtaaaattaactataccaacgatatcttggagtatatcagagaattccgtttgattatggatgatatttctcagaattacaatgttaactttcaagatgcaggggtcaaaagtgctgtcgattcttataaaaactacttgggtgaatacggcgaattggctgaattagaaccagctcacccgagtgagagccttttgagaagtttgagcgaagtaacatcttttgtgaacgagaatgcaccaaaggtattgccaccagacgctgttgagagtgaacaagatacgaacagcgatcatatcggtacttctggagatttgcgcaataaactcaaagagattttatctaagttgaatattttttcttctagaaaagatttggtctctttagagaagagattccgctcttgtgaaagtcaagtcagtctcttggagaatgaattaaagcaaaaaatggactataagaaattattagatgaaactgaagatgaaggaactaattctactgcaggaaatttaactgagcttttagaattgatgggatctcaatcctattgtcttgacgacatattggacaactatgtgtacactatatgctttcaacgtccaatgaccgaaggtgtcatatatcaagctgaggataaggttgacggtaaaaaagttttgatcggtcgttttaagacatctggttttaatgttgacttaaacatggaaaaatacgcagaacatttaaaggccacatatgatgagaagagtgatttgatttccaacttagcagctatacaggacgatgacggtaacatgcaacattacgtattcgggaacttaaacgaattgaataatggtttagtattggaatacgaaaatggagaccagtgctggaatggtccgcgcagatctgctactgtatttgttcgttgcagcgacaaattcaagattagaagtgtacatgaagcgactaagtgcaactacatcttcgatgtcgttggtcctttgggctgcaacaagactttcgaatacgagccccctaagttcaatttaagtgaatga

SEQ ID NO: 2225 - DNA, 1248 bp, Saccharomyces cerevisiae
atgcttgaatcgagcagtgataagataaagtttgcgcctattaaagaggtagattacaaaaaaccggtaagtaagagtaagaactatactcttattaatgacatccaaccattggagtggtattgtcacaatgatagtgaaacgggctaccaacacaccataagtaacaagacagatggtggtagaggtttattcagagtgatgaaaaaatcgatggagaccagagtcgagacccaaacgttatatttcacagatttgcatacaggcttgtgtggatttgttcaattactgtattctacggttatgggtggtatctataaaggcttccaattgaatttcaaggtttttggctcagaaagtaataatactgactacgacgtttgggaaagttttaaattggatgacatagctgaatttcaaccattaaagtttgtctctagaaatgttatttttgaatttttgagcaacaaaaatgaaaaattaggttccattggccagttatctatcaaatgtgatttaccaacatgtaacaatacaattcaaaatttgaaaatcgatttgttggtggatttgtttcaaggttttaagatgaaccccaacggttgcaattattattttgacaaacaaatctcgatgagtgacgaattcgtttcctcagacaaaatgatcagacatgtttttgtgcccagaggtaaatgtaatggtaatatttcctacgataaaaaactcaatagtggggactttcaaaataaaaatatttcattaactgatgttcctgtcgtttatctggacgctgttcaaggtcttttgccgaataaagcagccagtaaatggaatttcctatgttttcagagcgaaaactactctgttttagcaattgaattcactactcctcgagatcatgataacgtcaccgtaacagtttggtcaattactgaaaaaaacaaactgatatctattggttcttctgtgcagagcccaaaacgtcatgttaggttccgtgctacgagtacagataaggaaagcggctgggtatatccaacctctatcaagttccccggtggattttcagaacacgacttgaggctggttaatcgatacgacgttctcggtgagttaccaagcatggtcaggtcgttagctcagaaaattgtgagcatcaaacctttcatttatcaatactgtcaaccttctaaatataagcacgagaaaggtatttctatcgttgagagcaccttcattagttga

SEQ ID NO: 2226 - DNA, 1248 bp, Artificial Sequence
  Description of Artificial Sequence: Synthetic polynucleotide
atgcttgaaagtagcagtgataagataaagtttgcgcctattaaagaggtagattacaaaaaaccggtaagtaagagtaagaactatactcttattaatgacatccaaccattggagtggtattgtcacaatgatagtgaaacgggctaccaacacaccataagtaacaagacagatggtggtagaggtttattcagagtgatgaaaaaatctatggagaccagagtcgagacccaaacgttatatttcacagatttgcatacaggcttgtgtggatttgttcaattattatattctacggttatgggtggtatctataaaggcttccaattgaatttcaaggtttttggctctgaaagtaataatactgactacgacgtttgggaaagttttaaattggatgacatagctgaatttcaaccattaaagtttgtctctagaaatgttatttttgaatttttgagcaacaaaaatgaaaaattaggttccattggccagttatctatcaaatgtgatttaccaacatgtaacaatacaattcaaaatttgaaaatcgatttgttggtggatttgtttcaaggttttaagatgaaccccaacggttgcaattattattttgacaaacaaatctctatgagtgacgaattcgtttccagtgacaaaatgatcagacatgtttttgtgcccagaggtaaatgtaatggtaatatttcctacgataaaaaactcaatagtggggactttcaaaataaaaatatttctttaactgatgttcctgtcgtttatttggacgctgttcaaggtcttttgccgaataaagcagccagtaaatggaatttcttgtgttttcagagcgaaaactactctgttttagcaattgaattcactactcctagagatcatgataacgtcaccgtaacagtttggtctattactgaaaaaaacaaattgatatctattggttcttctgtgcagagcccaaaacgtcatgttaggttccgtgctacgagtacagataaggaaagcggctgggtatatccaacctctatcaagttccccggtggattttctgaacacgacttgaggttggttaatagatacgacgttctcggtgagttaccaagcatggtcaggtctttagctcagaaaattgtgagcatcaaacctttcatttatcaatactgtcaaccttctaaatataagcacgagaaaggtatttctatcgttgagagcaccttcattagttga

SEQ ID NO: 2227 - DNA, 1404 bp, Saccharomyces cerevisiae
atgttgcttagtgcgcctgttaacagtaccgtgcggcgcaagccacacagtccaaataaaaaaaagccaaaagagacaggtacagctgcttccttttcgtcgtcctcttcaactgtcgtcctttcatccaataatgatggcagctttgatgctctttgggacccctctataagtaaggcctcggattttgagagtagctatattagtgctaaacgattaaaaccagaaagtagtaatagacagaaaaaaaaaaattcttataaatattctagggaggaaaacaccaacgaggtagaggaaaagacgtctcttggcagcagctctaagacagaagcagataatatatttaatgaccagctcacgtcagctggcaatactacatatgtcagtaataagcgcgatgtaaacttcggggcgaattcggctgtagtactgctcggtttgccaacaagtaaaagtgaatctcaccgacaataccacagtccttcggcttcaacaactaatgaagatgaagaggacattggtgttgatattttagtagacaaccacatcgatagttgcgaaacagtatcgataaataataatagaggtattacacaccaatatccagaaacggaatcagatgtcgactttgatgaggccgtgatattgacaccaatggatggtacggataagggagtgaaaaatccaagaccactcgaaaaaaaatatagtagcagttgttttgaggaccgtacgccccttaacttggatgatggtcatttcagtgaatgcaatcatttttctacattagatgtgtctagcttttttcatctcaacgagcatgtgcataaaatcgacgaagtagagctcgatggacctgatcgcacctttagtctagacaacgtcgctattaatacaaggaaaaaggatattgattgcctctataatagttcaagagaagacttatccaacctcacatgttcttcggaaggcccaaggaatgatagttatgatagtgattacaacattgatgaggtcacttatagagatgatgaatcaacagatgaagacgagagcttaccaaccccagatcgaaaaaggaagaaaattggccataaagcttgcgaaatattggattctaaaagaattggaataaaagtaccaaagttatacgtttggtctttaagtgataaaccgtttagtgttatcgatgggttgtgcacaaaatcgctgtacccattgagtgatgacataaatactcctgaaagtttgagctcatgctcaagctcagtaagttcacgggaaaatcaaaaaggagatgcaacatttgataatgatgctatgatagccgaccttctaaacataggcggactcgaagtagagaaggcatccaatggccatattgagctcataggcgagtga

SEQ ID NO: 2228 - DNA, 1404 bp, Artificial Sequence
  Description of Artificial Sequence: Synthetic polynucleotide
atgttgcttagtgcgcctgttaacagtaccgtgagacgcaagccacacagtccaaataaaaaaaagccaaaagagacaggtacagctgcttccttttcttcttcctcttctactgtcgtcctttcctccaataatgatggcagctttgatgctctttgggacccctctataagtaaggcctctgattttgagagtagctatattagtgctaaaagattaaaaccagaaagtagtaatagacagaaaaaaaaaaattcttataaatattctagggaggaaaacaccaacgaggtagaggaaaagacgtctcttggcagcagctctaagacagaagcagataatatatttaatgaccagctcacgagcgctggcaatactacatatgtcagtaataagcgcgatgtaaacttcggggcgaattctgctgtagtattactcggtttgccaacaagtaaaagtgaatctcaccgtcaataccacagtccttctgcttctacaactaatgaagatgaagaggacattggtgttgatattttagtagacaaccacatcgatagttgcgaaacagtatctataaataataatagaggtattacacaccaatatccagaaacggaaagtgatgtcgactttgatgaggccgtgatattgacaccaatggatggtacggataagggagtgaaaaatccaagaccactcgaaaaaaaatatagtagcagttgttttgaggaccgtacgccccttaacttggatgatggtcatttcagtgaatgcaatcatttttctacattagatgtgtctagcttttttcatctcaacgagcatgtgcataaaatcgacgaagtagagctcgatggacctgatcgcacctttagtttggacaacgtcgctattaatacaaggaaaaaggatattgattgcctctataatagtagtagagaagacttatccaacctcacatgttcttctgaaggcccaaggaatgatagttatgatagtgattacaacattgatgaggtcacttatagagatgatgaatctacagatgaagacgagagcttaccaaccccagataggaaaaggaagaaaattggccataaagcttgcgaaatattggattctaaaagaattggaataaaagtaccaaagttatacgtttggtctttaagtgataaaccgtttagtgttatcgatgggttgtgcacaaaatctttgtacccattgagtgatgacataaatactcctgaaagtttgagctcctgcagtagctctgtaagttctagagaaaatcaaaaaggagatgcaacatttgataatgatgctatgatagccgaccttttgaacataggcggactcgaagtagagaaggcatccaatggccatattgagctcataggcgagtga

SEQ ID NO: 2229 - DNA, 396 bp, Saccharomyces cerevisiae
atgtctgctaaagccgaaaagaaaccagcctccaaagccccagctgaaaagaaaccagccgctaaaaagacttccacttccactgatggtaagaagagaagcaaggctagaaaggaaacatactcttcttacatttacaaagttttgaagcaaactcaccctgacactggtatttcccaaaagtccatgtctatcttgaactctttcgttaacgatatctttgaaagaatcgctactgaagcttctaaattggctgcgtataacaagaagtctactatctctgctagagaaattcaaaccgctgttagattgatcttaccaggtgaattggctaagcatgctgtctctgaaggtactagagctgttaccaagtactcttcctctactcaagcataa

SEQ ID NO: 2230 - DNA, 396 bp, Artificial Sequence
  Description of Artificial Sequence: Synthetic polynucleotide
atgtctgctaaagccgaaaagaaaccagcctccaaagccccagctgaaaagaaaccagccgctaaaaagacttccacttccactgatggtaagaagagaagcaaggctagaaaggaaacatactcttcttacatttacaaagttttgaagcaaactcaccctgacactggtatttcccaaaagtccatgtctatcttgaactctttcgttaacgatatctttgaaagaatcgctactgaagcttctaaattggctgcgtataacaagaagtctactatctctgctagagaaattcaaaccgctgttagattgatcttaccaggtgaattggctaagcatgctgtctctgaaggtactagagctgttaccaagtactcttcctctactcaagcatga

SEQ ID NO: 2231 - DNA, 399 bp, Saccharomyces cerevisiae
atgtccggtggtaaaggtggtaaagctggttcagctgctaaagcttctcaatctagatctgctaaggctggtttgacattcccagtcggtagagtgcacagattgctaagaagaggtaactacgcccaaagaattggttctggtgctccagtctacttgactgctgtcttggaatatttggccgctgaaattttagaattagctggtaatgctgctagggataacaagaagaccagaattattccaagacatttgcaattggctatcagaaatgatgacgaattgaacaagctattgggtaacgttaccattgcccaaggtggtgttttgccaaacatccatcaaaacttgttgccaaagaagtctgccaaggctaccaaggcttctcaagaattataa

SEQ ID NO: 2232 - DNA, 399 bp, Artificial Sequence
  Description of Artificial Sequence: Synthetic polynucleotide
atgtccggtggtaaaggtggtaaagctggttctgctgctaaagcttctcaatctagatctgctaaggctggtttgacattcccagtcggtagagtgcacagattgttaagaagaggtaactacgcccaaagaattggttctggtgctccagtctacttgactgctgtcttggaatatttggccgctgaaattttagaattagctggtaatgctgctagggataacaagaagaccagaattattccaagacatttgcaattggctatcagaaatgatgacgaattgaacaagttgttgggtaacgttaccattgcccaaggtggtgttttgccaaacatccatcaaaacttgttgccaaagaagtctgccaaggctaccaaggcttctcaagaattatga

SEQ ID NO: 2233 - DNA, 669 bp, Saccharomyces cerevisiae
atgtctagctcagaatccattagaatggtcctaattggcccacctggtgccggtaaaggtactcaagctccaaatttgcaagagcgtttccatgccgctcacttggccactggtgacatgttgagatctcaaatcgcaaagggcactcaattaggtttggaagcaaagaaaattatggaccaaggtggtttagtctctgatgacattatggttaacatgatcaaggatgaattgaccaacaatccagcttgtaagaatgggttcatcttggacggtttcccaagaaccattcctcaggctgaaaaattggaccaaatgttgaaagaacaaggaactcctttggaaaaagccatcgaattgaaggttgatgatgaattgttggttgccagaattaccggtagattaattcacccagcctctggcagatcctaccacaagatctttaacccaccaaaggaagacatgaaggatgacgtcaccggtgaagctttagttcaaagatctgatgacaatgcagacgccttgaagaagagattagctgcttaccatgctcaaaccgaaccaattgttgacttttacaaaaagaccggtatctgggctggtgttgatgcttcccaacctcctgctactgtttgggctgacatcttgaacaagctaggtaaggattaa

SEQ ID NO: 2234 - DNA, 669 bp, Artificial Sequence
  Description of Artificial Sequence: Synthetic polynucleotide
atgtctagctctgaatccattagaatggtcttgattggcccacctggtgccggtaaaggtactcaagctccaaatttgcaagagcgtttccatgccgctcacttggccactggtgacatgttgagatctcaaatcgcaaagggcactcaattaggtttggaagcaaagaaaattatggaccaaggtggtttagtctctgatgacattatggttaacatgatcaaggatgaattgaccaacaatccagcttgtaagaatgggttcatcttggacggtttcccaagaaccattcctcaggctgaaaaattggaccaaatgttgaaagaacaaggaactcctttggaaaaagccatcgaattgaaggttgatgatgaattgttggttgccagaattaccggtagattaattcacccagcctctggcagatcctaccacaagatctttaacccaccaaaggaagacatgaaggatgacgtcaccggtgaagctttagttcaaagatctgatgacaatgcagacgccttgaagaagagattagctgcttaccatgctcaaaccgaaccaattgttgacttttacaaaaagaccggtatctgggctggtgttgatgcttcccaacctcctgctactgtttgggctgacatcttgaacaagttgggtaaggattga

SEQ ID NO: 2235 - DNA, 4077 bp, Saccharomyces cerevisiae
atgccaaatgacaataagacacccaataggtccagcactcccaagtttactaaaaaaccagtaaccccgaatgataaaattcctgaaagagaagaaaaatccaatgaagtgaagacacctaaaattccattattcacgtttgccaaaagcaaaaactattcaaggccgtcaaccgcaattcatacctcacctcatcaaccaagtgatgtaaaaccgacttcccataaacagttgcaacagccaaaatcctcaccactgaaaaaaaataactataattcttttcctcactcaaatctggaaaaaataagcaacagcaaactactctcccttcttcggtccaaaacgtcagcaggaagaattgaatcaaacaatccttcacatgatgctagcaggtctctagcaagttttgaacaaacagcattttcccggcatgcgcagcaacaaacttctaccttcaattcaaagcctgtacgtaccatagtaccgatatcaacatcacaaaccaataactcatttttatcaggagtaaaaagcttactaagtgaagagaaaataagggattactctaaagagattctaggcataaacttggcaaacgaacagcctgttttagagaagccacttaaaaaaggatcagcagacatcggcgcctctgtgatttctttgaccaaggacaaatctatcaggaaagataccgtagaagaaaaaaaagaagaaaagttgaatataggtaaaaactttgcccattctgattcactatcagttccgaaggttagtgccggtgacagtggtatatcaccggaggagagcaaggcaagaagtcctggaattgcaaaaccgaatgccatacaaacagaagtgtatggaataaatgaggaatctactaacgagcgtttagaaataaatcaagaaaaaccagtaaaattagatgagaatagtgcaaatagtacggtcgcatcggccttagataccaatgggacgtcagccacgacagaaactctaacatcaaagaagatcgttccatctccaaaaaaagtcgccattgatcaagataaaataacactgcacgatgagaaaacacttgcaccttcgaagcatcagcctataacatctgaacaaaaaatgaaggaagacgccgacctcaagaggatggaaatcttaaagtcacctcatttgtcgaaaagtccagctgacagacctcaagggcgtagaaacagccgaaatttttccactagagatgaagaaactacaaaacttgcttttcttgttgaatatgaaggccaagaaaacaactataactctacttctcgaagcacagaaaagaaaaatgatatgaacacttctgcaaagaataaaaatggtgaaaacaagaaaattggtaagaggccgcctgaaatcatgagcactgaagctcacgtaaacaaagtaaccgaagaaaccacaaagcagatacagagtgtacgaatagatggtcgaaaagtgcttcaaaaagtacaaggagaatcccacattgattcgagaaacaataccctgaatgttacaccatcaaagaggccccagctaggagaaataccgaatcctatgaaaaagcataagcctaatgaagggcgaactccaaatatctcaaacggtacaataaacatccaaaagaaattagagcctaaggaaattgtgcgagatattttgcatacgaaagaatcatcaaatgaggctaagaaaactattcaaaaccctttaaataaatcacaaaacactgctcttccttccacacataaagttacacaaaaaaaagatataaaaattggaactaatgacctttttcaggttgaatctgctccaaaaatatcctcagagattgaccgggagaatgttaaatcaaaggatgaaccggtttccaaggctgttgaaagcaaatctttattaaatttgttttcaaacgtactcaaggctcctttcattaaaagtgaaagcaaacctttttctagtgatgctctgtcaaaagaaaaagccaattttttggaaactatcgcttccactgaaaagccagaaaataagactgataaggtgtctctatctcagccagttagtgcaagtaagcatgagtatagcgataattttccagtttctctatctcaaccttcaaagaaatctttcgcaaatcatacagaggatgagcaaattgaaaaaaagaagatctgccgtgggagaatgaatacgataataactcacccgggaaaaatggagctggtatacgtgtccgactcagacgattcttcttcagataatgatagcctaactgacttggaaagtttaagctctggtgaatcaaatgaaatcaaagtaactaatgatttagatacaagtgctgaaaaggaccaaattcaggcaggcaaatggtttgatcctgtattggattggcgaaaatctgatcgtgaattgacgaaaaacattctttggaggatagctgataaaacgacatacgataaagaaacaataactgaccttattgaacaagggatcccaaaacatagttatttaagtggcaatccattaactagtgtgactaacgacatttgctctgttgaaaactatgaaacatcaagtgctttcttttaccaacaagtgcacaagaaggacagattacaatatttgccattatatgcagtttctacatttgaaaacacaaataacactgaaaaaaatgatgtgaccaataaaaatatcaatatagggaaacatagccaagaacaaaattcttcttccgctaaaccatcccaaattccaaccgtgtcttctccattaggattcgaagaaacaaagctaagtaccacgcctactaaaagcaatagaagagtgtcgcatagtgatactaattctagcaaacccaaaaacacgaaggagaacctttcaaaaagctcttggaggcaagaatggcttgcaaatttgaaacttatttccgtttcgttggttgatgagttcccttcggagctttccgacagtgatagacaaataattaacgaaaaaatgcagttacttaaagatatatttgctaacaaccttaaatcagcaatttccaataattttagagagagtgacatcattatactgaaaggtgaaatagaagattacccaatgagttctgaaattaagatttactacaacgaattacagaacaagcctgatgcaaaaaaagccagattttggtcatttatgaagactcagagatttgtttccaacatgggatttgatattcagaagtcctgtgaacctgtttctatatccacgtcggtcaaaccacatgtggtcgagcccgagcatatggcagatgccaaaattatgcctaaggatatactgcaaattacaaaaaaaccgttaatggttaaaaatgtgaagccttcttctccgccagatgtgaagtctttggtgcagctgagcacaatggaaacgaaaaccctaccagaaaagaagcaattcgacagtatttttaattctaacaaagcaaaaataatccctggaaatgggaagcacgcatcagaaaacatctcactctctttctcaagacctgcgtcctacggctatttttctgttggaaaaagggttccaatcgttgaagatcgtcgagtgaaacaactcgacgatataacagacagtaatacaacagaaattttaactagtgttgacgttttaggaacacattcacaaactggtactcaacaatcaaatatgtacacatcaacccaaaaaacagaacttgaaattgataataaggatagtgtcaccgaatgttcgaaggacatgaaagaagatggtctttcctttgtggatatcgttttgtcgaaagcagcatcggcgctggatgaaaaggaaaaacaattggctgttgcaaatgaaattattcggtctttgtcagatgaagttatgaggaatgaaattagaataacttcacttcaaggtgatttaacttttacaaagaaatgtcttgaaaatgcgagaagtcaaatatctgaaaaagatgctaaaattaacaaattgatggaaaaagattttcaagtgaataaggagataaaaccgtattga

SEQ ID NO: 2236 - DNA, 4077 bp, Artificial Sequence
  Description of Artificial Sequence: Synthetic polynucleotide
atgccaaatgacaataagacacccaataggtccagcactcccaagtttactaaaaaaccagtaaccccgaatgataaaattcctgaaagagaagaaaaatccaatgaagtgaagacacctaaaattccattattcacgtttgccaaaagcaaaaactattctaggccgtccaccgcaattcatacctctcctcatcaaccaagtgatgtaaaaccgacttcccataaacagttgcaacagccaaaatcctctccattgaaaaaaaataactataattcttttcctcactctaatttggaaaaaataagcaacagcaaattactctcccttcttcgttccaaaacgtctgcaggaagaattgaatctaacaatccttctcatgatgctagcaggtctttggcaagttttgaacaaacagcattttccagacatgcgcagcaacaaacttctaccttcaattctaagcctgtacgtaccatagtaccgatatctacatctcaaaccaataactcttttttatctggagtaaaaagcttattaagtgaagagaaaataagggattactctaaagagattttgggcataaacttggcaaacgaacagcctgttttagagaagccacttaaaaaaggaagtgcagacatcggcgcctctgtgatttctttgaccaaggacaaatctatcaggaaagataccgtagaagaaaaaaaagaagaaaagttgaatataggtaaaaactttgcccattctgattctttaagtgttccgaaggttagtgccggtgacagtggtatatctccggaggagagcaaggcaagaagtcctggaattgcaaaaccgaatgccatacaaacagaagtgtatggaataaatgaggaatctactaacgagcgtttagaaataaatcaagaaaaaccagtaaaattagatgagaatagtgcaaatagtacggtcgcatctgccttagataccaatgggacgagtgccacgacagaaactttgacatccaagaagatcgttccatctccaaaaaaagtcgccattgatcaagataaaataacattacacgatgagaaaacacttgcaccttctaagcatcagcctataacatctgaacaaaaaatgaaggaagacgccgacctcaagaggatggaaatcttaaagtctcctcatttgagtaaaagtccagctgacagacctcaagggcgtagaaacagcagaaatttttccactagagatgaagaaactacaaaacttgcttttcttgttgaatatgaaggccaagaaaacaactataactctacttctagaagcacagaaaagaaaaatgatatgaacacttctgcaaagaataaaaatggtgaaaacaagaaaattggtaagaggccgcctgaaatcatgagcactgaagctcacgtaaacaaagtaaccgaagaaaccacaaagcagatacagagtgtaagaatagatggtagaaaagtgcttcaaaaagtacaaggagaatcccacattgattccagaaacaataccttgaatgttacaccatctaagaggccccagttaggagaaataccgaatcctatgaaaaagcataagcctaatgaagggagaactccaaatatctccaacggtacaataaacatccaaaagaaattagagcctaaggaaattgtgagagatattttgcatacgaaagaatcttccaatgaggctaagaaaactattcaaaaccctttaaataaatctcaaaacactgctcttccttccacacataaagttacacaaaaaaaagatataaaaattggaactaatgacctttttcaggttgaatctgctccaaaaatatcctctgagattgacagagagaatgttaaatccaaggatgaaccggtttccaaggctgttgaaagcaaatctttattaaatttgttttccaacgtactcaaggctcctttcattaaaagtgaaagcaaacctttttctagtgatgctttatccaaagaaaaagccaattttttggaaactatcgcttccactgaaaagccagaaaataagactgataaggtgtctttatctcagccagttagtgcaagtaagcatgagtatagcgataattttccagtttctttatctcaaccttctaagaaatctttcgcaaatcatacagaggatgagcaaattgaaaaaaagaagatctgccgtgggagaatgaatacgataataactcacccgggaaaaatggagttggtatacgtgtccgacagtgacgattcttcttctgataatgatagcttaactgacttggaaagtttaagctctggtgaaagtaatgaaatcaaagtaactaatgatttagatacaagtgctgaaaaggaccaaattcaggcaggcaaatggtttgatcctgtattggattggagaaaatctgatcgtgaattgacgaaaaacattctttggaggatagctgataaaacgacatacgataaagaaacaataactgaccttattgaacaagggatcccaaaacatagttatttaagtggcaatccattaactagtgtgactaacgacatttgctctgttgaaaactatgaaacatctagtgctttcttttaccaacaagtgcacaagaaggacagattacaatatttgccattatatgcagtttctacatttgaaaacacaaataacactgaaaaaaatgatgtgaccaataaaaatatcaatatagggaaacatagccaagaacaaaattcttcttccgctaaaccatcccaaattccaaccgtgtcttctccattaggattcgaagaaacaaagttgagtaccacgcctactaaaagcaatagaagagtgtctcatagtgatactaattctagcaaacccaaaaacacgaaggagaacctttctaaaagctcttggaggcaagaatggcttgcaaatttgaaacttatttccgtttctttggttgatgagttcccttctgagctttccgacagtgatagacaaataattaacgaaaaaatgcagttacttaaagatatatttgctaacaaccttaaatctgcaatttccaataattttagagagagtgacatcattatattgaaaggtgaaatagaagattacccaatgagttctgaaattaagatttactacaacgaattacagaacaagcctgatgcaaaaaaagccagattttggtcttttatgaagactcagagatttgtttccaacatgggatttgatattcagaagtcctgtgaacctgtttctatatccacgagtgtcaaaccacatgtggtcgagcccgagcatatggcagatgccaaaattatgcctaaggatatattgcaaattacaaaaaaaccgttaatggttaaaaatgtgaagccttcttctccgccagatgtgaagtctttggtgcagttgagcacaatggaaacgaaaaccttgccagaaaagaagcaattcgacagtatttttaattctaacaaagcaaaaataatccctggaaatgggaagcacgcatctgaaaacatctctctctctttcagtagacctgcgtcctacggctatttttctgttggaaaaagggttccaatcgttgaagatcgtcgtgtgaaacaactcgacgatataacagacagtaatacaacagaaattttaactagtgttgacgttttaggaacacattctcaaactggtactcaacaaagcaatatgtacacatctacccaaaaaacagaacttgaaattgataataaggatagtgtcaccgaatgttccaaggacatgaaagaagatggtctttcctttgtggatatcgttttgagtaaagcagcaagtgcgttggatgaaaaggaaaaacaattggctgttgcaaatgaaattattagatctttgagtgatgaagttatgaggaatgaaattagaataacttctcttcaaggtgatttaacttttacaaagaaatgtcttgaaaatgcgagaagtcaaatatctgaaaaagatgctaaaattaacaaattgatggaaaaagattttcaagtgaataaggagataaaaccgtattga

SEQ ID NO: 2237 - DNA, 1881 bp, Saccharomyces cerevisiae
atggatcacgacacagaagttatagtcaaggatttcaacagtattcttgaagaattaacttttaactcgagacccattattaccactctcacgaagttagcagaagaaaacatttcgtgtgctcaatattttgttgacgccattgagagtagaattgaaaaatgtatgcctaagcagaagctatacgctttttatgccttggactccatttgtaagaatgttggcagcccatacacaatctacttcagtagaaatttgtttaacttgtacaaaagaacatacttattggtggacaacaccacaagaacaaaactcatcaatatgtttaagctttggttgaatcctaatgacaccggcctgcctctgtttgaaggctcagcactggagaaaattgaacagtttttaataaaggccagtgctctccaccagaaaaacctgcaagcaatgttaccaactccgactgttcccctcctattaagagacattgataaattaacttgtttaactagtgaaaggctaaagaatcaaccaaatgatgaaaaattaaaaatgaaactgttggttttatctcagttgaaacaagaactgaaaagagaaaaactaactctcaatgctctgaaacaagttcaaatgcaactaaggcaggtcttctcacaggaccaacaagttttgcaggaaagaatgaggtatcacgaacttcagcagcaacagcaacaacagcagcaacagcaacaacaacaacagcagcagcagcagcagtatcacgaaactaaggatatggtcggttcttacacacaaaactctaattcagcgattccattgtttggaaataattcagatacaacgaaccaacagaattctttatcttcctctctttttggtaatatttctggcgttgaatcttttcaagaaattgagaaaaaaaagtccctaaacaaaatcaataacctctatgcatctcttaaggctgaagggctcatatatactccaccaaaagaatccatcgtaacgctttataaaaagctaaatggacactcaaactactctcttgattcacacgaaaaacaattgatgaagaacctgccaaagatacccttattaaatgatattctttctgactgcaaagcttattttgccacggttaacatcgacgttttgaataacccatccctgcagctgtccgaacaaactcttcttcaagaaaatcccatcgtccaaaataatcttattcacttattataccgatccaagccaaataaatgtagcgtgtgtggtaagagatttggcaactcagaaagtgaaaaactactacaaaatgagcatttggactggcatttcagaataaatacaagaattaagggatcacaaaacacagcaaatacaggcataagcaactctaacttaaatacaactaccacaaggaaaaatattcaatcaagaaactggtatttgagtgactctcaatgggcagccttcaaagatgatgaaattacctccacaaagcataaaaatgattatactgatccgcatgccaataaaaatatcgataaaagtgccctaaatattcacgctgatgaaaatgacgaaggctctgtagacaacactttaggaagtgatagaagtaacgagttggaaatacggggaaaatatgttgttgtaccagaaacttcacaagatatggccttcaaatgtccaatttgtaaggaaaccgttactggcgtttatgatgaagaatctggtgaatgggtttggaaaaatactattgaagtgaatggcaaatatttccactcgacatgttatcatgaaacgtcgcaaaattcaagcaaatctaatagtggcaaggtcggtttggatgacttaaagaaattggtcacaaaataa

SEQ ID NO: 2238 - DNA, 1881 bp, Artificial Sequence
  Description of Artificial Sequence: Synthetic polynucleotide
atggatcacgacacagaagttatagtcaaggatttcaacagtattcttgaagaattaacttttaactctagacccattattaccactctcacgaagttagcagaagaaaacattagttgtgctcaatattttgttgacgccattgagagtagaattgaaaaatgtatgcctaagcagaagttgtacgctttttatgccttggactccatttgtaagaatgttggcagcccatacacaatctacttcagtagaaatttgtttaacttgtacaaaagaacatacttattggtggacaacaccacaagaacaaaactcatcaatatgtttaagctttggttgaatcctaatgacaccggcttacctttatttgaaggcagtgcattagagaaaattgaacagtttttaataaaggccagtgctctccaccagaaaaacttacaagcaatgttaccaactccgactgttcccctcttgttaagagacattgataaattaacttgtttaactagtgaaaggttaaagaatcaaccaaatgatgaaaaattaaaaatgaaacttttggttttatctcagttgaaacaagaattgaaaagagaaaaattaactctcaatgctttgaaacaagttcaaatgcaattaaggcaggtcttctctcaggaccaacaagttttgcaggaaagaatgaggtatcacgaacttcagcagcaacagcaacaacagcagcaacagcaacaacaacaacagcagcagcagcagcagtatcacgaaactaaggatatggtcggttcttacacacaaaactctaattctgcgattccattgtttggaaataattctgatacaacgaaccaacagaattctttatcttcctctctttttggtaatatttctggcgttgaatcttttcaagaaattgagaaaaaaaagtccttgaacaaaatcaataacctctatgcatctcttaaggctgaagggctcatatatactccaccaaaagaatccatcgtaacgctttataaaaagttgaatggacactccaactactctcttgattctcacgaaaaacaattgatgaagaacttaccaaagatacccttattaaatgatattctttctgactgcaaagcttattttgccacggttaacatcgacgttttgaataacccatccttacagttgtccgaacaaactcttcttcaagaaaatcccatcgtccaaaataatcttattcacttattataccgttccaagccaaataaatgtagcgtgtgtggtaagagatttggcaactctgaaagtgaaaaattattacaaaatgagcatttggactggcatttcagaataaatacaagaattaagggatctcaaaacacagcaaatacaggcataagcaactctaacttaaatacaactaccacaaggaaaaatattcaatctagaaactggtatttgagtgactctcaatgggcagccttcaaagatgatgaaattacctccacaaagcataaaaatgattatactgatccgcatgccaataaaaatatcgataaaagtgccttgaatattcacgctgatgaaaatgacgaaggctctgtagacaacactttaggaagtgatagaagtaacgagttggaaataagaggaaaatatgttgttgtaccagaaacttctcaagatatggccttcaaatgtccaatttgtaaggaaaccgttactggcgtttatgatgaagaatctggtgaatgggtttggaaaaatactattgaagtgaatggcaaatatttccactctacatgttatcatgaaacgtctcaaaatagtagcaaatctaatagtggcaaggtcggtttggatgacttaaagaaattggtcacaaaatga

SEQ ID NO: 2239 - DNA, 1362 bp, Saccharomyces cerevisiae
atgcctgacaataatacggagcaattgcagggatctccttcaagtgaccagagactgagggttgactgggacaacggtaaccattttgacgtctctcccgacagatacgcgcctcatctatctgaattttacccaattgtaaatagtaaaagaccagtggctagcagtgctggctcagaaaataacgaccatctggacgacatgaaccatttacgttcatccaaagtgtattcaaaggcccgtcgggcatcgagcataacttctggtacgagcacaataaacgacttgcaaacgctaatcacaaagagagatgtgaaagagacccaggaagccctatcgacattactcaggaactcgaatgcttattcggattcgttattaaagacatctcagaatggggcagaaattgcccattccttagaaaacattgccaagttgaagggttgcaatgatgaaacggcggagaaactattgagtgccagtgggttattctaccttttatctaatcatcagcttataatgtcaaagtatttcaatgacttgttgggagataatttaattgatgatattgatgaattcgaattacagaccaagataatggagaacaagttcaaagcacaaagcaaagagcaaagtttaaaattgaaattgcaggaaagacataacttcgatatctcgaaaagaaaaataaggaatttaatctcataccgagagagcctttctagcttgcaagcaaggttagatcaactggagacactaaagcacgatttttacatggattcatacgaacttgtggaaaatacatgcaacaaagtactcagcaaagttgccacggtatctagggcacaagtggaaatttctgaaaatattgcaaggaaaggttggtctggaggcgggctagacgaactactttgtgatgcagacgaccccttcagcaaaaaagcagatgggccatacgggaccatcggtggtgatggagagactgctggagaagcatacaacagcgatgaggaaacgggtgggaatgacgtggtgctcaatgaactactagaaggaaccagccaaccttccacatcaaaaacatctttacccaaatccaaggggtcctcaacggtatccacaccgaatcattcacagtcaagttcaaacaaggacggggtacgaaacaatggcggcggcaaaaatggcgaagatgaggatacagacaatttgatgggaacagaaaattcattttctttaccgcctacgagaaactctgccgaggaaaccacacaaacgtttaaacaattgtccattaaagaagataatgacaatcacagcagcgatacggacggcatgcaagaccagtcaagtaatatataa

SEQ ID NO: 2240 - DNA, 1362 bp, Artificial Sequence
  Description of Artificial Sequence: Synthetic polynucleotide
atgcctgacaataatacggagcaattgcagggatctccttctagtgaccagagattaagggttgactgggacaacggtaaccattttgacgtctctcccgacagatacgcgcctcatttatctgaattttacccaattgtaaatagtaaaagaccagtggctagcagtgctggctctgaaaataacgaccatttggacgacatgaaccatttacgttcttccaaagtgtattccaaggcccgtagagcaagtagcataacttctggtacgagcacaataaacgacttgcaaacgttgatcacaaagagagatgtgaaagagacccaggaagccctttctacattactcaggaacagtaatgcttattctgattctttattaaagacatctcagaatggggcagaaattgcccattccttagaaaacattgccaagttgaagggttgcaatgatgaaacggcggagaaacttttgagtgccagtgggttattctaccttttatctaatcatcagcttataatgtccaagtatttcaatgacttgttgggagataatttaattgatgatattgatgaattcgaattacagaccaagataatggagaacaagttcaaagcacaaagcaaagagcaaagtttaaaattgaaattgcaggaaagacataacttcgatatctccaaaagaaaaataaggaatttaatctcctacagagagagcctttctagcttgcaagcaaggttagatcaattggagacattgaagcacgatttttacatggattcttacgaacttgtggaaaatacatgcaacaaagtactcagcaaagttgccacggtatctagggcacaagtggaaatttctgaaaatattgcaaggaaaggttggtctggaggcgggttggacgaattgctttgtgatgcagacgaccccttcagcaaaaaagcagatgggccatacgggaccatcggtggtgatggagagactgctggagaagcatacaacagcgatgaggaaacgggtgggaatgacgtggtgctcaatgaattattggaaggaaccagccaaccttccacaagtaaaacatctttacccaaatccaaggggtcctctacggtatccacaccgaatcattctcagagcagtagtaacaaggacggggtaagaaacaatggcggcggcaaaaatggcgaagatgaggatacagacaatttgatgggaacagaaaattctttttctttaccgcctacgagaaactctgccgaggaaaccacacaaacgtttaaacaattgtccattaaagaagataatgacaatcacagcagcgatacggacggcatgcaagaccagagcagtaatatatga

SEQ ID NO: 2241 - DNA, 618 bp, Saccharomyces cerevisiae
atgcgttggtggccgtggtcaaatcagacagaagatcaaaagcagcagcaacaaccgcagggtaaagcagatggtgatcgcgtgctgacaaattactcgcggggtcaaaagatcctcttagaagacactccacccaagtttgccgatgacttgtccaattctcagttggccaagaagcaagaacgggctactttgaaagaggcttgggactcgatcagatggagtgattttagtttgcagaagctgacttcaatcccgtgcttcagagacgcgggcatgctcgggttttccagcatgttcttgatgggatctattatatttatataccataagagcccgactaaggccacgaattgggcgatgagctctctgatactgggctcgattgtcggatgggagcaatgtaggctaaagagacaaaaaagtttccagatcgcacaattggcaaaggaaaccgtggcgaaaaaggaaaaaccaatgctccataatgtccctcatgacccatctctgccggggcaatgggaggccgccaaaaatgaaaagcagagtcagtttgaacaaagtaaccagaatttatctcaggcctcctctgagaagaaatggtacaagttctggtga

SEQ ID NO: 2242 - DNA, 618 bp, Artificial Sequence
  Description of Artificial Sequence: Synthetic polynucleotide
atgcgttggtggccgtggtctaatcagacagaagatcaaaagcagcagcaacaaccgcagggtaaagcagatggtgatcgcgtgttaacaaattactctcgtggtcaaaagatcctcttagaagacactccacccaagtttgccgatgacttgtccaattctcagttggccaagaagcaagaaagagctactttgaaagaggcttgggactctatcagatggagtgattttagtttgcagaagttgacttctatcccgtgcttcagagacgcgggcatgctcgggttttccagcatgttcttgatgggatctattatatttatataccataagagcccgactaaggccacgaattgggcgatgagctctttgatattgggctccattgtcggatgggagcaatgtaggttaaagagacaaaaaagtttccagatcgcacaattggcaaaggaaaccgtggcgaaaaaggaaaaaccaatgctccataatgtccctcatgacccatctttaccggggcaatgggaggccgccaaaaatgaaaagcagagtcagtttgaacaaagtaaccagaatttatctcaggcctcctctgagaagaaatggtacaagttctggtga

SEQ ID NO: 2243 - DNA, 1647 bp, Saccharomyces cerevisiae
atgcaacgctccatttttgcgaggttcggtaactcctctgccgctgtttccacactgaataggctgtccacgacagccgcaccacatgcgaaaaatggctatgccaccgctactggtgctggtgccgctgctgccactgccacagcgtcatcaacacatgcagcagcagcagcagccgctgctgccaaccattccacccaggagtcgggtttcgattacgaaggcctgatagattccgaactgcagaagaaaagacttgacaaatcgtacagatatttcaacaatatcaaccgattggccaaggagttccccctagctcatcgccagagagaggcggacaaggtcaccgtttggtgttccaacgactatttagcactttccaagcaccctgaggtattggacgccatgcataaaactatcgacaagtatggttgtggtgccggtggtacaagaaacattgctggccataacatccccactttgaatctggaagccgaattggccactttacacaagaaggaaggtgccttagttttttcgtcatgttacgtagccaacgatgccgtcttatccctactgggtcaaaagatgaaggacttggtgattttctccgacgaactcaaccatgcgtccatgattgtcggtattaagcatgctaacgtaaaaaaacacattttcaaacataatgacttgaacgaattggaacaactgctccagtcataccccaaatccgttcctaaactaattgctttcgaatcagtatattctatggccggttcagtggccgacatagaaaaaatttgcgacttggccgacaaatacggtgctttgaccttcttggatgaagtacatgcggtcggcctgtacggccctcacggtgcaggtgttgcagaacattgtgattttgaaagtcaccgtgcaagtggtattgctaccccaaagaccaatgacaagggcggcgcgaagactgtgatggaccgtgtcgacatgatcaccggcactttaggtaagtctttcggtagcgtaggtggctacgtcgcagcctctaggaaattgatcgattggttcagatcgtttgcacctggtttcattttcaccacgactttaccaccttcagttatggcaggcgctaccgcagcaattagataccaacgttgccacatcgacctaagaacctcgcaacagaaacataccatgtacgtaaagaaagctttccatgagttgggcattccagttattccaaatccttctcatatcgtcccagtgttgattggtaatgctgatttggctaagcaagcttctgacatcttaatcaataagcatcaaatctacgtacaagctatcaacttccctacggttgctcgcggtaccgaaagattgagaattaccccaacgccaggtcacaccaacgatttatctgacatcttaatcaatgcagttgatgatgtgttcaatgagctacagttaccacgtgtcagagactgggaaagccaaggtggcttattgggtgttggagagagcggatttgtggaagagtctaacttatggacatcaagccaactatctttaactaatgacgacttgaaccctaatgttagagaccccatcgttaaacaactagaggtttctagtggtatcaagcagtaa

SEQ ID NO: 2244 - DNA, 1647 bp, Artificial Sequence
  Description of Artificial Sequence: Synthetic polynucleotide
atgcaacgctccatttttgcgaggttcggtaactcctctgccgctgtttccacattaaataggctttccacgacagccgcaccacatgcgaaaaatggctatgccaccgctactggtgctggtgccgctgctgccactgccacagcgagttctacacatgcagcagcagcagcagccgctgctgccaaccattccacccaggagtctggtttcgattacgaaggcttgatagattccgaattacagaagaaaagacttgacaaatcttacagatatttcaacaatatcaacagattggccaaggagttccccttggctcatcgccagagagaggcggacaaggtcaccgtttggtgttccaacgactatttagcactttccaagcaccctgaggtattggacgccatgcataaaactatcgacaagtatggttgtggtgccggtggtacaagaaacattgctggccataacatccccactttgaatttggaagccgaattggccactttacacaagaaggaaggtgccttagttttttcttcttgttacgtagccaacgatgccgtcttatccttattgggtcaaaagatgaaggacttggtgattttctccgacgaactcaaccatgcgtccatgattgtcggtattaagcatgctaacgtaaaaaaacacattttcaaacataatgacttgaacgaattggaacaattgctccagtcttaccccaaatccgttcctaaattgattgctttcgaaagtgtatattctatggccggttctgtggccgacatagaaaaaatttgcgacttggccgacaaatacggtgctttgaccttcttggatgaagtacatgcggtcggcctttacggccctcacggtgcaggtgttgcagaacattgtgattttgaaagtcaccgtgcaagtggtattgctaccccaaagaccaatgacaagggcggcgcgaagactgtgatggaccgtgtcgacatgatcaccggcactttaggtaagtctttcggtagcgtaggtggctacgtcgcagcctctaggaaattgatcgattggttcagatcttttgcacctggtttcattttcaccacgactttaccaccttctgttatggcaggcgctaccgcagcaattagataccaacgttgccacatcgacttgagaacctctcaacagaaacataccatgtacgtaaagaaagctttccatgagttgggcattccagttattccaaatccttctcatatcgtcccagtgttgattggtaatgctgatttggctaagcaagcttctgacatcttaatcaataagcatcaaatctacgtacaagctatcaacttccctacggttgctcgcggtaccgaaagattgagaattaccccaacgccaggtcacaccaacgatttatctgacatcttaatcaatgcagttgatgatgtgttcaatgagttacagttaccacgtgtcagagactgggaaagccaaggtggcttattgggtgttggagagagcggatttgtggaagagtctaacttatggacatctagccaattatctttaactaatgacgacttgaaccctaatgttagagaccccatcgttaaacaattggaggtttctagtggtatcaagcagtga

SEQ ID NO: 2245 - DNA, 888 bp, Saccharomyces cerevisiae
atgtccgcctcagctcaacatagccaagcccaacaacaacaacaacaaaaaagctgtaattgcgatttgctattatggaggaaccctgttcaaaccggtaaatatttcggtgggtctctgttagccttgttaattttgaaaaaagttaacttgatcactttctttttgaaggttgcctacactatcttattcacaacaggatctattgaattcgtatccaagctctttttgggacaaggtttaatcaccaagtatggtcctaaagaatgtccaaatatcgccggctttattaagcctcatatcgatgaagctttgaaacagctaccagtcttccaagcccacataagaaagactgtattcgctcaagtccctaagcacactttcaagaccgctgttgccttatttctactacacaaattcttctcctggttctctatctggaccatcgtctttgttgctgacatttttaccttcactttgccagttatctaccattcctacaagcatgaaattgatgctactgtcgctcaaggtgtagaaatttctaagcaaaagacccaagagttttctcaaatggcttgcgaaaagacaaaaccatacttggacaaggttgaatctaaattgggcccaatttccaacttggtcaaatctaagactgctcctgtgtcttctactgccggtcctcaaaccgccagcacttctaagttggccgctgatgttccattggaaccagagtctaaggcttacacatcttcagctcaagttatgccagaagttccacaacacgaaccttccactacccaagaatttaacgtcgatgaattgtctaatgaattgaagaaaagtacaaaaaacttgcaaaatgaattggaaaaaaacaacgcttga

SEQ ID NO: 2246 - DNA, 888 bp, Artificial Sequence
  Description of Artificial Sequence: Synthetic polynucleotide
atgtccgcctctgctcaacatagccaagcccaacaacaacaacaacaaaaaagctgtaattgcgatttgttattatggaggaaccctgttcaaaccggtaaatatttcggtgggtctttattagccttgttaattttgaaaaaagttaacttgatcactttctttttgaaggttgcctacactatcttattcacaacaggatctattgaattcgtatccaagctctttttgggacaaggtttaatcaccaagtatggtcctaaagaatgtccaaatatcgccggctttattaagcctcatatcgatgaagctttgaaacagttaccagtcttccaagcccacataagaaagactgtattcgctcaagtccctaagcacactttcaagaccgctgttgccttatttttattacacaaattcttctcctggttctctatctggaccatcgtctttgttgctgacatttttaccttcactttgccagttatctaccattcctacaagcatgaaattgatgctactgtcgctcaaggtgtagaaatttctaagcaaaagacccaagagttttctcaaatggcttgcgaaaagacaaaaccatacttggacaaggttgaatctaaattgggcccaatttccaacttggtcaaatctaagactgctcctgtgtcttctactgccggtcctcaaaccgccagcacttctaagttggccgctgatgttccattggaaccagagtctaaggcttacacatcttctgctcaagttatgccagaagttccacaacacgaaccttccactacccaagaatttaacgtcgatgaattgtctaatgaattgaagaaaagtacaaaaaacttgcaaaatgaattggaaaaaaacaacgcttga

SEQ ID NO: 2247 - DNA, 2082 bp, Saccharomyces cerevisiae
atgctacgatcaaccacatttactcgttcgttccacagttctagggcctggttgaaaggtcagaacctaactgaaaaaattgttcagtcgtatgcggtcaaccttcccgagggtaaagttgtgcattctggtgactatgtatcgatcaagccggcacactgtatgtcccacgataattcgtggcctgtagctttgaaattcatggggcttggcgctaccaagatcaagaatccttcacagattgtgaccactctggaccacgatattcagaacaaatcagagaaaaatttgaccaagtacaagaacatcgaaaattttgctaagaaacaccatatagaccactaccctgccggtagaggtattggtcatcaaattatgattgaggagggctatgctttccccttgaacatgactgtcgcatctgactcgcattcaaacacctacggtggtctggggtcgctgggcactccaatagtgagaacagacgctgcagccatatgggccacgggacagacgtggtggcagatcccaccagtggctcaggttgagttgaaaggtcaattgcctcagggtgtttccggaaaagatatcattgtcgcattatgtgggcttttcaacaatgatcaagttctaaatcacgccattgaattcacgggtgactctttgaatgcattgcctatcgatcacagactcactattgctaacatgaccaccgagtggggggctctttctggtttgttccccgtggacaaaactttgatcgactggtataaaaaccgtttgcaaaagctgggcaccaataatcatccaaggattaatccaaagactatccgcgcactagaagaaaaggcgaagattccgaaagcagacaaggatgcacattatgccaagaaactgatcatcgatctagccacgctaactcactacgtctcaggtccaaatagtgttaaggtctccaacaccgtgcaagatctatctcaacaagacatcaagataaataaagcttatctagtgtcatgtacaaactcccgtctatctgatttgcaatctgcagcggatgtggtttgtcctactggagacttaaacaaagtcaacaaggtggctccaggtgtggagttctatgtcgctgctgcctcttcagaaattgaggctgatgcccgtaaatcaggcgcttgggaaaagctgctaaaggctggctgtatcccactgccttctggttgtggtccatgcatcggtctaggtgcgggattactggaaccaggtgaagttggtatcagtgccacaaacagaaacttcaaaggtagaatgggttccaaggatgcattggcttacttagcttcccctgctgtagtcgccgcttctgccgtgctgggtaagattagttctcctgctgaggtattgtccacaagcgaaattccattcagcggcgttaagactgagataattgagaatcccgtggttgaagaggaagttaacgctcaaacagaggctccaaaacaatccgttgagatattagaaggtttcccaagagagttttctggtgaattagttttatgtgatgccgataacatcaataccgatggtatatatcctggtaagtacacttatcaggatgatgtgcctaaagaaaagatggcgcaagtttgtatggaaaattatgatgccgagttcagaaccaaggttcatccaggtgatatagtggtcagtgggttcaatttcggtaccggttcctccagggaacaagcggccaccgccttattggctaaaggtatcaacttagttgtttcaggatcttttggtaatattttttcaagaaactccattaacaatgctcttctgaccttggaaatcccagcattaatcaaaaaattacgtgagaaatatcaaggtgctccaaaagaacttacaagaagaactggttggtttttgaaatgggatgtagctgatgctaaagtggtcgttaccgaaggttctttggacggccctgtgatcttggagcaaaaagtgggtgagctaggtaagaacctacaagaaattattgtaaaaggaggcttggaaggttgggtcaaatcccaactataa

SEQ ID NO: 2248 - DNA, 2082 bp, Artificial Sequence
  Description of Artificial Sequence: Synthetic polynucleotide
atgttaagatctaccacatttactcgttctttccacagttctagggcctggttgaaaggtcagaacttgactgaaaaaattgttcagagttatgcggtcaaccttcccgagggtaaagttgtgcattctggtgactatgtatctatcaagccggcacactgtatgtcccacgataattcttggcctgtagctttgaaattcatggggcttggcgctaccaagatcaagaatccttctcagattgtgaccactttggaccacgatattcagaacaaaagtgagaaaaatttgaccaagtacaagaacatcgaaaattttgctaagaaacaccatatagaccactaccctgccggtagaggtattggtcatcaaattatgattgaggagggctatgctttccccttgaacatgactgtcgcatctgactctcattccaacacctacggtggtttggggtctttaggcactccaatagtgagaacagacgctgcagccatatgggccacgggacagacgtggtggcagatcccaccagtggctcaggttgagttgaaaggtcaattgcctcagggtgtttccggaaaagatatcattgtcgcattatgtgggcttttcaacaatgatcaagttttgaatcacgccattgaattcacgggtgactctttgaatgcattgcctatcgatcacagactcactattgctaacatgaccaccgagtggggggctctttctggtttgttccccgtggacaaaactttgatcgactggtataaaaaccgtttgcaaaagttgggcaccaataatcatccaaggattaatccaaagactatccgcgcattggaagaaaaggcgaagattccgaaagcagacaaggatgcacattatgccaagaaattaatcatcgatttggccacgttgactcactacgtctctggtccaaatagtgttaaggtctccaacaccgtgcaagatttatctcaacaagacatcaagataaataaagcttatttggtgagctgtacaaactcccgtttatctgatttgcaatctgcagcggatgtggtttgtcctactggagacttaaacaaagtcaacaaggtggctccaggtgtggagttctatgtcgctgctgcctcttctgaaattgaggctgatgcccgtaaatctggcgcttgggaaaagttattgaaggctggctgtatcccattgccttctggttgtggtccatgcatcggtttaggtgcgggattattggaaccaggtgaagttggtatcagtgccacaaacagaaacttcaaaggtagaatgggttccaaggatgcattggcttacttagcttcccctgctgtagtcgccgcttctgccgtgttgggtaagattagttctcctgctgaggtattgtccacaagcgaaattccattcagcggcgttaagactgagataattgagaatcccgtggttgaagaggaagttaacgctcaaacagaggctccaaaacaatccgttgagatattagaaggtttcccaagagagttttctggtgaattagttttatgtgatgccgataacatcaataccgatggtatatatcctggtaagtacacttatcaggatgatgtgcctaaagaaaagatggcgcaagtttgtatggaaaattatgatgccgagttcagaaccaaggttcatccaggtgatatagtggtcagtgggttcaatttcggtaccggttcctccagggaacaagcggccaccgccttattggctaaaggtatcaacttagttgtttctggatcttttggtaatattttttccagaaactccattaacaatgctcttttaaccttggaaatcccagcattaatcaaaaaattacgtgagaaatatcaaggtgctccaaaagaacttacaagaagaactggttggtttttgaaatgggatgtagctgatgctaaagtggtcgttaccgaaggttctttggacggccctgtgatcttggagcaaaaagtgggtgagttaggtaagaacttacaagaaattattgtaaaaggaggcttggaaggttgggtcaaatcccaattatga

SEQ ID NO: 2249 - DNA, 1635 bp, Saccharomyces cerevisiae
atggataaatatactgctttgattcacgatgagaatttttcaactcttacattgaatgtctcgagataccctaaaagtttggcatattgggagaagttactgaactatatagtaaaggcttcggcaccaatatgcaagtccactgagcctcaattattaaagttaatacgatgtacttattcttctatgctgaatgagtttccctatctagaaaactactatatcgacttcgcgctactggaatacaaactagggaatgtttctatgtctcataagatatttcagcgcggattgcaagcctttaaccaaagatctttactattatggacttcatatttaaagttttgtaataacgttatctcacaccagaagcagttgtttaaaaaatatgaaacagctgaagaatatgttggtttgcattttttcagtggggaattctgggatttatacctggaacaaattagctcaagatgtacgtcttctaagaaatattggaacgttttgaggaagatactcgaaattcctttacactctttttcgaaattttatgcattatggttacagcgcatagacgatataatggacctaaagcaattatcacaactaacaagtaaagatgaattattgaagaaactcaagatagacatcaattacagtggaagaaagggaccgtacctgcaggatgcaaagaaaaagttgaagaaaataacgaaggaaatgtacatggttgtacaatatcaagtacttgaaatctattccatttttgaatcaaaaatttatatcaactattatacatcgccagaaaccttggtttcttcagatgaaatagaaacatggataaaatacttggattataccatcaccttacaaacagattctttaacacatttaaattttcaaagagctttacttcctctggcccattatgatcttgtatggataaaatacagtaaatggttgataaattcaaaaaatgaccttttgggggcaaaaaacgttctattaatgggtcttaaattttctttgaagaagaccgaaataataaaactactgtattcagttatttgcaagttaaatgagtacgtacttttgcgaaatctattggaaaaaattgagtcctcatattccgacaatgttgaaaacgttgatgattttgagatattttgggactatcttcagttcaaaacgttctgccagaattctctgtattccagtcgatattctgattcacaatcaaacgggcttttgaataaggagctgtttgataaagtatggaaacgtttgagttgtaaagaaaaaaaaagtggtcaagaaattttattgaataacttagtacagttttattcgaaggataccgtagaatttgtagaaaagaacatatttcaaaagataatagaatttggttgggagtactacctacagaacggtatgttctggaactgttattgccgtttaatttatttcgacacttctaggtcatatttggacaagaggcaatatattgtcagaaaaatatggccccaaatagacaaaaaatttgcacagagcgtcttgccgtctttaacagaattctgtgagtcatacttcccagaggagatggatacattagaggaaatgtttactgaagaaccttag

SEQ ID NO: 2250 - DNA, 1635 bp, Artificial Sequence
  Description of Artificial Sequence: Synthetic polynucleotide
atggataaatatactgctttgattcacgatgagaatttttccactcttacattgaatgtctctagataccctaaaagtttggcatattgggagaagttattaaactatatagtaaaggcttctgcaccaatatgcaagtccactgagcctcaattattaaagttaataagatgtacttattcttctatgttgaatgagtttccctatttggaaaactactatatcgacttcgcgttattggaatacaaattggggaatgtttctatgtctcataagatatttcagcgcggattgcaagcctttaaccaaagatctttattattatggacttcttatttaaagttttgtaataacgttatcagccaccagaagcagttgtttaaaaaatatgaaacagctgaagaatatgttggtttgcattttttcagtggggaattctgggatttatacttggaacaaattagcagcagatgtacgtcttctaagaaatattggaacgttttgaggaagatactcgaaattcctttacactctttttccaaattttatgcattatggttacagcgcatagacgatataatggacttgaagcaattatctcaattgacaagtaaagatgaattattgaagaaactcaagatagacatcaattacagtggaagaaagggaccgtacttacaggatgcaaagaaaaagttgaagaaaataacgaaggaaatgtacatggttgtacaatatcaagtacttgaaatctattccatttttgaaagtaaaatttatatcaactattatacatctccagaaaccttggtttcttctgatgaaatagaaacatggataaaatacttggattataccatcaccttacaaacagattctttaacacatttaaattttcaaagagctttacttcctttggcccattatgatcttgtatggataaaatacagtaaatggttgataaattctaaaaatgaccttttgggggcaaaaaacgttttattaatgggtcttaaattttctttgaagaagaccgaaataataaaattattatattctgttatttgcaagttaaatgagtacgtacttttgagaaatttattggaaaaaattgagtccagctattccgacaatgttgaaaacgttgatgattttgagatattttgggactatcttcagttcaaaacgttctgccagaattctttgtattccagtagatattctgattctcaaagtaacgggcttttgaataaggagttatttgataaagtatggaaacgtttgagttgtaaagaaaaaaaaagtggtcaagaaattttattgaataacttagtacagttttattccaaggataccgtagaatttgtagaaaagaacatatttcaaaagataatagaatttggttgggagtactacttacagaacggtatgttctggaactgttattgccgtttaatttatttcgacacttctaggagttatttggacaagaggcaatatattgtcagaaaaatatggccccaaatagacaaaaaatttgcacagagcgtcttgccgtctttaacagaattctgtgagagttacttcccagaggagatggatacattagaggaaatgtttactgaagaaccttga

SEQ ID NO: 2251 - DNA, 657 bp, Saccharomyces cerevisiae
atgtttacgtggactatttatgtttcgttattgctagtgttagcaggtactttcttaatgaaccgaaatacgaatacagatataattgatacttttaaacgagaagtcgatttgccaatacctgcgcaaccaggtccaccattcccgcttgttactgactattgtgacattgtatgtggatttggccgcggatccgccgaattgggtattcccactgccaatgtacctataaatcagttacctaaaggtatcaacgatttggatttaggggtttactttgggtttgctcacattaaaactgttgatggtcaagaactatcggtggaaacaaggcgggatggaagaactgtggtttataattacggtcaatatttaagtgaagcgaacgatgatttgtccgtacttcctatggtactttcagttgggaaaaatccattctacggaaatgatttcaaaaccatggaattacatattatacatgattttaaaaatgatttttatggggccagggtcaagttcaatattttaggtcatatcagacccgaattgaactacactactaaggaagctctgatcgaagacatcaatatcgatattaggactgcgcagactgtccttgccactccaccgtatcaagtattcaaacaacaattatag

SEQ ID NO: 2252 - DNA, 657 bp, Artificial Sequence
  Description of Artificial Sequence: Synthetic polynucleotide
atgtttacgtggactatttatgtttctttattgttggtgttagcaggtactttcttaatgaacagaaatacgaatacagatataattgatacttttaaaagagaagtcgatttgccaatacctgcgcaaccaggtccaccattcccgcttgttactgactattgtgacattgtatgtggatttggccgcggatccgccgaattgggtattcccactgccaatgtacctataaatcagttacctaaaggtatcaacgatttggatttaggggtttactttgggtttgctcacattaaaactgttgatggtcaagaattatctgtggaaacaaggagagatggaagaactgtggtttataattacggtcaatatttaagtgaagcgaacgatgatttgtccgtacttcctatggtactttctgttgggaaaaatccattctacggaaatgatttcaaaaccatggaattacatattatacatgattttaaaaatgatttttatggggccagggtcaagttcaatattttaggtcatatcagacccgaattgaactacactactaaggaagctttgatcgaagacatcaatatcgatattaggactgcgcagactgtccttgccactccaccgtatcaagtattcaaacaacaattatga

SEQ ID NO: 2253 - DNA, 879 bp, Saccharomyces cerevisiae
atgcaaaggttttcactagtcactcacagatcattctctcactcctgtgtgaagcccaaatctgcatgctctttggtcaaaccagttcatcacttggtgaaaattgataagtcaaagttatcccctagatttccagaattgaaatatgacaaaagtgatattaggtcacctggatttaaaccaaaagacactcatgcagatagactcaatgaccattaccttaacactttacaatctgatttgttattgattaattattcacataacgctgcggtggtaaagggtctaaaacaaagagcgtggagtggtgattcgccataccacttgaacagaccaccgaaaaatcctcgaggttcgaaagctcaactacctgacattcatcctatcaaatggagtaacattcctgggctagaaagtgttgtaataaactgttttgttagggaagcgagagaaaatcagctattggctatcaccgctgcgttacaattacaacaaattactggatgtaaacctcatccaattttttccaaaaatgatgttccaacctggaaactgagaaaaggtcatcagatgggagctaaagtcgaactaaagggaaaagaaatgtctcagttcttaagcacattgaccgaaatcgtcctaccaagaatcagagaatataaaggtataagcaaccagtctgggaacagatttggtgggattagtttcggcctgacggctgaagatatcaaattcttccctgaaatcgatgcaaaccaggactcatggcctaaaacttttggtatgcacataaatataaacacctcagctcaattagattaccaggcgagaactttgttgagtgggttccagttcccatttttcggagaggagaaataa

SEQ ID NO: 2254 - DNA, 879 bp, Artificial Sequence
  Description of Artificial Sequence: Synthetic polynucleotide
atgcaaaggttttctttggtcactcacagatctttctctcactcctgtgtgaagcccaaatctgcatgctctttggtcaaaccagttcatcacttggtgaaaattgataagtccaagttatcccctagatttccagaattgaaatatgacaaaagtgatattaggtctcctggatttaaaccaaaagacactcatgcagatagactcaatgaccattaccttaacactttacaatctgatttgttattgattaattattctcataacgctgcggtggtaaagggtttgaaacaaagagcgtggagtggtgattctccataccacttgaacagaccaccgaaaaatcctcgtggttccaaagctcaattacctgacattcatcctatcaaatggagtaacattcctgggttggaaagtgttgtaataaactgttttgttagggaagcgagagaaaatcagttattggctatcaccgctgcgttacaattacaacaaattactggatgtaaacctcatccaattttttccaaaaatgatgttccaacctggaaattgagaaaaggtcatcagatgggagctaaagtcgaattgaagggaaaagaaatgtctcagttcttaagcacattgaccgaaatcgtcttgccaagaatcagagaatataaaggtataagcaaccagtctgggaacagatttggtgggattagtttcggcttgacggctgaagatatcaaattcttccctgaaatcgatgcaaaccaggactcttggcctaaaacttttggtatgcacataaatataaacaccagtgctcaattagattaccaggcgagaactttgttgagtgggttccagttcccatttttcggagaggagaaatga

SEQ ID NO: 2255 - DNA, 2922 bp, Saccharomyces cerevisiae
atgacttcactttcttcacagccagcgtacacgttggttttcgatccttctccgagtatggagacttactcgagtaccgattttcagaaagctcttgaaaagggatctgatgaacaaaaaattgacacgatgaaatcaattttagttacaatgctggaaggaaatccaatgcctgaattgttgatgcacataataagatttgtcatgccttctaaaaataaggaattaaaaaagcttttgtacttctactgggaaattgttcccaaactagctgaagatggaaaattgagacatgaaatgattcttgtctgtaatgccattcaacacgatttgcaacatcctaatgaatatattagaggtaacacattaaggtttttaacgaaattgagagaggccgaactcttagaacagatggttccctctgtcttagcgtgcttggaataccgtcatgcatatgttcgtaagtatgcaatcctagcagttttctccattttcaaggtcagcgaacatttacttcccgatgctaaagaaatcatcaattcgttcatagtagctgaaactgatccaatatgtaaaagaaatgcatttattgggttagctgaattagatcgtgaaaatgccttacactatttagagaacaatattgctgatatagaaaacctagaccctttattacaagctgtctttgttcaatttatcagacaagatgcaaacaggacccctgctttgaaagcccaatatatcgaattattgatggaactgctttcgaccacgacttccgatgaagtcatcttcgagaccgcattagccctaactgtgttgtctgccaatccaaatgtcttggttcctgcggttaacaaattgattgacttggccgtcaaggtttctgataataacattaagttaattgttctagaccgtattcaagacatcaatgctaataacgtaggtgctttggaagagttaaccctggatattttgagagtcttgaatgcagaagatttagacgttcgttcaaaggcgcttgatatttcaatggacttggccacatccagaaatgctgaagatgttgttcagcttttgaagaaagagctgcaaacaaccgtaaataacccagatcaagacaaggcaatgcagtacagacaattgttaataaaaactattcgtaccgtggctgtaaactttgtagaaatggcagcaagtgttgtttcgctattattagatttcatcggtgatttaaactcggttgccgccagtggtatcattgcctttatcaaagaagtgatcgaaaaatacccacaacttagagccaatatccttgaaaacatggttcaaacgctagacaaagtgagatctgctaaagcttaccgcggtgcattatggattatgggtgagtatgctgaaggagaaagtgagatacaacattgttggaagcacattcgtaacagcgtaggtgaagttcctatccttcaatcagaaatcaaaaagttaacacaaaaccaagaacacaccgaagaaaatgaggttgacgctaccgccaagccaactggtccagttattctaccagacggtacgtatgccactgaaagcgctttcgatgtgaagacttctcaaaagtcagttaccgatgaagaacgtgattctagacctccaattcgccggtttgttttaagtggtgatttctacacagctgccattctggccaacaccatcattaaacttgttttaaaattcgaaaacgtttccaagaacaaaactgtcatcaatgctctaaaggcggaagctttactaattttagttagtattgtaagagtgggtcaaagctctttggtggagaaaaaaattgatgaagattctttagagagagttatgacatctatttctattttattggatgaagttaatcctgaggaaaagaaggaagaagttaaacttctggaggttgcattcctggacaccaccaaatcctcattcaagagacaaattgaaattgcaaagaagaacaagcataagagagcattaaaagacagttgcaaaaacatcgaaccaattgatacgccgatttctttcaggcaatttgctggtgtggattctactaatgtgcaaaaagatagtattgaagaagatttacaactggcaatgaaaggagatgcaatccacgctactagcagctctagtatttcgaagctgaagaagatagtacctttatgtggcttttctgatccagtttacgccgaggcttgtattacaaacaatcaatttgacgtcgtattagatgttcttcttgttaatcaaacgaaagaaacattgaaaaacctacatgtgcaatttgcaactcttggtgatttgaagattattgacacaccacagaagaccaacgtgattcctcatggcttccacaaattcactgttactgtcaaagtttcctctgctgacacaggtgtcattttcggtaatattatttatgatggtgcgcatggtgaagatgctcgttatgttattttaaacgacgttcatgttgacattatggattatatcaaaccagccactgctgacgatgaacatttccgtaccatgtggaatgcatttgagtgggagaacaaaatatcggtcaaatcacaactaccaacattgcatgcttatttgagagaactggtcaagggaactaatatgggtattctaacaccatcagagtcgttgggagaagatgattgtaggttcttaagttgtaatctgtatgcgaagtcgtcctttggtgaagatgccctagccaacttgtgtatcgaaaaggattccaaaaccaatgatgtcataggttatgttcgtatccgatcaaagggacaaggtttggctctgtccctaggtgacagagtggcattgattgctaagaagaccaataaacttgctctcactcatgtttga

SEQ ID NO: 2256 - DNA, 2922 bp, Artificial Sequence
  Description of Artificial Sequence: Synthetic polynucleotide
atgacttctctttcttctcagccagcgtacacgttggttttcgatccttctccgagtatggagacttactctagtaccgattttcagaaagctcttgaaaagggatctgatgaacaaaaaattgacacgatgaaatccattttagttacaatgttggaaggaaatccaatgcctgaattgttgatgcacataataagatttgtcatgccttctaaaaataaggaattaaaaaagcttttgtacttctactgggaaattgttcccaaattggctgaagatggaaaattgagacatgaaatgattcttgtctgtaatgccattcaacacgatttgcaacatcctaatgaatatattagaggtaacacattaaggtttttaacgaaattgagagaggccgaactcttagaacagatggttccctctgtcttagcgtgcttggaataccgtcatgcatatgttcgtaagtatgcaatcttggcagttttctccattttcaaggtcagcgaacatttacttcccgatgctaaagaaatcatcaattctttcatagtagctgaaactgatccaatatgtaaaagaaatgcatttattgggttagctgaattagatcgtgaaaatgccttacactatttagagaacaatattgctgatatagaaaacttggaccctttattacaagctgtctttgttcaatttatcagacaagatgcaaacaggacccctgctttgaaagcccaatatatcgaattattgatggaattgctttctaccacgacttccgatgaagtcatcttcgagaccgcattagccttaactgtgttgtctgccaatccaaatgtcttggttcctgcggttaacaaattgattgacttggccgtcaaggtttctgataataacattaagttaattgttttggaccgtattcaagacatcaatgctaataacgtaggtgctttggaagagttaaccttggatattttgagagtcttgaatgcagaagatttagacgttcgttccaaggcgcttgatatttccatggacttggccacatccagaaatgctgaagatgttgttcagcttttgaagaaagagttacaaacaaccgtaaataacccagatcaagacaaggcaatgcagtacagacaattgttaataaaaactattcgtaccgtggctgtaaactttgtagaaatggcagcaagtgttgtttctttattattagatttcatcggtgatttaaactctgttgccgccagtggtatcattgcctttatcaaagaagtgatcgaaaaatacccacaacttagagccaatatccttgaaaacatggttcaaacgcttgacaaagtgagatctgctaaagcttaccgcggtgcattatggattatgggtgagtatgctgaaggagaaagtgagatacaacattgttggaagcacattcgtaacagcgtaggtgaagttcctatccttcaaagtgaaatcaaaaagttaacacaaaaccaagaacacaccgaagaaaatgaggttgacgctaccgccaagccaactggtccagttattttaccagacggtacgtatgccactgaaagcgctttcgatgtgaagacttctcaaaagtctgttaccgatgaagaacgtgattctagacctccaattcgcagatttgttttaagtggtgatttctacacagctgccattttagccaacaccatcattaaacttgttttaaaattcgaaaacgtttccaagaacaaaactgtcatcaatgctttgaaggcggaagctttattgattttagttagtattgtaagagtgggtcaaagctctttggtggagaaaaaaattgatgaagattctttagagagagttatgacatctatttctattttattggatgaagttaatcctgaggaaaagaaggaagaagttaaacttttggaggttgcattcttggacaccaccaaatccagtttcaagagacaaattgaaattgcaaagaagaacaagcataagagagcattaaaagacagttgcaaaaacatcgaaccaattgatacgccgatttctttcaggcaatttgctggtgtggattctactaatgtgcaaaaagatagtattgaagaagatttacaattggcaatgaaaggagatgcaatccacgctactagcagctctagtatttccaagttgaagaagatagtacctttatgtggcttttctgatccagtttacgccgaggcttgtattacaaacaatcaatttgacgtcgtattagatgttcttcttgttaatcaaacgaaagaaacattgaaaaacttacatgtgcaatttgcaactcttggtgatttgaagattattgacacaccacagaagaccaacgtgattcctcatggcttccacaaattcactgttactgtcaaagtttcctctgctgacacaggtgtcattttcggtaatattatttatgatggtgcgcatggtgaagatgctcgttatgttattttaaacgacgttcatgttgacattatggattatatcaaaccagccactgctgacgatgaacatttccgtaccatgtggaatgcatttgagtgggagaacaaaatatctgtcaaatctcaattaccaacattgcatgcttatttgagagaattggtcaagggaactaatatgggtattttaacaccaagtgagtctttgggagaagatgattgtaggttcttaagttgtaatttatatgcgaagtcttcctttggtgaagatgccttggccaacttgtgtatcgaaaaggattccaaaaccaatgatgtcataggttatgttcgtatcagatccaagggacaaggtttggctttgtccttgggtgacagagtggcattgattgctaagaagaccaataaacttgctctcactcatgtttga

SEQ ID NO: 2257 - DNA, 2364 bp, Saccharomyces cerevisiae
atgtttgatggctttagcaacaataaaggtaaacgaaggtctttttttcggtttggttctgaaagtaaaaacaatgactctgaaaaatccgttagaaagccatcggtgccctctacaataaagaaatcaacaaatatcgcacgaacttcgacggctgaaacttctgcccctgatataccgccaagaagtccaaataggaatgctcatagcaggagccattctatccaggcaccattacaaaaggaaacattaaagaatactaatccatttttgaatgctgaggataccttaggagattctcttgaattaacacagtccaaggaagcgtcaggaaacgatcacaaaggaattgaatatttacaagaaaacaacatcattgggcagagaaccaaccccttcacaacaagcgcaaattcaaatgcacatttctccaagataaaacgttcgaggcctccaccaccgcctatggacatgaagtcaataacaacgtcaataagcaacaatactactaaggaagaaatagagagtaataatgattctgagcgggatagtattgcaatctcatccacccacaatcaacataggcggcagcgttcagaagcagaaaagttggtagatgatattgaaaattacattaatgaacacaaggtaagttccggtagctcactatccctagacacgtctgaaaactcagatactaaagcatcgcaagataagttgccagtagatgtcatggaagctcccattttgagaaatgtcagcgcggagagttccttaagctacgtaaaaccacttattgtggataatgaagaagtaaataaagcaagtaacggaaatttagtacaatcagatcatctaaaagaattttcttcgaatctggatgatggggatgataaattttcctttagtacatcggctagtggtaaatccaccaaaagccttcagcaagtttctaaagacgaatctagtggttttaaagctgcacattttgattttgcatataaatcaaatgagcaccttgggagtgatggaagtattgcaagcgccagaaagcctctgcggataactaatgagattgatagcggttcttccaacgaggatgatgatgatggtcttcaggaaaaaggttttgtggatagtgaaagtaaagcatttataaattacgcaagtgatcaaggctcatctataaaaaatgacgtctcaacacaagagcctgagttaccaagtcatcgtagaatatttagggtggttaatgaagatcgccctagtttctatttaaatagtgtaaacgatacgggcagtctaaccgacaagcattcttttgacactgcatcatctggtgagtatgatgccaagtcaaacttctctagccagtcaggactttctatatcaaaaggctctaaatcaactgttttggctgctcttgactcaaacggaaacacaaaatcatcaaataaaacatccgagttaaacagtttaaactccatttcagaaagtttagtgccggctgctcactcgttcaatgaacacacagttactatccctgcaacggtggatttaccaaatccggtacatgatgccccaagcgaaagatctgtcaaatgttcaccgttaacatctgtcgtatcgaacaaatcggaaaagtccgtgcctttggtttctagttacgtagaagaactgcgactaaagtattacaagacttctaactttttacaagcgcctcctaacttgccggttgctctaaaacaaaaaaataatttgattcaacccaagaatattaaggtcaagttgaggacaagttctaagcaaattggtatcaagcatggtaaagttaaacagaaattactggcgttggagacaagaaatgaagaatcagatggaaccgctacagggctgaaaaataaaatcaatgttgaccacacaaaggaattccataaattgttagggaaggaaaatgaaactggctctatttcaaaaaaagaaggcactgacgcagaacaagccgaagactacctcaaggacatacccggtgatgaagcatataacagtgatgatataatggcgcctttacgagaaaaaagagggcaaaacggttctgttgattccgtgtcaagatctaacacggtagtcagctactacacaaggtctcagaacagaatgagaagtggaacactggataatgattacgtgaacagacaaaagcttcctacacatatctctcttcaagattatcgtgatgctaatgctagaagtaatatatcgcgtcaggactctgtctccacaacgaactctgatgtggtagacctcagctattctctggggcatggcttgcgtgtggcaaaccctgattcagacccagaatga

SEQ ID NO: 2258 - DNA, 2364 bp, Artificial Sequence
  Description of Artificial Sequence: Synthetic polynucleotide
atgtttgatggctttagcaacaataaaggtaaaagaaggtctttttttagatttggttctgaaagtaaaaacaatgactctgaaaaatccgttagaaagccatctgtgccctctacaataaagaaatctacaaatatcgcaagaacttccacggctgaaacttctgcccctgatataccgccaagaagtccaaataggaatgctcatagcaggagccattctatccaggcaccattacaaaaggaaacattaaagaatactaatccatttttgaatgctgaggataccttaggagattctcttgaattaacacagtccaaggaagcgtctggaaacgatcacaaaggaattgaatatttacaagaaaacaacatcattgggcagagaaccaaccccttcacaacaagcgcaaatagtaatgcacatttctccaagataaaacgttctaggcctccaccaccgcctatggacatgaagagtataacaacgtctataagcaacaatactactaaggaagaaatagagagtaataatgattctgagagagatagtattgcaatctcttccacccacaatcaacataggaggcagcgttctgaagcagaaaagttggtagatgatattgaaaattacattaatgaacacaaggtaagttccggtagctctttatccttggacacgtctgaaaacagtgatactaaagcatctcaagataagttgccagtagatgtcatggaagctcccattttgagaaatgtcagcgcggagagttccttaagctacgtaaaaccacttattgtggataatgaagaagtaaataaagcaagtaacggaaatttagtacaatctgatcatttgaaagaattttcttccaatttggatgatggggatgataaattttcctttagtacatctgctagtggtaaatccaccaaaagccttcagcaagtttctaaagacgaatctagtggttttaaagctgcacattttgattttgcatataaatctaatgagcaccttgggagtgatggaagtattgcaagcgccagaaagcctttaagaataactaatgagattgatagcggttcttccaacgaggatgatgatgatggtcttcaggaaaaaggttttgtggatagtgaaagtaaagcatttataaattacgcaagtgatcaaggctcttctataaaaaatgacgtctctacacaagagcctgagttaccaagtcatcgtagaatatttagggtggttaatgaagatcgccctagtttctatttaaatagtgtaaacgatacgggcagtttaaccgacaagcattcttttgacactgcatcttctggtgagtatgatgccaagtctaacttctctagccagtccggactttctatatccaaaggctctaaatctactgttttggctgctcttgactccaacggaaacacaaaatcttccaataaaacatccgagttaaacagtttaaactccatttctgaaagtttagtgccggctgctcactctttcaatgaacacacagttactatccctgcaacggtggatttaccaaatccggtacatgatgccccaagcgaaagatctgtcaaatgttctccgttaacatctgtcgtatccaacaaaagtgaaaagtccgtgcctttggtttctagttacgtagaagaattaaggttaaagtattacaagacttctaactttttacaagcgcctcctaacttgccggttgctttgaaacaaaaaaataatttgattcaacccaagaatattaaggtcaagttgaggacaagttctaagcaaattggtatcaagcatggtaaagttaaacagaaattattggcgttggagacaagaaatgaagaaagtgatggaaccgctacagggttgaaaaataaaatcaatgttgaccacacaaaggaattccataaattgttagggaaggaaaatgaaactggctctatttccaaaaaagaaggcactgacgcagaacaagccgaagactacctcaaggacatacccggtgatgaagcatataacagtgatgatataatggcgcctttaagagaaaaaagagggcaaaacggttctgttgattccgtgtccagatctaacacggtagtcagctactacacaaggtctcagaacagaatgagaagtggaacattagataatgattacgtgaacagacaaaagcttcctacacatatctctcttcaagattatcgtgatgctaatgctagaagtaatatatctcgtcaggactctgtctccacaacgaactctgatgtggtagacctcagctattctttagggcatggcttgcgtgtggcaaaccctgattctgacccagaatga

SEQ ID NO: 2259 - DNA, 1479 bp, Saccharomyces cerevisiae
atgcgcccaagaaggagaggattagcgtatcatcataccaagccgaagggacaactttcacaaggacattatcctacgacatccaatgatggccaaagaaggaaggtcggtaattctgaagcattccaatcttttgatatatggaaaaacctagataggataaggtcgactaagaagaatgcagggcaattcataaaaggtagtctgctcatactccccatgagaacggaagataaacaacagttcgacgagtgcatggatgaattgcataagtatatatcgaaggatatattacgatgttatccacagaaagagcagaaagatgaaggcatgcttttctacatagttttgaaggacttcaatatattggactcttgcttcgtattatcagttctgcttgctttccagaagcgattatggatggcaccatccgaaaaatcatactttagagttcctaagaatattaacttgacaggttcgttttatttgcccaagaatatagaaactggtagaggccatataataacaagctatagaagagagcagccctcatccagtattgtagaagttggtttcaatgttgttccagattttcaacagtttcaagttaaggcttgtcatgtaagtaagttcatgaatgagctttctaattttttttcacaagtagaatttggcaagtgtgaagctaacgtgataaactactttaagcgtgaatataaccgcacttattcacagatatcacttgccctctacgaacttccattaattggcgatggcttgtttgatataaagtcgtacattagtaaaaccaggccaattatagaaacatcaaaagctcaaatgattaaacatatttctgaaatgaaggcatataacgaaataagtggccttcaaggagatcaatttccacgacaacaaagacctttatcgaattcgccctcttcaaattcaatttcctcttctcaaactattgaagcaggtgcaacttcatatcaaacacaaccacagagacacgctgttaataagccatcaaatgtattgaattcttccaatcgtcattccgggccaaaaacttttgaggacggaaggtatagtgaaggtaataaaccgggttttatgacgcaggatgaaatcaaacaacattgcattggtaccataaaagcttctatggatgcagtgaaaaagaagtcttcgtatcagattctaaagacatacgttaggtgtccaagacaaaattatattgatattgtttatcaaaatctaaatgatctacgatcaaagacaaattgtaatatcgtcgtattgaatctgaataatcttcacgagtcacaaatgtggcttgaatctttaaatacaacaaattacactatttttgctcaggcgcctcacccaagtaccatccgcgttattagtattggtggagtcggtgaatatatagtcaaagcattagagctgatattgaatatattagaacattga

SEQ ID NO: 2260 - DNA, 1479 bp, Artificial Sequence
  Description of Artificial Sequence: Synthetic polynucleotide
atgcgcccaagaaggagaggattagcgtatcatcataccaagccgaagggacaactttctcaaggacattatcctacgacatccaatgatggccaaagaaggaaggtcggtaattctgaagcattccaatcttttgatatatggaaaaaccttgataggataaggtctactaagaagaatgcagggcaattcataaaaggtagtttactcatactccccatgagaacggaagataaacaacagttcgacgagtgcatggatgaattgcataagtatatatccaaggatatattaagatgttatccacagaaagagcagaaagatgaaggcatgcttttctacatagttttgaaggacttcaatatattggactcttgcttcgtattaagtgttttacttgctttccagaagagattatggatggcaccatccgaaaaatcttactttagagttcctaagaatattaacttgacaggttctttttatttgcccaagaatatagaaactggtagaggccatataataacaagctatagaagagagcagccctcttccagtattgtagaagttggtttcaatgttgttccagattttcaacagtttcaagttaaggcttgtcatgtaagtaagttcatgaatgagctttctaattttttttctcaagtagaatttggcaagtgtgaagctaacgtgataaactactttaagcgtgaatataaccgcacttattctcagatatctcttgccctctacgaacttccattaattggcgatggcttgtttgatataaagtcctacattagtaaaaccaggccaattatagaaacaagtaaagctcaaatgattaaacatatttctgaaatgaaggcatataacgaaataagtggccttcaaggagatcaatttccaagacaacaaagacctttatccaattctccctcttccaattctatttcctcttctcaaactattgaagcaggtgcaacttcttatcaaacacaaccacagagacacgctgttaataagccatccaatgtattgaattcttccaatcgtcattccgggccaaaaacttttgaggacggaaggtatagtgaaggtaataaaccgggttttatgacgcaggatgaaatcaaacaacattgcattggtaccataaaagcttctatggatgcagtgaaaaagaagtcttcttatcagattttgaagacatacgttaggtgtccaagacaaaattatattgatattgtttatcaaaatttgaatgatttaagatccaagacaaattgtaatatcgtcgtattgaatttgaataatcttcacgagtctcaaatgtggcttgaatctttaaatacaacaaattacactatttttgctcaggcgcctcacccaagtaccatccgcgttattagtattggtggagtcggtgaatatatagtcaaagcattagagttgatattgaatatattagaacattga

SEQ ID NO: 2261 - DNA, 1650 bp, Saccharomyces cerevisiae
atgactgtgcactcaacgtggaaggaaaaagttcaattaaaaaaagatcaactgaacagtaagataaaagacgaatggaaattaaacagcacaactataacgaggttgaagaacgataaaaaaaatttaatcaagaatatcgatgatttatgctcatcttcagaaaatcagatcacccactccacgattatggccttgagacaggcactggaagcaaaagagttaagctgccatgaaataacagctgcattttgtcatagggctgctttaattcatcaagtagtgaattgtctatccgaaatcatgttttcagaggcattgagattggctgactattacgacagcaatagaccagccatattgccacccttgtacggtataccgatatctctcaaagaccaatgtaacgttgagggtgtagacacctcactgggttatttatgtcgaactttcaaaccaaaaaccaagaatgaagaatcattgattgtcagttttctgagagatttaggagctattatatttgtaaaaaccaccgtaccttcatcgatgatggctacagatacacaatctaacacctttgggtacacatataatagtattaatttaagcttctccagtggtggatcttctggtggagagggttcgttaattggtgctcatggttccttgctgggactaggaactgatataggcggaagcatcagaattcctagtagttaccaaggattatttggtttgaaaccaacttttggacgcgtcccttacttgagggtggataattcatttgagggaagggaaacaattcccagtgtaattgggccgttggcaagagatctttcggatttgagatacttcatgagttgcgttatcaacatctgtcaaccatgggtacaagacgtcaagtgtattccataccattttgattcctctacaagtaaattacacgataattatgttgttggaatatggtatggtgacggcgttattgatcctccgcccagtgacatcagggctttaaagacgtgcgaagacctagttaataaaactaaaggaatgaaggcagttaaatgggagccttccagtgaactgagcagggaattgtttgatctcgcaaatgaagcagatgttgctgactcaggtaacgagataaaaaacgaattcgaaatttccggagaaccactcctagatattttaaaaccaatggttttggaaaacggaaggcccccatatactgttaatgaatggtgggatttgaccaaaagagtttataatgcacaacaattaatgagagattattacctttctttcccggaatcagaaaggcctgatgttatcatatctcctacaacgctgatgccatttaggcctggtgacatgctaaagacaactttacgatacattttactattcaacgttttaaatttcccatcattatctatacctgtaggtagtgtcgattgccaaattgatgggctaatggataccacttctgcgctcaatccagaagataaaatgatcaaaacatattggaatgatttaatacaatctggtgagatagatgggtttccaataggcctacaagtagttagcccgactttcaatgacaatgaagtttgtaaatttgcgtcttggctttttagcaaaatatag

SEQ ID NO: 2262 - DNA, 1650 bp, Artificial Sequence
  Description of Artificial Sequence: Synthetic polynucleotide
atgactgtgcactccacgtggaaggaaaaagttcaattaaaaaaagatcaattgaacagtaagataaaagacgaatggaaattaaacagcacaactataacgaggttgaagaacgataaaaaaaatttaatcaagaatatcgatgatttatgctcttcttctgaaaatcagatcacccactccacgattatggccttgagacaggcattggaagcaaaagagttaagctgccatgaaataacagctgcattttgtcatagggctgctttaattcatcaagtagtgaattgtttatccgaaatcatgttttctgaggcattgagattggctgactattacgacagcaatagaccagccatattgccacccttgtacggtataccgatatctctcaaagaccaatgtaacgttgagggtgtagacacctccttgggttatttatgtagaactttcaaaccaaaaaccaagaatgaagaatctttgattgtcagttttttaagagatttaggagctattatatttgtaaaaaccaccgtaccttcttctatgatggctacagatacacaatctaacacctttgggtacacatataatagtattaatttaagcttctccagtggtggatcttctggtggagagggttctttaattggtgctcatggttccttgttgggacttggaactgatataggcggaagcatcagaattcctagtagttaccaaggattatttggtttgaaaccaacttttggacgcgtcccttacttgagggtggataattcttttgagggaagggaaacaattcccagtgtaattgggccgttggcaagagatctttctgatttgagatacttcatgagttgcgttatcaacatctgtcaaccatgggtacaagacgtcaagtgtattccataccattttgattcctctacaagtaaattacacgataattatgttgttggaatatggtatggtgacggcgttattgatcctccgcccagtgacatcagggctttaaagacgtgcgaagacttggttaataaaactaaaggaatgaaggcagttaaatgggagccttccagtgaattgagcagggaattgtttgatctcgcaaatgaagcagatgttgctgactctggtaacgagataaaaaacgaattcgaaatttccggagaaccactcttggatattttaaaaccaatggttttggaaaacggaaggcccccatatactgttaatgaatggtgggatttgaccaaaagagtttataatgcacaacaattaatgagagattattacctttctttcccggaaagtgaaaggcctgatgttatcatatctcctacaacgttgatgccatttaggcctggtgacatgttgaagacaactttaagatacattttattattcaacgttttaaatttcccatctttatctatacctgtaggtagtgtcgattgccaaattgatgggttgatggataccacttctgcgctcaatccagaagataaaatgatcaaaacatattggaatgatttaatacaatctggtgagatagatgggtttccaataggcttacaagtagttagcccgactttcaatgacaatgaagtttgtaaatttgcgtcttggctttttagcaaaatatga

SEQ ID NO: 2263 - DNA, 1767 bp, Saccharomyces cerevisiae
atggcaagaccaatcgatgttagtcagctgattgctggtataaacaagaaaaaaggactagatgaaaatacatcaggtaaaatcagcaagcctaggtttttgaataaacaagaaagatctaagcaagaacgtttgaaggagaacgaagagagtttgacgcctacgcaaagtgatagcgctaaggtggagattaaaaaggtaaactctagagatgacagttttttcaatgaaacaaatgataagaagagaaatccatcaaagcaaaatggctctaaatttcacttttcttggaatgaaagcgaagatactctgagcggatatgatcctatcgtttcaactagagctatagatttgctatggaagggaaagactcctaaaaatgctgcagaatcttcatatatggggaagcattggactgagaagtccttgcacgaaatgaatgagagagattggaggatactaaaagaagactacgctattgttacaaaaggtgggacagtagaaaatccattgagaaattgggaagagctcaatataataccaagggacttgttacgtgttattatacaggagctgcgatttccttcaccaactcctattcaaaggattactattccaaacgtttgcaatatgaaacaatatagagattttcttggtgttgcctctacaggttcgggtaagactttggcctttgtaataccgatactaatcaagatgagtaggtcacctccaaggccaccatctttgaagattattgatggccccaaagcgttaattttagctccaacaagggaattagtgcagcaaattcaaaaagaaacacaaaaagttacaaaaatatggtccaaagagagcaactatgactgcaaagtaatttctattgttggtggacactccttggaggaaatttcattttctctatcggagggttgtgacatcctggtggccactccaggacgtttaattgactctttagaaaatcacttacttgtgatgaaacaggtggagacattagtactagatgaagctgacaaaatgattgatttaggttttgaggaccaagtaacaaacattttaactaaagtcgatataaatgctgactctgctgtgaatagacaaaccctgatgtttaccgctacaatgacacccgttatagaaaaaattgcagcaggatacatgcaaaagcctgtttatgcaaccattggggttgagacgggttctgaacctttgattcaacaggttgtggaatatgcagataatgacgaagacaaattcaaaaagttgaagccaattgtcgctaaatatgatccaccaataataatttttatcaattacaaacaaactgctgattggttagcagaaaagtttcaaaaggaaaccaacatgaaggtgacgattttacatggttctaaatcgcaagagcaaagggaacattctttgcaattatttcgcaccaacaaagtccaaatcatgatcgcaacaaacgttgccgcaagaggattggatatccctaatgtttccttggtagtcaatttccagatttccaaaaaaatggatgactacatccatagaattggtagaacaggtcgtgcagcaaatgagggcactgctgtctcctttgttagtgccgctgaagatgaatcattgatacgtgaactttacaaatacgtcaggaaacatgatcccttgaatagcaatatcttttccgaagccgtaaagaacaaatataacgtcggcaaacagctcagtaatgagattatatattaa

SEQ ID NO: 2264 - DNA, 1767 bp, Artificial Sequence
  Description of Artificial Sequence: Synthetic polynucleotide
atggcaagaccaatcgatgttagtcagttgattgctggtataaacaagaaaaaaggattagatgaaaatacatctggtaaaatcagcaagcctaggtttttgaataaacaagaaagatctaagcaagaacgtttgaaggagaacgaagagagtttgacgcctacgcaaagtgatagcgctaaggtggagattaaaaaggtaaactctagagatgacagttttttcaatgaaacaaatgataagaagagaaatccatctaagcaaaatggctctaaatttcacttttcttggaatgaaagcgaagatactttaagcggatatgatcctatcgtttccactagagctatagatttgttatggaagggaaagactcctaaaaatgctgcagaatcttcttatatggggaagcattggactgagaagtccttgcacgaaatgaatgagagagattggaggatattgaaagaagactacgctattgttacaaaaggtgggacagtagaaaatccattgagaaattgggaagagctcaatataataccaagggacttgttacgtgttattatacaggagttaagatttccttctccaactcctattcaaaggattactattccaaacgtttgcaatatgaaacaatatagagattttcttggtgttgcctctacaggttctggtaagactttggcctttgtaataccgatattgatcaagatgagtaggtctcctccaaggccaccatctttgaagattattgatggccccaaagcgttaattttagctccaacaagggaattagtgcagcaaattcaaaaagaaacacaaaaagttacaaaaatatggtccaaagagagcaactatgactgcaaagtaatttctattgttggtggacactccttggaggaaatttccttttctttatctgagggttgtgacatcttagtggccactccaggacgtttaattgactctttagaaaatcacttacttgtgatgaaacaggtggagacattagtattggatgaagctgacaaaatgattgatttaggttttgaggaccaagtaacaaacattttaactaaagtcgatataaatgctgactctgctgtgaatagacaaaccttgatgtttaccgctacaatgacacccgttatagaaaaaattgcagcaggatacatgcaaaagcctgtttatgcaaccattggggttgagacgggttctgaacctttgattcaacaggttgtggaatatgcagataatgacgaagacaaattcaaaaagttgaagccaattgtcgctaaatatgatccaccaataataatttttatcaattacaaacaaactgctgattggttagcagaaaagtttcaaaaggaaaccaacatgaaggtgacgattttacatggttctaaatctcaagagcaaagggaacattctttgcaattatttcgcaccaacaaagtccaaatcatgatcgcaacaaacgttgccgcaagaggattggatatccctaatgtttccttggtagtcaatttccagatttccaaaaaaatggatgactacatccatagaattggtagaacaggtcgtgcagcaaatgagggcactgctgtctcctttgttagtgccgctgaagatgaatctttgatacgtgaactttacaaatacgtcaggaaacatgatcccttgaatagcaatatcttttccgaagccgtaaagaacaaatataacgtcggcaaacagctcagtaatgagattatatattga

SEQ ID NO: 2265 - DNA, 1839 bp, Saccharomyces cerevisiae
atggacgtaggaagttgctcagtgggaaataatccgcttgcgcagttgcacaaacatactcagcagaacaaatcgcttcagtttaatcagaagaataatgggcgtcttaatgagtcacctctacagggtaccaacaagccaggtattagtgaggcttttatatccaatgttaatgctatttcacaagaaaacatggcgaatatgcaaaggttcataaacggagaaccactgatcgatgataaaagaagaatggaaatagggccatcctcaggcaggcttccacctttttcaaacgtacattctctacagacttcagcaaacccaacccaaattaagggagtgaacgatatatctcattggtcacaggaatttcaaggtagtaatagtattcaaaatagaaacgcggatacaggaaattcagaaaaggcatggcagcgtggctcaacaaccgcatcaagccggtttcagtaccctaataccatgatgaataactatgcttatgcttctatgaacagtcttagtggatcaaggctccaatcgcctgctttcatgaatcaacaacagtctggtcgttctaaagaaggagtcaatgagcaagaacaacaaccctggacagatcagtttgaaaagctggaaaaagaagtctcagaaaacttggacataaatgatgaaatagagaaggaggaaaatgtgagtgaagtagaacaaaacaaaccagaaactgttgagaaggaagaaggagtatatggagatcagtatcaatctgatttccaagaagtgtgggatagcatacacaaggacgctgaagaagtcttgccatccgaattagttaatgatgacctcaatctaggagaagactacttgaaatatctcggcggtagagtaaatgggaacatcgagtatgcttttcaatctaacaacgaatattttaataatcctaatgcttataaaattggctgcctactgatggaaaacggagccaaattgagcgaggcagcgctagcatttgaagctgctgttaaagaaaaaccggaccatgtggatgcatggctaagattgggtctagtacaaacccagaatgaaaaagagttgaacggcataagcgccctcgaagaatgtttaaagttagacccaaagaatctggaggcaatgaaaactttagcgataagttatataaacgaaggttatgatatgagcgccttcacaatgctggataaatgggcagaaactaagtacccggaaatttggtcaaggatcaagcaacaagatgacaaatttcaaaaagagaaagggtttacccatattgatatgaacgctcatatcacaaagcaatttttgcaactagcaaacaatttaagcacaatagatcctgaaatacaactatgcttgggtctcttattttacacgaaagatgattttgacaaaaccatagattgctttgaaagtgcgttgagggtgaatcctaatgacgaactcatgtggaatagattaggggcttcattggccaattccaatagatcagaggaagcaatccaagcctatcatagggcactacaactaaaaccttcttttgttagagctcgctataatctggcggtatcatccatgaatataggctgtttcaaagaagcagcaggctacttattaagtgttctaagtatgcatgaagtgaacactaataataaaaaaggagacgttggatctctcttgaatacgtacaatgatactgttatagagactttgaagagagtttttatagcgatgaatagagatgatttacttcaagaagtgaagccaggcatggacctgaaaagatttaaaggagaattttcgttttga

SEQ ID NO: 2266 - DNA, 1839 bp, Artificial Sequence
  Description of Artificial Sequence: Synthetic polynucleotide
atggacgtaggaagttgctctgtgggaaataatccgcttgcgcagttgcacaaacatactcagcagaacaaatctcttcagtttaatcagaagaataatgggcgtcttaatgagtctcctttgcagggtaccaacaagccaggtattagtgaggcttttatatccaatgttaatgctatttctcaagaaaacatggcgaatatgcaaaggttcataaacggagaaccattgatcgatgataaaagaagaatggaaatagggccatccagtggcaggcttccacctttttccaacgtacattctttgcagacttctgcaaacccaacccaaattaagggagtgaacgatatatctcattggtctcaggaatttcaaggtagtaatagtattcaaaatagaaacgcggatacaggaaattctgaaaaggcatggcagcgtggctctacaaccgcaagtagcagatttcagtaccctaataccatgatgaataactatgcttatgcttctatgaacagtcttagtggatctaggctccaaagtcctgctttcatgaatcaacaacagtctggtcgttctaaagaaggagtcaatgagcaagaacaacaaccctggacagatcagtttgaaaagttggaaaaagaagtcagtgaaaacttggacataaatgatgaaatagagaaggaggaaaatgtgagtgaagtagaacaaaacaaaccagaaactgttgagaaggaagaaggagtatatggagatcagtatcaatctgatttccaagaagtgtgggatagcatacacaaggacgctgaagaagtcttgccatccgaattagttaatgatgacctcaatttaggagaagactacttgaaatatctcggcggtagagtaaatgggaacatcgagtatgcttttcaatctaacaacgaatattttaataatcctaatgcttataaaattggctgcttattgatggaaaacggagccaaattgagcgaggcagcgttggcatttgaagctgctgttaaagaaaaaccggaccatgtggatgcatggttgagattgggtttagtacaaacccagaatgaaaaagagttgaacggcataagcgccctcgaagaatgtttaaagttagacccaaagaatttggaggcaatgaaaactttagcgataagttatataaacgaaggttatgatatgagcgccttcacaatgcttgataaatgggcagaaactaagtacccggaaatttggagcaggatcaagcaacaagatgacaaatttcaaaaagagaaagggtttacccatattgatatgaacgctcatatcacaaagcaatttttgcaattggcaaacaatttaagcacaatagatcctgaaatacaattatgcttgggtctcttattttacacgaaagatgattttgacaaaaccatagattgctttgaaagtgcgttgagggtgaatcctaatgacgaactcatgtggaatagattaggggcttctttggccaattccaatagaagtgaggaagcaatccaagcctatcatagggcattacaattgaaaccttcttttgttagagctcgctataatttggcggtatcttccatgaatataggctgtttcaaagaagcagcaggctacttattaagtgttttgagtatgcatgaagtgaacactaataataaaaaaggagacgttggatctctcttgaatacgtacaatgatactgttatagagactttgaagagagtttttatagcgatgaatagagatgatttacttcaagaagtgaagccaggcatggacttgaaaagatttaaaggagaattttctttttga

SEQ ID NO: 2267 - DNA, 1182 bp, Saccharomyces cerevisiae
atgtctagtgtaccttataattcccaacttcctatatccaaccatctagagtacgatgaagatgaaaagaagagcagaggctcaaaactaggcctgaaatataaaatgatatactggaggaaaactttatgcagttcgctagcgagatggagaaagctaatactattaatatctttagctttgtttttattcatatggataagcgattccaccataagcagaaatccatctaccacaagttttcaaggccaaaatagtaacgataataagttgagtaatactggttctagcatcaactccaaaagatatgtaccaccatattctaagagatcaagatggtcgttttggaatcaagatcctaggattgtcattatattagcggcaaacgaaggtggtggtgtattgaggtggaaaaatgagcaagaatgggctatcgaaggcatatcaatagaaaataagaaggcctatgcgaagagacatggatatgcgttgactatcaaggatttgacaacgtccaaaagatactctcacgaatacagagagggttggcaaaaagtagatatattgagacagacgttcagggagtttcctaatgcagaatggttctggtggttggacctggatactatgataatggagccttctaaatcattagaagaacatattttcgacagattggaaactctggctgacagagaattgaaaagttttaatcccctaaacctaagagacgacataccctatgtcgattattcagaggaaatggagtttctaataacacaagattgtggaggcttcaatttgggctcatttctgataaaaaatagcgaatggtctaagctgcttctagatatgtggtgggaccccgttctgtatgaacaaaaacatatggtttgggaacatagagaacaagatgcgttagaggcattatatgaaaacgaaccgtggattcgttcgagaataggatttttgcccttaagaacgatcaatgcattcccaccgggagcatgctctgaatacagtggtgactcaagatacttttacagtgagaaagaccatgattttgttgtgaatatggccggatgcaattttggcagagattgctggggcgagatgcagtactacaccactttaatggaaaaactgaataggaaatggtacacgagatttttcttcccataa

SEQ ID NO: 2268 - DNA, 1182 bp, Artificial Sequence
  Description of Artificial Sequence: Synthetic polynucleotide
atgtctagtgtaccttataattcccaacttcctatatccaaccatttagagtacgatgaagatgaaaagaagagcagaggctctaaattgggcttgaaatataaaatgatatactggaggaaaactttatgcagttctttagcgagatggagaaagttaatattattaatatctttagctttgtttttattcatatggataagcgattccaccataagcagaaatccatctaccacaagttttcaaggccaaaatagtaacgataataagttgagtaatactggttctagcatcaactccaaaagatatgtaccaccatattctaagagatctagatggtctttttggaatcaagatcctaggattgtcattatattagcggcaaacgaaggtggtggtgtattgaggtggaaaaatgagcaagaatgggctatcgaaggcatatccatagaaaataagaaggcctatgcgaagagacatggatatgcgttgactatcaaggatttgacaacgtccaaaagatactctcacgaatacagagagggttggcaaaaagtagatatattgagacagacgttcagggagtttcctaatgcagaatggttctggtggttggacttggatactatgataatggagccttctaaatctttagaagaacatattttcgacagattggaaactttggctgacagagaattgaaaagttttaatcccttaaacttgagagacgacataccctatgtcgattattctgaggaaatggagtttttaataacacaagattgtggaggcttcaatttgggctcttttttaataaaaaatagcgaatggtctaagcttcttttagatatgtggtgggaccccgttttatatgaacaaaaacatatggtttgggaacatagagaacaagatgcgttagaggcattatatgaaaacgaaccgtggattcgttccagaataggatttttgcccttaagaacgatcaatgcattcccaccgggagcatgctctgaatacagtggtgacagtagatacttttacagtgagaaagaccatgattttgttgtgaatatggccggatgcaattttggcagagattgctggggcgagatgcagtactacaccactttaatggaaaaattgaataggaaatggtacacgagatttttcttcccatga

SEQ ID NO: 2269 - DNA, 660 bp, Saccharomyces cerevisiae
atggccatcgaaacaatacttgtaataaacaaatcaggcggactaatctatcagcggaattttaccaacgacgaacagaaattgaacagcaatgaatacttaattcttgctagtacactgcacggtgtattcgccatcgcgagccagctgactccgaaggcattacagctaactcaacaaacgaacatcgaaaataccatcccatatataccttacgtgggcatgtccagcaataggagcgatacaagaaatggaggtggcaataacaacaaacacactaataatgaaaaactgggcagttttaaaggagatgattttttcaaagaaccatttacgaactggaacaagagcggattgagacaactatgcacggatcagttcacgatgttcatatatcagaccctaaccggcctgaagtttgtcgctatcagctccagcgtcatgccccagagacagccaactatagccaccaccgacaagcctgaccgacccaagagtacatccaatttggccatccaaatagccgacaacttcctaaggaaggtttactgtttgtatagtgactacgtcatgaaagacccatcttactcaatggaaatgcctataagatctaacctgttcgacgaaaaagtcaaaaaaatggtagaaaacctacaatag

SEQ ID NO: 2270 - DNA, 660 bp, Artificial Sequence
  Description of Artificial Sequence: Synthetic polynucleotide
atggccatcgaaacaatacttgtaataaacaaatctggcggattgatctatcagagaaattttaccaacgacgaacagaaattgaacagcaatgaatacttaattcttgctagtacattacacggtgtattcgccatcgcgagccagttgactccgaaggcattacagttgactcaacaaacgaacatcgaaaataccatcccatatataccttacgtgggcatgtccagcaataggagcgatacaagaaatggaggtggcaataacaacaaacacactaataatgaaaaattgggcagttttaaaggagatgattttttcaaagaaccatttacgaactggaacaagagcggattgagacaattatgcacggatcagttcacgatgttcatatatcagaccttaaccggcttgaagtttgtcgctatcagctccagcgtcatgccccagagacagccaactatagccaccaccgacaagcctgacagacccaagagtacatccaatttggccatccaaatagccgacaacttcttgaggaaggtttactgtttgtatagtgactacgtcatgaaagacccatcttactccatggaaatgcctataagatctaacttgttcgacgaaaaagtcaaaaaaatggtagaaaacttacaatga

SEQ ID NO: 2271 - DNA, 201 bp, Saccharomyces cerevisiae
atgcgccgcctatatcgtcatcttgcttcctttttcttactcccttcctgccctggaaacaccatacaatccatcacatcatatcctgccaatgcactattacgcagctttcggcacgtgagtacggaaacaccagttcggaaccgggtacacaatagggatagtcaaagctgtccattttttccgctgatggatgactga

SEQ ID NO: 2272 - DNA, 201 bp, Artificial Sequence
  Description of Artificial Sequence: Synthetic polynucleotide
atgcgccgcttgtatcgtcatcttgcttcctttttcttactcccttcctgccctggaaacaccatacaatccatcacatcttatcctgccaatgcattattacgcagctttagacacgtgagtacggaaacaccagttagaaacagagtacacaatagggatagtcaaagctgtccattttttccgttaatggatgactga

SEQ ID NO: 2273 - DNA, 1386 bp, Saccharomyces cerevisiae
atgatgatgttccataattgcagaattaataactacttaataacttctcaaattggcgaaggcgcgtacggtctggtttaccgtgccttagatattcgtaccgatagacaatacgctatcaaagcggttgttcaaagttacggtgttagcaaggaggctgatatgggcaatgataaaatacacaaaaatagcgtgaaattgcaaaagaagctcgctaaactgttcaaggaatcgaaaaacgttgtcagggtgccctctatagatctagaatcaattgagaatatgtcagaagaagattttaaaaagctgccccattataaagagatttcgctacacctaagagtccaccatcataagaacattgtcaccatacatgaggtgctacaatctgcagtctgcacgttcattgtcatggattattacccaacagacctattcacgtctattgtagataacagacattttgtcactaatggactgctagtaaaaaaggtttttctacagatctgttctgctcttaattattgccatgagcacggcatctaccactgtgacatcaagcctgaaaacttgctactggatacagaagataacgttttcctatgcgattttggtctatccactacttccacatatataaagccaaatgtttgcattggtagctcgtattatatgccccctgaaagaatctcatttgatgggagagtttccagctctaaaagtgggggacataagttgggtaaggtttgtccctcatgtaatggcgatttgtggtcattaggtatcatccttatcaatttgacatgcatcagaaatccctggctgaaggctgacaaaaccgaggataatacctactattatttcactaaggatcccaatatactaaagcaaatcctaccgctttccgatgacttttactcattattatctaagattttacaagtgaatccgaagaatagaatgagcttgcaagagttgatgaaagaagttagttctattacaagcttcaccaatgaaggcccgttatcaaaagtgccgcctctttccaagtctgtttatgaaaagttcgttagccccgtcgataacacgaatgagaatttgtctccaaaatcctacgtgtacatgcacgatagtaaagctgccaagaatttatcttatacatcttcaagtgaggaagaagatggaatcaaagaagggatagacgatgataatggcagtcgcagtggcagtttcggaacgctagacacagacactggattgcattcttcgttcacaagcacttcttgcgagtccgataacgaatgttctaagatttccaacaaattttccttgttcgaaaaaaaattcaacgaacttcgcatgagttcctcttctttaactaactaa

SEQ ID NO: 2274 - DNA, 1386 bp, Artificial Sequence
  Description of Artificial Sequence: Synthetic polynucleotide
atgatgatgttccataattgcagaattaataactacttaataacttctcaaattggcgaaggcgcgtacggtttagtttaccgtgccttagatattcgtaccgatagacaatacgctatcaaagcggttgttcaaagttacggtgttagcaaggaggctgatatgggcaatgataaaatacacaaaaatagcgtgaaattgcaaaagaagctcgctaaattattcaaggaaagtaaaaacgttgtcagggtgccctctatagatttggaaagtattgagaatatgtctgaagaagattttaaaaagttgccccattataaagagatttctttacacttgagagtccaccatcataagaacattgtcaccatacatgaggtgttgcaatctgcagtctgcacgttcattgtcatggattattacccaacagaccttttcacgtctattgtagataacagacattttgtcactaatggattattggtaaaaaaggtttttttgcagatctgttctgctcttaattattgccatgagcacggcatctaccactgtgacatcaagcctgaaaacttgttgttggatacagaagataacgttttcttgtgcgattttggtttatccactacttccacatatataaagccaaatgtttgcattggtagctcttattatatgccccctgaaagaatctcttttgatgggagagtttccagctctaaaagtgggggacataagttgggtaaggtttgtcccagttgtaatggcgatttgtggtctttaggtatcatccttatcaatttgacatgcatcagaaatccctggttaaaggctgacaaaaccgaggataatacctactattatttcactaaggatcccaatatattgaagcaaatcttaccgctttccgatgacttttactctttattatctaagattttacaagtgaatccgaagaatagaatgagcttgcaagagttgatgaaagaagttagttctattacaagcttcaccaatgaaggcccgttatccaaagtgccgcctctttccaagtctgtttatgaaaagttcgttagccccgtcgataacacgaatgagaatttgtctccaaaatcctacgtgtacatgcacgatagtaaagctgccaagaatttatcttatacatcttccagtgaggaagaagatggaatcaaagaagggatagacgatgataatggcagtcgcagtggcagtttcggaacgcttgacacagacactggattgcattcttctttcacaagcacttcttgcgagtccgataacgaatgttctaagatttccaacaaattttccttgttcgaaaaaaaattcaacgaacttcgcatgagttcctcttctttaactaactga

SEQ ID NO: 2275 - DNA, 582 bp, Saccharomyces cerevisiae
atgacagagaaacacaaaactatggggaaatttaaggttattgtattggcaggtactgcaggtacaggaaaatcaaccattgcaggtgaactaatccatgaatttaaagatatatacccggatttgaaattcatcgaaggtgatgatttacacccgcctgccaacgtagaaaagatgacaagagggattccattaaatgacgacgaccgttgggactggttgaaaaaagttgccgtagaatctacaaaagctgcagcaagcactaaggagcatttgtcaattgttgcttgctcgagcttgaagaagaaatacagagatttgattaggcacacatgccctgaatcggagttccattttatctttttgtatgcaagtaaaatagaagttctgaaaaggctcaaaacaaggaagggtcatttcatgaaagctgatatgatggagtctcaattcagggatctggagttaccagacatcaacgacgaaactgactgtgacattgttcccttagatttcaaaacgttttatcaaattgaaaaagatgttatacaggtggtaaaaagtaaagttttgaatattgagtaa

SEQ ID NO: 2276 - DNA, 582 bp, Artificial Sequence
  Description of Artificial Sequence: Synthetic polynucleotide
atgacagagaaacacaaaactatggggaaatttaaggttattgtattggcaggtactgcaggtacaggaaaatctaccattgcaggtgaattgatccatgaatttaaagatatatacccggatttgaaattcatcgaaggtgatgatttacacccgcctgccaacgtagaaaagatgacaagagggattccattaaatgacgacgaccgttgggactggttgaaaaaagttgccgtagaatctacaaaagctgcagcaagcactaaggagcatttgtctattgttgcttgcagtagcttgaagaagaaatacagagatttgattaggcacacatgccctgaaagtgagttccattttatctttttgtatgcaagtaaaatagaagttttgaaaaggctcaaaacaaggaagggtcatttcatgaaagctgatatgatggagtctcaattcagggatttagagttaccagacatcaacgacgaaactgactgtgacattgttcccttagatttcaaaacgttttatcaaattgaaaaagatgttatacaggtggtaaaaagtaaagttttgaatattgagtga

SEQ ID NO: 2277 - DNA, 1122 bp, Saccharomyces cerevisiae
atgggttatattttgacaggatattctagccgtcatgataagagaaagaaacatgcacttcctttgcatcggtatgcatcgtcttcgataaacttgcagcaccatgtgcatctcttagagacccgggtttcatccaagaggccaatatcggaagatcaaaggactatcaggcttcctgcgaagaaacttaggcatcatcaaaagctaactttgcaagatttacctgtagagattattcaacatattttcgttttcacaaagggtgaaccgtcgatggtcaccttgaacaggttcttctatagttgcttgaagccatctttttcattattatcgaagatcatgtgggaaaaatatcttttcgatcccctggagtttggcgtaagtaatataaaagcttattcaagaaatattgtgatccctacattatttgagcatgaaactttttttagactactactagatcatcatcctatcctgttgaaaaatatttctcattttcttcccagaaagcactatcaagatatgcagaatggcgattttgatacatctaaagagctagacttgtgttcaatgaacactgaagatacatcgaaagaagacttccctaaaaacttttacaacaatatgcatatttttttaacacgtagggaatgtgtgaagtctctaggtaatcattttactttgaagaatccatatgatgtgatatccccttttatagaatggttttttcaaggtattgatatgcaaggaactgacctaagccctaagtttacctttgtttctctatttgaatcaatagatttaatcctatacgtctctggatctacagtgcaaaaactagcgtctattgaaccccttacgactgtaatatttttattatatttcacgtatgctgattcactagggagtctgaactttgagttttttttgcagaatagatcaagattacagctcatagagaaatttatcctgaaatattattacaatccatcattgacagaaaacgaacttttatctgatagcactatatgggacctgttaaggcgggtgtctgatttaaaactcatagatttggtcgttaaatgcggcggaaggcctcaatacggggttatgtttgcataa

SEQ ID NO: 2278 - DNA, 1122 bp, Artificial Sequence
  Description of Artificial Sequence: Synthetic polynucleotide
atgggttatattttgacaggatattctagccgtcatgataagagaaagaaacatgcacttcctttgcatcgttatgcatcttcttctataaacttgcagcaccatgtgcatctcttagagaccagagtttcttccaagaggccaatatctgaagatcaaaggactatcaggcttcctgcgaagaaacttaggcatcatcaaaagttgactttgcaagatttacctgtagagattattcaacatattttcgttttcacaaagggtgaaccgtctatggtcaccttgaacaggttcttctatagttgcttgaagccatctttttctttattatccaagatcatgtgggaaaaatatcttttcgatcccttggagtttggcgtaagtaatataaaagcttattctagaaatattgtgatccctacattatttgagcatgaaactttttttagattattattagatcatcatcctatcttgttgaaaaatatttctcattttcttcccagaaagcactatcaagatatgcagaatggcgattttgatacatctaaagagttggacttgtgttccatgaacactgaagatacaagtaaagaagacttccctaaaaacttttacaacaatatgcatatttttttaacacgtagggaatgtgtgaagtctttgggtaatcattttactttgaagaatccatatgatgtgatatccccttttatagaatggttttttcaaggtattgatatgcaaggaactgacttgagccctaagtttacctttgtttctttatttgaaagtatagatttaatcttgtacgtctctggatctacagtgcaaaaattagcgtctattgaaccccttacgactgtaatatttttattatatttcacgtatgctgattctttagggagtttgaactttgagttttttttgcagaatagatctagattacagctcatagagaaatttatcttgaaatattattacaatccatctttgacagaaaacgaacttttatctgatagcactatatgggacttattaaggagggtgtctgatttaaaactcatagatttggtcgttaaatgcggcggaaggcctcaatacggggttatgtttgcatga

SEQ ID NO: 2279 - DNA, 2493 bp, Saccharomyces cerevisiae
atgacatctgcattaagggttttggtatgcggagatcacccaaatctcattctgtacacatccaggtttcaacatgccaaaaatatagaattttatcttgtgaacaactcaaaaaatgccaactacgaggttagttcactattttatgggacggaacggtttcagattcaaaaccatttccaatcgctcctagatttagtagaccttaataatgaaaatggtggcttggtattcgacttgataataatgagtgcgtcttcactgcaagaaatcccgcaggtattgagagatataaaacctatgatgaataagacaacaaagatactatttgaaagtagcgggtttatatatttggagccattcatcaaggcttcagttgatctttcgctgtcaaatattttcagcattttcaccgattatgacataagacggttggacaatggctcatacaaacagttcacgactgcaaatgccaaatccttttctgtttcgatcggtcaaacgacatccgttcacgaaaacagctattcaagtgatattattcctattttgaatacatttcagaaattgttccaaaaactgtttcctagggacgttgtgactctttacgatcattctccctccgctttcttggcaaaagaatgggaactagctttgcctcaaatatgtttcgatccattattaataatattagaagagaagaatccatcaaccttggatgaccacgttttggccaaacctcttatttcaggtttactaggcgagagcttattaataataaaaaaaatgggtatagccatgaacaatccaaattttcaaaatgaacagactatattgaaacattggaagaataagtgcgaagacttacctgatgggccggcacttttatataatttcatccataaggcttcatctttgaatattgacttattgttattacagccgatattattagcagatgactttggcgtgaagacaccatatttagaatgtttgtttacaatgatgactcaatatcaattgttaaataaaggtgattctgaatggtttattagaaaggatgagaacacagcgttaactcgcgttgatgatttacaaaacagtatcgcacttaaagatggaaaaatcatgcagctgcaaaattcggaatcaaccctgaaaaatgagataaaagaacttcaaagtcaagttttgagcttaaaacaagaagtgtcctcaagtaaagcaaataatggacaagagttggaaattttaaagaagaaagtgcaaatgggagacaattcattatttgatcgcccaaatagtaatactaatggtatatctccctctgataacattgttgatgttgatttaaattacgaaaggagtgaccaaggtaataatagtagtggtaatgatagcagaagacaatcttttttcaactccacatctgatacaacattatccagagatgaaacctcgttgaaagagcgtgagttagaagtacgaatgaaggaattagaacttcaagagcgtgagttagagttacagagaaaagccctccagcaacaacaacaatatcaacagagaccgcctaagcaagtatactccggtccttctggtacaccaaccagcggcaataacaataataaaagttacaatccaaatagaaaatcttcctatagtcagcctcaacatgtggctatgatgaccagcagaggtctacatggtcctagcgctgcaagctctagccctgtcatttctgccaacaattttgttgatccagtttcttctgggacgccatatagcagcaatagttctcgatttagtcagcaaattccatcgcagcaatacatgcatactgttaagccaacgagtagaaaaaacagaagtagtgtcatgcctaatataggttacgtcccagggctaaccaataacgagtatggtagaaagtttaacggtaatggtatgaatggtacccaaagccgtctgaattcactttcaaaccaaagtacgtttagatctcaacagggtccaccgataacacagcaaaaatcgtttcaaaataacggtggtagcatgaggacaaatcgcataccatctgcaaattacaatatttcaaatcagcaatcgggttttgttaactctatttcaagtccaaatctaagcaatttggagaatagaaacacagtacaaaacagtagaaatgcggattctgctccgtgcgttaatcaattgaacagtgactctccgccccaattacagtctctatctcaaaacggtacctcaaaagttcctcagatcaatattacgcaaccatcaccaattcagaccaactttgctacgagtgataaccctgctgctgtaataaaactagggacaccttctgaagatacagtttcagctgcggcaacagccaataatataagtacaatgggagatgaaagccgcaaagaggacgttaaggaaaaaaagaagaaaaagttcagtttctttggaaaaaggaaaaagtaa

SEQ ID NO: 2280 - DNA, 2493 bp, Artificial Sequence
  Description of Artificial Sequence: Synthetic polynucleotide
atgacatctgcattaagggttttggtatgcggagatcacccaaatctcattttatacacatccaggtttcaacatgccaaaaatatagaattttatcttgtgaacaactccaaaaatgccaactacgaggttagttctttattttatgggacggaaagatttcagattcaaaaccatttccaatctctcttggatttagtagaccttaataatgaaaatggtggcttggtattcgacttgataataatgagtgcgtcttctttacaagaaatcccgcaggtattgagagatataaaacctatgatgaataagacaacaaagatattgtttgaaagtagcgggtttatatatttggagccattcatcaaggcttctgttgatctttctttatccaatattttcagcattttcaccgattatgacataagaagattggacaatggctcttacaaacagttcacgactgcaaatgccaaatccttttctgtttccatcggtcaaacgacatccgttcacgaaaacagctattctagtgatattattcctattttgaatacatttcagaaattgttccaaaaattatttcctagggacgttgtgactctttacgatcattctccctccgctttcttggcaaaagaatgggaattggctttgcctcaaatatgtttcgatccattattaataatattagaagagaagaatccatctaccttggatgaccacgttttggccaaacctcttatttctggtttattaggcgagagcttattaataataaaaaaaatgggtatagccatgaacaatccaaattttcaaaatgaacagactatattgaaacattggaagaataagtgcgaagacttacctgatgggccggcacttttatataatttcatccataaggcttcttctttgaatattgacttattgttattacagccgatattattagcagatgactttggcgtgaagacaccatatttagaatgtttgtttacaatgatgactcaatatcaattgttaaataaaggtgattctgaatggtttattagaaaggatgagaacacagcgttaactcgcgttgatgatttacaaaacagtatcgcacttaaagatggaaaaatcatgcagttacaaaattctgaaagtaccttgaaaaatgagataaaagaacttcaaagtcaagttttgagcttaaaacaagaagtgtcctccagtaaagcaaataatggacaagagttggaaattttaaagaagaaagtgcaaatgggagacaattctttatttgatcgcccaaatagtaatactaatggtatatctccctctgataacattgttgatgttgatttaaattacgaaaggagtgaccaaggtaataatagtagtggtaatgatagcagaagacaatcttttttcaactccacatctgatacaacattatccagagatgaaacctctttgaaagagcgtgagttagaagtaagaatgaaggaattagaacttcaagagcgtgagttagagttacagagaaaagccctccagcaacaacaacaatatcaacagagaccgcctaagcaagtatactccggtccttctggtacaccaaccagcggcaataacaataataaaagttacaatccaaatagaaaatcttcctatagtcagcctcaacatgtggctatgatgaccagcagaggtttgcatggtcctagcgctgcaagctctagccctgtcatttctgccaacaattttgttgatccagtttcttctgggacgccatatagcagcaatagttctagatttagtcagcaaattccatctcagcaatacatgcatactgttaagccaacgagtagaaaaaacagaagtagtgtcatgcctaatataggttacgtcccagggttaaccaataacgagtatggtagaaagtttaacggtaatggtatgaatggtacccaaagccgtttgaattctctttccaaccaaagtacgtttagatctcaacagggtccaccgataacacagcaaaaaagttttcaaaataacggtggtagcatgaggacaaatcgcataccatctgcaaattacaatatttctaatcagcaatctggttttgttaactctatttccagtccaaatttgagcaatttggagaatagaaacacagtacaaaacagtagaaatgcggattctgctccgtgcgttaatcaattgaacagtgactctccgccccaattacagtctttatctcaaaacggtacctccaaagttcctcagatcaatattacgcaaccatctccaattcagaccaactttgctacgagtgataaccctgctgctgtaataaaattggggacaccttctgaagatacagtttctgctgcggcaacagccaataatataagtacaatgggagatgaaagccgcaaagaggacgttaaggaaaaaaagaagaaaaagttcagtttctttggaaaaaggaaaaagtga

SEQ ID NO: 2281 - DNA, 450 bp, Saccharomyces cerevisiae
atgcctgtagatcaagaaaaattagctaagctgcacaagttatcagcagcaaacaaagttggtggtaccagaaggaaaataaacaagaaaggtaatttatataataacaatgacaaggataataccaagttacaagctgaacttcataaactgcatccaatgaccattgaaaacgttgccgaagcaaattttttcaaaaagaatggcaaggttttacattttaacagtgcagttgtacagattgcccctcaatgcaatctcacaatgattcatggccaaccgaaagagaatacacttaatgggctgtatccgagcgtagcctctcaattaggtagccaagaacttgagtatttgacaggtttggctcataacctagaaaatgaacagacggtgctcgaccagctgggcgacagatgcagcgagacaaaacaacaagtgatgaatagctga

SEQ ID NO: 2282 - DNA, 450 bp, Artificial Sequence
  Description of Artificial Sequence: Synthetic polynucleotide
atgcctgtagatcaagaaaaattagctaagttgcacaagttaagtgcagcaaacaaagttggtggtaccagaaggaaaataaacaagaaaggtaatttatataataacaatgacaaggataataccaagttacaagctgaacttcataaattgcatccaatgaccattgaaaacgttgccgaagcaaattttttcaaaaagaatggcaaggttttacattttaacagtgcagttgtacagattgcccctcaatgcaatctcacaatgattcatggccaaccgaaagagaatacacttaatgggttatatccgagcgtagcctctcaattaggtagccaagaacttgagtatttgacaggtttggctcataacttggaaaatgaacagacggtgctcgaccagttaggcgacagatgcagcgagacaaaacaacaagtgatgaatagctga

SEQ ID NO: 2283 - DNA, 576 bp, Saccharomyces cerevisiae
atggaggatcaggatgctgcatttatcaaacaggctacagaagcaatagtggatgtatcattaaatatagataacatagatcctataataaaagagttattagaaagggtaaggaataggcaaaacaggttacaaaataaaaaaccagcactcataccggcagaaaatggtgttgatataaatagtcaaggcggtaacataaaggttaaaaaggaaaacgcattaccaaaaccaccgaagtccagcaaaagcaaaccccaagatcgtagaaatagtactggtgaaaaaagatttaaatgtgcgaaatgttcgttggaattttcaagatcatcagatttgagaaggcacgaaaagacacacttcgccatattgcctaacatttgtcctcaatgtggcaaaggttttgcaaggaaagatgcattgaaaagacattatgatacactgacatgtaggagaaacaggactaaattactaactgcgggtggtgagggtatcaatgaattactgaaaaaagtcaagcaatccaacatcgttcatcgtcaagataacaaccacaatggtagcagtaatggctga

SEQ ID NO: 2284 - DNA, 576 bp, Artificial Sequence
  Description of Artificial Sequence: Synthetic polynucleotide
atggaggatcaggatgctgcatttatcaaacaggctacagaagcaatagtggatgtatctttaaatatagataacatagatcctataataaaagagttattagaaagggtaaggaataggcaaaacaggttacaaaataaaaaaccagcactcataccggcagaaaatggtgttgatataaatagtcaaggcggtaacataaaggttaaaaaggaaaacgcattaccaaaaccaccgaagtccagcaaaagcaaaccccaagatcgtagaaatagtactggtgaaaaaagatttaaatgtgcgaaatgttctttggaattttccagaagttctgatttgagaaggcacgaaaagacacacttcgccatattgcctaacatttgtcctcaatgtggcaaaggttttgcaaggaaagatgcattgaaaagacattatgatacattaacatgtaggagaaacaggactaaattattaactgcgggtggtgagggtatcaatgaattattgaaaaaagtcaagcaatccaacatcgttcatcgtcaagataacaaccacaatggtagcagtaatggctga

SEQ ID NO: 2285 - DNA, 1377 bp, Saccharomyces cerevisiae
atgtctaacgaattacggcttgaagataactatgtaccaacttccgacacactagtagttttcaaacaattgatgaagctgccggtaacggtattatatgatcttacgctatcatggttcgcaaaattcggtgggtcatttgatggtgacatatatttattgacagaaacattagacttactgattgagaaaggcgtgaggcgaaatgttatagtaaataggatattatacgtatactggccggatggcctgaatgttttccaattagcagaaatagattgccatttaatgataagtaaaccagagaaatttaagtggcttccatcaaaagctttacggggagatgggaaaccttacgtagtaaagctccaacctgccaaatttatagaaaatttacaaacagatctagcgaaaatttaccattgtcatgtttacatgtttaaacatccctctttgccagtgttaattaccagaatacagctatttgacagcaataatttatttttgagtacgcctaatatagggagtataaataaagagtctctttacaacaagttagacaaattccaagggaaaccattaatatcaaggagaccatattacgttgcattcccgctaaattctccaataattttccattcagttgacaaggatatttatgctagactagttttgcagagcattagtcgaacgatatcagaaagagaaacaatcatcttcaaaccggtacagaaaatacccgtgaaatcaatacataatataatgactttattaggaccttcgagatttgcggagtctatgggcccatgggaatgttatgctagtgctaactttgaacggtcaccactacacgactacaaaaagcaccaaggccttactggtaaaaaggtaatggttagagaatttgatgattctttcttaaatgacgatgagaatttttacggaaaagaagaacctgaaattagacgactaaggttagagaaaaacatgatcaaattcaaaggttcagcaaacggcgtaatggatcagaaatataatgatttgaaagaatttaacgaacatgtccacaatattaggaatggaaagaaaaatgaagattctggtgagccagtgtacatttctagatacagttccttagttcctattgaaaaagttggattcactttaaaaaacgaaataaacagtagaataattaccataaaattgaaatttaatggtaatgatatttttgggggattacacgaactatgcgataaaaatttaataaatattgataaagttcctgggtggttggctggagaaaatggatcgttctcaggaacgataatgaatggagattttcagcgagagcaggttgctaaaggtggtttactgtag

SEQ ID NO: 2286 - DNA, 1377 bp, Artificial Sequence
  Description of Artificial Sequence: Synthetic polynucleotide
atgtctaacgaattaagacttgaagataactatgtaccaacttccgacacattggtagttttcaaacaattgatgaagttaccggtaacggtattatatgatcttacgttatcttggttcgcaaaattcggtgggtcttttgatggtgacatatatttattgacagaaacattagacttattgattgagaaaggcgtgaggagaaatgttatagtaaataggatattatacgtatactggccggatggcttgaatgttttccaattagcagaaatagattgccatttaatgataagtaaaccagagaaatttaagtggcttccatctaaagctttaagaggagatgggaaaccttacgtagtaaagctccaacctgccaaatttatagaaaatttacaaacagatttggcgaaaatttaccattgtcatgtttacatgtttaaacatccctctttgccagtgttaattaccagaatacagttatttgacagcaataatttatttttgagtacgcctaatatagggagtataaataaagagtctctttacaacaagttagacaaattccaagggaaaccattaatatctaggagaccatattacgttgcattcccgttaaattctccaataattttccattctgttgacaaggatatttatgctagattggttttgcagagcattagtaggacgatatctgaaagagaaacaatcatcttcaaaccggtacagaaaatacccgtgaaatctatacataatataatgactttattaggaccttccagatttgcggagtctatgggcccatgggaatgttatgctagtgctaactttgaaagatctccattacacgactacaaaaagcaccaaggccttactggtaaaaaggtaatggttagagaatttgatgattctttcttaaatgacgatgagaatttttacggaaaagaagaacctgaaattagaagattaaggttagagaaaaacatgatcaaattcaaaggttctgcaaacggcgtaatggatcagaaatataatgatttgaaagaatttaacgaacatgtccacaatattaggaatggaaagaaaaatgaagattctggtgagccagtgtacatttctagatacagttccttagttcctattgaaaaagttggattcactttaaaaaacgaaataaacagtagaataattaccataaaattgaaatttaatggtaatgatatttttgggggattacacgaattgtgcgataaaaatttaataaatattgataaagttcctgggtggttggctggagaaaatggaagtttcagtggaacgataatgaatggagattttcagagagagcaggttgctaaaggtggtttattgtga

SEQ ID NO: 2287 - DNA, 1266 bp, Saccharomyces cerevisiae
atgtctgaattactagatagctttgagacagagtttgcgaaattttataccgacagcaatctggaagagacaaaccttcaaaaatgtcttgatcatactcatgaattcaagagtcaattaaagaagttgaaagcgcacttaaacaagcatattcaggaatcaaaaccagaagtctataataagctgagtgataaggagaaacaaaagtttaagagaaaaagagaactaattattgagaagctaagcaagtcacagaggcaatgggaccattcagtaaagaaacaaataaagtacgtttctcagcagtcgaatcgcttcaacaaaagcacgctgaacaaattaaaagaatttgatatagatagcgtatatgtcaataaattaccgaaagagacaatggaaaatgttaatgaagccatcggttaccatattttgaggtatagtatagacaacatgccattaggaaataaaaatgaggctttccagtatctaaaagatgtctacggaattactaataaagaatctactgaatttattgagatgggccaaatcgtacatgatcttaaaaagggtgacacagaaagctgtctgaaatggtgctccaatgaaatggaaagcttatcatctaaccatacggctttatcgtccctaaaatttgatttatacactttgtcagcaatgcagatagtgaagcatggaaatccggtagagttgtactaccaaataacacagaacgcacccctggattgctttagacatagggagaaggaattaatgcaaaacgtcgtaccattattaactaaatcgctaataggtcaacctattgaagatattgattctaaagtaaataaggaattaaaagaatgcacgtcgttatttataaaagaatattgtgctgcaaaacatattttctttgactctcccttgtttttgatagtattgagtggtttaatttctttccaatttttcatcaaatacaaaaccatcagggagttagcgcacgttgactggactacgaaagatgagttgccatttgatgtcaagttaccagattttctgactcatttccatccgatcttcatctgtcccgtcttaaaggaggaaaccactacagaaaatcctccttattcactggcatgccatcacatcatttctaaaaaggcgctagacagattatcgaagaacggaacaattactttcaagtgcccatactgccccgtaaatacttcaatgagcagtacaaaaaaggttcgttttgttatgctttga

SEQ ID NO: 2288 - DNA, 1266 bp, Artificial Sequence
  Description of Artificial Sequence: Synthetic polynucleotide
atgtctgaattattagatagctttgagacagagtttgcgaaattttataccgacagcaatttggaagagacaaaccttcaaaaatgtcttgatcatactcatgaattcaagagtcaattaaagaagttgaaagcgcacttaaacaagcatattcaggaaagtaaaccagaagtctataataagttgagtgataaggagaaacaaaagtttaagagaaaaagagaattgattattgagaagttgagcaagtctcagaggcaatgggaccattctgtaaagaaacaaataaagtacgtttctcagcagtctaatcgcttcaacaaaagcacgttgaacaaattaaaagaatttgatatagatagcgtatatgtcaataaattaccgaaagagacaatggaaaatgttaatgaagccatcggttaccatattttgaggtatagtatagacaacatgccattaggaaataaaaatgaggctttccagtatttgaaagatgtctacggaattactaataaagaatctactgaatttattgagatgggccaaatcgtacatgatcttaaaaagggtgacacagaaagctgtttgaaatggtgctccaatgaaatggaaagcttatcttctaaccatacggctttatcttccttgaaatttgatttatacactttgagtgcaatgcagatagtgaagcatggaaatccggtagagttgtactaccaaataacacagaacgcacccttagattgctttagacatagggagaaggaattaatgcaaaacgtcgtaccattattaactaaatctttgataggtcaacctattgaagatattgattctaaagtaaataaggaattaaaagaatgcacgtctttatttataaaagaatattgtgctgcaaaacatattttctttgactctcccttgtttttgatagtattgagtggtttaatttctttccaatttttcatcaaatacaaaaccatcagggagttagcgcacgttgactggactacgaaagatgagttgccatttgatgtcaagttaccagattttttaactcatttccatccgatcttcatctgtcccgtcttaaaggaggaaaccactacagaaaatcctccttattctttggcatgccatcacatcatttctaaaaaggcgttggacagattatccaagaacggaacaattactttcaagtgcccatactgccccgtaaatacttctatgagcagtacaaaaaaggttcgttttgttatgctttga

SEQ ID NO: 2289 - DNA, 1548 bp, Saccharomyces cerevisiae
atgtcgaaattgggacaagaaaaaaatgaagtaaattactctgatgtaagagaggatagagttgtgacaaactccactggtaatccaatcaatgaaccatttgtcacccaacgtattggggaacatggccctttgcttttgcaagattataacttaattgattctttggctcatttcaacagggaaaatattcctcaaaggaatccacatgctcatggttctggtgccttcggctattttgaagtaaccgatgacattactgatatctgcgggtctgctatgtttagtaaaattgggaaaagaacgaaatgtctaacaagattttcgactgtgggtggtgataaaggtagtgccgacacggttcgtgatccaagggggtttgccaccaaattctacactgaagaaggtaatttagattgggtctacaataatacaccggtattctttatcagagacccttccaagttccctcactttatccacacacagaagagaaacccacaaaccaacctaagggatgctgacatgttttgggatttcctcaccactcctgaaaatcaggtggccattcatcaagtaatgatccttttttcagaccgtggtacccctgccaactaccgtagtatgcatggttattctggtcatacctataaatggtccaataaaaacggagattggcattatgtgcaagttcatatcaaaaccgatcaaggaataaagaatttgaccatagaagaggctaccaaaattgcgggatccaatccagattactgccagcaggatttatttgaggctattcagaatggaaactatccttcctggacagtttatattcaaacaatgaccgaacgcgatgccaaaaaattaccattttcagtctttgatttgactaaagtatggcctcaggggcaattccctttacggcgtgtgggtaagattgttttgaacgagaatccactgaacttcttcgcacaggtggaacaagctgccttcgcccccagtaccacggttccttaccaagaagcaagcgctgatccagtattacaggcccgtttgttttcatatgcggatgctcatagatacaggctaggtcctaacttccatcaaatacccgtaaactgtccatatgcatctaaatttttcaatcccgctatcagagatggaccgatgaatgttaacggcaacttcggctcagaacctacatatttggccaacgataaatcgtacacgtatatccaacaggacagacccattcaacaacaccaagaggtatggaatgggccagctatcccttatcattgggcaacatccccaggtgatgtagatttcgtgcaagcaagaaatctctaccgcgttttgggtaaacaacctggacagcaaaagaacttggcatataacatcggcattcatgtagaaggcgcctgtcctcaaatacagcagcgcgtttatgatatgtttgctcgtgttgataagggactatctgaggcaattaaaaaagtagctgaggcaaaacatgcttctgagctttcgagtaactccaaattttga

SEQ ID NO: 2290 - DNA, 1548 bp, Artificial Sequence
  Description of Artificial Sequence: Synthetic polynucleotide
atgtccaaattgggacaagaaaaaaatgaagtaaattactctgatgtaagagaggatagagttgtgacaaactccactggtaatccaatcaatgaaccatttgtcacccaacgtattggggaacatggccctttgcttttgcaagattataacttaattgattctttggctcatttcaacagggaaaatattcctcaaaggaatccacatgctcatggttctggtgccttcggctattttgaagtaaccgatgacattactgatatctgcgggtctgctatgtttagtaaaattgggaaaagaacgaaatgtttaacaagattttccactgtgggtggtgataaaggtagtgccgacacggttcgtgatccaagggggtttgccaccaaattctacactgaagaaggtaatttagattgggtctacaataatacaccggtattctttatcagagacccttccaagttccctcactttatccacacacagaagagaaacccacaaaccaacttgagggatgctgacatgttttgggatttcctcaccactcctgaaaatcaggtggccattcatcaagtaatgatccttttttctgaccgtggtacccctgccaactaccgtagtatgcatggttattctggtcatacctataaatggtccaataaaaacggagattggcattatgtgcaagttcatatcaaaaccgatcaaggaataaagaatttgaccatagaagaggctaccaaaattgcgggatccaatccagattactgccagcaggatttatttgaggctattcagaatggaaactatccttcctggacagtttatattcaaacaatgaccgaacgcgatgccaaaaaattaccattttctgtctttgatttgactaaagtatggcctcaggggcaattccctttaagacgtgtgggtaagattgttttgaacgagaatccattgaacttcttcgcacaggtggaacaagctgccttcgcccccagtaccacggttccttaccaagaagcaagcgctgatccagtattacaggcccgtttgttttcttatgcggatgctcatagatacaggcttggtcctaacttccatcaaatacccgtaaactgtccatatgcatctaaatttttcaatcccgctatcagagatggaccgatgaatgttaacggcaacttcggctctgaacctacatatttggccaacgataaatcttacacgtatatccaacaggacagacccattcaacaacaccaagaggtatggaatgggccagctatcccttatcattgggcaacatccccaggtgatgtagatttcgtgcaagcaagaaatctctaccgcgttttgggtaaacaacctggacagcaaaagaacttggcatataacatcggcattcatgtagaaggcgcctgtcctcaaatacagcagcgcgtttatgatatgtttgctcgtgttgataagggattatctgaggcaattaaaaaagtagctgaggcaaaacatgcttctgagctttccagtaactccaaattttga

SEQ ID NO: 2291 - DNA, 1485 bp, Saccharomyces cerevisiae
atggatgatttttcaagagataccgaaaactttgtttgctggttaaaaactaccgctgaaattgaagtatcccctaagatagaaatcaaagatctttgttgtgataatcaaggccgcgcagtagttgccactcaaaagattaagaaggatgaaacattgtttaaaatacctcgtagttctgttttaagcgttacaacatctcaactgataaaggattatccttctctcaaggataagttcctgaacgaaaccggatcgtgggaaggtttaattatctgtatactttatgagatggaagttttgcaagaaagaagccgatgggcgccttactttaaagtttggaacaaaccaagcgatatgaacgcgttaattttttgggatgataatgaactgcaacttttaaaaccatcacttgtccttgaaagaataggaaaaaaggaagccaaagagatgcatgaaagaattattaaatcaatcaaacaaattggtggagaattttcacgtgtagcgacgtccttcgagtttgataattttgcctatattgcaagcattatattgagttactcctttgatttggaaatgcaagatagtagtgtaaatgaaaatgaagaagaagaaaccagtgaagaagaacttgaaaatgagcgctacttgaaatcgatgattccacttgctgatatgttgaatgcagataccagtaaatgcaacgctaatttaacttacgactctaactgtttaaagatggttgctttgagggatattgaaaagaatgaacaagtgtacaacatatacggagaacatccaaattcggaactactaagaagatatgggtatgttgaatgggacggttcgaagtatgattttggagaagtgttacttgaaaatattgtcgaggcgttaaaagagacttttgagacgaatactgaatttttggacaggtgtattgatatcttacgcaataacgccaatattcaagaattcttagaaggtgaagaaatagtactagattcatatgattgttataataatggtgaattgttgcctcaactaatacttttggtccaaatcttgacaattctttgccaaattccaggtttatgcaaactggacataaaagcaatggaaaggcaagtggagagaattgtaaagaagtgtttacaattgatagaaggtgcccgcgccactacaaactgtagtgccacatggaaacgttgtattatgaagcgtctagccgattaccccataaaaaagtgcgtttctatcgaaaaaccttcgaaaggaaactcattaacaagggaagaactaagagatgttatggctcggagagttttgaaaagcgaaatagattcgctgcaagtttgtgaagaaaccatcgacaagaattacaaggttattcctgatgaaaagctgctaactaatattttaaagagaaagttgacagaggaagaaaaaagctctgtcaaacgtccttgcgtgaagaagtga

SEQ ID NO: 2292 - DNA, 1485 bp, Artificial Sequence
  Description of Artificial Sequence: Synthetic polynucleotide
atggatgatttttccagagataccgaaaactttgtttgctggttaaaaactaccgctgaaattgaagtatcccctaagatagaaatcaaagatctttgttgtgataatcaaggccgcgcagtagttgccactcaaaagattaagaaggatgaaacattgtttaaaatacctcgtagttctgttttaagcgttacaacatctcaattgataaaggattatccttctctcaaggataagttcttgaacgaaaccggatcttgggaaggtttaattatctgtatactttatgagatggaagttttgcaagaaagaagcagatgggcgccttactttaaagtttggaacaaaccaagcgatatgaacgcgttaattttttgggatgataatgaattacaacttttaaaaccaagtcttgtccttgaaagaataggaaaaaaggaagccaaagagatgcatgaaagaattattaaatctatcaaacaaattggtggagaattttctcgtgtagcgacgtccttcgagtttgataattttgcctatattgcaagcattatattgagttactcctttgatttggaaatgcaagatagtagtgtaaatgaaaatgaagaagaagaaaccagtgaagaagaacttgaaaatgagcgctacttgaaatctatgattccacttgctgatatgttgaatgcagataccagtaaatgcaacgctaatttaacttacgactctaactgtttaaagatggttgctttgagggatattgaaaagaatgaacaagtgtacaacatatacggagaacatccaaattctgaattattaagaagatatgggtatgttgaatgggacggttccaagtatgattttggagaagtgttacttgaaaatattgtcgaggcgttaaaagagacttttgagacgaatactgaatttttggacaggtgtattgatatcttacgcaataacgccaatattcaagaattcttagaaggtgaagaaatagtattggattcttatgattgttataataatggtgaattgttgcctcaattgatacttttggtccaaatcttgacaattctttgccaaattccaggtttatgcaaattagacataaaagcaatggaaaggcaagtggagagaattgtaaagaagtgtttacaattgatagaaggtgcccgcgccactacaaactgtagtgccacatggaaacgttgtattatgaagcgtttggccgattaccccataaaaaagtgcgtttctatcgaaaaaccttccaaaggaaactctttaacaagggaagaattgagagatgttatggctagaagagttttgaaaagcgaaatagattctttacaagtttgtgaagaaaccatcgacaagaattacaaggttattcctgatgaaaagttattaactaatattttaaagagaaagttgacagaggaagaaaaaagctctgtcaaacgtccttgcgtgaagaagtga

SEQ ID NO: 2293 - DNA, 2436 bp, Saccharomyces cerevisiae
atgttaagacaagctacaaaagcaccaatacaaaaatatttacagagaacgcaactattaaggcgaagtactccacgaatatacactattgtacagtgtaaaagatctatttgcagttttaatgcaagacctcgagtagccaataaacttctatcagatataaaaacaaatgcattaaatgaagtcgctatttcaacctgcgccctcaagagctcatatggattgcccaatttcaaaagaacgtacgtccaaatgaggatggatcccaatcagcaaccggaaaagccagctttagaacaatttggtacaaacttgacaaaattagcgcgcgacggtaaattagaccctgtcattggcagagacgaagaaatcgcaagagctattcaaattttatcaagaagaacaaaaaataatccatgtttgatcggtcgagctggtgtcggtaaaaccgcccttattgatgggttagctcaaagaattgttgctggggaggtccctgactcgttgaaagataaagatctagtagctttggatttgggatctttgattgctggcgccaaatatagaggtgaattcgaagaacgtttaaaaaaggttttagaagaaattgacaaggccaatggtaaggttattgttttcattgatgaagttcatatgctgcttggcttaggtaaaactgatggtagtatggatgcttctaacatcttaaagccaaaactggcccgtgggctacgttgtatctctgcaaccactcttgatgaattcaaaatcattgaaaaagatccggctttatcgagaaggtttcagcctatcttattgaatgagccgagcgtctccgatacgatttctatactaagaggtttaaaagaaaggtacgaggttcatcatggtgtaaggatcactgatacagctttagtgtctgctgcagttctttcaaatcgttatataacagacaggtttctacctgataaagccattgatctagttgacgaagcttgtgctgtactacgtttacaacatgaatccaaaccggatgaaatacagaaactggatcgtgctattatgaaaatacaaatagaactggaatctttaaagaaagagaccgaccctgtttccgtggaaagaagagaagcgttggaaaaggacctagaaatgaaaaatgatgaattaaacagattaacaaaaatatgggacgctgaaagagctgaaattgaatctatcaaaaatgctaaggcaaatttggaacaagcaagaattgagttggaaaagtgtcagagagagggtgattacactaaagcatccgagttgcgatattccagaattcctgacttggagaagaaggtagctttaagcgagaagagtaaggacggagataaagtaaatttacttcatgattcagttacttctgacgatatttctaaggttgttgccaaaatgactggtattcctacagaaacggtgatgaaaggcgacaaggaccgcctactgtatatggaaaattctttaaaagaaagagtcgttggccaagacgaggccattgctgctatttctgatgctgtacgtcttcaaagggctggtttgaccagtgaaaagagacctattgccagctttatgttcttaggtcctactggtactggtaaaacagaattgaccaaggctttagctgaattcctatttgatgacgaatcaaatgtgattcgttttgacatgtcagaatttcaagagaagcatactgtctctcgtttaatcggtgcacctccaggttacgtcttaagcgaatctggtggccaattaactgaggctgtcagaagaaagccttatgctgtcgttttatttgatgaatttgaaaaagcgcaccccgatgtttccaaactactgttgcaagtgttggatgaaggtaagctgaccgattccctaggccatcatgttgatttccgtaacacgatcattgtgatgacctcaaacattggacaagatattttattaaacgacacaaagttgggtgatgatggtaagattgacaccgcaaccaagaataaagttatcgaagcaatgaaaagatcctatccacctgagttcatcaatcgtattgatgatattctagttttcaataggctatccaagaaagttttgaggtcaattgttgatattagaattgcagaaattcaagatcgtttggccgaaaaaagaatgaaaattgatttaactgatgaagcgaaggattggctaactgacaaaggctacgatcaattatatggtgcaaggccattgaatagattaattcatagacagattttgaactccatggcaactttcttattaaaaggtcaaattagaaacggcgaaactgttagagtggtggttaaagatactaagcttgtcgtgctaccaaatcatgaagaaggcgaagttgttgaagaggaagctgaaaagtaa

SEQ ID NO: 2294 - DNA, 2436 bp, Artificial Sequence
  Description of Artificial Sequence: Synthetic polynucleotide
atgttaagacaagctacaaaagcaccaatacaaaaatatttacagagaacgcaattattaaggagaagtactccaagaatatacactattgtacagtgtaaaagatctatttgcagttttaatgcaagacctagagtagccaataaacttttaagtgatataaaaacaaatgcattaaatgaagtcgctatttctacctgcgccctcaagagctcttatggattgcccaatttcaaaagaacgtacgtccaaatgaggatggatcccaatcagcaaccggaaaagccagctttagaacaatttggtacaaacttgacaaaattagcgcgcgacggtaaattagaccctgtcattggcagagacgaagaaatcgcaagagctattcaaattttatctagaagaacaaaaaataatccatgtttgatcggtagagctggtgtcggtaaaaccgcccttattgatgggttagctcaaagaattgttgctggggaggtccctgactctttgaaagataaagatttagtagctttggatttgggatctttgattgctggcgccaaatatagaggtgaattcgaagaacgtttaaaaaaggttttagaagaaattgacaaggccaatggtaaggttattgttttcattgatgaagttcatatgttacttggcttaggtaaaactgatggtagtatggatgcttctaacatcttaaagccaaaattggcccgtgggttacgttgtatctctgcaaccactcttgatgaattcaaaatcattgaaaaagatccggctttatctagaaggtttcagcctatcttattgaatgagccgagcgtctccgatacgatttctatattaagaggtttaaaagaaaggtacgaggttcatcatggtgtaaggatcactgatacagctttagtgtctgctgcagttctttctaatcgttatataacagacaggtttttacctgataaagccattgatttggttgacgaagcttgtgctgtattacgtttacaacatgaatccaaaccggatgaaatacagaaattggatcgtgctattatgaaaatacaaatagaattggaatctttaaagaaagagaccgaccctgtttccgtggaaagaagagaagcgttggaaaaggacttggaaatgaaaaatgatgaattaaacagattaacaaaaatatgggacgctgaaagagctgaaattgaatctatcaaaaatgctaaggcaaatttggaacaagcaagaattgagttggaaaagtgtcagagagagggtgattacactaaagcatccgagttgagatattccagaattcctgacttggagaagaaggtagctttaagcgagaagagtaaggacggagataaagtaaatttacttcatgattctgttacttctgacgatatttctaaggttgttgccaaaatgactggtattcctacagaaacggtgatgaaaggcgacaaggaccgcttattatatatggaaaattctttaaaagaaagagtcgttggccaagacgaggccattgctgctatttctgatgctgtacgtcttcaaagggctggtttgaccagtgaaaagagacctattgccagctttatgttcttaggtcctactggtactggtaaaacagaattgaccaaggctttagctgaattcttatttgatgacgaaagtaatgtgattcgttttgacatgtctgaatttcaagagaagcatactgtctctcgtttaatcggtgcacctccaggttacgtcttaagcgaatctggtggccaattaactgaggctgtcagaagaaagccttatgctgtcgttttatttgatgaatttgaaaaagcgcaccccgatgtttccaaattattattgcaagtgttggatgaaggtaagttgaccgattccttgggccatcatgttgatttccgtaacacgatcattgtgatgaccagtaacattggacaagatattttattaaacgacacaaagttgggtgatgatggtaagattgacaccgcaaccaagaataaagttatcgaagcaatgaaaagatcctatccacctgagttcatcaatcgtattgatgatattttggttttcaataggctttccaagaaagttttgaggtctattgttgatattagaattgcagaaattcaagatcgtttggccgaaaaaagaatgaaaattgatttaactgatgaagcgaaggattggttgactgacaaaggctacgatcaattatatggtgcaaggccattgaatagattaattcatagacagattttgaactccatggcaactttcttattaaaaggtcaaattagaaacggcgaaactgttagagtggtggttaaagatactaagcttgtcgtgttaccaaatcatgaagaaggcgaagttgttgaagaggaagctgaaaagtga

SEQ ID NO: 2295 - DNA, 1152 bp, Saccharomyces cerevisiae
atgcaaaaccctccgttgattcgtcccgatatgtataatcagggaagcagctcaatggctacttataatgcctctgagaagaatctaaatgagcatccttctccgcaaattgcacagcccagcacgtcccaaaagttaccttatagaataaatcctacaaccactaatggggacaccgacatatctgttaacagcaatcctatccagcctcctttgccaaacttgatgcatctatctggtccgtctgactatagatcgatgcatcaaagtcctatacatccatcttatatcatccctccgcattcaaatgaaagaaaacaatcagcttcttacaacagacctcaaaatgctcatgttagtattcaaccttccgtggtattcccccctaaaagttattccatatcttatgcaccttatcaaataaatccccctttaccaaatggacttccgaaccagagcatatctttgaataaggagtatattgcagaggagcaactatcaaccctcccatctcgcaataccagtgttactactgcacctccttcttttcaaaacagtgctgataccgctaaaaattcagctgataataatgataataatgataatgtaaccaaacctgttcctgataaagacacccaactcataagtagttcaggcaaaactttaagaaatactagaagagctgctcaaaatagaaccgctcaaaaggcatttagacaaaggaaagaaaaatacatcaagaatctcgaacaaaaatcaaagatatttgacgatttactagcagaaaataataacttcaaatcattaaacgattcattaagaaatgacaacaacattttaatagctcagcatgaagctataaggaatgcaattactatgttaagaagtgagtatgatgtcttatgtaacgaaaacaacatgttgaagaatgagaatagtataataaaaaatgaacacaacatgtcaagaaatgaaaatgaaaacctaaaacttgagaataaacgcttccacgctgaatatatacgaatgatcgaggatattgaaaatactaaaagaaaggaacaagaacaacgagatgaaatagagcaactaaaaaaaaaaataagatccctggaggaaatagtagggagacactcggatagtgccacgtaa

SEQ ID NO: 2296 - DNA, 1152 bp, Artificial Sequence
  Description of Artificial Sequence: Synthetic polynucleotide
atgcaaaaccctccgttgattcgtcccgatatgtataatcagggaagcagcagtatggctacttataatgcctctgagaagaatttgaatgagcatccttctccgcaaattgcacagcccagcacgtcccaaaagttaccttatagaataaatcctacaaccactaatggggacaccgacatatctgttaacagcaatcctatccagcctcctttgccaaacttgatgcatttatctggtccgtctgactatagaagtatgcatcaaagtcctatacatccatcttatatcatccctccgcattctaatgaaagaaaacaatctgcttcttacaacagacctcaaaatgctcatgttagtattcaaccttccgtggtattcccccctaaaagttattccatatcttatgcaccttatcaaataaatccccctttaccaaatggacttccgaaccagagcatatctttgaataaggagtatattgcagaggagcaattatctaccctcccatctcgcaataccagtgttactactgcacctccttcttttcaaaacagtgctgataccgctaaaaattctgctgataataatgataataatgataatgtaaccaaacctgttcctgataaagacacccaactcataagtagttctggcaaaactttaagaaatactagaagagctgctcaaaatagaaccgctcaaaaggcatttagacaaaggaaagaaaaatacatcaagaatctcgaacaaaaatccaagatatttgacgatttattggcagaaaataataacttcaaatctttaaacgattctttaagaaatgacaacaacattttaatagctcagcatgaagctataaggaatgcaattactatgttaagaagtgagtatgatgtcttatgtaacgaaaacaacatgttgaagaatgagaatagtataataaaaaatgaacacaacatgagtagaaatgaaaatgaaaacttgaaacttgagaataaacgcttccacgctgaatatataagaatgatcgaggatattgaaaatactaaaagaaaggaacaagaacaaagagatgaaatagagcaattgaaaaaaaaaataagatccttggaggaaatagtagggagacacagtgatagtgccacgtga

SEQ ID NO: 2297 - DNA, 513 bp, Saccharomyces cerevisiae
atgagttcaagttcttatagggattcatattttcaataccgccatttaccagcaccacatcacatattatatgcggaatggaatcaagatatactggcgcttccggacgaagtggcaaatattacaatggctatgaaagataatactcgcaccgacgcggaggagggaagagctccccaagatggggaaaggaattctaatgtacgcgagagcgctcaaggtaaggcattaatgacaagtgaacaaaatagcaaccgctactggaactcttttcatgatgaagacgattggaatctattcaatggcatggaactggagagtaatggagtagtgacgtttgctggacaggcgttcgatcattctttaaacgggggaaccaattccaggaacgacggtgccaatgagccaagaaaagaaacgataactggttctatttttgataggcgcatcacacaattggcgtacgcaagaaataacggttggcacgaactggctctcccacagtcacgatga

SEQ ID NO: 2298 - DNA, 513 bp, Artificial Sequence
  Description of Artificial Sequence: Synthetic polynucleotide
atgagtagtagttcttatagggattcttattttcaataccgccatttaccagcaccacatcacatattatatgcggaatggaatcaagatatattggcgcttccggacgaagtggcaaatattacaatggctatgaaagataatactcgcaccgacgcggaggagggaagagctccccaagatggggaaaggaattctaatgtacgcgagagcgctcaaggtaaggcattaatgacaagtgaacaaaatagcaaccgctactggaactcttttcatgatgaagacgattggaatttattcaatggcatggaattagagagtaatggagtagtgacgtttgctggacaggcgttcgatcattctttaaacgggggaaccaattccaggaacgacggtgccaatgagccaagaaaagaaacgataactggttctatttttgataggcgcatcacacaattggcgtacgcaagaaataacggttggcacgaattggctctcccacagtctaggtga

SEQ ID NO: 2299 - DNA, 1689 bp, Saccharomyces cerevisiae
atgcctttgaagtcgttttttttttcagcatttctagttttatgcctgtctaaattcacgcaaggcgttggcaccacagagaaggaagaatcgttatcgcctttggaactaaatattttacaaaacaaattcgcctcctactatgcaaacgacactatcaccgtgaaaggtattactattggcggctggctagtaacagaaccttatatcacgccatcattatatcgtaatgctacgtcactggcaaaacagcaaaactcttccagcaatatctccattgtcgacgaatttactctttgtaaaaccttaggatataacacctctctaactttattggataatcacttcaaaacttggattacagaggatgattttgaacaaatcaaaaccaacggtttcaatttagttaggatccccatcggatattgggcgtggaaacaaaatactgataaaaacttgtacatcgataacataactttcaatgatccatacgtaagtgatggattacaactgaaatatttaaataatgctctcgaatgggcgcaaaagtacgaactaaatgtatggttagatctacatggtgctcctggatcccagaatggattcgataattccggtgaaagaatactctatggcgatttaggctggttaaggttgaataatactaaagaactgactctggctatttggagagatatgttccagacatttttaaataaaggtgacaaaagtcctgtggtgggtattcaaatcgtcaacgaaccgcttggtggcaaaatcgatgtttcagacataacggagatgtattacgaagcatttgacttgctcaagaaaaatcagaattcgagtgacaacactacgtttgttattcatgacggttttcaaggaatcggtcactggaacttggagctaaacccaacctaccagaatgtatcgcatcattatttcaatttgactggtgcaaattacagctctcaagatatattggtcgaccatcatcattatgaagtgtttactgatgcgcaattggccgaaactcagtttgcacgtattgaaaacattatcaattatggggactctatccacaaagaactttcttttcacccagcagtagtcggagaatggtcaggcgctattactgattgtgcaacctggctaaatggtgttggggtgggtgcacgttacgatggatcatactacaatacaacgttgtttaccaccaacgacaagccagttggaacatgtatatcccaaaatagcttagctgattggacgcaagattaccgtgaccgtgtgagacaattcattgaggcacagctagccacttattcgtcaaaaacaacgggatggattttttggaattggaagaccgaagacgccgtagaatgggattatttgaagctaaaagaagctaaccttttcccttcccctttcgacaactacacgtacttcaaagcagatggatctatcgaagaaaaattctcatcctctttatcagcacaggcatttccaagaacaacgtcatcggttttgtcctccactacgacttccaggaagagtaagaatgctgcaatttctaataaactaacaacttcgcagctattaccaatcaaaaatatgagtttgacctggaaagcgagcgtatgcgcactcgctatcaccattgccgctctttgcgcttctctttaa

SEQ ID NO: 2300 - DNA, 1689 bp, Artificial Sequence
  Description of Artificial Sequence: Synthetic polynucleotide
atgcctttgaagagcttttttttttctgcatttttggttttatgcttatctaaattcacgcaaggcgttggcaccacagagaaggaagaatctttatctcctttggaattgaatattttacaaaacaaattcgcctcctactatgcaaacgacactatcaccgtgaaaggtattactattggcggctggttggtaacagaaccttatatcacgccatctttatatcgtaatgctacgtccttggcaaaacagcaaaactcttccagcaatatctccattgtcgacgaatttactctttgtaaaaccttaggatataacacctctttgactttattggataatcacttcaaaacttggattacagaggatgattttgaacaaatcaaaaccaacggtttcaatttagttaggatccccatcggatattgggcgtggaaacaaaatactgataaaaacttgtacatcgataacataactttcaatgatccatacgtaagtgatggattacaattgaaatatttaaataatgctctcgaatgggcgcaaaagtacgaattgaatgtatggttagatttgcatggtgctcctggatcccagaatggattcgataattccggtgaaagaatactctatggcgatttaggctggttaaggttgaataatactaaagaattgactttggctatttggagagatatgttccagacatttttaaataaaggtgacaaaagtcctgtggtgggtattcaaatcgtcaacgaaccgcttggtggcaaaatcgatgtttctgacataacggagatgtattacgaagcatttgacttgctcaagaaaaatcagaatagtagtgacaacactacgtttgttattcatgacggttttcaaggaatcggtcactggaacttggagttgaacccaacctaccagaatgtatctcatcattatttcaatttgactggtgcaaattacagctctcaagatatattggtcgaccatcatcattatgaagtgtttactgatgcgcaattggccgaaactcagtttgcacgtattgaaaacattatcaattatggggactctatccacaaagaactttcttttcacccagcagtagtcggagaatggtctggcgctattactgattgtgcaacctggttaaatggtgttggggtgggtgcacgttacgatggatcttactacaatacaacgttgtttaccaccaacgacaagccagttggaacatgtatatcccaaaatagcttagctgattggacgcaagattaccgtgaccgtgtgagacaattcattgaggcacagttggccacttattcttctaaaacaacgggatggattttttggaattggaagaccgaagacgccgtagaatgggattatttgaagttgaaagaagctaaccttttcccttcccctttcgacaactacacgtacttcaaagcagatggatctatcgaagaaaaattctcttcctctttaagtgcacaggcatttccaagaacaacgtcttctgttttgtcctccactacgacttccaggaagagtaagaatgctgcaatttctaataaattaacaacttctcagcttttaccaatcaaaaatatgagtttgacctggaaagcgagcgtatgcgcactcgctatcaccattgccgctctttgcgcttctctttga

SEQ ID NO: 2301 - DNA, 819 bp, Saccharomyces cerevisiae
atgatattcaatctacctgttagtgtgctgctttatttttctttgatatgggcaatggagcctagtttcgtaagaggtaagaacgtcgtcaacttaattactttcaaagattcaaatggcaagctgcacaagcggttagcaccagaggaaataccgccccggctacataattctcaagtaaattcttatccattaggatataagggaatgcgtgacttttcaagacccgcagtgaatttagatgatattttagggacacagcaaagaaagcagcaagagtttttggctgaattgtctcctttatccttagaatcaaagttgtcattagtgaacgaggtccaaatatttgcaagctatgtgcgaaatgatgttgaaacatataacaaagtaagtgaccccaacgaagatttgattattattgcaccaacgaacagggctgtctctcagcttactttaaaaccgtggcaatttccgaataatattgataagcttgaaagtgatggtgccaccgagaaggaacttgatacggcaatacaagagaatatctccaaatttgtgagatctcatattgtagtgtacaatgatgataaaaattcctacaagaaggtgagtccaggatgtacgctcctgcagagtattgacttcacagaaagcaagaaaagcgattcggaaactggtggtgatattttactcaaaaaagaaggagaagtatattatgtagcttcctccagagacgagaaatttcatgccgtcgagagcattgaaaatggaagcaatggtgttattttgatggttgatttcaccctggtgggtccttag

SEQ ID NO: 2302 - DNA, 819 bp, Artificial Sequence
  Description of Artificial Sequence: Synthetic polynucleotide
atgatattcaatttacctgttagtgtgttgctttatttttctttgatatgggcaatggagcctagtttcgtaagaggtaagaacgtcgtcaacttaattactttcaaagattctaatggcaagttgcacaagagattagcaccagaggaaataccgcccaggttacataattctcaagtaaattcttatccattaggatataagggaatgcgtgacttttccagacccgcagtgaatttagatgatattttagggacacagcaaagaaagcagcaagagtttttggctgaattgtctcctttatccttagaatccaagttgtctttagtgaacgaggtccaaatatttgcaagctatgtgagaaatgatgttgaaacatataacaaagtaagtgaccccaacgaagatttgattattattgcaccaacgaacagggctgtctctcagcttactttaaaaccgtggcaatttccgaataatattgataagcttgaaagtgatggtgccaccgagaaggaacttgatacggcaatacaagagaatatctccaaatttgtgagatctcatattgtagtgtacaatgatgataaaaattcctacaagaaggtgagtccaggatgtacgctcttacagagtattgacttcacagaaagcaagaaaagcgattctgaaactggtggtgatattttactcaaaaaagaaggagaagtatattatgtagcttcctccagagacgagaaatttcatgccgtcgagagcattgaaaatggaagcaatggtgttattttgatggttgatttcaccttagtgggtccttga

SEQ ID NO: 2303 - DNA, 1293 bp, Saccharomyces cerevisiae
atgggaatacctggcttactgcctcaattaaagagaattcaaaaacaggtgtccctgaaaaaatacatgtatcaaacattagccattgatggttatgcgtggctacacagggcttcttgtgcgtgtgcttttgaacttgtgatgaataagccaacaaacaaatacttgcaatttttcattaaaaggctgcaactcctaaaacgccttaagatcaagccatatatagtttttgatggtgattccctttttgtgaaaaatcatacagaaactagaagaagaaagaaaaggttagaaaacgaaatgattgcaaagaaattgtggtcagccggcaacagatataatgcaatggaatattttcaaaaaagtgttgacatcacaccagaaatggcgaaatgtattattgattattgcaaactacattcaattccctacattgttgcaccatttgaagcagatccgcaaatggtttacttggaaaaaatgggccttatacagggtatcatatcagaagattctgatttgttggtctttggttgtaaaacactcataacaaagttaaatgatcagggaaaagctttagaaatctcaaaagacgatttttcagctttacctgaaaatttccctctaggagaattaagtgaacaacaatttcgtaatctagtttgtttagcagggtgtgattacactagcggaatttggaaagtgggtgtagtcactgctatgaagattgtgaaacggtattctgaaatgaaagacatccttatacaaatagaacggacagaaaaactttgtttcagtaaggcgttcaagcagcaggttgagttcgccaattatgcgtttcaataccaaagagtgttttgtcctctatcaaatcagattacaactttaaataatattcctaaagcagtcacaaattcccacgctgaaattattaaaattatgaaatgtattggttccgttgttgaaaggggatcaggggtacgaaaagatgtcattaatactaaaaatattgatcacaaagttcatgaaatgatagcaaaaggggagttgcaccctgtagatatggcttctaaacttattaatagagaaagaaaattaaaagcaagaaagctgtttaaagtaggtctacttgggggtgaatccaactcattcaataagaaagtggagcaaccgctagtggatacgcaggacgtgttatcggagagggagaattctcttgataacaaaaacgcatcctctatttatatgacctcaccagcagcgatctcaggcaccgtaccatcaattttctaa

SEQ ID NO: 2304 - DNA, 1293 bp, Artificial Sequence
  Description of Artificial Sequence: Synthetic polynucleotide
atgggaatacctggcttattgcctcaattaaagagaattcaaaaacaggtgtccttgaaaaaatacatgtatcaaacattagccattgatggttatgcgtggttgcacagggcttcttgtgcgtgtgcttttgaacttgtgatgaataagccaacaaacaaatacttgcaatttttcattaaaaggttacaactcttgaaacgccttaagatcaagccatatatagtttttgatggtgattccctttttgtgaaaaatcatacagaaactagaagaagaaagaaaaggttagaaaacgaaatgattgcaaagaaattgtggtctgccggcaacagatataatgcaatggaatattttcaaaaaagtgttgacatcacaccagaaatggcgaaatgtattattgattattgcaaattgcattctattccctacattgttgcaccatttgaagcagatccgcaaatggtttacttggaaaaaatgggccttatacagggtatcatatctgaagattctgatttgttggtctttggttgtaaaacactcataacaaagttaaatgatcagggaaaagctttagaaatctccaaagacgatttttctgctttacctgaaaatttccctttgggagaattaagtgaacaacaatttcgtaatttggtttgtttagcagggtgtgattacactagcggaatttggaaagtgggtgtagtcactgctatgaagattgtgaaaagatattctgaaatgaaagacatccttatacaaatagaaagaacagaaaaactttgtttcagtaaggcgttcaagcagcaggttgagttcgccaattatgcgtttcaataccaaagagtgttttgtcctttatccaatcagattacaactttaaataatattcctaaagcagtcacaaattcccacgctgaaattattaaaattatgaaatgtattggttccgttgttgaaaggggatctggggtaagaaaagatgtcattaatactaaaaatattgatcacaaagttcatgaaatgatagcaaaaggggagttgcaccctgtagatatggcttctaaacttattaatagagaaagaaaattaaaagcaagaaagttatttaaagtaggtttacttgggggtgaatccaactctttcaataagaaagtggagcaaccgttggtggatacgcaggacgtgttatctgagagggagaattctcttgataacaaaaacgcatcctctatttatatgacctctccagcagcgatcagtggcaccgtaccatctattttctga

SEQ ID NO: 2305 - DNA, 2295 bp, Saccharomyces cerevisiae
atggtgaacgaattagagaatgtgccacgggcgtcgaccttgacgaatgaagagcaaacggttgatcctagcaataacgactcacaggaagatattagtctgggtgattctaacgaaattacttcgttggcatcattaaaggctatccgatcaggaaatgaagaggaaagcgggaacgagcaggtgaatcataatgatgaggccgaagaagatcctctgttaactcgctaccataccgcttgccaaagaggtgatctagcgactgtcaaagaaatgatacatggaaagttgctcgaagttaataacgacggtgactctacggaacatatcactggtttgcattgggcaagtattaataacagactttctgtagtggattttctagtttcacaaggcgctgatgtcaatgcaagggctggtgctttgcatgccacaccattacattgggctgcaaggtatgggtacgtgtacattgtcgattttttgcttaagcatggagctgatcccaccatgaccgatgaccaaggtttcaatctactacacttatctgtgaacagctcaaatataatgctagttctatacgttttattcaacgttgtcagcaaaggtcttttagatatagattgccgagacccaaagggcagaacttcactactatgggctgcttaccagggagattccctaactgtagcagaattgttgaaatttggtgccagcataaagatcgcagatacagaaggattcaccccactgcactggggcactgtaaaagggcaaccacatgtactaaaatacttgattcaagatggtgcagattttttccaaaaaacggataccggaaaagattgctttgctattgctcaagaaatgaacactgtgtactcacttagagaggctctaacacattctggattcgactaccatggttatcccattaaaaaatggttcaaaaaaagtcaacatgctaagctcgttacattcataacgccatttctatttctaggaatcgcatttgctcttttctctcatattaaccctttgtttgtaatcattgtcctttttttattggccattgccactaacaaaggcttgaacaaattcgttctgccgtcatatggacgaatgggtgtccacaacgttaccttgttaaggtcacctttgttatccggtgttttttttggcactttactttgggtgactatcgtttggtttttcaaagttatgcctcgaacattttctgatgaacaatatactaacatcctaatgctggtaatacttgtttctgtattttacctttttgggcagcttgttattatggacccaggatgtttgccagaagaaactgatcatgagaacgtgcgacaaacaatctcgaacttgctcgaaatcggtaaatttgatacgaagaacttttgtatcgaaacttggattagaaaacctctaagaagcaaattttcgcccttaaacaatgctgtggttgcaagatttgatcattactgcccttggatctttaatgatgtcggactcaaaaatcacaaagcatttatattttttattacattaatggaaagtggtattttcacatttcttgcactttgcctggaatattttgatgaacttgaagatgcacacgaagatacatcccagaaaaatggcaaatgtttcatcctaggcgcttcagatctctgttcgggattaatatatgatagatttgtctttctgatattattatgggctttactccaatctatttgggttgcaagtttgatcttcgtccaagcctttcaaatatgtaaaggaatgaccaatacagaattcaatgttttgatgaaagagagtaagtccattggccccgatgggttatctttcaatgaaaacttcaatactactccagaaggatttgcgccgtcgattgatccgggtgaggagagtaatgatactgtactagcaccagtcccaggctcaacgataaggaaaccacgcacttgttttggcgtttgttacgcggtgactggtatggatcagtggttagcggttataaaagaaaccattggcatcaaggatagcaccggacataatgtgtattcgattacatcaagaataccaacaaattacggttggaaaagaaatgttaaagacttttggcttacaagcgatataaatgcgcctttgtggaggcgaattttgtatcctccttcgggctctaaagctttgctcaacgggatagaagttgactattttaagctttacaaattgccaaataaggatgttgaacaaggaaatgatatggtatga

SEQ ID NO: 2306 - DNA, 2295 bp, Artificial Sequence
  Description of Artificial Sequence: Synthetic polynucleotide
atggtgaacgaattagagaatgtgccaagggcgagtaccttgacgaatgaagagcaaacggttgatcctagcaataacgactctcaggaagatattagtttgggtgattctaacgaaattacttctttggcatctttaaaggctatcagatctggaaatgaagaggaaagcgggaacgagcaggtgaatcataatgatgaggccgaagaagatcctttattaactcgctaccataccgcttgccaaagaggtgatttggcgactgtcaaagaaatgatacatggaaagttgctcgaagttaataacgacggtgactctacggaacatatcactggtttgcattgggcaagtattaataacagactttctgtagtggattttttggtttctcaaggcgctgatgtcaatgcaagggctggtgctttgcatgccacaccattacattgggctgcaaggtatgggtacgtgtacattgtcgattttttgcttaagcatggagctgatcccaccatgaccgatgaccaaggtttcaatttattacacttatctgtgaacagcagtaatataatgcttgttctttacgttttattcaacgttgtcagcaaaggtcttttagatatagattgcagagacccaaagggcagaacttctttattatgggctgcttaccagggagattccttgactgtagcagaattgttgaaatttggtgccagcataaagatcgcagatacagaaggattcaccccattacactggggcactgtaaaagggcaaccacatgtattgaaatacttgattcaagatggtgcagattttttccaaaaaacggataccggaaaagattgctttgctattgctcaagaaatgaacactgtgtactctcttagagaggctttaacacattctggattcgactaccatggttatcccattaaaaaatggttcaaaaaaagtcaacatgctaagctcgttacattcataacgccatttttgtttttgggaatcgcatttgctcttttctctcatattaaccctttgtttgtaatcattgtcctttttttattggccattgccactaacaaaggcttgaacaaattcgttttaccgagctatggaagaatgggtgtccacaacgttaccttgttaaggtctcctttgttatccggtgttttttttggcactttactttgggtgactatcgtttggtttttcaaagttatgcctagaacattttctgatgaacaatatactaacatcttgatgttggtaatacttgtttctgtattttacctttttgggcagcttgttattatggacccaggatgtttgccagaagaaactgatcatgagaacgtgagacaaacaatctccaacttgctcgaaatcggtaaatttgatacgaagaacttttgtatcgaaacttggattagaaaacctttgagaagcaaattttctcccttaaacaatgctgtggttgcaagatttgatcattactgcccttggatctttaatgatgtcggactcaaaaatcacaaagcatttatattttttattacattaatggaaagtggtattttcacatttcttgcactttgcttagaatattttgatgaacttgaagatgcacacgaagatacatcccagaaaaatggcaaatgtttcatcttgggcgcttctgatctctgttctggattaatatatgatagatttgtctttttaatattattatgggctttactccaatctatttgggttgcaagtttgatcttcgtccaagcctttcaaatatgtaaaggaatgaccaatacagaattcaatgttttgatgaaagagagtaagtccattggccccgatgggttatctttcaatgaaaacttcaatactactccagaaggatttgcgccgtctattgatccgggtgaggagagtaatgatactgtattggcaccagtcccaggctctacgataaggaaaccacgcacttgttttggcgtttgttacgcggtgactggtatggatcagtggttagcggttataaaagaaaccattggcatcaaggatagcaccggacataatgtgtattctattacatctagaataccaacaaattacggttggaaaagaaatgttaaagacttttggcttacaagcgatataaatgcgcctttgtggaggagaattttgtatcctccttccggctctaaagctttgctcaacgggatagaagttgactattttaagctttacaaattgccaaataaggatgttgaacaaggaaatgatatggtatga

SEQ ID NO: 2307 - DNA, 1014 bp, Saccharomyces cerevisiae
atgaagaatgataataagttgcaaaaggaagcacttatgcgactatcgcagctaagatttccatttgccgatgctccaagtatagtacaagcgcatcaaaaagatgaacaaatccagggccttttgattatgaaagtgactgaattgtgcaaattgataaagagtcaattgtttgttaactcttaccctaaggaactgtccatatttgccaagctcctgtatttgctctttactacaggaagacgtggtagaacgttaggtgaggaatatgttgacttgacatacactaataggaagggtaccagacttgcaggacggctcaaaatgattgtattcgctttcgcttatcctttatgtccatatttcatcaccaaactatacaagaaaataatgaagaacaacaaggaaagtaaaattgaagatactgaaagtgttgccgcgttttgtaagggccttttagatttcattttagacgtacacatgaccctcttttatttcaaaggagctttttacagtatttccaaaaggatttttggtatgagatatgtttttaaacatatattgtcaaaaaatgaggccaattttagagaagagggctcacaaaagtacaaagtattaggttatatcctattagctcaaaatgttatgaaatggtaccctgtcctaacctctacgctcgggtcctggatttatgggagaaaaaggaccaatgattcaattactaggtcgtctgttggtctacaggagcgttcagaacatgaatctatagaaggcataccgaaggaatcgcagctgactcatataaatttgtcagataaaaaccaattgccatttattccagaagcctcgagaaaatgcatcctatgtctcatgaacatgagtgatcctagctgcgcgccatgtggacatctattttgttggagttgtcttatgagctggtgtaaagagaggccagaatgccccttgtgcagacaacactgtcaaccacaggaaattctggtcctgcggcaatag

SEQ ID NO: 2308 - DNA, 1014 bp, Artificial Sequence
  Description of Artificial Sequence: Synthetic polynucleotide
atgaagaatgataataagttgcaaaaggaagcacttatgagattatctcagttaagatttccatttgccgatgctccaagtatagtacaagcgcatcaaaaagatgaacaaatccagggccttttgattatgaaagtgactgaattgtgcaaattgataaagagtcaattgtttgttaactcttaccctaaggaattatccatatttgccaagctcttatatttgctctttactacaggaagacgtggtagaacgttaggtgaggaatatgttgacttgacatacactaataggaagggtaccagacttgcaggaagactcaaaatgattgtattcgctttcgcttatcctttatgtccatatttcatcaccaaactttacaagaaaataatgaagaacaacaaggaaagtaaaattgaagatactgaaagtgttgccgcgttttgtaagggccttttagatttcattttagacgtacacatgaccctcttttatttcaaaggagctttttacagtatttccaaaaggatttttggtatgagatatgtttttaaacatatattgagtaaaaatgaggccaattttagagaagagggctctcaaaagtacaaagtattaggttatatcttattagctcaaaatgttatgaaatggtaccctgtcttgacctctacgctcgggtcctggatttatgggagaaaaaggaccaatgattctattactaggtcttctgttggtttacaggagcgttctgaacatgaatctatagaaggcataccgaaggaatctcagttgactcatataaatttgagtgataaaaaccaattgccatttattccagaagcctctagaaaatgcatcttgtgtctcatgaacatgagtgatcctagctgcgcgccatgtggacatttattttgttggagttgtcttatgagctggtgtaaagagaggccagaatgccccttgtgcagacaacactgtcaaccacaggaaattttagtcttgagacaatga

SEQ ID NO: 2309 - DNA, 1920 bp, Saccharomyces cerevisiae
atgagcgaatcagtgaaagaaaacgttactccgacacgtaacttccgtcgtactcaagggccccaaaataatacaaaacctcacaacgacaggaagaatttcagaagaaagcaaaagaaaaataacctttctgctgaacccaacctcaccacttcaagcgcagatgatactgatgaagaaaatgaattatgtgtaatttgtgcgcgcaagttaacatacgtatctctaacaccatgccatcataagacatgccatatctgtggtttcagacaacgagctttgtacaacaagaaaagctgtttgatttgcagaacggagaatgaagaagtcatgtttaccgatcgcatagatggtgatatttcagataaatataacttttgcgaaaaaaatgaaaaatatggaataaatttcactagcgaagaggttgctaccgaaacactaaatcttttaaaatttttttgtcccctatcgaaggatgaacaagtttgtgactttggtagtttcaagaaatataatgaacacttgaaatctgaacataacagaatgatctgtttaatatgtgcaacccataagcatgcattcccttgtgagcttgaaatattcacccaaaatcaattacgcaaccatcaaactaagggtaattcagaaggattcaaaggccaccctatgtgtgccttctgttccggaaaacgattttattcagacgacgaattgtacattcacatgagaaatcagcatgaaaagtgccatatttgtgataagatgaaccccgcttctcctcaatactttaaggattataatcagctttttgaccactttaaacattcgcattacgtttgcaccgtccaaacttgcttagataacaagtttgtcgtatttaaagacgagttggagttacaagcccacattttgcaggagcatggtaatatcctgaagggaaagccaaagtttttccagtcagaactttctacttttatctcggctccatctagagtgatcagggaaagagatgattacgaccttccatctatatcttccctaccgggttcatcatccggctctagaactgatgtgagatctgctagttctcccgaggaaagtagactaagattggcagaaagagcaaaatactatctggaaaattccaaagaagacttcaataagttttcttcttataacgaagattattctaaaggtcgcttaagtgctgaaaaattattggaatcatataaattgttattcacaaaaccaaatgcggatgtatatttattgattcataacttagctgaaacctttcccaaaaactcctccaaatacaataatctgaacgccatatatgaacaaagagagcaaacccttgcacgacaaacttcactaccttctttatctagtgattcttccctttcaatgtcaataggcaggggccattggggtggaacaaacgatgggggcagcgctggtgcagcattaggcgttaggaatatcaaaaatcttccaaccctgaaaagtccttcagcgtcgtatgatccctttgcaaccaccgtaaaaaaaaacactctgagacccgtgcaaaacattaaaagaactacacctcaatcagttagttatcgaacttccactaatacagtcgccttctctccaacctatttggaaagtaaaaagggttcctcttctacttctctaaataatagcaaagataaattgaaaagtctcaacctacctcaactacctccaccaaagccaaaggtgcaaattccaggtctgaacagaccccaaattgctgatcctaagcagtggggtaaaaagtcaagcacacaagatactaacgtgcacgataatttgagggaattgaacacaactagtggaggaaataaaaagaaaggcaaacaaaagcagctgttattccacattggtgtatag

SEQ ID NO: 2310 - DNA, 1920 bp, Artificial Sequence
  Description of Artificial Sequence: Synthetic polynucleotide
atgagcgaatctgtgaaagaaaacgttactccgacacgtaacttccgtcgtactcaagggccccaaaataatacaaaacctcacaacgacaggaagaatttcagaagaaagcaaaagaaaaataacctttctgctgaacccaacctcaccacttccagcgcagatgatactgatgaagaaaatgaattatgtgtaatttgtgcgcgcaagttaacatacgtatctttaacaccatgccatcataagacatgccatatctgtggtttcagacaaagagctttgtacaacaagaaaagctgtttgatttgcagaacggagaatgaagaagtcatgtttaccgatcgcatagatggtgatatttctgataaatataacttttgcgaaaaaaatgaaaaatatggaataaatttcactagcgaagaggttgctaccgaaacattaaatcttttaaaatttttttgtcccttatccaaggatgaacaagtttgtgactttggtagtttcaagaaatataatgaacacttgaaatctgaacataacagaatgatctgtttaatatgtgcaacccataagcatgcattcccttgtgagcttgaaatattcacccaaaatcaattacgcaaccatcaaactaagggtaattctgaaggattcaaaggccaccctatgtgtgccttctgttccggaaaaagattttattctgacgacgaattgtacattcacatgagaaatcagcatgaaaagtgccatatttgtgataagatgaaccccgcttctcctcaatactttaaggattataatcagctttttgaccactttaaacattctcattacgtttgcaccgtccaaacttgcttagataacaagtttgtcgtatttaaagacgagttggagttacaagcccacattttgcaggagcatggtaatatcttgaagggaaagccaaagtttttccagtctgaactttctacttttatctctgctccatctagagtgatcagggaaagagatgattacgaccttccatctatatcttccttaccgggttcttcttccggctctagaactgatgtgagatctgctagttctcccgaggaaagtagattgagattggcagaaagagcaaaatactatttggaaaattccaaagaagacttcaataagttttcttcttataacgaagattattctaaaggtcgcttaagtgctgaaaaattattggaaagttataaattgttattcacaaaaccaaatgcggatgtatatttattgattcataacttagctgaaacctttcccaaaaactcctccaaatacaataatttgaacgccatatatgaacaaagagagcaaacccttgcaagacaaacttctttgccttctttatctagtgattcttccctttctatgagtataggcaggggccattggggtggaacaaacgatgggggcagcgctggtgcagcattaggcgttaggaatatcaaaaatcttccaaccttgaaaagtccttctgcgtcttatgatccctttgcaaccaccgtaaaaaaaaacactttgagacccgtgcaaaacattaaaagaactacacctcaatctgttagttatagaacttccactaatacagtcgccttctctccaacctatttggaaagtaaaaagggttcctcttctacttctttgaataatagcaaagataaattgaaaagtctcaacttgcctcaattacctccaccaaagccaaaggtgcaaattccaggtttgaacagaccccaaattgctgatcctaagcagtggggtaaaaagagcagcacacaagatactaacgtgcacgataatttgagggaattgaacacaactagtggaggaaataaaaagaaaggcaaacaaaagcagcttttattccacattggtgtatga

SEQ ID NO: 2311 - DNA, 993 bp, Saccharomyces cerevisiae
atggcgtctatcaatctgattaagtctttgaaactttacaaggaaaagatatggtcttttgacttttctcaaggtatattagcaacaggttcaactgatcgaaaaattaagctagttagcgtgaaatatgacgattttacgttaattgatgtgctagatgagactgctcataaaaaggcgattcgatctgtggcgtggagacctcacacttcgctgttagcggctggctcttttgattccactgtatctatctgggctaaggaagaatctgctgacagaactttcgagatggacctgctagctattatcgaaggtcacgaaaatgaagtaaaaggtgtagcgtggtcgaatgatggatattacctagcaacctgttccagagataaaagcgtgtggatatgggaaacagatgaaagtggcgaggaatatgagtgtattagtgttttgcaagaacattcacaagacgttaaacatgttatatggcatccatctgaagcattactggcttcaagttcttatgatgacaccgtcaggatatggaaagactatgacgatgactgggaatgtgttgctgtcttaaatggccatgaaggaactgtttggtcttctgattttgacaagactgagggcgtgtttagactgtgcagtggaagcgacgattccactgtacgggtatggaaatacatgggtgacgacgaggatgatcaacaagaatgggtttgtgaagctattctcccggatgtacacaaaagacaggtatacaatgttgcatggggctttaatggcctcattgctagtgtaggagcggatggagtactagcggtctatgaagaagtagacggagaatggaaagtttttgctaaacgtgcattatgtcatggagtttatgaaatcaacgttgtgaagtggttggagttaaatggtaaaactatacttgcaacaggcggtgacgacgggatcgtaaatttctggtctctagaaaaagcagcgtag

SEQ ID NO: 2312 - DNA, 993 bp, Artificial Sequence
  Description of Artificial Sequence: Synthetic polynucleotide
atggcgtctatcaatttaattaagtctttgaaactttacaaggaaaagatatggtcttttgacttttctcaaggtatattagcaacaggttctactgataggaaaattaagttggttagcgtgaaatatgacgattttacgttaattgatgtgttggatgagactgctcataaaaaggcgattagatctgtggcgtggagacctcacacttctttattagcggctggctcttttgattccactgtatctatctgggctaaggaagaatctgctgacagaactttcgagatggacttattagctattatcgaaggtcacgaaaatgaagtaaaaggtgtagcgtggtctaatgatggatattacttggcaacctgttccagagataaaagcgtgtggatatgggaaacagatgaaagtggcgaggaatatgagtgtattagtgttttgcaagaacattctcaagacgttaaacatgttatatggcatccatctgaagcattattagcttccagttcttatgatgacaccgtcaggatatggaaagactatgacgatgactgggaatgtgttgctgtcttaaatggccatgaaggaactgtttggtcttctgattttgacaagactgagggcgtgtttagattgtgcagtggaagcgacgattccactgtaagagtatggaaatacatgggtgacgacgaggatgatcaacaagaatgggtttgtgaagctattctcccggatgtacacaaaagacaggtatacaatgttgcatggggctttaatggcctcattgctagtgtaggagcggatggagtattggcggtctatgaagaagtagacggagaatggaaagtttttgctaaacgtgcattatgtcatggagtttatgaaatcaacgttgtgaagtggttggagttaaatggtaaaactatacttgcaacaggcggtgacgacgggatcgtaaatttctggtctttggaaaaagcagcgtga

SEQ ID NO: 2313 - DNA, 1140 bp, Saccharomyces cerevisiae
atgtcgaataagcaggcggttctgaagttaatcagtaaaaggtggataagcacagtgcaacgtgccgattttaagctgaattccgaagcgcttcatagtaatgctacggtatttagtatgattcagccaactgggtgtttccaccttggtaattatctaggtgctacacgtgtttggacagacttatgtgaattaaaacaacctggccaggaattgatatttggagttgctgatttacacgctatcactgttccaaagccagatggagaaatgtttagaaaatttcgccatgaggcagtagcaagtatactggctgtcggtgtagatccagaaaaggcttcggtgatctaccaatccgccatccctcaacacagtgaattacactggttgctttctactcttgcctcgatgggattacttaaccgcatgacgcaatggaaatcaaaatcgaatatcaaacaatcaactaatggggattatctggttaacgattctgacgtgggaaaagttagactgggcttattttcgtatcctgttttacaggcagcggatattctactttataaatctacacacgttcctgttggcgatgatcaatcgcagcatttggaactaacaagacaccttgctgaaaagtttaacaaaatgtacaagaaaaatttttttcctaaacctgtaactatgttggcacaaacgaaaaaagttttgagcttaagcacgcctgaaaagaaaatgtccaagagtgatccgaatcacgactctgtaatttttttgaatgatgagcctaaggcaattcagaaaaagattagaaaagctttaacagattccatttctgataggttctactacgaccctgtagaaagaccaggcgtatcgaatttaattaacattgtcagtggcattcaaagaaaatcgattgaagatgtcgtagaagatgtatctcgtttcaataactatagggatttcaaagattatgtttcagaagtgataattgaggaattgaaaggcccaagaacagaatttgagaaatatatcaacgaaccgacctatttgcatagtgtcgttgaatctggcatgcgcaaagcgagagaaaaagcagcaaaaaacctggccgacattcataaaataatgggcttctga

SEQ ID NO: 2314 - DNA, 1140 bp, Artificial Sequence
  Description of Artificial Sequence: Synthetic polynucleotide
atgagtaataagcaggcggttttgaagttaatcagtaaaaggtggataagcacagtgcaacgtgccgattttaagttgaattccgaagcgcttcatagtaatgctacggtatttagtatgattcagccaactgggtgtttccaccttggtaattatttgggtgctacacgtgtttggacagacttatgtgaattaaaacaacctggccaggaattgatatttggagttgctgatttacacgctatcactgttccaaagccagatggagaaatgtttagaaaatttcgccatgaggcagtagcaagtatattggctgtcggtgtagatccagaaaaggcttctgtgatctaccaatccgccatccctcaacacagtgaattacactggttgctttctactcttgcctctatgggattacttaaccgcatgacgcaatggaaatctaaatctaatatcaaacaatctactaatggggattatttggttaacgattctgacgtgggaaaagttagattgggcttattttcttatcctgttttacaggcagcggatattttactttataaatctacacacgttcctgttggcgatgatcaatctcagcatttggaattaacaagacaccttgctgaaaagtttaacaaaatgtacaagaaaaatttttttcctaaacctgtaactatgttggcacaaacgaaaaaagttttgagcttaagcacgcctgaaaagaaaatgtccaagagtgatccgaatcacgactctgtaatttttttgaatgatgagcctaaggcaattcagaaaaagattagaaaagctttaacagattccatttctgataggttctactacgaccctgtagaaagaccaggcgtatctaatttaattaacattgtcagtggcattcaaagaaaatccattgaagatgtcgtagaagatgtatctcgtttcaataactatagggatttcaaagattatgtttctgaagtgataattgaggaattgaaaggcccaagaacagaatttgagaaatatatcaacgaaccgacctatttgcatagtgtcgttgaatctggcatgcgcaaagcgagagaaaaagcagcaaaaaacttggccgacattcataaaataatgggcttctga

SEQ ID NO: 2315 - DNA, 3015 bp, Saccharomyces cerevisiae
atgagagaagtgatacttgctgtacatggaatgacatgcagcgcctgtactaatacaatcaatacgcagttacgagctttaaagggtgtaacaaaatgtgatattagtttagtgactaatgagtgccaggtgacatacgataacgaggttaccgccgattctattaaggaaattatagaggattgtggatttgactgtgagatactaagagattctgaaattacagccataagtacgaaggaaggactactgagtgtacaaggtatgacctgtgggtcttgtgtttctacagtcaccaaacaagtggaaggcattgagggtgttgaatcggtagtcgtttccttggtaacggaagagtgccatgttatttatgaaccgtccaagacaacgctagaaaccgccagagaaatgattgaagactgtggatttgactcaaatattattatggatggcaacgggaatgcagacatgaccgaaaaaacggtgatcttgaaagtaactaaggctttcgaggacgaatccccactcatactttcttcagtaagcgaaaggtttcaatttttgttagacctaggtgtaaaatcgatagaaatttctgatgatatgcacacactcaccataaaatactgttgtaacgaactcggcattagagatttattgaggcaccttgagaggaccggatataaattcactgtattttccaatttagataatactacccagttaaggcttctctctaaagaggacgagataagattctggaaaaaaaacagcataaaatccacccttttggctataatatgtatgctattgtatatgattgtccctatgatgtggccaacaattgttcaggaccgcatattcccttacaaagaaacctcctttgttagaggtctgttctacagagatattttgggtgtaatattggcaagctatattcagttcagcgttggtttttacttttacaaggcagcatgggcatctttaaagcacggttcaggaaccatggatacactagtttgtgtttccactacttgtgcatacacattttctgtgttttctttagttcacaatatgttccatccctcaagtactggcaaactcccaaggatcgttttcgacacatcaatcatgatcatttcatatatttccatcgggaaatatttggaaactttagctaaatcacaaacatcaaccgcactttctaaattaattcagctcactccatcggtgtgttcaattatatctgacgtggagcggaatgaaaccaaggaaattcccatagaattattgcaagtgaacgatatagtggagattaaaccagggatgaaaattcctgctgatggcatcataacaagaggtgaatctgaaattgacgagtcgttaatgacaggcgaatccattttggtgcccaagaaaactggttttccggttattgctggttctgttaatggacctggacatttctacttcagaactactaccgttggggaggaaactaaattagcaaatattatcaaggtaatgaaagaagcacaattgagtaaagctcccattcaggggtatgcagattatttagcctctatttttgttccggggatcctaattttggcagtattgactttctttatttggtgttttattttaaacatctcggctaatcctcccgtcgctttcaccgcaaatactaaggctgataatttttttatttgcttacaaactgctacttctgttgtcatcgtcgcatgcccatgtgcattgggacttgccacgccgactgctataatggtgggtacaggggttggagctcagaatggtgtcttaataaagggcggagaagtattggaaaaattcaatagtattactacttttgtttttgataaaacaggtaccttaactacaggttttatggttgtgaaaaagttccttaaagattcaaattgggttggaaacgtggatgaagacgaagttctcgcctgtataaaagcaacggaatccattagtgaccatccagtttcgaaagcaattatacgttattgtgatggtttgaactgtaataaggctttaaatgccgttgttttagaaagcgaatacgtgcttggaaagggaatagtctcaaagtgtcaagttaatggaaatacttatgatatttgtattgggaacgaggcgctgattttggaggatgcattaaaaaaatccggatttattaacagtaatgtcgaccaaggaaacactgtatcatacgtatcagtaaacgggcatgtgtttggcttgttcgagattaatgatgaagttaaacatgattcttacgcaacagttcagtatctacaaagaaatggatatgaaacgtatatgattactggcgataataactcagcagcaaaaagagtcgctagagaagtaggtataagcttcgaaaatgtttacagcgatgtgtcacccacaggcaaatgtgatctcgtgaaaaaaattcaagataaagaaggtaataacaaggttgctgttgttggcgatggcattaacgacgctcccgctttagcactgagtgatctaggtattgccatttcaacaggtacggagattgctattgaagcagctgatattgttatactgtgcggtaatgatctgaatactaatagtttgagaggactggccaacgccatcgatatttcactaaaaacgttcaaaagaataaagctgaatttgttctgggcactttgctataatatattcatgattccgattgctatgggtgtgctcattccttggggcataactcttcctccaatgctcgccggtttagcgatggcattcagctcggtcagtgtcgttctaagttcattgatgttgaagaagtggactccaccggatattgaatcacatgggatttcagatttcaagtccaaattttcgattgggaatttttggtcaaggcttttttctacgcgggctattgcaggtgagcaagacatagaatcacaggccggactaatgtcaaacgaagaagtcttgtaa

SEQ ID NO: 2316 - DNA, 3015 bp, Artificial Sequence
  Description of Artificial Sequence: Synthetic polynucleotide
atgagagaagtgatacttgctgtacatggaatgacatgcagcgcctgtactaatacaatcaatacgcagttaagagctttaaagggtgtaacaaaatgtgatattagtttagtgactaatgagtgccaggtgacatacgataacgaggttaccgccgattctattaaggaaattatagaggattgtggatttgactgtgagatattaagagattctgaaattacagccataagtacgaaggaaggacttttaagtgtacaaggtatgacctgtgggtcttgtgtttctacagtcaccaaacaagtggaaggcattgagggtgttgaaagtgtagtcgtttccttggtaacggaagagtgccatgttatttatgaaccgtccaagacaacgttagaaaccgccagagaaatgattgaagactgtggatttgactctaatattattatggatggcaacgggaatgcagacatgaccgaaaaaacggtgatcttgaaagtaactaaggctttcgaggacgaatccccactcatactttcttctgtaagcgaaaggtttcaatttttgttagacttgggtgtaaaatctatagaaatttctgatgatatgcacacactcaccataaaatactgttgtaacgaactcggcattagagatttattgaggcaccttgagaggaccggatataaattcactgtattttccaatttagataatactacccagttaaggcttctctctaaagaggacgagataagattctggaaaaaaaacagcataaaatccacccttttggctataatatgtatgcttttgtatatgattgtccctatgatgtggccaacaattgttcaggaccgcatattcccttacaaagaaacctcctttgttagaggtcttttctacagagatattttgggtgtaatattggcaagctatattcagttcagcgttggtttttacttttacaaggcagcatgggcatctttaaagcacggttctggaaccatggatacattagtttgtgtttccactacttgtgcatacacattttctgtgttttctttagttcacaatatgttccatcccagtagtactggcaaactcccaaggatcgttttcgacacatctatcatgatcatttcttatatttccatcgggaaatatttggaaactttagctaaatctcaaacatctaccgcactttctaaattaattcagctcactccatctgtgtgttctattatatctgacgtggagagaaatgaaaccaaggaaattcccatagaattattgcaagtgaacgatatagtggagattaaaccagggatgaaaattcctgctgatggcatcataacaagaggtgaatctgaaattgacgagtctttaatgacaggcgaatccattttggtgcccaagaaaactggttttccggttattgctggttctgttaatggacctggacatttctacttcagaactactaccgttggggaggaaactaaattagcaaatattatcaaggtaatgaaagaagcacaattgagtaaagctcccattcaggggtatgcagattatttagcctctatttttgttccggggatcttgattttggcagtattgactttctttatttggtgttttattttaaacatctctgctaatcctcccgtcgctttcaccgcaaatactaaggctgataatttttttatttgcttacaaactgctacttctgttgtcatcgtcgcatgcccatgtgcattgggacttgccacgccgactgctataatggtgggtacaggggttggagctcagaatggtgtcttaataaagggcggagaagtattggaaaaattcaatagtattactacttttgtttttgataaaacaggtaccttaactacaggttttatggttgtgaaaaagttccttaaagattctaattgggttggaaacgtggatgaagacgaagttctcgcctgtataaaagcaacggaatccattagtgaccatccagtttccaaagcaattatacgttattgtgatggtttgaactgtaataaggctttaaatgccgttgttttagaaagcgaatacgtgcttggaaagggaatagtctccaagtgtcaagttaatggaaatacttatgatatttgtattgggaacgaggcgttaattttggaggatgcattaaaaaaatccggatttattaacagtaatgtcgaccaaggaaacactgtatcttacgtatctgtaaacgggcatgtgtttggcttgttcgagattaatgatgaagttaaacatgattcttacgcaacagttcagtatttacaaagaaatggatatgaaacgtatatgattactggcgataataactctgcagcaaaaagagtcgctagagaagtaggtataagcttcgaaaatgtttacagcgatgtgtctcccacaggcaaatgtgatctcgtgaaaaaaattcaagataaagaaggtaataacaaggttgctgttgttggcgatggcattaacgacgctcccgctttagcattaagtgatttaggtattgccatttctacaggtacggagattgctattgaagcagctgatattgttatattgtgcggtaatgatttgaatactaatagtttgagaggattggccaacgccatcgatatttctttgaaaacgttcaaaagaataaagttgaatttgttctgggcactttgctataatatattcatgattccgattgctatgggtgtgctcattccttggggcataactcttcctccaatgctcgccggtttagcgatggcattcagctctgtcagtgtcgttttgagttctttgatgttgaagaagtggactccaccggatattgaaagtcatgggatttctgatttcaagtccaaattttctattgggaatttttggagcaggcttttttctacgagggctattgcaggtgagcaagacatagaatctcaggccggattaatgtccaacgaagaagtcttgtga

SEQ ID NO: 2317 - DNA, 825 bp, Saccharomyces cerevisiae
atgcaggttaaatcgattaaaatgagatgggagtctggtggtgttaattactgctatctattgtccgacagtaaaaataaaaaatcgtggctaatcgatccagcagagcctcctgaggttctgccagagttgactgaggatgagaaaataagtgttgaagcaattgttaatacacatcaccattatgaccatgcagatggtaacgctgatatcttgaagtatttaaaagagaaaaatccaacttcaaaagttgaggttataggagggtcaaaggactgcccaaaggttacgataattccggagaatttgaaaaagttacacctaggtgacttagagattacttgtattaggacgccctgccataccagagactctatctgttattatgtgaaagatccaacaacagatgagcgctgcatttttactggcgatacactatttaccgctggttgcggtaggttttttgagggtacaggcgaagaaatggatatagctctgaacaattctatcttagaaactgtgggcaggcagaactggagtaaaacgagggtttatccaggacacgaatacacaagtgataatgtaaagtttgttcgtaagatttacccgcaagttggtgaaaataaagcattggatgagttagaacaattctgctccaagcatgaagtcacagcagggcggttcactttgaaagatgaggtagaatttaatccattcatgagattagaagatccaaaggtccaaaaagctgccggagatacgaataattcatgggacagagctcaaattatggataaattgagagctatgaaaaaccgtatgtag

SEQ ID NO: 2318 - DNA, 825 bp, Artificial Sequence
  Description of Artificial Sequence: Synthetic polynucleotide
atgcaggttaaatccattaaaatgagatgggagtctggtggtgttaattactgctatcttttgtccgacagtaaaaataaaaaaagttggttgatcgatccagcagagcctcctgaggttttgccagagttgactgaggatgagaaaataagtgttgaagcaattgttaatacacatcaccattatgaccatgcagatggtaacgctgatatcttgaagtatttaaaagagaaaaatccaacttctaaagttgaggttataggagggtccaaggactgcccaaaggttacgataattccggagaatttgaaaaagttacacttgggtgacttagagattacttgtattaggacgccctgccataccagagactctatctgttattatgtgaaagatccaacaacagatgagcgctgcatttttactggcgatacattatttaccgctggttgcggtaggttttttgagggtacaggcgaagaaatggatatagctttgaacaattctatcttagaaactgtgggcaggcagaactggagtaaaacgagggtttatccaggacacgaatacacaagtgataatgtaaagtttgttcgtaagatttacccgcaagttggtgaaaataaagcattggatgagttagaacaattctgctccaagcatgaagtcacagcagggagattcactttgaaagatgaggtagaatttaatccattcatgagattagaagatccaaaggtccaaaaagctgccggagatacgaataattcttgggacagagctcaaattatggataaattgagagctatgaaaaaccgtatgtga

SEQ ID NO: 2319 - DNA, 1098 bp, Saccharomyces cerevisiae
atgggaaagaaaaatagaaagggaaaagaaaataatgctgctaaaacctcttttctaaaagtagagaatattaaaaacactaattcgggattggagcttccatcgcaagactatacaaacgttgaagaaaaagaaagtagcccgaaaactgactttccattaattacaaaggaacatgtaaacacgaaaactgacagcaatattctcgattatcccaccataggcgatttagtttcctcagtagagaaattatgtgtcttgaaagaattgaagatagcatttccagaagtagatgatacattaattaaagccattttaattgcctcccaaggggttttggagccggcattcaattctttactctactactcaagtccggaggaaaacactgactttgcattaccaatgaagccgataagtgtggaagactatagtaaaataaatgtgtctgagattttgcaacgtgaaatattcgatgatattgaagacgaattttctggtcaaggaataaatggctccatggtaatttcaaaaattgaatcagaactaagttctttggccgaacacattggcaacattagcacccccggatcgaatagagaagtcgccgaatcgactaggaacgtggctgttgcagagggccataatacaattttatcaaacgaagatagtatactcaagggaaaagagaagggaaaagaggaggaaaaggagaagggagaagaaaagggagttaacagcttaaaaggcgccgctgtgaaagttgttgcgaagtcattgaagaataatcgcattcccgtcactgtgaagagaaatgagccttcaaacaatttatttgacgttttaaactgcgacgaaagcgaggaagaagaagagcaagatgtcgaaaccaatacgtcgaatcaagaaaggaagaaccagggcggtaatactgaagtgccggaggctcagcgtgacagtgcagataggttacctgccaaggacgacggtggatacaaatctgcctttggcactgatagttgtggtctatttgcagctgacgctaaagatgaaaaaaagcaggttcatccatctagacaagaattaagttttacgtag

SEQ ID NO: 2320 - DNA, 1098 bp, Artificial Sequence
  Description of Artificial Sequence: Synthetic polynucleotide
atgggaaagaaaaatagaaagggaaaagaaaataatgctgctaaaacctcttttttgaaagtagagaatattaaaaacactaattctggattggagcttccatctcaagactatacaaacgttgaagaaaaagaaagtagcccgaaaactgactttccattaattacaaaggaacatgtaaacacgaaaactgacagcaatattctcgattatcccaccataggcgatttagtttcctctgtagagaaattatgtgtcttgaaagaattgaagatagcatttccagaagtagatgatacattaattaaagccattttaattgcctcccaaggggttttggagccggcattcaattctttactctactactctagtccggaggaaaacactgactttgcattaccaatgaagccgataagtgtggaagactatagtaaaataaatgtgtctgagattttgcaacgtgaaatattcgatgatattgaagacgaattttctggtcaaggaataaatggctccatggtaatttccaaaattgaaagtgaattaagttctttggccgaacacattggcaacattagcacccccggaagtaatagagaagtcgccgaatctactaggaacgtggctgttgcagagggccataatacaattttatctaacgaagatagtatactcaagggaaaagagaagggaaaagaggaggaaaaggagaagggagaagaaaagggagttaacagcttaaaaggcgccgctgtgaaagttgttgcgaagtctttgaagaataatcgcattcccgtcactgtgaagagaaatgagccttccaacaatttatttgacgttttaaactgcgacgaaagcgaggaagaagaagagcaagatgtcgaaaccaatacgtccaatcaagaaaggaagaaccagggcggtaatactgaagtgccggaggctcagcgtgacagtgcagataggttacctgccaaggacgacggtggatacaaatctgcctttggcactgatagttgtggtttatttgcagctgacgctaaagatgaaaaaaagcaggttcatccatctagacaagaattaagttttacgtga

SEQ ID NO: 2321 - DNA, 372 bp, Saccharomyces cerevisiae
atgttttcttgccttttacattcctcacgccctactgacagctattgcactttggcggcaccactcagccagactgcccgtacccgtacgatgaccttccatgcagccacggcgaaacgcaagaccgagcattcgggaatcaaggaatctaacttgcatttgtcccgggtcctactaagctctttctgccgtgcaaaaggacgtttcgtttcgtttttcatatgctatccatttccttttgggctaactaggtttccgcgggttttgtggtcaataggactcgacaaatcattatttacgcgcgtgcatttttcgccatcattcttttcccttcttgcaccactacaattttccgggattgtacgatcgtag

SEQ ID NO: 2322 - DNA, 372 bp, Artificial Sequence
  Description of Artificial Sequence: Synthetic polynucleotide
atgttttcttgccttttacattcctctcgccctactgacagctattgcactttggcggcaccactcagccagactgcccgtacccgtacgatgaccttccatgcagccacggcgaaacgcaagaccgagcattctggaatcaaggaatctaacttgcatttgtccagggtcttgttgagctctttctgccgtgcaaaaggacgtttcgtttcttttttcatatgctatccatttccttttgggttgactaggtttccgcgtgttttgtggtccataggactcgacaaatctttatttacgcgcgtgcatttttctccatctttcttttcccttcttgcaccattgcaattttccgggattgtaagatcctga

SEQ ID NO: 2323 - DNA, 708 bp, Saccharomyces cerevisiae
atgttttttttcccgaagcttagaaaacttataggttcaactgtgatcgatcacgataccaagaactcatcaggaaaggaagagatcatgtcaaatagccgattagcacttgttattatcaaccacgcctttgataaggtactatctttgacgtggcactgcgggatattatccgaaataagatcaggactgatgttaatgtttggcattttccagttgatgtgctctttgggtgtcatcgtattgctgttgcctattatcatactggacgcgatcgatctattcctctacatgtgcaggttgcttgattacggttgcaagttattccactacaatagatcatcattaccggtggcagatggaaaagaaaagaccagtggtcccataagcggaaaggaggaaatagttattgatgaggagataattaatatgctaaatgaatcctcagaatcattgatcaatcatactacagctggtctggaatatgatattagttcaggtagtgttaacaaaagtaggcgtttgaattcaactagtacagttacatttgtgaagcagaataaacttgttaatgaaaggagggaagacgcctactacgaggaagaggatgatgatttcctatcaaatccgaattatgataagatatcattgatcgaaaaatcattcacgagtcgttttgaagtggcttgtgagcagaaagctgcttaa

SEQ ID NO: 2324 - DNA, 708 bp, Artificial Sequence
  Description of Artificial Sequence: Synthetic polynucleotide
atgttttttttcccgaagcttagaaaacttataggttctactgtgatcgatcacgataccaagaactcttctggaaaggaagagatcatgagtaatagcagattagcacttgttattatcaaccacgcctttgataaggtattatctttgacgtggcactgcgggatattatccgaaataagatctggattaatgttaatgtttggcattttccagttgatgtgctctttgggtgtcatcgtattgttgttgcctattatcatattggacgcgatcgatcttttcctctacatgtgcaggttgcttgattacggttgcaagttattccactacaatagaagttctttaccggtggcagatggaaaagaaaagaccagtggtcccataagcggaaaggaggaaatagttattgatgaggagataattaatatgttgaatgaatccagtgaatctttgatcaatcatactacagctggtttggaatatgatattagttctggtagtgttaacaaaagtaggcgtttgaattctactagtacagttacatttgtgaagcagaataaacttgttaatgaaaggagggaagacgcctactacgaggaagaggatgatgatttcttatccaatccgaattatgataagatatctttgatcgaaaaatctttcacgagtcgttttgaagtggcttgtgagcagaaagctgcttga

SEQ ID NO: 2325 - DNA, 168 bp, Saccharomyces cerevisiae
atggattctgccaagatcattaacattatattatcccttttcttaccaccagtcgccgtttttctagcccgtgggtggggtactgactgtatagtggatatcattttgaccattttggcttggttcccaggtatgctatatgccttgtacattgtcctacaagattaa

SEQ ID NO: 2326 - DNA, 168 bp, Artificial Sequence
  Description of Artificial Sequence: Synthetic polynucleotide
atggattctgccaagatcattaacattatattatcccttttcttaccaccagtcgccgtttttttggcccgtgggtggggtactgactgtatagtggatatcattttgaccattttggcttggttcccaggtatgctttatgccttgtacattgtcttacaagattga

SEQ ID NO: 2327 - DNA, 1302 bp, Saccharomyces cerevisiae
atgtttgtttcaccaccaccagcaacttcgaaaaaccaagttttacaacgacgtccattagaatcgactaacagtaatcatgggtttgcaagctccctacaggccattccggaaaacacgatgagtggcagtgataatgcttcttttcaaagtttgccactatcaatgagtagctctcaatccacgacttcttcgagaagagagaactttgtgaatgctcctccggagtacactgatagagctagagatgagattaaaaaaagattattggcctcctcacctagcagaaggtcacatcattcaagcagtatgcattcagcgagcaggagatcaagcgtggctgaaagtgggagtttactttcggataatgcctcgtcttatcaatcaagtatattttctgccccctctactgtgcacacgcaactaactaatgactcttcgttctccgaatttcctaaccacaagttaatcacgagagtgagcctggatgaagcattacccaaaacgttttatgacatgtattcgccagatattctattagcagacccatccaacattctctgtaacgggcgtcccaagtttaccaagagagagttattggattgggatttaaacgatataagatcgttattgatagtcgagaagttaaggcccgaatggggtaatcaactaccggaagtaataacggtgggtgataatatgccccagtttaggttacaattattaccactatattctagcgatgagaccataatcgcaacgttagtccattcggatctgtacatggaggctaacttagattatgaattcaaactaaccagcgccaaatatacagtagcgaccgctagaaaaagacatgagcatataactggtagaaatgaagccgtcatgaatttgtcgaaaccggaatggagaaatatcatcgaaaattacctcttaaatatagcagtagaggcacaatgcaggtttgatttcaaacaaagatgctccgaatataagaaatggaagttacaacagtccaacttaaaaagaccggacatgcccccaccaagcataataccgcggaaaaacagcacagaaacaaaatcgcttctgaaaaaggctttattgaagaacattcagttgaaaaaccccaataataaccttgatgaattgatgatgagatcaagcgccgcaacaaatcaacagggaaaaaacaaagtcagcttatctaaagaagaaaaggctacgatatggtcgcaatgtcaggcacaagtttaccaaagattaggattggattggcagccggattcagtatcctga

SEQ ID NO: 2328 - DNA, 1302 bp, Artificial Sequence
  Description of Artificial Sequence: Synthetic polynucleotide
atgtttgtttctccaccaccagcaacttctaaaaaccaagttttacaacgtcgtccattagaatctactaacagtaatcatgggtttgcaagctccttacaggccattccggaaaacacgatgagtggcagtgataatgcttcttttcaaagtttgccattatctatgagtagctctcaatccacgacttcttctagaagagagaactttgtgaatgctcctccggagtacactgatagagctagagatgagattaaaaaaagattattggcctcctcccctagcagaaggagccatcattctagcagtatgcattctgcgagcaggagaagcagcgtggctgaaagtgggagtttactttctgataatgcctcttcttatcaaagtagtatattttctgccccctctactgtgcacacgcaattgactaatgactcttctttctccgaatttcctaaccacaagttaatcacgagagtgagcttagatgaagcattacccaaaacgttttatgacatgtattctccagatattttattagcagacccatccaacattctctgtaacgggcgtcccaagtttaccaagagagagttattggattgggatttaaacgatataagatctttattgatagtcgagaagttaaggcccgaatggggtaatcaattgccggaagtaataacggtgggtgataatatgccccagtttaggttacaattattaccattgtattctagcgatgagaccataatcgcaacgttagtccattctgatttatacatggaggctaacttagattatgaattcaaattgaccagcgccaaatatacagtagcgaccgctagaaaaagacatgagcatataactggtagaaatgaagccgtcatgaatttgagtaaaccggaatggagaaatatcatcgaaaattacctcttaaatatagcagtagaggcacaatgcaggtttgatttcaaacaaagatgctccgaatataagaaatggaagttacaacagtccaacttaaaaagaccggacatgcccccaccaagcataataccgcgtaaaaacagcacagaaacaaaatctcttttgaaaaaggctttattgaagaacattcagttgaaaaaccccaataataaccttgatgaattgatgatgagaagcagcgccgcaacaaatcaacagggaaaaaacaaagtcagcttatctaaagaagaaaaggctacgatatggtctcaatgtcaggcacaagtttaccaaagattaggattggattggcagccggattctgtatcctga

SEQ ID NO: 2329 - DNA, 318 bp, Saccharomyces cerevisiae
atgaacgtttcttttaggtcaaactatcaccaaggtacaatccgatgtagtgtaacggctatcacatcacgttctcaccgtggagaccggggttcgactccccgcttcggagtttcttttttattttctagaaaaattcacatgctgattcatttaccgttactgtttcactgtgatgctactagtcatattcttcttatatcaattttttttctattgctgtttgcattaccgcaacatacgatgggaataaacagcacaagctgttgtgtacatttttcctcatcatataactacaatgtacataagttagcttga

SEQ ID NO: 2330 - DNA, 318 bp, Artificial Sequence
  Description of Artificial Sequence: Synthetic polynucleotide
atgaacgtttcttttaggtctaactatcaccaaggtacaatcagatgtagtgtaacggctatcacatctcgttctcaccgtggagaccgtggttctactccccgcttcggagtttcttttttattttctagaaaaattcacatgttgattcatttaccgttactttttcactgtgatgctactagtcatattcttcttatatctattttttttttattgttatttgcattaccgcaacatacgatgggaataaacagcacaagctgttgtgtacatttttcctcttcttataactacaatgtacataagttagcttga

SEQ ID NO: 2331 - DNA, 1053 bp, Saccharomyces cerevisiae
atgaccgtttccaacattgggggggaagaacgactaataattttaccagacgattatgaaacttcgaaaactataaacacttttacactgccgccaccttccaatattacatccaaacctcgtatcgagctcttcgaaaatattaatggaaaactttacgaaataagatcttttcaattcggcaaagggccctcgtattcacatgaggaagatttggcaaatgataaatatcactatactaaggaaaatcacccgatcaaatcaactttcattgtaaatacgtctgatcccaccgatggttatgtttttaactcaagcaaaatacacttttgttctttatacgatattgcttttagtttgattggattttactatagaaacagtgtttcagcagatgaacaagattactccaattcaagtgatactggtgaaaaccaaaaaagcaacagcaaaaccaatgagaaatttcttacggtgcgtgattaccatgatttcttaacggataaccatgacaagaattgggaaaacatttctttaagtcgtctcaagagtggcttagcaaaagttagtgaaaccattgaggaagctggtgacgtctattacaagatcacatctgcaatgataacacaatttttgttaggcaaggtatcaaaaattgtagaaaactttcctccaagtatccctacacttaaaaatgccccaacggaaataaaacagtgctacaaggtagttatggctacaaatcttttagtttccctgattccaagggcggcctaccataatttacttaccttttcacctacaatggatagtggttgcctaaatccggatataaaagctagcttcatagaactcgaaaactacgagactacgaacgaattacagaatgctgaaagagaattactgatgaaaagtgccatgaatgtaggcctaaattcgaatggcagggtttcattgccagtgaaaaaagttaccaaaaaaatagttcaaaataaaaaaccaaaagtagccataggaaaaggggccattgatggattttttaaacgtaagtag

SEQ ID NO: 2332 - DNA, 1053 bp, Artificial Sequence
  Description of Artificial Sequence: Synthetic polynucleotide
atgaccgtttccaacattgggggggaagaaagattaataattttaccagacgattatgaaacttctaaaactataaacacttttacattgccgccaccttccaatattacatccaaacctcgtatcgagctcttcgaaaatattaatggaaaactttacgaaataagatcttttcaattcggcaaagggccctcttattctcatgaggaagatttggcaaatgataaatatcactatactaaggaaaatcacccgatcaaatctactttcattgtaaatacgtctgatcccaccgatggttatgtttttaactccagcaaaatacacttttgttctttatacgatattgcttttagtttgattggattttactatagaaacagtgtttctgcagatgaacaagattactccaatagtagtgatactggtgaaaaccaaaaaagcaacagcaaaaccaatgagaaatttcttacggtgcgtgattaccatgatttcttaacggataaccatgacaagaattgggaaaacatttctttaagtcgtctcaagagtggcttagcaaaagttagtgaaaccattgaggaagctggtgacgtctattacaagatcacatctgcaatgataacacaatttttgttaggcaaggtatccaaaattgtagaaaactttcctccaagtatccctacacttaaaaatgccccaacggaaataaaacagtgctacaaggtagttatggctacaaatcttttagtttccttgattccaagggcggcctaccataatttacttaccttttctcctacaatggatagtggttgcttgaatccggatataaaagctagcttcatagaactcgaaaactacgagactacgaacgaattacagaatgctgaaagagaattattgatgaaaagtgccatgaatgtaggcttgaatagtaatggcagggtttctttgccagtgaaaaaagttaccaaaaaaatagttcaaaataaaaaaccaaaagtagccataggaaaaggggccattgatggattttttaaacgtaagtga

SEQ ID NO: 2333 - DNA, 918 bp, Saccharomyces cerevisiae
atggccaaagacattgagatatccgcatccgagtcaaaatttatcttagaagcactgagacagaattataggttggacggccgctcctttgatcaatttcgtgacgtggaaataacgtttggtaaagaatttggtgatgttagcgtaaaaatgggcaacaccaaagttcactgcaggattagttgtcaaatagcacaaccatacgaagacaggccatttgaaggattatttgtaatatctacagaaatatctcctatggctggttctcaatttgaaaatggaaatatcacgggggaagatgaagttttatgttcaagaataattgaaaaatctgttaggcggtcgggcgcattggacgtggaaggactatgtatcgttgctggcagtaaatgctgggctgtgagagctgatgtacatttcctggattgtgatggtggatttattgacgcttcgtgtattgccgtcatggcaggattgatgcattttaagaaaccagatataactgtccatggcgagcagatcattgttcatcctgttaatgaaagagagccagttccactaggtatactgcatattccaatatgtgtaactttttctttcttcaatcctcaagacaccgaggaaaacataaaaggtgagactaactcagaaatttccatcattgatgcaacattgaaagaggaactactgcgagatggtgtattgacggttacgctaaacaaaaaccgtgaagtggtacaagtttccaaagcgggtggtttaccaatggatgcgttgacgctaatgaaatgttgtcacgaggcttacagcattattgagaaaataactgatcaaatactgcagcttttaaaggaggattcagaaaagagaaacaagtatgcagccatgcttacatctgaaaatgcccgcgagatctaa

SEQ ID NO: 2334 - DNA, 918 bp, Artificial Sequence
  Description of Artificial Sequence: Synthetic polynucleotide
atggccaaagacattgagatatccgcatccgagagtaaatttatcttagaagcattgagacagaattataggttggacggccgctcctttgatcaatttcgtgacgtggaaataacgtttggtaaagaatttggtgatgttagcgtaaaaatgggcaacaccaaagttcactgcaggattagttgtcaaatagcacaaccatacgaagacaggccatttgaaggattatttgtaatatctacagaaatatctcctatggctggttctcaatttgaaaatggaaatatcacgggggaagatgaagttttatgttccagaataattgaaaaatctgttaggagaagcggcgcattggacgtggaaggattatgtatcgttgctggcagtaaatgctgggctgtgagagctgatgtacatttcttggattgtgatggtggatttattgacgcttcttgtattgccgtcatggcaggattgatgcattttaagaaaccagatataactgtccatggcgagcagatcattgttcatcctgttaatgaaagagagccagttccattgggtatattacatattccaatatgtgtaactttttctttcttcaatcctcaagacaccgaggaaaacataaaaggtgagactaactctgaaatttccatcattgatgcaacattgaaagaggaattacttagagatggtgtattgacggttacgttgaacaaaaaccgtgaagtggtacaagtttccaaagcgggtggtttaccaatggatgcgttgacgttgatgaaatgttgtcacgaggcttacagcattattgagaaaataactgatcaaatattacagcttttaaaggaggattctgaaaagagaaacaagtatgcagccatgcttacatctgaaaatgcccgcgagatctga

SEQ ID NO: 2335 - DNA, 315 bp, Saccharomyces cerevisiae
atggaagatacctcgaggtgcatcgatgatgtactgaaaataggacaacaggagaaggaaataagacaggcagagttttctgacgcacaaggggagagagaggaggttaagtgtattgattacacagtagatttggaagcaggtcttccgcgccacgagagtagtggaaaaagtaataccctcaaacagtgttataacgccgttctagggtttctcgaggaactcatcatcgtcattattattgtgttgctgttgtacagtttgacaatggtaggtcttttttatgtgatgacgatgacgaagtttttgttttaa

SEQ ID NO: 2336 - DNA, 315 bp, Artificial Sequence
  Description of Artificial Sequence: Synthetic polynucleotide
atggaagatacctctaggtgcatcgatgatgtattgaaaataggacaacaggagaaggaaataagacaggcagagttttctgacgcacaaggggagagagaggaggttaagtgtattgattacacagtagatttggaagcaggtcttccgcgccacgagagtagtggaaaaagtaataccctcaaacagtgttataacgccgttttggggtttctcgaggaactcatcatcgtcattattattgtgttgttgttgtacagtttgacaatggtaggtcttttttatgtgatgacgatgacgaagtttttgttttga

SEQ ID NO: 2337 - DNA, 1245 bp, Saccharomyces cerevisiae
atgctttcattcagaagtttgactagcacattcggtttcgtatcacgattccaaattagacggttaggaactagtttatcaatacagaatttagaagtgcaagatggccgttggaaaggtaaactagctacagagaagaagaccaatagggaacacaagtcagtggatacgaatatcaagacaatgaagatgcttaaaaacccgaagaattctactcgctatttgagacgaagttttgtgccaaaccacagaaagcaggagaatggacgtgatattctggaggattctttaagtaaagatcacttaaaagtgaagagttgtatcaccattaccaccggagagggttatgatctcaaaagatgcatgaaattgcttactatgcaaggattacaaccgacaaatttgatacctgatgaaatcgtgtcatttagttatcaggataatggcaataaaggtgacgtaatgattttaggtcaaaatggatctattgtaagctggggcttcagtgaatctagtgttcgaaactgcatagtgcctatagttaaagcagcgagtttaaatccactgaacggagaagactttgagactgaggacatggattatgtggaaatagaaggggaacaagattttgataagctttccagtttggataataaggtaacaccgagaattgcatgcgaaagctttctttctggagatttgataataattaactccttggattctgatcaaggaatgctagataaggcggcattctcaagtgggctatcgagaagcaccaacttggcagtcctagaagaagcaatggaaaaacatatatcaaagaccagaacaataacagaaaatatttctaagggaacaaagttaaatctaaggtcaagtgatgcattaaagtcaataggccgcctttttctaattagaggaaagttgaacctctattcagaactaattgagacccctgatctttattggagtgaacctcaattggaagagatttttaaaaatgtttcgaggtatttggacataggcccaagaataaatattctgaacagcaagctggactattctacggacgagtgtcgagccctcatctctcttttaaacgagagaaacagcacttttttggaatggataattatatacctgattgctttcgaactgtgctttgaaatttatcatttctaccagaaatattcttcctactgctcagaacccacgaatgatgatctagatgctacaaagtaa

SEQ ID NO: 2338 - DNA, 1245 bp, Artificial Sequence
  Description of Artificial Sequence: Synthetic polynucleotide
atgctttctttcagaagtttgactagcacattcggtttcgtatctagattccaaattagaagattaggaactagtttatctatacagaatttagaagtgcaagatggccgttggaaaggtaaattggctacagagaagaagaccaatagggaacacaagtctgtggatacgaatatcaagacaatgaagatgcttaaaaacccgaagaattctactcgctatttgagaagaagttttgtgccaaaccacagaaagcaggagaatggacgtgatattttagaggattctttaagtaaagatcacttaaaagtgaagagttgtatcaccattaccaccggagagggttatgatctcaaaagatgcatgaaattgcttactatgcaaggattacaaccgacaaatttgatacctgatgaaatcgtgtcctttagttatcaggataatggcaataaaggtgacgtaatgattttaggtcaaaatggatctattgtaagctggggcttcagtgaatctagtgttagaaactgcatagtgcctatagttaaagcagcgagtttaaatccattgaacggagaagactttgagactgaggacatggattatgtggaaatagaaggggaacaagattttgataagctttccagtttggataataaggtaacaccgagaattgcatgcgaaagctttctttctggagatttgataataattaactccttggattctgatcaaggaatgcttgataaggcggcattctctagtgggctttctagaagcaccaacttggcagtcttggaagaagcaatggaaaaacatatatccaagaccagaacaataacagaaaatatttctaagggaacaaagttaaatttaaggtctagtgatgcattaaagagtataggccgcctttttttgattagaggaaagttgaacctctattctgaattgattgagacccctgatctttattggagtgaacctcaattggaagagatttttaaaaatgtttccaggtatttggacataggcccaagaataaatattttgaacagcaagttggactattctacggacgagtgtcgtgccctcatctctcttttaaacgagagaaacagcacttttttggaatggataattatatacttgattgctttcgaattgtgctttgaaatttatcatttctaccagaaatattcttcctactgcagtgaacccacgaatgatgatttggatgctacaaagtga

SEQ ID NO: 2339 - DNA, 4980 bp, Saccharomyces cerevisiae
atgtcattgagtcatctcactttagatcaatattatgaaatacagtgcaacgaacttgaagcgatacgttccatttatatggatgactttactgacttaactaaaagaaagtctagctgggataagcagccacagattatattcgaaattacgcttcgatctgttgacaaagagccggttgaatcttctataacattacattttgcgatgaccccaatgtatccttataccgctccagaaatagaattcaaaaatgtacaaaatgtaatggatagtcaattgcaaatgctgaaaagtgaatttaagaaaatccacaacacctcccgaggccaagagattatatttgaaattacatcttttactcaagaaaaactggacgaatttcaaaatgtggtaaatacacagtccttggaagatgatcgattacaaagaatcaaagaaactaaagaacaattagaaaaggaagaaagagaaaaacaacaggaaacaataaaaaaaagatcagatgagcagcgaaggatagatgaaattgttcaaagagagttggagaaaagacaagatgatgatgatgatttgctattcaacagaacaacccagttagatttacaaccaccttcagaatgggttgcatcaggtgaagctattgtcttttcaaaaactataaaggcaaaattgcctaataactcaatgttcaagtttaaagcagttgtaaatcctaagccaataaaactgacatcagatatatttagtttttccaaacaatttcttgtgaagccttatataccaccagaatctccgttggcagattttttaatgtcttctgaaatgatggaaaatttctactatttgctatctgaaattgaattggataatagctatttcaacacaagtaatggaaaaaaagaaatagcaaatttagagaaagagttagagacggtgttgaaagctaagcatgacaatgtgaatcgattgttcggttatacggtggagcgcatggggagaaataatgcaacgtttgtttggaaaataagactcttgacagagtactgtaactactatccattgggagatttgatacaatctgttggatttgttaacttagcaacagcgcgtatttggatgattagattgcttgaaggattggaggccatacacaaattgggaattgttcataaatgtatcaacttagaaaccgtgatcctggtgaaggatgcagattttggaagcactattcccaagttagttcactccacttatggctacactgttttgaatatgctatcgagatatccaaataaaaatggttcttcggttgagttatctccaagtacatggatagcccctgagttgttgaaattcaataacgccaaacctcaaagattaactgatatttggcaacttggtgttttgtttatccagataatcagtggatctgatatagtgatgaattttgaaacgcctcaagaattcctagattcaacaagtatggatgaaactttatatgatcttctttcgaaaatgcttaataacgatccgaagaaaagattaggaacattagaactactgcccatgaaattcttaaggaccaatattgactctacaatcaatcgatttaacttagtttccgaaagtgtcaattctaattccttggagttaactcctggagataccataaccgttcggggcaatggaggtagaacactttcacaatcgagtatacgaagaagatcatttaatgttggttccagattctcttctataaatcctgcaacgcgatcacgatatgcttctgactttgaagagattgcagttttaggccagggcgcatttggacaagttgtcaaggcacgtaatgctctcgatagcagatactatgcgatcaagaagattagacatacagaagaaaagttatctactatattgagtgaagtaatgctgttagcaagcttaaatcatcaatatgttgtgcgttactatgctgcatggttagaagaagacagtatggatgaaaacgtttttgaatcaactgatgaagaaagtgacttgagcgaatcttcctctgattttgaggaaaatgatttattagatcaaagcagtatttttaaaaatagaacaaatcacgatttggataatagtaactgggatttcatatcggggtcaggatatccggatattgtctttgaaaatagttctcgtgatgatgaaaatgaagatctagaccatgatacttcctcgacttcctcgagcgaaagtcaagatgatactgataaagaatcaaagagtatccagaacgttccaagaaggaggaattttgtaaaaccgatgactgctgttaagaagaaaagtacgctttttattcaaatggagtactgtgaaaatagaacgctatatgatttgatccattctgaaaatttaaatcaacaacgtgatgaatattggaggttatttcgacaaattttggaagcactgagttatatacattcccagggtatcattcatagggatctgaagccaatgaatatttttatagatgaatcgagaaatgttaaaatcggtgattttgggttagctaagaacgtccatagatctctggatatacttaagctagattcacagaatttgccaggcagctcagataatttaacatccgccattggtacagcaatgtatgttgctactgaagttttagatggtacaggtcactataatgaaaagattgatatgtattcacttggaatcattttttttgaaatgatctatcctttcagtacaggtatggagagagttaatattttgaaaaagttacgatcagtgtcgatagaatttcctcctgatttcgacgataataagatgaaagttgaaaagaaaattataaggttactcatagaccatgatcccaataaaaggcctggtgctaggacattattaaatagtggttggcttcctgtgaagcatcaggatgaagtaatcaaagaggctttaaaaagtttgtcgaatccttcatccccttggcaacagcaagttcgagaaagtttatttaaccaatcttacagtctaacaaatgatattctatttgataactcagttccaacatccactcctttcgcaaacattctcaggtcccaaatgacagaagaggtagttaaaattttcaggaaacatggaggaattgaaaataatgctcctccgaggatttttccaaaggcccccatatacggtacgcagaatgtatatgaagtgcttgacaagggcggtaccgtcttgcagttacaatatgatttaacttatcctatggctaggtatctatctaaaaatccaagtctgatttctaagcaatataggatgcagcacgtttaccgacctcctgatcattcaaggtcaagtttggaacctagaaagtttggtgagattgacttcgacataatttcaaaatcttcctcagagtcaggattttatgatgcagaaagcttgaaaattatcgatgaaatattaaccgtatttcctgtatttgagaaaacaaacacttttttcatattaaatcatgctgatattttggagagtgttttcaactttacaaatattgataaagcccaaaggcctctagtttcacgaatgttgtcgcaagtaggctttgcaaggtccttcaaggaagtaaagaatgaactaaaggcgcaactgaacatatcttctacggcattgaatgatttggagttatttgattttagactggacttcgaagcagccaaaaaacgcctgtataaattgatgattgatagtccgcatctaaaaaaaattgaggactctttgtcccatatatcaaaggttctcagttacctaaaacccttagaagttgcaagaaatgttgtgatatctcctttgagtaactacaatagcgctttttacaaaggaggtatcatgtttcatgcagtttatgacgatggatcctcacgtaatatgatagctgctggagggaggtatgacactttgatatccttttttgccagaccatcaggaaaaaagagcagcaatactcgtaaggctgtaggtttcaacttagcgtgggaaacaatattcggtatagcccaaaactatttcaaactcgcttctggaaataggataaagaagagaaataggtttttgaaagatacagctgttgattggaagccaagcaggtgtgatgtattgatatcgagtttttcgaactctttgttggacacaatcggggttacaatactgaatacattgtggaagcaaaacattaaagcggatatgttaagggattgttcctcggtggatgatgtcgttactggcgctcaacaggatggtatagactggattttgctgattaagcaacaagcgtatccactaaccaatcacaagagaaagtacaagccattaaaaataaaaaaattgagcactaatgttgacatagatttagatcttgatgagtttttaaccttgtaccaacaagaaactggtaataaatctttgatcaacgatagtctcactttgggcgataaggctgatgaatttaaaagatgggatgaaaacagcagtgccggtagtagtcaagaaggtgacatagatgatgttgttgctggttcgactaataatcaaaaggtaatttatgttccaaacatggctacaagatctaagaaagctaataaaagggaaaagtgggtttatgaggatgcagccagaaattcttcgaatatgatattacacaatttatccaatgcaccaattatcactgttgatgccttaagagatgaaactttagaaataatctcaattacttctttggctcagaaggaagaatggctgagaaaagtttttgggtcaggtaataactcgactcctagaagctttgccacgagcatttataataacctctccaaagaggctcataaagggaataggtgggcaatattatactgccacaaaaccggaaaatcatctgttatcgatttacagaggtag

SEQ ID NO: 2340 - DNA, 4980 bp, Artificial Sequence
  Description of Artificial Sequence: Synthetic polynucleotide
atgtctttgagtcatctcactttagatcaatattatgaaatacagtgcaacgaacttgaagcgatacgttccatttatatggatgactttactgacttaactaaaagaaagtctagctgggataagcagccacagattatattcgaaattacgcttagatctgttgacaaagagccggttgaatcttctataacattacattttgcgatgaccccaatgtatccttataccgctccagaaatagaattcaaaaatgtacaaaatgtaatggatagtcaattgcaaatgttgaaaagtgaatttaagaaaatccacaacacctccagaggccaagagattatatttgaaattacatcttttactcaagaaaaattagacgaatttcaaaatgtggtaaatacacagtccttggaagatgatagattacaaagaatcaaagaaactaaagaacaattagaaaaggaagaaagagaaaaacaacaggaaacaataaaaaaaagaagtgatgagcagagaaggatagatgaaattgttcaaagagagttggagaaaagacaagatgatgatgatgatttgttattcaacagaacaacccagttagatttacaaccaccttctgaatgggttgcatctggtgaagctattgtcttttccaaaactataaaggcaaaattgcctaataactccatgttcaagtttaaagcagttgtaaatcctaagccaataaaattaacatctgatatatttagtttttccaaacaatttcttgtgaagccttatataccaccagaatctccgttggcagattttttaatgtcttctgaaatgatggaaaatttctactatttgttatctgaaattgaattggataatagctatttcaacacaagtaatggaaaaaaagaaatagcaaatttagagaaagagttagagacggtgttgaaagctaagcatgacaatgtgaatagattgttcggttatacggtggagcgcatggggagaaataatgcaacgtttgtttggaaaataagactcttgacagagtactgtaactactatccattgggagatttgatacaatctgttggatttgttaacttagcaacagcgcgtatttggatgattagattgcttgaaggattggaggccatacacaaattgggaattgttcataaatgtatcaacttagaaaccgtgatcttagtgaaggatgcagattttggaagcactattcccaagttagttcactccacttatggctacactgttttgaatatgctttctagatatccaaataaaaatggttcttctgttgagttatctccaagtacatggatagcccctgagttgttgaaattcaataacgccaaacctcaaagattaactgatatttggcaacttggtgttttgtttatccagataatcagtggatctgatatagtgatgaattttgaaacgcctcaagaattcttggattctacaagtatggatgaaactttatatgatcttctttctaaaatgcttaataacgatccgaagaaaagattaggaacattagaattattgcccatgaaattcttaaggaccaatattgactctacaatcaatagatttaacttagtttccgaaagtgtcaattctaattccttggagttaactcctggagataccataaccgttagaggcaatggaggtagaacactttctcaaagtagtataagaagaagatcttttaatgttggttccagattctcttctataaatcctgcaacgagatctagatatgcttctgactttgaagagattgcagttttaggccagggcgcatttggacaagttgtcaaggcacgtaatgctctcgatagcagatactatgcgatcaagaagattagacatacagaagaaaagttatctactatattgagtgaagtaatgcttttagcaagcttaaatcatcaatatgttgtgcgttactatgctgcatggttagaagaagacagtatggatgaaaacgtttttgaatctactgatgaagaaagtgacttgagcgaatcttcctctgattttgaggaaaatgatttattagatcaaagcagtatttttaaaaatagaacaaatcacgatttggataatagtaactgggatttcataagcgggtctggatatccggatattgtctttgaaaatagttctcgtgatgatgaaaatgaagatttggaccatgatacttccagcacttcctctagcgaaagtcaagatgatactgataaagaatccaagagtatccagaacgttccaagaaggaggaattttgtaaaaccgatgactgctgttaagaagaaaagtacgctttttattcaaatggagtactgtgaaaatagaacgctttatgatttgatccattctgaaaatttaaatcaacaacgtgatgaatattggaggttatttagacaaattttggaagcattaagttatatacattcccagggtatcattcatagggatttgaagccaatgaatatttttatagatgaatctagaaatgttaaaatcggtgattttgggttagctaagaacgtccatagatctttagatatacttaagttggattctcagaatttgccaggcagcagtgataatttaacatccgccattggtacagcaatgtatgttgctactgaagttttagatggtacaggtcactataatgaaaagattgatatgtattctcttggaatcattttttttgaaatgatctatcctttcagtacaggtatggagagagttaatattttgaaaaagttaagatctgtgtctatagaatttcctcctgatttcgacgataataagatgaaagttgaaaagaaaattataaggttactcatagaccatgatcccaataaaaggcctggtgctaggacattattaaatagtggttggcttcctgtgaagcatcaggatgaagtaatcaaagaggctttaaaaagtttgagcaatccttcttccccttggcaacagcaagttagagaaagtttatttaaccaatcttacagtttgacaaatgatattttatttgataactctgttccaacatccactcctttcgcaaacattctcaggtcccaaatgacagaagaggtagttaaaattttcaggaaacatggaggaattgaaaataatgctcctccgaggatttttccaaaggcccccatatacggtacgcagaatgtatatgaagtgcttgacaagggcggtaccgtcttgcagttacaatatgatttaacttatcctatggctaggtatttatctaaaaatccaagtttgatttctaagcaatataggatgcagcacgtttacagacctcctgatcattccaggtctagtttggaacctagaaagtttggtgagattgacttcgacataatttccaaatcttcctctgagagtggattttatgatgcagaaagcttgaaaattatcgatgaaatattaaccgtatttcctgtatttgagaaaacaaacacttttttcatattaaatcatgctgatattttggagagtgttttcaactttacaaatattgataaagcccaaaggcctttggtttccagaatgttgtctcaagtaggctttgcaaggtccttcaaggaagtaaagaatgaattgaaggcgcaattgaacatatcttctacggcattgaatgatttggagttatttgattttagattagacttcgaagcagccaaaaaacgcttgtataaattgatgattgatagtccgcatttgaaaaaaattgaggactctttgtcccatatatccaaggttctcagttacttgaaacccttagaagttgcaagaaatgttgtgatatctcctttgagtaactacaatagcgctttttacaaaggaggtatcatgtttcatgcagtttatgacgatggatcctctcgtaatatgatagctgctggagggaggtatgacactttgatatccttttttgccagaccatctggaaaaaagagcagcaatactcgtaaggctgtaggtttcaacttagcgtgggaaacaatattcggtatagcccaaaactatttcaaactcgcttctggaaataggataaagaagagaaataggtttttgaaagatacagctgttgattggaagccaagcaggtgtgatgtattgatatctagtttttccaactctttgttggacacaatcggggttacaatattgaatacattgtggaagcaaaacattaaagcggatatgttaagggattgttcctctgtggatgatgtcgttactggcgctcaacaggatggtatagactggattttgttaattaagcaacaagcgtatccattgaccaatcacaagagaaagtacaagccattaaaaataaaaaaattgagcactaatgttgacatagatttagatcttgatgagtttttaaccttgtaccaacaagaaactggtaataaatctttgatcaacgatagtctcactttgggcgataaggctgatgaatttaaaagatgggatgaaaacagcagtgccggtagtagtcaagaaggtgacatagatgatgttgttgctggttctactaataatcaaaaggtaatttatgttccaaacatggctacaagatctaagaaagctaataaaagggaaaagtgggtttatgaggatgcagccagaaattcttccaatatgatattacacaatttatccaatgcaccaattatcactgttgatgccttaagagatgaaactttagaaataatctctattacttctttggctcagaaggaagaatggttgagaaaagtttttgggtctggtaataactctactcctagaagctttgccacgagcatttataataacctctccaaagaggctcataaagggaataggtgggcaatattatactgccacaaaaccggaaaatcttctgttatcgatttacagaggtga

SEQ ID NO: 2341 - DNA, 870 bp, Saccharomyces cerevisiae
atgaacagagtttcgtttattaaaacgcctttcaacataggggcgaaatggagattagaagatgtctttttgctcattatcatgatacttcttaactacccagtgtattaccaacaaccgttcgaacgtcagttttacattaacgatctcactatatcgcatccttatgcgacaactgaacgtgtaaataacaacatgttgtttgtttatagttttgtcgtgccatctttaaccatattgataattggttccattttggccgatagaagacatttgatttttattttgtacacatctctccttggtttatcactcgcttggttcagtacgagtttctttacaaacttcatcaagaattggattggaagactaagaccagattttctagatcgttgccaacctgttgaaggcttgccattggacactttatttactgcaaaagatgtgtgtacgactaagaatcacgaacgtctgttggatgggtttaggacaactccgtcaggtcattcaagtgaaagctttgcaggactgggttatttgtacttctggctatgtgggcaacttttgactgaatcaccgttgatgcctttatggagaaaaatggtggcctttctaccactgttaggagctgcactaattgctctatccagaactcaagattacagacatcatttcgtcgatgtaattttagggtctatgttgggttatataatggcacactttttctacagaagaatcttcccacccattgatgatcctcttccgttcaaaccattgatggacgattcagatgtcaccctggaggaagcagtcacccatcagaggatcccggatgaggaattacatcctttgtccgatgaaggtatgtaa

SEQ ID NO: 2342 - DNA, 870 bp, Artificial Sequence
  Description of Artificial Sequence: Synthetic polynucleotide
atgaacagagtttcttttattaaaacgcctttcaacataggggcgaaatggagattagaagatgtctttttgctcattatcatgatacttcttaactacccagtgtattaccaacaaccgttcgaacgtcagttttacattaacgatctcactatatctcatccttatgcgacaactgaacgtgtaaataacaacatgttgtttgtttatagttttgtcgtgccatctttaaccatattgataattggttccattttggccgatagaagacatttgatttttattttgtacacatctctccttggtttatctctcgcttggttcagtacgagtttctttacaaacttcatcaagaattggattggaagattgagaccagattttttggatcgttgccaacctgttgaaggcttgccattggacactttatttactgcaaaagatgtgtgtacgactaagaatcacgaacgtttattggatgggtttaggacaactccgtctggtcattctagtgaaagctttgcaggattaggttatttgtacttctggttatgtgggcaacttttgactgaatctccgttgatgcctttatggagaaaaatggtggcctttttaccattattaggagctgcattgattgctttgtccagaactcaagattacagacatcatttcgtcgatgtaattttagggtctatgttgggttatataatggcacactttttctacagaagaatcttcccacccattgatgatcctcttccgttcaaaccattgatggacgattctgatgtcaccttagaggaagcagtcacccatcagaggatcccggatgaggaattacatcctttgtccgatgaaggtatgtga

SEQ ID NO: 2343 - DNA, 2628 bp, Saccharomyces cerevisiae
atgtcaaacttttttagagatagttcaatgggattcaagcctcgaccaaacatcttcgctaagctgagagtcagagatgtagattcagattcttccgctaatactgttgtcgagaattcatccaactgtttagacgtgggttcttctatagagggagatgataccttcaaaaaaccccacaaaacttctaccgaacaagaactgattacaagtatgagccttagtcagagaaaccatggttattctgatgatatggaaataggttcaccaaaaaaaacaacatcaacagaccaatacaacagaattttaaaaaatgatgttgccgcaattgaaaatgatactgatgaagattttgaaattacagaagtaagagaagtgagtgaaggagtagcaaaagaaacgaaagaaagtcatggggatcctaacgattctgagacaactctcaaggatagtaaaatgcatgaatatactatgacaaatggaaaggctcctttgcacacgtccatcaataattctagtacatcttcaaatgatgtcctgttagaagccttcacaaacactcaaagaatatgttcaaatttaaagcaagagctacaaaagcagcaacaggataatgcaaagttgaaagttcgactacagtcgtatgcttccaattctgataagatcaatgaaaaagtcggaaaatataaatcttgtttagaaactcttcaagaaaggattgcaacgttgacgagccataagaataatcaagaaactaaattgaaagatttaagacaaaaccaccaactatatcagagaaggataagcggatttaagacaagtattgaaaacttgaacaaaacaataaatgatttagggaagaacaaaaaggaggcggatgcagaattaatgaaaaaaggtaaagagattgaatacctgaaaagagaactagatgattgttcaggtcagttgagcgaagaaaaaatcaaaaacagttccttaatacaggaaatgggaaaaaatagagaagaaatgattaaatcaattgagaatttcttttcagaagataaagcacaccatttactgcaatttaacaaattcgaagaaagagttcatgatttgtttgaaaaaaaattacaaaagcacttcgatgtggcaaaagatacccttaacgtaggcttgaggaacaccactgtagagttgagtagtaatacagagaccatgctaaagcagcaatatgaagatatcaaagaaaatcttgaacaaaaaatgtcatccagtaaggatgaaatggcaaaaacaataaatgagctgagtgtaacgcaaaaaggacttataatgggagtacaagaagaactattaacgtcatcagggaatattcaaactgctttggtaagtgaaatgaataacacaaggcaagagcttcttgatgatgcgtctcaaacagccaaaaattacgcgagtttggaaaacttggtgaaggcatataaggcagaaatagttcagtcgaatgagtatgaagaaaggataaaacatttggagagtgaaaggtcaactttgtcttcacaaaaaaatcagattattagctctcttggtactaaagaagcacaatatgaagatttggtcaaaaagttggaggcgaagaatatcgaaatttcacaaatttctggcaaagaacaaagtttaactgaaaaaaatgaaaacctttctaatgaactgaaaaaagtccaggatcaactagaaaaactcaacaatttgaacatcacaacaaaatcaaattacgaaaataaaatatcttctcagaatgaaattgtgaaggctttagtttccgaaaacgacactctgaagcaaagaattcaacagctagtagaaatcaaagaaaatgaacagaaggatcatacaaccaaactggaggctttccaaaagaacaatgagcagctacaaaagctaaacgtcgaagtagtacaactgaaggctcatgaattggagcttgaagagcagaataggcacttaaaaaattgtttagaaaaaaaggaaactggtgttgaagaatcactaagcgatgtaaaaaccctaaaacagcaagtgatagttctgaaatcggagaagcaagatataacagctgaaaagttagaacttcaagataacctcgaaagtttggaagaagtcaccaaaaatttacagcaaaaggtgcaatcgcaaaagagggaattagaacagaagattaaagagctagaagagataaaaaaccataaacggaacgagcctagtaaaaaaggtacacaaaattttactaaaccatcagattcacccaaaaaaaatgctacgacgtccaacttatttcctaataactctgctgccattcactctcctatgaaaaagtgtcctaaggtggatcatataagtaagtcaagaattaattcatccaaagaaacatccaaatttaacgatgagttcgatctttcttcatcatcaaatgacgacctagagttaaccaacccttccccaatccaaattaaaccagtgagaggaaaaatcaagaagggttcaaattgcatgaaacctccaatttcttcaagaaaaaaattactactagtagaagacgaagaccagtcattaaaaataagcaagaaaaggagaaggaaatag

SEQ ID NO: 2344 - DNA, 2628 bp, Artificial Sequence
  Description of Artificial Sequence: Synthetic polynucleotide
atgtccaacttttttagagatagttctatgggattcaagcctaggccaaacatcttcgctaagttgagagtcagagatgtagattctgattcttccgctaatactgttgtcgagaattcttccaactgtttagacgtgggttcttctatagagggagatgataccttcaaaaaaccccacaaaacttctaccgaacaagaattgattacaagtatgagccttagtcagagaaaccatggttattctgatgatatggaaataggttctccaaaaaaaacaacatctacagaccaatacaacagaattttaaaaaatgatgttgccgcaattgaaaatgatactgatgaagattttgaaattacagaagtaagagaagtgagtgaaggagtagcaaaagaaacgaaagaaagtcatggggatcctaacgattctgagacaactctcaaggatagtaaaatgcatgaatatactatgacaaatggaaaggctcctttgcacacgtccatcaataattctagtacatcttccaatgatgtccttttagaagccttcacaaacactcaaagaatatgttctaatttaaagcaagagttacaaaagcagcaacaggataatgcaaagttgaaagttagattacagagttatgcttccaattctgataagatcaatgaaaaagtcggaaaatataaatcttgtttagaaactcttcaagaaaggattgcaacgttgacgagccataagaataatcaagaaactaaattgaaagatttaagacaaaaccaccaattatatcagagaaggataagcggatttaagacaagtattgaaaacttgaacaaaacaataaatgatttagggaagaacaaaaaggaggcggatgcagaattaatgaaaaaaggtaaagagattgaatacttgaaaagagaattagatgattgttctggtcagttgagcgaagaaaaaatcaaaaacagttccttaatacaggaaatgggaaaaaatagagaagaaatgattaaatccattgagaatttcttttctgaagataaagcacaccatttattacaatttaacaaattcgaagaaagagttcatgatttgtttgaaaaaaaattacaaaagcacttcgatgtggcaaaagatacccttaacgtaggcttgaggaacaccactgtagagttgagtagtaatacagagaccatgttgaagcagcaatatgaagatatcaaagaaaatcttgaacaaaaaatgtcttccagtaaggatgaaatggcaaaaacaataaatgagttgagtgtaacgcaaaaaggacttataatgggagtacaagaagaattattaacgtcttctgggaatattcaaactgctttggtaagtgaaatgaataacacaaggcaagagcttcttgatgatgcgtctcaaacagccaaaaattacgcgagtttggaaaacttggtgaaggcatataaggcagaaatagttcagtctaatgagtatgaagaaaggataaaacatttggagagtgaaaggtctactttgtcttctcaaaaaaatcagattattagctctcttggtactaaagaagcacaatatgaagatttggtcaaaaagttggaggcgaagaatatcgaaatttctcaaatttctggcaaagaacaaagtttaactgaaaaaaatgaaaacctttctaatgaattgaaaaaagtccaggatcaattggaaaaactcaacaatttgaacatcacaacaaaatctaattacgaaaataaaatatcttctcagaatgaaattgtgaaggctttagtttccgaaaacgacactttgaagcaaagaattcaacagttggtagaaatcaaagaaaatgaacagaaggatcatacaaccaaattagaggctttccaaaagaacaatgagcagttacaaaagttgaacgtcgaagtagtacaattgaaggctcatgaattggagcttgaagagcagaataggcacttaaaaaattgtttagaaaaaaaggaaactggtgttgaagaatctttaagcgatgtaaaaaccttgaaacagcaagtgatagttttgaaaagtgagaagcaagatataacagctgaaaagttagaacttcaagataacctcgaaagtttggaagaagtcaccaaaaatttacagcaaaaggtgcaatctcaaaagagggaattagaacagaagattaaagagttagaagagataaaaaaccataaaagaaacgagcctagtaaaaaaggtacacaaaattttactaaaccaagtgattctcccaaaaaaaatgctacgacgtccaacttatttcctaataactctgctgccattcactctcctatgaaaaagtgtcctaaggtggatcatataagtaagtctagaattaattcttccaaagaaacatccaaatttaacgatgagttcgatctttcttcttcttccaatgacgacttggagttaaccaacccttccccaatccaaattaaaccagtgagaggaaaaatcaagaagggtagtaattgcatgaaacctccaatttcttctagaaaaaaattattattggtagaagacgaagaccagtctttaaaaataagcaagaaaaggagaaggaaatga

SEQ ID NO: 2345 - DNA, 345 bp, Saccharomyces cerevisiae
atgttgagagcgttccgctgttctatacatacttcgagggtattgttacatgatgctggagtgaaattaactttcttctcaaagcctaattgtgggttatgcgatcaagcaaaggaagtgatagatgatgtatttgaaagaaaggaatttcataataaagcagtttcactagagatagtcaacataactgaccgaagaaacgcaaaatggtggaaggaatattgcttcgacataccagtacttcatattgagaaagttggtgatcctaagtcgtgcaccaagatcctgcactttcttgaagaagacgatatcagtgataaaataaggagaatgcaatctagatga

SEQ ID NO: 2346 - DNA, 345 bp, Artificial Sequence
  Description of Artificial Sequence: Synthetic polynucleotide
atgttgagagcgttccgctgttctatacatacttctagggtattgttacatgatgctggagtgaaattaactttcttctccaagcctaattgtgggttatgcgatcaagcaaaggaagtgatagatgatgtatttgaaagaaaggaatttcataataaagcagtttctttggagatagtcaacataactgacagaagaaacgcaaaatggtggaaggaatattgcttcgacataccagtacttcatattgagaaagttggtgatcctaagtcttgcaccaagatcttgcactttcttgaagaagacgatatcagtgataaaataaggagaatgcaatctagatga

SEQ ID NO: 2347 - DNA, 879 bp, Saccharomyces cerevisiae
atggtattaacgaggcaagtactagaggaagtggagaacacatttattgaattacttaggagtaaaataggacctctcgtaaaatcgcacgcaggaacaaacttttgttcatatgatgataaagcaaatggcgtagatttggtaactgctttagacaaacaaattgaatctataatcaaggaaaatttaacggccaagtatcccagtttcaaatttatcggagaagaaacttatgtaaaaggtgtcacgaaaataactaacggccctacatttattgttgatcccatcgatggtactactaattttattcacggttacccctatagttgtacatctctaggtttagctgaaatggggaagccggttgttggtgtggttttcaatcctcacttaaaccaactattccatgcttccaaaggcaatggagctttcttaaatgatcaggagataaaggtttcaaaaaggccattgattttgcaaaaatccttaattgctttagaaggaggttcggaaagaactgaaggttcccaaggaaactttgataagaaaatgaatacttataaaaacttactaagtgagtccggcgcctttgttcacgggttcagaagtgcaggaagtgctgccatgaacatatgctacgtagcgagcggcatgcttgatgcttattgggaaggtggctgctgggcttgggatgtttgtgccggttggtgtattcttgaggaagcaggaggaataatggttggcggaaattgtggagaatggaacattccattagacagaagatgttacttggctattagaggtggatgtgagtcgatggagcagaagcgatttgcagaatcgttttggcctcacgttgcgggtgagttagaatactaa

SEQ ID NO: 2348 - DNA, 879 bp, Artificial Sequence
  Description of Artificial Sequence: Synthetic polynucleotide
atggtattaacgaggcaagtattggaggaagtggagaacacatttattgaattacttaggagtaaaataggacctctcgtaaaatctcacgcaggaacaaacttttgttcttatgatgataaagcaaatggcgtagatttggtaactgctttagacaaacaaattgaatctataatcaaggaaaatttaacggccaagtatcccagtttcaaatttatcggagaagaaacttatgtaaaaggtgtcacgaaaataactaacggccctacatttattgttgatcccatcgatggtactactaattttattcacggttacccctatagttgtacatctttgggtttagctgaaatggggaagccggttgttggtgtggttttcaatcctcacttaaaccaattattccatgcttccaaaggcaatggagctttcttaaatgatcaggagataaaggtttccaaaaggccattgattttgcaaaaatccttaattgctttagaaggaggttctgaaagaactgaaggttcccaaggaaactttgataagaaaatgaatacttataaaaacttattaagtgagtccggcgcctttgttcacgggttcagaagtgcaggaagtgctgccatgaacatatgctacgtagcgagcggcatgcttgatgcttattgggaaggtggctgctgggcttgggatgtttgtgccggttggtgtattcttgaggaagcaggaggaataatggttggcggaaattgtggagaatggaacattccattagacagaagatgttacttggctattagaggtggatgtgagtccatggagcagaagagatttgcagaaagtttttggcctcacgttgcgggtgagttagaatactga

SEQ ID NO: 2349 - DNA, 912 bp, Saccharomyces cerevisiae
atgagttctatagataatgacagcgatgtggatttaacagaagatttagccgtggccaagatcgttaaagagaatcctgtagctagaaaaatggttaggtatattttatcgagaggagaatctcaaaattcgatcataacaagaaacaagttacaatctgttatacatgaagctgctcgcgaggaaaacatagcaaaaccgtcttttagtaaaatgtttatggacataaatgctatactgtataacgtatatgggtttgaattacaaggattgccgtcaaaaaataatatgaacgctggcggtaatggaagcaatagcaatacaaataaatcaatgcctgagccactgggacatagagcccagaaatttatcttgctaaacaatgtcccgcactcaaaaaattttgacgatttcaagattttacaaagcgctcacacttatgaagagctaatagttaccggagagtatattggtgacgatatagcttcaggaacttccaataccttagaaagcaagttgagtacagatcgagatcttgtttacaagggtgttttgagcgtcattttatgcattgttttcttctctaagaataacatattacatcaggaattgatcaaatttctagagacatttggcattccaagcgatggttcaaagattgctatactgaacattactattgaagatttgataaaaagtttagaaaagcgcgaatatatagtcagattggaggagaaatccgataccgacggggaagtgatatcatacaggataggtagaagaactcaggctgagcttggactagagtctcttgaaaaattggtgcaagaaatcatgggccttgaaaaggagcagactaaaagtttgcacgatgatataataaaaagcattggcgattcatattctatatag

SEQ ID NO: 2350 - DNA, 912 bp, Artificial Sequence
  Description of Artificial Sequence: Synthetic polynucleotide
atgagttctatagataatgacagcgatgtggatttaacagaagatttagccgtggccaagatcgttaaagagaatcctgtagctagaaaaatggttaggtatattttatctagaggagaatctcaaaattccatcataacaagaaacaagttacaatctgttatacatgaagctgctcgcgaggaaaacatagcaaaaccgtcttttagtaaaatgtttatggacataaatgctatactttataacgtatatgggtttgaattacaaggattgccgtccaaaaataatatgaacgctggcggtaatggaagcaatagcaatacaaataaatctatgcctgagccattaggacatagagcccagaaatttatcttgttgaacaatgtcccgcactctaaaaattttgacgatttcaagattttacaaagcgctcacacttatgaagagttgatagttaccggagagtatattggtgacgatatagcttctggaacttccaataccttagaaagcaagttgagtacagatagagatcttgtttacaagggtgttttgagcgtcattttatgcattgttttcttctctaagaataacatattacatcaggaattgatcaaatttttggagacatttggcattccaagcgatggttccaagattgctatattaaacattactattgaagatttgataaaaagtttagaaaagcgcgaatatatagtcagattggaggagaaatccgataccgacggggaagtgatatcttacaggataggtagaagaactcaggctgagcttggattggagtctcttgaaaaattggtgcaagaaatcatgggccttgaaaaggagcagactaaaagtttgcacgatgatataataaaaagcattggcgattcttattctatatga

SEQ ID NO: 2351 - DNA, 1230 bp, Saccharomyces cerevisiae
atgcctttctcttctgagcaattcacaaccaaattaaatacgttggaagattcccaagaatctatttccagtgcctcaaagtggttgcttctacagtatagagatgctcccaaagtggcagaaatgtggaaagaatacatgttaaggcctagtgtaaacacaagaaggaagttattgggtctttacttaatgaatcatgttgttcaacaggctaaaggtcaaaaaattattcaatttcaagattcctttggaaaggtggcagcagaagtattgggaagaattaatcaagagtttccgagggacctaaaaaagaagttgtcaagagttgtgaatatactaaaagaaagaaatatattttccaagcaggtagtcaatgacatagaaagaagtcttaaaaccgagagctcaccagtggaagcgttggtgttaccccagaaattgaaagattttgctaaggactatgaaaaattagtgaaaatgcaccataatgtttgcgcgatgaaaatgagatttgacaaatcatcagatgaattggatccatccagctcagtttacgaggaaaattttaaaacaataagtaagattgggaacatggctaaagatataataaatgaatcaattctaaaaagagaaagcggtatccataaactgcaaagcacactggacgatgaaaaaaggcatctagatgaggaacagaatatgttaagtgaaatagaattcgttttatctgctaaagacccatccagattaaataaaaacgttgatgaagacaatattattcctacgtatgaagtgggggatggagatgacgatgacgatgatggtgataatgatgatgatgatgatgatgatgatgatgacaaaaattacgatgatagatccaatgacagcaattatggcgttactaatattagcaccacagataagaagaatgaagttgtagaaaagacagatagcgaacataaaaactctactcataatcctagtgacaatcaatttggtatgaaacgaacacatgatatgataggtcatgatgacgctaatgacataccggaaaaaaaggttcatcttgattcgaagacgagtgaagatggtactttcaacagtgaggatggacattatgagttagatatagaaggccacgtcggcgcccaaaccgacgaaggtgttgagaattccggaggggtttcttctagtatacaagacttgttaagtaagcttgcaaattaa

SEQ ID NO: 2352 - DNA, 1230 bp, Artificial Sequence
  Description of Artificial Sequence: Synthetic polynucleotide
atgcctttctcttctgagcaattcacaaccaaattaaatacgttggaagattcccaagaatctatttccagtgcctccaagtggttgcttttacagtatagagatgctcccaaagtggcagaaatgtggaaagaatacatgttaaggcctagtgtaaacacaagaaggaagttattgggtctttacttaatgaatcatgttgttcaacaggctaaaggtcaaaaaattattcaatttcaagattcctttggaaaggtggcagcagaagtattgggaagaattaatcaagagtttccgagggacttgaaaaagaagttgtccagagttgtgaatatattgaaagaaagaaatatattttccaagcaggtagtcaatgacatagaaagaagtcttaaaaccgagagctctccagtggaagcgttggtgttaccccagaaattgaaagattttgctaaggactatgaaaaattagtgaaaatgcaccataatgtttgcgcgatgaaaatgagatttgacaaatcttctgatgaattggatccatccagctctgtttacgaggaaaattttaaaacaataagtaagattgggaacatggctaaagatataataaatgaaagtattttgaaaagagaaagcggtatccataaattacaaagcacattagacgatgaaaaaaggcatttggatgaggaacagaatatgttaagtgaaatagaattcgttttatctgctaaagacccatccagattaaataaaaacgttgatgaagacaatattattcctacgtatgaagtgggggatggagatgacgatgacgatgatggtgataatgatgatgatgatgatgatgatgatgatgacaaaaattacgatgatagatccaatgacagcaattatggcgttactaatattagcaccacagataagaagaatgaagttgtagaaaagacagatagcgaacataaaaactctactcataatcctagtgacaatcaatttggtatgaaaagaacacatgatatgataggtcatgatgacgctaatgacataccggaaaaaaaggttcatcttgattctaagacgagtgaagatggtactttcaacagtgaggatggacattatgagttagatatagaaggccacgtcggcgcccaaaccgacgaaggtgttgagaattccggaggggtttcttctagtatacaagacttgttaagtaagcttgcaaattga

SEQ ID NO: 2353 - DNA, 3234 bp, Saccharomyces cerevisiae
atggaggaaggacctatcaaaaagaaactgaagtcagcaggtcaagggagtggaaagaccgatgcctttagaaattttgaacaattttttttccgccttaatactctttacacctttttgatttgcagaaagcatgttgtgcctacatttaaaacactttgtggacctatagaaactgctttgaaaagaactgtgacgaaagaagacctagccatggttatggcgctaatgccaagagaatgtgttttcaagtatattgatgagaaccaaatttatactgaaactaagatttttgacttcaataatggcggctttcagcagaaggaaaatgacatatttgaactgaaggacgttgatgaccaaaatcagactcaaaaatctactcagttacttatatttgaatttatagacggtacaatgcaacgctcatggtctgcaagtgatagattttctcaaataaagataccaacatatactacggaggaaatgaaaaagatgatttctaaaagggaagctctctttaaatccagactacgggaatttatcctggaaaaggaaaaggctaaccttgacccattttctgagttaacaaatctagcgcagaaatatattccaagggagagagattatgaggatcctattgaggcaatgatgaaggcgaagcaagaaagtaatgagatgagcattcccaattattccaataattcagtgataacaacaattcctcaaatgattgagaaattaaaaagtactgaattctacgcttctcagataaagcattgttttacaataccatcaagaacagcgaagtataaaggtctctgttttgagcttgcaccggaagtatatcagggtatggaacacgaaaatttctacagccatcaagcagatgcgataaacagtcttcatcaaggcgaaaacgtcattattacaacatcgacctcttcaggtaaatcccttatttaccaactagcagctatcgatcttcttttaaaggatcctgaatcaacgtttatgtatatatttccaacaaaggccctggcacaagatcaaaaaagagcattcaaggtaatactttcaaagatccccgagctaaagaatgccgtggttgatacgtatgacggcgatacggagccagaggaaagagcttatattcgtaaaaatgctagagttatttttaccaatcctgacatgatacataccagcattttacctaatcatgcaaattggagacattttttgtaccatctaaagttagtggtggtcgatgaattgcatatatataagggtttatttggatcgcacgtggcattagtgatgagacgtttactaagactgtgccactgtttttacgaaaatagtggtttacaatttatttcatgttctgcaactttaaagtctccagtacaacatatgaaggacatgtttggaattaatgaggttacgctaatacacgaggatggctcacctacaggtgctaagcatctagtggtgtggaatcctccaattttacctcaacacgaacgtaaacgagaaaatttcattagagagagtgcaaagatattggtacaattgatattgaacaacgtaagaaccatagcattttgctacgttcgtcgtgtttgtgaattgttgatgaaagaagttcgcaatatttttattgaaactgggcgtgaggatctggttacagaagtcatgtcttacaggggtggttattctgcttccgacagacgtaaaatagaacgtgagatgtttcacggaaatttaaaggctgtcatatctaccaatgctctagaacttggtattgatatcggtggactagacgcagtcttgatgtgcggtttcccactatcaatggcgaattttcatcaacaaagtggtagagctggaagaagaaataatgattctttaaccctcgtggttgcaagtgactcgcctgttgatcaacattatgttgctcatccagaatccttgctggaggttaataatttcgaatcttatcaagatttggttcttgatttcaataacattttgatactggaaggacacatacaatgcgctgctttcgaactgccaataaattttgaacgtgacaagcaatactttactgaatctcatcttcgcaaaatctgtgttgaacgcttacatcacaatcaagatgggtaccacgccagtaatagatttttaccatggccgtccaagtgtgtatctttgagaggcggagaagaagatcaatttgccgtagtggatataacaaatggaagaaatataataattgaggaaatagaagcatccaggactagttttactttatatgatggcggtatattcattcaccaaggctatccctaccttgtgaaggagtttaatcctgatgaaagatatgctaaagtgcaaagagtagatgttgactgggtaaccaaccaaagagactttacagatgtagatccacaggaaattgaacttatacgctctttaaggaatagtgatgttcctgtttactttggtaagatcaagactacaattattgtatttggcttttttaaagtagacaagtacaagaggatcatcgatgccatcgaaacccataaccctcctgtaataatcaattctaaaggattatggatagatatgccaaaatatgccttagaaatttgccaaaagaagcaattaaatgtagcaggagctattcacggggcgcaacatgcaattatgggtatgttaccgcgatttatagtggcgggtgtggatgaaatacaaactgaatgcaaagctccggaaaaggaatttgcagaacgtcaaactaaacgaaagcgaccagctagattaatattctatgattccaagggcggtaagtacgggtctggcttgtgtgttaaagcgtttgagcatattgatgatattatagagtctagtttaagaagaatagaagaatgcccatgcagcgatggatgtcctgactgtgtagcggcttctttttgtaaggaaaacagcctggtcctgtcgaaacctggcgcccaagtcgttttgcattgtattctaggtcactcggaagatagttttatagatcttatcaaagatggtccagagccaaatatgccagagataaaagtagagactgttattcctgtgtcagagcatgtcaacttttcagatgattttaagattattgacgttagaagagctacgaaagacgatactcatacaaatgaaatcattaaaaaagagatatga

SEQ ID NO: 2354 - DNA, 3234 bp, Artificial Sequence
  Description of Artificial Sequence: Synthetic polynucleotide
atggaggaaggacctatcaaaaagaaattgaagtctgcaggtcaagggagtggaaagaccgatgcctttagaaattttgaacaattttttttccgccttaatactctttacacctttttgatttgcagaaagcatgttgtgcctacatttaaaacactttgtggacctatagaaactgctttgaaaagaactgtgacgaaagaagacttggccatggttatggcgttaatgccaagagaatgtgttttcaagtatattgatgagaaccaaatttatactgaaactaagatttttgacttcaataatggcggctttcagcagaaggaaaatgacatatttgaattgaaggacgttgatgaccaaaatcagactcaaaaatctactcagttacttatatttgaatttatagacggtacaatgcaacgcagttggtctgcaagtgatagattttctcaaataaagataccaacatatactacggaggaaatgaaaaagatgatttctaaaagggaagctctctttaaatccagattaagagaatttatcttggaaaaggaaaaggctaaccttgacccattttctgagttaacaaatttggcgcagaaatatattccaagggagagagattatgaggatcctattgaggcaatgatgaaggcgaagcaagaaagtaatgagatgagcattcccaattattccaataattctgtgataacaacaattcctcaaatgattgagaaattaaaaagtactgaattctacgcttctcagataaagcattgttttacaataccatctagaacagcgaagtataaaggtctctgttttgagcttgcaccggaagtatatcagggtatggaacacgaaaatttctacagccatcaagcagatgcgataaacagtcttcatcaaggcgaaaacgtcattattacaacatctacctcttctggtaaatcccttatttaccaattggcagctatcgatcttcttttaaaggatcctgaaagtacgtttatgtatatatttccaacaaaggccttggcacaagatcaaaaaagagcattcaaggtaatactttccaagatccccgagttgaagaatgccgtggttgatacgtatgacggcgatacggagccagaggaaagagcttatattcgtaaaaatgctagagttatttttaccaatcctgacatgatacataccagcattttacctaatcatgcaaattggagacattttttgtaccatttgaagttagtggtggtcgatgaattgcatatatataagggtttatttggatctcacgtggcattagtgatgagacgtttattaagattgtgccactgtttttacgaaaatagtggtttacaatttattagttgttctgcaactttaaagtctccagtacaacatatgaaggacatgtttggaattaatgaggttacgttgatacacgaggatggctctcctacaggtgctaagcatttggtggtgtggaatcctccaattttacctcaacacgaacgtaaaagagaaaatttcattagagagagtgcaaagatattggtacaattgatattgaacaacgtaagaaccatagcattttgctacgttcgtcgtgtttgtgaattgttgatgaaagaagttcgcaatatttttattgaaactgggcgtgaggatttggttacagaagtcatgtcttacaggggtggttattctgcttccgacagacgtaaaatagaacgtgagatgtttcacggaaatttaaaggctgtcatatctaccaatgctttggaacttggtattgatatcggtggattggacgcagtcttgatgtgcggtttcccattatctatggcgaattttcatcaacaaagtggtagagctggaagaagaaataatgattctttaaccctcgtggttgcaagtgactctcctgttgatcaacattatgttgctcatccagaatccttgttggaggttaataatttcgaatcttatcaagatttggttcttgatttcaataacattttgatattggaaggacacatacaatgcgctgctttcgaattaccaataaattttgaacgtgacaagcaatactttactgaatctcatcttcgcaaaatctgtgttgaacgcttacatcacaatcaagatgggtaccacgccagtaatagatttttaccatggccgtccaagtgtgtatctttgagaggcggagaagaagatcaatttgccgtagtggatataacaaatggaagaaatataataattgaggaaatagaagcatccaggactagttttactttatatgatggcggtatattcattcaccaaggctatccctaccttgtgaaggagtttaatcctgatgaaagatatgctaaagtgcaaagagtagatgttgactgggtaaccaaccaaagagactttacagatgtagatccacaggaaattgaacttatacgctctttaaggaatagtgatgttcctgtttactttggtaagatcaagactacaattattgtatttggcttttttaaagtagacaagtacaagaggatcatcgatgccatcgaaacccataaccctcctgtaataatcaattctaaaggattatggatagatatgccaaaatatgccttagaaatttgccaaaagaagcaattaaatgtagcaggagctattcacggggcgcaacatgcaattatgggtatgttaccgagatttatagtggcgggtgtggatgaaatacaaactgaatgcaaagctccggaaaaggaatttgcagaacgtcaaactaaaagaaagagaccagctagattaatattctatgattccaagggcggtaagtacgggtctggcttgtgtgttaaagcgtttgagcatattgatgatattatagagtctagtttaagaagaatagaagaatgcccatgcagcgatggatgtcctgactgtgtagcggcttctttttgtaaggaaaacagcttagtcctttctaaacctggcgcccaagtcgttttgcattgtattttgggtcacagtgaagatagttttatagatcttatcaaagatggtccagagccaaatatgccagagataaaagtagagactgttattcctgtgtctgagcatgtcaacttttctgatgattttaagattattgacgttagaagagctacgaaagacgatactcatacaaatgaaatcattaaaaaagagatatga

SEQ ID NO: 2355 - DNA, 1866 bp, Saccharomyces cerevisiae
atgttcgaccaattagcagtctttacccctcaaggtcaagtactttaccaatataactgtttaggaaaaaagttttctgaaatacaaattaacagctttatatcccagctgattacttccccagtaactagaaaagaaagtgttgcaaacgcaaatacagacggatttgatttcaatcttttaacaatcaacagcgaacacaaaaattctccttcatttaatgcactattttatttgaataagcaaccagaattgtatttcgtagtgacttttgccgagcagactttagagcttaatcaagaaactcaacaaacacttgcactggtgttaaaactctggaactcattgcatttaagtgaatccattctaaaaaatcgtcagggccaaaacgaaaagaacaagcataactacgtcgatattcttcagggaattgaagacgacctgaagaaatttgagcaatattttaggataaaatatgaagagtcaataaaacaagaccatatcaatccagataattttaccaaaaatggatcagtaccccaatcgcataataaaaataccaagaaaaaattgagggatacaaaaggtaagaagcaatctacaggaaatgttggtagtgggagaaagtggggccgtgatggtggcatgcttgatgaaatgaatcatgaagatgcagccaaattagatttctcatcatccaacagccacaatagtagccaagtagctctagactccactattaataaagattcttttggggatagaacagaaggaggcgatttcttaatcaaagaaattgatgatcttttgtcttctcataaagacgagataactagtgggaacgaagctaaaaattctggatacgtcagtacagcttttggattccttcaaaaacacgttctaggtaacaaaacgatcaatgaaagtgatttgaaatctgtattagagaagttaacacaacaattgataaccaaaaatgtagcaccagaggcagcagactatttaacacagcaagtctcacatgatcttgtaggctcaaaaactgcaaattggaccagtgttgagaatactgctcgtgaatctttaacaaaagcattaactcaaatattaacgcctggtgtatccgttgatctcctccgtgaaattcagagcaaaagaagcaaaaaggatgaagaaggtaaatgtgatccctatgtgttctctatagttggtgttaatggtgttggtaagtcaacaaatctttcaaagctagcgttttggttactgcaaaataatttcaaggtcttaattgttgcttgtgatacgtttaggtctggtgcagttgagcaactaagggtccatgttgaaaatttggcacagctaatggatgattcacacgttcgtggctccaagaacaaaaggggtaaaactggtaatgactacgttgaactatttgaagctggttatggtggatctgacttggtaaccaaaattgcaaagcaagccatcaaatattctcgtgatcaaaacttcgatatagtgttaatggatactgccgggagaaggcataatgatcctactttaatgtcgccattgaagtctttcgctgaccaagccaagccagataaaatcattatggttggagaggctttagtaggtactgattctgtccagcaagccaaaaattttaatgatgccttcggaaagggaagaaatcttgacttctttattatctccaagtgtgacacagttggtgaaatgctgggtactatggtaaatatggtttatgctacggggattcctatcttattcgttggcgtgggacaaacctataccgatttgaggacattaagcgtaaaatgggctgttaatacattaatgtcttaa

SEQ ID NO: 2356 - DNA, 1866 bp, Artificial Sequence
  Description of Artificial Sequence: Synthetic polynucleotide
atgttcgaccaattagcagtctttacccctcaaggtcaagtactttaccaatataactgtttaggaaaaaagttttctgaaatacaaattaacagctttatatcccagttgattacttccccagtaactagaaaagaaagtgttgcaaacgcaaatacagacggatttgatttcaatcttttaacaatcaacagcgaacacaaaaattctccttcttttaatgcattattttatttgaataagcaaccagaattgtatttcgtagtgacttttgccgagcagactttagagcttaatcaagaaactcaacaaacacttgcattggtgttaaaactctggaactctttgcatttaagtgaatccattttgaaaaatcgtcagggccaaaacgaaaagaacaagcataactacgtcgatattcttcagggaattgaagacgacttgaagaaatttgagcaatattttaggataaaatatgaagagagtataaaacaagaccatatcaatccagataattttaccaaaaatggaagtgtaccccaatctcataataaaaataccaagaaaaaattgagggatacaaaaggtaagaagcaatctacaggaaatgttggtagtgggagaaagtggggccgtgatggtggcatgcttgatgaaatgaatcatgaagatgcagccaaattagatttctcttcttccaacagccacaatagtagccaagtagctttggactccactattaataaagattcttttggggatagaacagaaggaggcgatttcttaatcaaagaaattgatgatcttttgtcttctcataaagacgagataactagtgggaacgaagctaaaaattctggatacgtcagtacagcttttggattccttcaaaaacacgttttaggtaacaaaacgatcaatgaaagtgatttgaaatctgtattagagaagttaacacaacaattgataaccaaaaatgtagcaccagaggcagcagactatttaacacagcaagtctctcatgatcttgtaggctctaaaactgcaaattggaccagtgttgagaatactgctcgtgaatctttaacaaaagcattaactcaaatattaacgcctggtgtatccgttgatctcctccgtgaaattcagagcaaaagaagcaaaaaggatgaagaaggtaaatgtgatccctatgtgttctctatagttggtgttaatggtgttggtaagagtacaaatctttccaagttggcgttttggttattacaaaataatttcaaggtcttaattgttgcttgtgatacgtttaggtctggtgcagttgagcaattaagggtccatgttgaaaatttggcacagttgatggatgattctcacgttcgtggctccaagaacaaaaggggtaaaactggtaatgactacgttgaattatttgaagctggttatggtggatctgacttggtaaccaaaattgcaaagcaagccatcaaatattctcgtgatcaaaacttcgatatagtgttaatggatactgccgggagaaggcataatgatcctactttaatgtctccattgaagtctttcgctgaccaagccaagccagataaaatcattatggttggagaggctttagtaggtactgattctgtccagcaagccaaaaattttaatgatgccttcggaaagggaagaaatcttgacttctttattatctccaagtgtgacacagttggtgaaatgttgggtactatggtaaatatggtttatgctacggggattcctatcttattcgttggcgtgggacaaacctataccgatttgaggacattaagcgtaaaatgggctgttaatacattaatgtcttga

SEQ ID NO: 2357 - DNA, 3753 bp, Saccharomyces cerevisiae
atgtctaaaaatagcaacgttaacaacaatagatcccaagagccaaataacatgtttgtgcaaaccacaggaggtggtaaaaacgccccaaagcagattcatgttgcacacagacgttcccaaagtgagttgacaaatttgatgattgaacaattcactttgcagaagcagttggagcaagttcaagcacagcagcaacagttgatggctcagcaacagcaattggcacaacagacaggacaatacctgtcaggaaattctggctctaacaatcatttcacgcctcaaccgcctcaccctcattacaactcaaacggtaattcacctggtatgagtgcaggtggcagcagaagtagaactcactccaggaacaactccggatattatcataattcatatgataacaataacaatagcaataatcctgggtctaactcacacagaaagacgagttcacaatccagcatatatggccattccagaagacattctttaggtctaaatgaagcgaaaaaggctgctgcggaagaacaagctaaaagaatatctgggggtgaagcaggcgtaactgtgaagatagattctgttcaagctgatagtggctcaaattctactacagaacaatctgattttaaatttccaccaccaccaaatgctcatcagggccatcgtcgcgcaacttcaaacctatcacctccctctttcaaatttcctccaaactctcacggggataatgacgatgaattcatagcaacctcttcaacgcaccgccgttcaaagacaagaaacaatgaatattctccaggcattaattccaactggagaaaccaatcacagcaacctcaacagcagctttctccattccgccacagaggatctaattcaagggattacaattccttcaataccttagaacctcctgcgatatttcagcagggacacaaacatcgtgcctctaattcatcagttcatagtttcagttcacaaggtaataataacggaggtggacgtaagtccctatttgcaccctaccttccccaagccaacattccagagctaatccaagaagggagactagtagctggtatattaagagttaataaaaagaatagatcggatgcctgggtctctacagatggcgctcttgatgcggatatttacatttgcggctccaaagatcgtaatagagcacttgaaggtgatttagtcgcggtagaactattagttgtggacgatgtttgggagtccaagaaagaaaaggaagaaaagaagaggagaaaggatgcctctatgcaacacgatctaattcctttgaacagtagtgacgattaccacaacgatgcatctgttactgctgcaacaagcaacaattttctatcttctccctcctcgtctgattcgctaagcaaggatgatttatccgtcagaagaaagaggtcatctactatcaataatgatagtgattccttatcatctcctaccaaatcaggagtaaggagaagaagttcattgaaacaacgtccaactcaaaagaaaaatgacgatgttgaagttgaaggtcagtcattgttattagttgaagaagaagaaatcaacgataaatataagccactttacgcaggccatgtcgttgctgttttggaccgtatccctggtcagttatttagcggtacattaggtttgttgagaccatcccaacaagctaatagcgacaataacaaaccaccacaaagcccaaaaattgcttggttcaagcctactgataagaaggtgccattaattgcaattcctacagaattagctccaaaggactttgttgaaaacgctgataaatactccgaaaagttattcgttgcctctattaaacgttggccaatcacatctttgcatccatttggtattttagtttccgaacttggagatattcacgatcctgatactgaaattgattccattttaagggataacaattttctttcgaatgaatatttggatcaaaaaaatccgcaaaaagaaaaaccaagttttcagccgctaccattaacggctgaaagtctagaatataggaggaattttacggacactaatgagtacaatatctttgcaatttccgagcttggatgggtgtctgaatttgccttacatgtcaggaataacggaaatggtaccctagagctgggttgtcatgttgttgatgtgaccagccatattgaagaaggctcctctgttgataggcgtgcgagaaagaggtcctctgcggtgttcatgccacaaaaacttgtcaatttattaccacaatcgttcaacgacgaactgtcgttggcccctggcaaggaatcagccacgctgtcggttgtttacactctagactcatctactttaaggattaaatctacttgggtaggcgaatctacaatttccccctcaaacatcttgtctttagaacaattagacgaaaaattatctactggaagtcccactagctacctctctactgtacaggaaattgctagatcattttatgctagaagaataaatgatccagaagctacattacttcccaccctgtccttattggaaagcttggatgacgaaaaagttaaggttgacttgaacatcctggatagaactttaggctttgttgtaattaatgagattaaaagaaaggtcaactccactgttgcagagaaaatttacaccaaacttggtgatctagctcttttgagaaggcagatgcaacccattgcaaccaagatggcgtcatttagaaagaaaattcaaaattttggttacaattttgataccaatacggcggatgaattaatcaaaggggtgctaaaaattaaagatgacgatgttagagtcggaattgaaattttactgtttaaaaccatgccaagagctagatactttattgctggcaaagtagacccggaccaatatgggcattatgccttgaacctacctatctacacacatttcacagcgccaatgagaagatacgctgatcatgtcgttcataggcaattaaaggccgttatccacgatactccatacaccgaagatatggaagctttgaagattacctccgaatattgtaattttaaaaaggactgtgcttatcaagcacaggaacaagcaattcatctattgttgtgtaaaacaatcaacgacatgggaaatactacaggacaattattaacaatggctactgtcttacaagtttacgagtcctcctttgatgtatttattccagaatttggtattgaaaagagagttcatggagatcaactacctttgatcaaagctgagtttgatggtaccaatcgtgtcttggaattgcattggcagcccggcgtagatagtgcaacttttataccagcagatgaaaaaaatccaaaatcctatagaaattccattaagaacaaattcagatccacagccgctgagattgcgaatattgaactagataaagaagcggaatctgaaccattgatcagcgatccattgagtaaggaactcagcgatttgcatctaacagtaccaaatttaaggctaccatctgcaagcgacaacaagcaaaatgctttagaaaaattcatttctactactgaaaccagaattgaaaatgataactatatacaagaaatacatgaattgcaaaagattcctattctattgagagctgaggtggggatggctttgccatgtttaaccgtccgtgcattaaatccattcatgaagagggtataa

SEQ ID NO: 2358 - DNA, 3753 bp, Artificial Sequence
  Description of Artificial Sequence: Synthetic polynucleotide
atgtctaaaaatagcaacgttaacaacaatagatcccaagagccaaataacatgtttgtgcaaaccacaggaggtggtaaaaacgccccaaagcagattcatgttgcacacagacgttcccaaagtgagttgacaaatttgatgattgaacaattcactttgcagaagcagttggagcaagttcaagcacagcagcaacagttgatggctcagcaacagcaattggcacaacagacaggacaatacctttctggaaattctggctctaacaatcatttcacgcctcaaccgcctcaccctcattacaactccaacggtaattctcctggtatgagtgcaggtggcagcagaagtagaactcactccaggaacaactccggatattatcataattcttatgataacaataacaatagcaataatcctgggtctaactctcacagaaagacgagttctcaatccagcatatatggccattccagaagacattctttaggtttgaatgaagcgaaaaaggctgctgcggaagaacaagctaaaagaatatctgggggtgaagcaggcgtaactgtgaagatagattctgttcaagctgatagtggcagtaattctactacagaacaatctgattttaaatttccaccaccaccaaatgctcatcagggccatcgtcgcgcaacttctaacttatctcctccctctttcaaatttcctccaaactctcacggggataatgacgatgaattcatagcaacctcttctacgcaccgccgttccaagacaagaaacaatgaatattctccaggcattaattccaactggagaaaccaatctcagcaacctcaacagcagctttctccattccgccacagaggatctaattctagggattacaattccttcaataccttagaacctcctgcgatatttcagcagggacacaaacatcgtgcctctaattcttctgttcatagtttcagttctcaaggtaataataacggaggtggacgtaagtccttatttgcaccctaccttccccaagccaacattccagagttgatccaagaagggagattggtagctggtatattaagagttaataaaaagaatagaagtgatgcctgggtctctacagatggcgctcttgatgcggatatttacatttgcggctccaaagatcgtaatagagcacttgaaggtgatttagtcgcggtagaattattagttgtggacgatgtttgggagtccaagaaagaaaaggaagaaaagaagaggagaaaggatgcctctatgcaacacgatttgattcctttgaacagtagtgacgattaccacaacgatgcatctgttactgctgcaacaagcaacaattttttatcttctccctcctcttctgattctttaagcaaggatgatttatccgtcagaagaaagaggtcttctactatcaataatgatagtgattccttatcttctcctaccaaaagtggagtaaggagaagaagttctttgaaacaacgtccaactcaaaagaaaaatgacgatgttgaagttgaaggtcagtctttgttattagttgaagaagaagaaatcaacgataaatataagccactttacgcaggccatgtcgttgctgttttggaccgtatccctggtcagttatttagcggtacattaggtttgttgagaccatcccaacaagctaatagcgacaataacaaaccaccacaaagcccaaaaattgcttggttcaagcctactgataagaaggtgccattaattgcaattcctacagaattagctccaaaggactttgttgaaaacgctgataaatactccgaaaagttattcgttgcctctattaaacgttggccaatcacatctttgcatccatttggtattttagtttccgaacttggagatattcacgatcctgatactgaaattgattccattttaagggataacaattttctttctaatgaatatttggatcaaaaaaatccgcaaaaagaaaaaccaagttttcagccgttaccattaacggctgaaagtttagaatataggaggaattttacggacactaatgagtacaatatctttgcaatttccgagcttggatgggtgtctgaatttgccttacatgtcaggaataacggaaatggtaccttagagttaggttgtcatgttgttgatgtgaccagccatattgaagaaggctcctctgttgataggcgtgcgagaaagaggtcctctgcggtgttcatgccacaaaaacttgtcaatttattaccacaaagtttcaacgacgaattatctttggcccctggcaaggaaagtgccacgttaagtgttgtttacactttggactcttctactttaaggattaaatctacttgggtaggcgaatctacaatttccccctctaacatcttgtctttagaacaattagacgaaaaattatctactggaagtcccactagctacctctctactgtacaggaaattgctagatctttttatgctagaagaataaatgatccagaagctacattacttcccaccttatccttattggaaagcttggatgacgaaaaagttaaggttgacttgaacatcttagatagaactttaggctttgttgtaattaatgagattaaaagaaaggtcaactccactgttgcagagaaaatttacaccaaacttggtgatttggctcttttgagaaggcagatgcaacccattgcaaccaagatggcgtcttttagaaagaaaattcaaaattttggttacaattttgataccaatacggcggatgaattaatcaaaggggtgttgaaaattaaagatgacgatgttagagtcggaattgaaattttactttttaaaaccatgccaagagctagatactttattgctggcaaagtagacccggaccaatatgggcattatgccttgaacttgcctatctacacacatttcacagcgccaatgagaagatacgctgatcatgtcgttcataggcaattaaaggccgttatccacgatactccatacaccgaagatatggaagctttgaagattacctccgaatattgtaattttaaaaaggactgtgcttatcaagcacaggaacaagcaattcatcttttgttgtgtaaaacaatcaacgacatgggaaatactacaggacaattattaacaatggctactgtcttacaagtttacgagtcctcctttgatgtatttattccagaatttggtattgaaaagagagttcatggagatcaattacctttgatcaaagctgagtttgatggtaccaatcgtgtcttggaattgcattggcagcccggcgtagatagtgcaacttttataccagcagatgaaaaaaatccaaaatcctatagaaattccattaagaacaaattcagatccacagccgctgagattgcgaatattgaattagataaagaagcggaatctgaaccattgatcagcgatccattgagtaaggaactcagcgatttgcatttaacagtaccaaatttaaggttaccatctgcaagcgacaacaagcaaaatgctttagaaaaattcatttctactactgaaaccagaattgaaaatgataactatatacaagaaatacatgaattgcaaaagattcctattttattgagagctgaggtggggatggctttgccatgtttaaccgtccgtgcattaaatccattcatgaagagggtatga

SEQ ID NO: 2359 - DNA, 1770 bp, Saccharomyces cerevisiae
atgagtggagtatcaaataaaacagtatcaattaatggttggtatggcatgccaattcatttactaagggaagaaggcgactttgcccagtttatgattctaaccatcaacgaattaaaaatagccatacatggttacctcagaaataccccatggtacaacatgttgaaggattatttgtttgtgatcttttgttacaagctaataagtaattttttttatctgttgaaagtttatgggccggtgaggttagcagtgagaacatacgagcatagttccagaagattgtttcgttggttattggactcaccatttttgaggggtaccgtagaaaaggaagtcacaaaggtcaaacaatcgatcgaagacgaactaattagatcggactctcagttaatgaatttcccacagttgccatccaatgggatacctcaggatgatgttattgaagagctaaataaattgaacgacttgataccacatacccaatggaaggaaggaaaggtctctggtgccgtttaccacggtggtgatgatttgatccacttacaaacaatcgcatacgaaaaatattgcgttgccaatcaattacatcccgatgtctttcctgccgtacgtaaaatggaatccgaagtggtttctatggttttaagaatgtttaatgccccttctgatacaggttgtggtaccacaacttcaggtggtacagaatccttgcttttagcatgtctgagcgctaaaatgtatgcccttcatcatcgtggaatcaccgaaccagaaataattgctcccgtaactgcacatgctgggtttgacaaagctgcttattactttggcatgaagctacgccacgtggagctagatccaacgacatatcaagtggacctgggaaaagtgaaaaaattcatcaataagaacacaattttactggtcggttccgctccaaactttcctcatggtattgccgatgatattgaaggattgggtaaaatagcacaaaaatataaacttcctttacacgtcgacagttgtctaggttcctttattgtttcatttatggaaaaggctggttacaaaaatctgccattacttgactttagagtcccgggagtcacctcaatatcatgtgacactcataaatatggatttgcaccaaaaggctcgtcagttataatgtatagaaacagcgacttacgaatgcatcagtattacgtaaatcctgcttggactggcgggttatatggctctcctacattagcagggtccaggcctggtgctattgtcgtaggttgttgggccactatggtcaacatgggtgaaaatgggtacattgagtcgtgccaagaaatagtcggtgcagcaatgaagtttaaaaaatacatccaggaaaacattccagacctgaatataatgggcaaccctagatattcagtcatttcattttcttcaaagaccttgaacatacacgaactatctgacaggttgtccaagaaaggctggcatttcaatgccctacaaaagccggttgcactacacatggccttcacgagattgagcgctcatgttgtggatgagatctgcgacattttacgtactaccgtgcaagagttgaagagcgaatcaaattctaaaccatccccagacggaactagcgctctatatggtgtcgccgggagcgttaaaactgctggcgttgcagacaaattgattgtgggattcctagacgcattatacaagttgggtccaggagaggataccgccaccaagtag

SEQ ID NO: 2360 - DNA, 1770 bp, Artificial Sequence
  Description of Artificial Sequence: Synthetic polynucleotide
atgagtggagtatctaataaaacagtatctattaatggttggtatggcatgccaattcatttattgagggaagaaggcgactttgcccagtttatgattttgaccatcaacgaattaaaaatagccatacatggttacctcagaaataccccatggtacaacatgttgaaggattatttgtttgtgatcttttgttacaagttaataagtaattttttttatcttttgaaagtttatgggccggtgaggttagcagtgagaacatacgagcatagttccagaagattgtttcgttggttattggactctccatttttgaggggtaccgtagaaaaggaagtcacaaaggtcaaacaatccatcgaagacgaattgattagaagtgactctcagttaatgaatttcccacagttgccatccaatgggatacctcaggatgatgttattgaagagttgaataaattgaacgacttgataccacatacccaatggaaggaaggaaaggtctctggtgccgtttaccacggtggtgatgatttgatccacttacaaacaatcgcatacgaaaaatattgcgttgccaatcaattacatcccgatgtctttcctgccgtacgtaaaatggaatccgaagtggtttctatggttttaagaatgtttaatgccccttctgatacaggttgtggtaccacaacttctggtggtacagaatccttgcttttagcatgtttgagcgctaaaatgtatgcccttcatcatcgtggaatcaccgaaccagaaataattgctcccgtaactgcacatgctgggtttgacaaagctgcttattactttggcatgaagttgcgccacgtggagttagatccaacgacatatcaagtggacttgggaaaagtgaaaaaattcatcaataagaacacaattttattggtcggttccgctccaaactttcctcatggtattgccgatgatattgaaggattgggtaaaatagcacaaaaatataaacttcctttacacgtcgacagttgtttaggttcctttattgtttcttttatggaaaaggctggttacaaaaatttaccattacttgactttagagtcccgggagtcaccagtatatcttgtgacactcataaatatggatttgcaccaaaaggctcttctgttataatgtatagaaacagcgacttaagaatgcatcagtattacgtaaatcctgcttggactggcgggttatatggctctcctacattagcagggtccaggcctggtgctattgtcgtaggttgttgggccactatggtcaacatgggtgaaaatgggtacattgagagttgccaagaaatagtcggtgcagcaatgaagtttaaaaaatacatccaggaaaacattccagacttgaatataatgggcaaccctagatattctgtcatttccttttcttccaagaccttgaacatacacgaattatctgacaggttgtccaagaaaggctggcatttcaatgccttgcaaaagccggttgcattgcacatggccttcacgagattgagcgctcatgttgtggatgagatctgcgacattttacgtactaccgtgcaagagttgaagagcgaaagtaattctaaaccatccccagacggaactagcgctttgtatggtgtcgccgggagcgttaaaactgctggcgttgcagacaaattgattgtgggattcttggacgcattatacaagttgggtccaggagaggataccgccaccaagtga

SEQ ID NO: 2361 - DNA, 2025 bp, Saccharomyces cerevisiae
atgagtaggaaaaattctaagaaactaaaagtctattacttacctgtaacgctaacccaatttcaaaaggatttatcagaaattttgatatccctgcacgccaagtcattcaaagcaagcataataggagaaccacaggcagatgcagtgaacaagccttccggcttacctgctggccctgaaacacatccgtatccaacgctatcacaaaggcaattaacctatatctttgattcaaacataagagcaatagccaatcatccttcccttctagtggaccattatatgcctcgacagcttttgagaatggagcccacggaaagctctattgctgggagccacaagtttcaagttctcaaccagctcattaattcgatatgctttagagacagagagggctcaccaaacgaagttataaaatgtgccatcatcgcacacagcataaaggaattagatttgctagaaggtttaatattaggcaagaaattcagaaccaagagactttccggtacatctctttataatgagaaacacaaattccctaatctacctacggtcgattccacaataaataaagatggaacaccaaattctgtaagcagcacaagctctaattccaattcgacctcttatacaggttattctaaggacgactatgattactcagtgaaaagaaacctgaaaaaaagaaaaataaatacggatgactggctgtttttagccactaccaaacatctcaaacacgatcaatacctattggctaactatgatatagatatgataattagttttgatccaatgttggaagttgaattgcccgctttgcaggtactgaggaataatgccaataaggatattccgataataaagctattagtacaaaattctccagatcattacttgttagattctgaaatcaagaattcaagtgttaaatcgtcgcatttgagcaataacggtcatgtcgatgatagccaagaatatgaagagatcaaatcctccttactatattttttgcaagcaaggaatgctccggtgaacaactgtgagattgattatattaaattggtaaagtgttgtttagaggggaaagattgcaataacattttaccggttttggatttgataacgttagatgaggcctccaaagattcgagcgattctgggttttggcagcctcaattaacaaaattgcaatattcgtctacagaattgcccctttgggacggaccattggatatcaaaacctaccaaacagagttaatgcatagagccgtcataagattgcgagatatacaggacgagtatgccaaaggcactgttccactgtacgagaaacgattaaacgaaactcaacggcagaaccagttggacgaaataaagaattctgttggtcttacattcaagaaaaaacaagaagtggaaaaatccattaatgactctgaaaaaaggttgaagcatgcgatgacagaatctaccaagctacaaaataaaataaatcacttactgaaaaataggcaggaactagagaatttcaacaaattgccctcgaatactatttcatcagaaaatcatctggaagagggatctgccttagcagacaagttgaaggaatacatagacaaaaatgcgactctttttaataagttaaaggaactccaacaagcaaatgcggaaaaatcaaagctcaatgatgaactacgttccaaatatcaaatagaatcttcaaaagccgcagagtccgcgcaaacattgaaaattttgcaagaatcaatgaagtctttagaaaacgaagttaatggtccactgactaaattttccacagaaagcttgaagaaggagctggaacgtttacagaatgattttcagtcgcttaaagcaagaaacaaattcttaaagaattacataaccttaatgaaccgacagtacgacttaaaaaacaaaaacaacgtccaggtggaaaaagctgccgcaaatggtacacggtttagatcaacaagatccaatacccctaattacacatga

SEQ ID NO: 2362 - DNA, 2025 bp, Artificial Sequence
  Description of Artificial Sequence: Synthetic polynucleotide
atgagtaggaaaaattctaagaaattgaaagtctattacttacctgtaacgttgacccaatttcaaaaggatttatctgaaattttgatatccttgcacgccaagagtttcaaagcaagcataataggagaaccacaggcagatgcagtgaacaagccttccggcttacctgctggccctgaaacacatccgtatccaacgttatctcaaaggcaattaacctatatctttgattccaacataagagcaatagccaatcatccttcccttttagtggaccattatatgcctcgtcagcttttgagaatggagcccacggaaagctctattgctgggagccacaagtttcaagttctcaaccagctcattaattctatatgctttagagacagagagggctctccaaacgaagttataaaatgtgccatcatcgcacacagcataaaggaattagatttgttggaaggtttaatattaggcaagaaattcagaaccaagagactttccggtacatctctttataatgagaaacacaaattccctaatttacctacggtcgattccacaataaataaagatggaacaccaaattctgtaagcagcacaagctctaattccaattctacctcttatacaggttattctaaggacgactatgattactctgtgaaaagaaacttgaaaaaaagaaaaataaatacggatgactggttatttttagccactaccaaacatctcaaacacgatcaatacttgttggctaactatgatatagatatgataattagttttgatccaatgttggaagttgaattgcccgctttgcaggtattgaggaataatgccaataaggatattccgataataaagcttttagtacaaaattctccagatcattacttgttagattctgaaatcaagaatagtagtgttaaaagctctcatttgagcaataacggtcatgtcgatgatagccaagaatatgaagagatcaaatcctccttattatattttttgcaagcaaggaatgctccggtgaacaactgtgagattgattatattaaattggtaaagtgttgtttagaggggaaagattgcaataacattttaccggttttggatttgataacgttagatgaggcctccaaagattctagcgattctgggttttggcagcctcaattaacaaaattgcaatattcttctacagaattgcccctttgggacggaccattggatatcaaaacctaccaaacagagttaatgcatagagccgtcataagattgagagatatacaggacgagtatgccaaaggcactgttccattgtacgagaaaagattaaacgaaactcaaagacagaaccagttggacgaaataaagaattctgttggtcttacattcaagaaaaaacaagaagtggaaaaatccattaatgactctgaaaaaaggttgaagcatgcgatgacagaatctaccaagttacaaaataaaataaatcacttattgaaaaataggcaggaattagagaatttcaacaaattgccctccaatactatttcttctgaaaatcatttggaagagggatctgccttagcagacaagttgaaggaatacatagacaaaaatgcgactctttttaataagttaaaggaactccaacaagcaaatgcggaaaaatccaagctcaatgatgaattgcgttccaaatatcaaatagaatcttctaaagccgcagagtccgcgcaaacattgaaaattttgcaagaaagtatgaagtctttagaaaacgaagttaatggtccattgactaaattttccacagaaagcttgaagaaggagttagaacgtttacagaatgattttcagtctcttaaagcaagaaacaaattcttaaagaattacataaccttaatgaacagacagtacgacttaaaaaacaaaaacaacgtccaggtggaaaaagctgccgcaaatggtacaagatttagatctacaagatccaatacccctaattacacatga

SEQ ID NO: 2363 - DNA, 681 bp, Saccharomyces cerevisiae
atgaaggtaaaccattcaatttcaagattccgccccgcttcatggttcgaaaagacaaagataatcccaccccaggtatacatctttaggaacctagagtatggacaagtactatattctcaatttcccaacttttcgcaaacacaggtggataagctgtttgtgagaccaaactggagcaacagaaagccatcattgagaagggacatctggaaatgtatgtgtgtagtgaacttgcaaaactataagcagagtgtccatctataccagaacctctgccggttgagatacctccgtgatgtggcacagcgtaaggagagtgacaagctaagaaaaaaggactctaacgggcacgtctggtatagcggacagtatagacctacatattgtcaagaggcagtggcagacttgcgggagtccttgttgaaggtgtttgagaatgccacaccagcagaaaagcagacagtacccgccaaaaaaccgtccatatactgggaggacccatggaggatgggtgacaaggacaaacattggaattacgatgtgttcaatgctctggggctggaacacaagcttattcagcgtgtggggaacattgcgagggaagaaagcgttattctgaaggaactagctaagctcgaatcacatcctacagagcagacggaagtgtcttcccagtag

SEQ ID NO: 2364 - DNA, 681 bp, Artificial Sequence
  Description of Artificial Sequence: Synthetic polynucleotide
atgaaggtaaaccattctatttctagattccgccccgcttcttggttcgaaaagacaaagataatcccaccccaggtatacatctttaggaacttggagtatggacaagtattatattctcaatttcccaacttttctcaaacacaggtggataagttatttgtgagaccaaactggagcaacagaaagccatctttgagaagggacatctggaaatgtatgtgtgtagtgaacttgcaaaactataagcagagtgtccatctttaccagaacctctgcagattgagatacctccgtgatgtggcacagcgtaaggagagtgacaagttgagaaaaaaggactctaacgggcacgtctggtatagcggacagtatagacctacatattgtcaagaggcagtggcagacttgagagagtccttgttgaaggtgtttgagaatgccacaccagcagaaaagcagacagtacccgccaaaaaaccgtccatatactgggaggacccatggaggatgggtgacaaggacaaacattggaattacgatgtgttcaatgctttagggttggaacacaagcttattcagcgtgtggggaacattgcgagggaagaaagcgttattttgaaggaattggctaagctcgaaagtcatcctacagagcagacggaagtgtcttcccagtga

SEQ ID NO: 2365 - DNA, 1050 bp, Saccharomyces cerevisiae
atgaacgtaacatcgaatgcaactgcagccggttcctttccactagcatttggtctcaagacctcatttgggtttatgcactatgccaaggcccctgccattaatttacgccccaaggaatccttgctgccggaaatgagtgatggtgtgctggccttggttgcgccggttgttgcctactgggcgttgtctggtatattccatgtaatagacactttccatctggctgagaagtacagaattcatccgagcgaagaggttgccaagaggaacaaggcgtcgagaatgcatgttttccttgaagtgattctacaacatatcatacagaccattgttggccttatctttatgcacttcgagccgatctacatgactgggtttgaagaaaatgccatgtggaagcttcgtgcagaccttcctcggattattccagatgccgctatttattacggctatatgtacggaatgtccgctttgaagatctttgcaggctttttattcgttgatacatggcaatactttttgcatagattgatgcatatgaataagaccttatacaaatggttccactctgttcatcatgaactatacgtgccatatgcttacggtgctcttttcaacaatcctgttgagggcttcttgttagatactttgggaaccggtattgccatgacgttaactcatttgactcacagagagcaaatcattctttttacctttgccaccatgaagactgtcgatgaccactgtgggtatgctttgccacttgacccattccaatggcttttccctaataacgctgtctatcacgatatccaccaccagcaatttggtatcaagacgaactttgctcaaccatttttcactttctgggacaatttgttccaaactaactttaaagggtttgaagaatatcaaaagaagcaaagacgtgtcaccatcgacaagtacaaagagtttttgcaagagagagaattggaaaagaaggagaaactcaaaaacttcaaagctatgaatgctgctgaaaatgaagtaaagaaagagaaataa

SEQ ID NO: 2366 - DNA, 1050 bp, Artificial Sequence
  Description of Artificial Sequence: Synthetic polynucleotide
atgaacgtaacaagtaatgcaactgcagccggttcctttccattggcatttggtctcaagacctcttttgggtttatgcactatgccaaggcccctgccattaatttacgccccaaggaatccttgttaccggaaatgagtgatggtgtgcttgccttggttgcgccggttgttgcctactgggcgttgtctggtatattccatgtaatagacactttccatttggctgagaagtacagaattcatccgagcgaagaggttgccaagaggaacaaggcgtccagaatgcatgttttccttgaagtgattttacaacatatcatacagaccattgttggccttatctttatgcacttcgagccgatctacatgactgggtttgaagaaaatgccatgtggaagcttcgtgcagaccttcctagaattattccagatgccgctatttattacggctatatgtacggaatgtccgctttgaagatctttgcaggctttttattcgttgatacatggcaatactttttgcatagattgatgcatatgaataagaccttatacaaatggttccactctgttcatcatgaattatacgtgccatatgcttacggtgctcttttcaacaatcctgttgagggcttcttgttagatactttgggaaccggtattgccatgacgttaactcatttgactcacagagagcaaatcattctttttacctttgccaccatgaagactgtcgatgaccactgtgggtatgctttgccacttgacccattccaatggcttttccctaataacgctgtctatcacgatatccaccaccagcaatttggtatcaagacgaactttgctcaaccatttttcactttctgggacaatttgttccaaactaactttaaagggtttgaagaatatcaaaagaagcaaagacgtgtcaccatcgacaagtacaaagagtttttgcaagagagagaattggaaaagaaggagaaactcaaaaacttcaaagctatgaatgctgctgaaaatgaagtaaagaaagagaaatga

SEQ ID NO: 2367 - DNA, 639 bp, Saccharomyces cerevisiae
atgtttaatagagtctttaccaggtcatttgcatcaagcttaagagctgctgcttccaaagctgctgctcccccaccggtgagattgttcggtgttgagggcacttacgcaacagctttatatcaggccgctgcaaagaactcctctattgatgctgcctttcaatctttgcaaaaagttgaaagcacagtcaaaaagaatccaaaattaggtcacttattactgaatcctgcattgtcattgaaggacagaaattctgtcattgatgccatcgtggagactcacaagaatttggatggttatgtcgttaacctattgaaggttctttccgaaaataacagactgggatgttttgaaaaaattgcgtctgactttggcgttttaaacgatgctcacaacgggttacttaaaggtacagtgactagtgctgaaccattggatcctaaatctttcaagaggattgaaaaagctttgagcgcctccaaattggtggggcaaggtaaatctttgaagctggaaaacgtggttaagccagagattaagggtggtttgattgtagaacttggtgacaagactgttgacttaagcatttctacaaagattcaaaaactgaataaggtcttagaggacagcatttaa

SEQ ID NO: 2368 - DNA, 639 bp, Artificial Sequence
  Description of Artificial Sequence: Synthetic polynucleotide
atgtttaatagagtctttaccaggtcttttgcaagtagcttaagagctgctgcttccaaagctgctgctcccccaccggtgagattgttcggtgttgagggcacttacgcaacagctttatatcaggccgctgcaaagaactcctctattgatgctgcctttcaatctttgcaaaaagttgaaagcacagtcaaaaagaatccaaaattaggtcacttattattgaatcctgcattgtctttgaaggacagaaattctgtcattgatgccatcgtggagactcacaagaatttggatggttatgtcgttaaccttttgaaggttctttccgaaaataacagattaggatgttttgaaaaaattgcgtctgactttggcgttttaaacgatgctcacaacgggttacttaaaggtacagtgactagtgctgaaccattggatcctaaatctttcaagaggattgaaaaagctttgagcgcctccaaattggtggggcaaggtaaatctttgaagttggaaaacgtggttaagccagagattaagggtggtttgattgtagaacttggtgacaagactgttgacttaagcatttctacaaagattcaaaaattgaataaggtcttagaggacagcatttga

SEQ ID NO: 2369 - DNA, 1605 bp, Saccharomyces cerevisiae
atggaaaaatcactagcggatcaaatttccgatatcgccattaaaccggtcaataaagacttcgatattgaagatgaggaaaatgcatctttatttcaacacaatgaaaaaaatggagaaagtgatttaagcgactatggaaatagcaacacagaagaaaccaagaaggcgcactatttggaggtggaaaagtctaagttaagagcagaaaaaggtttagaactaaacgatccaaaatatacaggtgttaaaggttcaagacaagcattatatgaagaagtttccgagaatgaggacgaagaagaagaagaagaagaggaagaagaaaaagaggaagatgctctttcattcaggacagattctgaagatgaagaagtagagattgatgaagaagaatcagacgcggacggcggtgaaacggaggaggctcaacagaaaaggcatgcactatcgaaactaattcaacaagagactaaacaagctattaacaaactgtctcaatcagttcaaagagatgcttcgaagggttattccattttacaacagacaaaattatttgacaacatcattgatttgagaataaaactacaaaaagctgtaattgcagcaaataagctcccattaactacagagtcctgggaagaggctaaaatggatgattcagaggaaacaaagcgtttgctgaaggaaaacgaaaaactgttcaataatttattcaatcggttgataaatttcagaataaaattccaacttggcgatcatatcactcaaaatgaagaggtggcgaagcataaattgtccaaaaaaagatctctcaaagagctttaccaagaaactaatagcttagactcagaactaaaagagtacaggactgccgtattaaacaagtggtctaccaaagtttcttctgcatcaggtaacgctgctttatcatctaacaaattcaaagctatcaacttacctgcagatgtacaagtcgaaaaccaattatccgatatgtcccgtttgatgaaaagaacaaagttgaacaggagaaacataacgcctttgtatttccaaaaagactgtgctaatggcaggctaccagaattgatttctcccgttgtcaaagatagtgttgatgacaatgagaattcggatgatgggcttgatatcccgaaaaactatgacccaagaagaaaggataacaatgccattgacattaccgaaaacccatatgtttttgatgacgaagatttttaccgtgttttactaaacgatttaattgacaaaaagatttccaacgctcacaattctgaaagtgcagcaattacaatcacctcaactaatgctcgttcgaacaacaagctaaagaagaatatcgatactaaggcttccaagggtaggaaattgaactactcagttcaagatccaattgcgaattatgaagcccccatcacatccggatacaaatggtcagacgaccaaatcgatgaattctttgcgggattgttaggtcaacgagtgaactttaatgaaaatgaggatgaggaacaacatgccagaatagaaaatgacgaagaattagaggctgttaaaaacgatgatatccaaatctttggttga

SEQ ID NO: 2370 - DNA, 1605 bp, Artificial Sequence
  Description of Artificial Sequence: Synthetic polynucleotide
atggaaaaatctttagcggatcaaatttccgatatcgccattaaaccggtcaataaagacttcgatattgaagatgaggaaaatgcatctttatttcaacacaatgaaaaaaatggagaaagtgatttaagcgactatggaaatagcaacacagaagaaaccaagaaggcgcactatttggaggtggaaaagtctaagttaagagcagaaaaaggtttagaattgaacgatccaaaatatacaggtgttaaaggttccagacaagcattatatgaagaagtttccgagaatgaggacgaagaagaagaagaagaagaggaagaagaaaaagaggaagatgctctttctttcaggacagattctgaagatgaagaagtagagattgatgaagaagaaagtgacgcggacggcggtgaaacggaggaggctcaacagaaaaggcatgcattatccaaattgattcaacaagagactaaacaagctattaacaaattatctcaatctgttcaaagagatgcttccaagggttattccattttacaacagacaaaattatttgacaacatcattgatttgagaataaaattacaaaaagctgtaattgcagcaaataagctcccattaactacagagtcctgggaagaggctaaaatggatgattctgaggaaacaaagcgtttgttgaaggaaaacgaaaaattattcaataatttattcaatagattgataaatttcagaataaaattccaacttggcgatcatatcactcaaaatgaagaggtggcgaagcataaattgtccaaaaaaagatctctcaaagagctttaccaagaaactaatagcttagactctgaattgaaagagtacaggactgccgtattaaacaagtggtctaccaaagtttcttctgcatctggtaacgctgctttatcttctaacaaattcaaagctatcaacttacctgcagatgtacaagtcgaaaaccaattatccgatatgtcccgtttgatgaaaagaacaaagttgaacaggagaaacataacgcctttgtatttccaaaaagactgtgctaatggcaggttaccagaattgatttctcccgttgtcaaagatagtgttgatgacaatgagaattctgatgatgggcttgatatcccgaaaaactatgacccaagaagaaaggataacaatgccattgacattaccgaaaacccatatgtttttgatgacgaagatttttaccgtgttttattaaacgatttaattgacaaaaagatttccaacgctcacaattctgaaagtgcagcaattacaatcacctctactaatgctcgttctaacaacaagttgaagaagaatatcgatactaaggcttccaagggtaggaaattgaactactctgttcaagatccaattgcgaattatgaagcccccatcacatccggatacaaatggtctgacgaccaaatcgatgaattctttgcgggattgttaggtcaaagagtgaactttaatgaaaatgaggatgaggaacaacatgccagaatagaaaatgacgaagaattagaggctgttaaaaacgatgatatccaaatctttggttga

SEQ ID NO: 2371 - DNA, 1287 bp, Saccharomyces cerevisiae
atgaaggatgctaatgagagtaaatcgtatactatagtgatcaaattaggctcttcatcgctagtagatgaaaaaaccaaagaacctaagttagctatcatgtcgcttattgtcgaaactgtagtcaaattgagaagaatgggacacaaagttatcatcgtgtccagtggtggtattgctgttggtttgaggactatgcgtatgaataaaagaccaaaacatttagcagaagttcaggccatcgcagctattgggcagggtagattgatcgggagatgggatcttctgttttcgcaatttgatcaacgtatcgctcaaattctattgaccagaaatgatattctggactggacccaatataagaacgctcaaaacacaattaatgaattgttgaacatgggcgttattcccattgtgaatgaaaacgacacactatctgttagagaaatcaaatttggtgacaatgacactttatcagcaattacttctgctttaatccatgcagattatcttttcttactgacagatgttgactgtttgtatactgataatccaaggacaaacccagatgccatgccgatcttagttgtcccagatctctcaaagggtttgcccggtgtgaatactgctggtggttcaggttctgacgttgggaccggtggtatggaaactaaattggttgctgcagatttggcaacgaatgccggtgttcatacgttgatcatgaaaagcgatacacctgcgaatataggtagaattgtcgagtatatgcaaactctagaacttgacgatgaaaataaagttaaacaagcatataatggcgatttaacggatttgcaaaaaagagaatttgagaaattaaaggctcttaacgttccactacatacgaagttcattgctaatgataataaacaccatctaaagaatagagagttttggattttacacggtcttgtctctaaaggcgctgttgttatagaccaaggtgcgtacgcagccttaacaaggaaaaataaggcgggattattgccagcaggtgttattgatgttcagggcactttccatgagttagaatgtgttgacataaaagttggtaaaaagttaccagatggcacgttagatccagattttcccttgcaaacagtaggcaaggcaagatgcaattacacgagttctgaattaactaaaattaaaggtttgcacagtgaccaaatcgaagaggaattgggctataatgacagcgaatatgtcgctcatagagaaaatttggcattcccacctcgttga

SEQ ID NO: 2372 - DNA, 1287 bp, Artificial Sequence
  Description of Artificial Sequence: Synthetic polynucleotide
atgaaggatgctaatgagagtaaaagttatactatagtgatcaaattaggctcttcttctttagtagatgaaaaaaccaaagaacctaagttagctatcatgtctcttattgtcgaaactgtagtcaaattgagaagaatgggacacaaagttatcatcgtgtccagtggtggtattgctgttggtttgaggactatgcgtatgaataaaagaccaaaacatttagcagaagttcaggccatcgcagctattgggcagggtagattgatcgggagatgggatcttttattttctcaatttgatcaacgtatcgctcaaattttattgaccagaaatgatattttggactggacccaatataagaacgctcaaaacacaattaatgaattgttgaacatgggcgttattcccattgtgaatgaaaacgacacattatctgttagagaaatcaaatttggtgacaatgacactttaagtgcaattacttctgctttaatccatgcagattatcttttcttattaacagatgttgactgtttgtatactgataatccaaggacaaacccagatgccatgccgatcttagttgtcccagatctctctaagggtttgcccggtgtgaatactgctggtggttctggttctgacgttgggaccggtggtatggaaactaaattggttgctgcagatttggcaacgaatgccggtgttcatacgttgatcatgaaaagcgatacacctgcgaatataggtagaattgtcgagtatatgcaaactttggaacttgacgatgaaaataaagttaaacaagcatataatggcgatttaacggatttgcaaaaaagagaatttgagaaattaaaggctcttaacgttccattgcatacgaagttcattgctaatgataataaacaccatttgaagaatagagagttttggattttacacggtcttgtctctaaaggcgctgttgttatagaccaaggtgcgtacgcagccttaacaaggaaaaataaggcgggattattgccagcaggtgttattgatgttcagggcactttccatgagttagaatgtgttgacataaaagttggtaaaaagttaccagatggcacgttagatccagattttcccttgcaaacagtaggcaaggcaagatgcaattacacgagttctgaattaactaaaattaaaggtttgcacagtgaccaaatcgaagaggaattgggctataatgacagcgaatatgtcgctcatagagaaaatttggcattcccacctcgttga

SEQ ID NO: 2373 - DNA, 4074 bp, Saccharomyces cerevisiae
atgaatgtatatgatgatgtgcttgacgctactgttgtgtctcattcattagcaacacattttactacttcagattatgaggagctcttagtggtgcgaacaaatatcctttctgtctacaggcctactagggatggtaaactgtatttgactgatgagtttaagtttcatggcttgatcaccgatataggcctcattccccaaaaagacagtccgttaagttgcctgcttttatgcacaggcgtcgctaaaatctctattttaaagttcaacacgctaacaaactcaatcgataccctaagcctgcattactacgaaggaaagttcaagggtaaatcgttggtagagctggccaaaatttccaccttgagaatggatcctggaagttcttgtgccttactgttcaataatgacattatcgcttttctacccttccatgtcaataaaaatgacgacgatgaggaggaagaagatgaggacgagaacatagacgatagtgaattaatccatagcatgaatcaaaaatcccaagggacgaatactttcaataagaggaagagaaccaagttaggtgacaagttcacggctccaagcgtggtattggtagcgagtgagttgtacgaaggcgccaaaaatatcatagatattcagttcttgaaaaattttactaaaccaacgatagcgctcttataccaaccaaagcttgtttgggcaggaaacaccaccatttcaaaactccctacacaatacgttatactcacattaaatatccagcctgcagaaagtgccaccaagattgaatcaaccacaatagcatttgtcaaggaactgccttgggatctacacaccattgtacctgtttcgaatggtgctatcattgtgggaaccaatgaactggcatttctagataatactggcgttttacaatcgacagtattattaaactcatttgctgataaagagttacagaaaacaaaaattatcaacaattcttcattggaaattatgttcagggagaaaaacactacgtcaatttggataccttcgtccaagagcaaaaacggaggaagtaataatgacgaaacactactacttatggacttgaaatccaatatatactatatccaaatggaagcagagggcaggttactgattaaattcgatattttcaagctacctatagtcaatgatcttttgaaggagaactccaatccaaaatgtataacacgtttgaatgccaccaattcaaacaaaaatatggacttatttattgggtttggttcaggaaatgctttggttctcagattgaataatttgaaatctaccattgaaacaagagaagcacacaatccatcttcaggtacaaatagtttgatggatatcaatgacgacgatgatgaggaaatggacgatttatacgccgatgaagctcctgaaaatggactaacaactaatgattccaaaggcactgtggaaactgttcaacctttcgatatcgaactgttatcatctctaaggaatgttggtcccatcacatcgttaactgtaggtaaggtatcttccattgatgatgtggtaaaaggactaccaaatccaaacaaaaacgagtattcgctagttgccacatcgggaaatggttcaggttctcatttgaccgtcatacagactagtgttcaaccggaaattgaattagcattgaaatttatcagtataacacaaatctggaatctgaagatcaaaggaagagataggtacttaataactactgattccacaaaatcccggagtgacatatatgaaagtgacaataacttcaaacttcataagggcggccgtttaagaagagatgctactacagtttacatttcaatgtttggtgaagaaaaaagaataatacaagtcaccaccaatcacttatatttatatgatacacattttagacgtctcaccacaattaaatttgactacgaagttattcatgtttccgtcatggatccgtatatactagttaccgtatcaaggggtgatattaagatatttgaattggaggaaaagaataaaagaaaattgttaaaagttgatttgccagaaattttgaatgaaatggttattacatctggtttgattttgaaaagcaatatgtgtaatgaatttttgattgggttgagtaagtctcaagaagaacagttattgtttacatttgttactgcagataaccaaattatcttttttactaaagaccataatgacagaatctttcaactaaatggtgttgaccaattaaatgaatctttatacattagcacttatcaactgggcgatgagatcgtccctgatccatcgattaaacaagtaatgataaacaaactgggccatgacaataaagaagaatacctgacaatattaaccttcggaggagagatttaccaatatagaaaattaccacaaagacgtagtagattttatagaaacgttacaagaaatgatctagctattactggtgctcctgacaatgcatacgccaagggtgttagttccatcgaaagaatcatgcattactttcccgattacaacggttattcggtaatatttgtaaccggtagcgttccatacatattaataaaagaagatgattccacaccgaagattttcaaattcggaaacataccattggtttcagtcactccctggagcgagcgttcagtcatgtgtgtagatgatattaaaaacgccagagtttacacactaactactgacaatatgtactatggtaacaaattaccattgaaacagataaagatcagcaatgtgcttgatgactacaaaactctgcaaaaactagtctatcatgaaagggctcaattgtttcttgtatcttattgcaagcgggttccttacgaagcattaggagaagatggcgaaaaagtaattggttatgacgagaatgttcctcatgcggaaggatttcaaagtggaattttactcattaatccaaaaagttggaaggtcattgataaaatcgactttccaaagaattctgtcgtcaatgaaatgagatcctctatgattcaaattaattcaaaaactaagaggaaaagagaatacattatagccggtgttgccaatgccaccactgaagacactccaccaactggcgctttccatatttatgatgtgatagaagttgttcccgaacctggtaaacctgataccaattataagctcaaggaaatttttcaagaagaggtcagtggtactgtatctactgtttgtgaggttagtggaagattcatgattagtcaaagccaaaaagttctagtaagagatatccaagaagataattccgtcataccagtggcatttttggatattcctgttttcgttacggattctaaaagctttggtaatcttttgataattggtgacgctatgcaggggttccaatttattggttttgacgcagaaccatacaggatgatttcattgggcagaagtatgtcgaaatttcaaacaatgtcgctagagtttttagtgaacggaggggatatgtattttgcggcaacagatgctgacagaaatgttcatgttttaaaatatgcgccagatgaacccaactctctttcgggtcaacgtttagtccactgctccagtttcacgttgcattccaccaatagttgtatgatgcttttaccaagaaacgaggaatttggctctcctcaagtgccatcgtttcaaaacgttggtggccaagtggatgggtcagtcttcaagatagttcctttaagtgaggaaaaatacagaagactttatgtgattcaacaacaaatcatcgatcgagaattacagctaggtggtttaaaccctcgcatggaaagattggccaacgacttttatcagatgggtcactctatgaggcctatgcttgatttcaacgttatacggaggttctgtggattagctattgatagacggaaaagcattgcgcagaaagcaggaagacatgcgcattttgaagcatggagagatatcataaatattgaattttcaatgagatctttatgccagggtaagtga

SEQ ID NO: 2374 - DNA, 4074 bp, Artificial Sequence
  Description of Artificial Sequence: Synthetic polynucleotide
atgaatgtatatgatgatgtgcttgacgctactgttgtgtctcattctttagcaacacattttactacttctgattatgaggagctcttagtggtgagaacaaatatcctttctgtctacaggcctactagggatggtaaactttatttgactgatgagtttaagtttcatggcttgatcaccgatataggcctcattccccaaaaagacagtccgttaagttgcttgcttttatgcacaggcgtcgctaaaatctctattttaaagttcaacacgttgacaaactctatcgataccttgagcttgcattactacgaaggaaagttcaagggtaaatctttggtagagttggccaaaatttccaccttgagaatggatcctggaagttcttgtgccttattattcaataatgacattatcgcttttttgcccttccatgtcaataaaaatgacgacgatgaggaggaagaagatgaggacgagaacatagacgatagtgaattaatccatagcatgaatcaaaaatcccaagggacgaatactttcaataagaggaagagaaccaagttaggtgacaagttcacggctccaagcgtggtattggtagcgagtgagttgtacgaaggcgccaaaaatatcatagatattcagttcttgaaaaattttactaaaccaacgatagcgctcttataccaaccaaagcttgtttgggcaggaaacaccaccatttccaaactccctacacaatacgttatactcacattaaatatccagcctgcagaaagtgccaccaagattgaaagtaccacaatagcatttgtcaaggaattaccttgggatttacacaccattgtacctgtttctaatggtgctatcattgtgggaaccaatgaattggcatttttggataatactggcgttttacaaagtacagtattattaaactcttttgctgataaagagttacagaaaacaaaaattatcaacaattcttctttggaaattatgttcagggagaaaaacactacgtccatttggataccttcttccaagagcaaaaacggaggaagtaataatgacgaaacattgttacttatggacttgaaatccaatatatactatatccaaatggaagcagagggcaggttattgattaaattcgatattttcaagttacctatagtcaatgatcttttgaaggagaactccaatccaaaatgtataacacgtttgaatgccaccaatagcaacaaaaatatggacttatttattgggtttggttctggaaatgctttggttctcagattgaataatttgaaatctaccattgaaacaagagaagcacacaatccatcttctggtacaaatagtttgatggatatcaatgacgacgatgatgaggaaatggacgatttatacgccgatgaagctcctgaaaatggattaacaactaatgattccaaaggcactgtggaaactgttcaacctttcgatatcgaattattatcttctttgaggaatgttggtcccatcacaagtttaactgtaggtaaggtatcttccattgatgatgtggtaaaaggattaccaaatccaaacaaaaacgagtattctttggttgccacatctggaaatggttctggttctcatttgaccgtcatacagactagtgttcaaccggaaattgaattagcattgaaatttatcagtataacacaaatctggaatttgaagatcaaaggaagagataggtacttaataactactgattccacaaaatccagaagtgacatatatgaaagtgacaataacttcaaacttcataagggcggccgtttaagaagagatgctactacagtttacatttccatgtttggtgaagaaaaaagaataatacaagtcaccaccaatcacttatatttatatgatacacattttagacgtctcaccacaattaaatttgactacgaagttattcatgtttccgtcatggatccgtatatattagttaccgtaagtaggggtgatattaagatatttgaattggaggaaaagaataaaagaaaattgttaaaagttgatttgccagaaattttgaatgaaatggttattacatctggtttgattttgaaaagcaatatgtgtaatgaatttttgattgggttgagtaagtctcaagaagaacagttattgtttacatttgttactgcagataaccaaattatcttttttactaaagaccataatgacagaatctttcaattgaatggtgttgaccaattaaatgaatctttatacattagcacttatcaattaggcgatgagatcgtccctgatccatctattaaacaagtaatgataaacaaattgggccatgacaataaagaagaatacttgacaatattaaccttcggaggagagatttaccaatatagaaaattaccacaaagacgtagtagattttatagaaacgttacaagaaatgatttggctattactggtgctcctgacaatgcatacgccaagggtgttagttccatcgaaagaatcatgcattactttcccgattacaacggttattctgtaatatttgtaaccggtagcgttccatacatattaataaaagaagatgattccacaccgaagattttcaaattcggaaacataccattggtttctgtcactccctggagcgagcgtagtgtcatgtgtgtagatgatattaaaaacgccagagtttacacattgactactgacaatatgtactatggtaacaaattaccattgaaacagataaagatcagcaatgtgcttgatgactacaaaactttacaaaaattggtctatcatgaaagggctcaattgtttcttgtatcttattgcaagagagttccttacgaagcattaggagaagatggcgaaaaagtaattggttatgacgagaatgttcctcatgcggaaggatttcaaagtggaattttactcattaatccaaaaagttggaaggtcattgataaaatcgactttccaaagaattctgtcgtcaatgaaatgagatcctctatgattcaaattaattctaaaactaagaggaaaagagaatacattatagccggtgttgccaatgccaccactgaagacactccaccaactggcgctttccatatttatgatgtgatagaagttgttcccgaacctggtaaacctgataccaattataagctcaaggaaatttttcaagaagaggtcagtggtactgtatctactgtttgtgaggttagtggaagattcatgattagtcaaagccaaaaagttttggtaagagatatccaagaagataattccgtcataccagtggcatttttggatattcctgttttcgttacggattctaaaagctttggtaatcttttgataattggtgacgctatgcaggggttccaatttattggttttgacgcagaaccatacaggatgatttctttgggcagaagtatgtccaaatttcaaacaatgtctttggagtttttagtgaacggaggggatatgtattttgcggcaacagatgctgacagaaatgttcatgttttaaaatatgcgccagatgaacccaactctctttctggtcaacgtttagtccactgctccagtttcacgttgcattccaccaatagttgtatgatgcttttaccaagaaacgaggaatttggctctcctcaagtgccatcttttcaaaacgttggtggccaagtggatgggtctgtcttcaagatagttcctttaagtgaggaaaaatacagaagactttatgtgattcaacaacaaatcatcgatagagaattacagttgggtggtttaaaccctcgcatggaaagattggccaacgacttttatcagatgggtcactctatgaggcctatgcttgatttcaacgttataagaaggttctgtggattagctattgatagaagaaaaagcattgcgcagaaagcaggaagacatgcgcattttgaagcatggagagatatcataaatattgaattttccatgagatctttatgccagggtaagtga

SEQ ID NO: 2375 - DNA, 660 bp, Saccharomyces cerevisiae
atgccagctaaaaaaaggactagaaagacagtgaaaaaaaccgtatcattctccgatgacacaacattaacaacgcaccaaaatcgtgagaaaaagaacgtagatcatgatcgtccacctgtgtatgtgaggaaaacccctctgatgacatttccataccatttagtagcactactttattactacgtttttgtatcttcaaatttcaatacggtgaagttgctaagttttttgattcctacacaagttgcttatttagttttacaattcaataaatgcacagtttacggtaacaaaatcattaagatcaattactcattgaccattatttgtctaggtgttacatttttgttgagctttcccacaatgttattaactatattatttggtgcgccattaatggacttattgtgggaaacctggctgttgtcactgcattttgcatttttagcataccctgcagtttattctgtatttaattgtgatttcaaagtgggattatggaagaagtattttatctttatcgttgtagggggttggattagttgtgttgtcattcctttggattgggatagagattggcagaattggccaattcctattgttgttggaggttatttgggcgctttggtgggctatactatcggtgcctatatataa

SEQ ID NO: 2376 - DNA, 660 bp, Artificial Sequence
  Description of Artificial Sequence: Synthetic polynucleotide
atgccagctaaaaaaaggactagaaagacagtgaaaaaaaccgtatctttctccgatgacacaacattaacaacgcaccaaaatcgtgagaaaaagaacgtagatcatgatcgtccacctgtgtatgtgaggaaaacccctttgatgacatttccataccatttagtagcattactttattactacgtttttgtatcttccaatttcaatacggtgaagttgttaagttttttgattcctacacaagttgcttatttagttttacaattcaataaatgcacagtttacggtaacaaaatcattaagatcaattactctttgaccattatttgtttaggtgttacatttttgttgagctttcccacaatgttattaactatattatttggtgcgccattaatggacttattgtgggaaacctggttattgtctttgcattttgcatttttagcataccctgcagtttattctgtatttaattgtgatttcaaagtgggattatggaagaagtattttatctttatcgttgtagggggttggattagttgtgttgtcattcctttggattgggatagagattggcagaattggccaattcctattgttgttggaggttatttgggcgctttggtgggctatactatcggtgcctatatatga

SEQ ID NO: 2377 - DNA, 2658 bp, Saccharomyces cerevisiae
atggatattcgtggtagaaaaatgaaaaaaccgcctgcatgcgtgcagtgccgtaagaggaagataggctgcgatcgtgttaagccgatttgtgggaactgtatgaagcataataaaatggactgcttttatccggacgttcccggacaatacgttccctctagttcttcctcttccaatacacgccaagtagccaacggtccgtacttaaactcttattacgcttctcgtcgtgtctccaaggaaactgctgcacttttgcagaaaaatccagaactggcttctttggagcaaataagagaatacaacacgcgtctgcaactgctcaatgctcaaaatcaacttaataatagatcatctgcggcaaatgcaaccttgaatcaacaacacactcaatatattccaaaatcagtgccttccttggaaagtaagccagtcacttctgcaaacgaatcttctactccactcaattgggttcaaggccctgcaatttttcatatgctaacctctccttacacacaagatgaaatcatcaatcatgaaatgaatttcttgaaaggcagactactggaattgcaagaaattacaggtaagaaaattacgggagtaaatcttgatctcaagcaggattcctcagcgcaaatgcagtcttcacactccaatagaaaccaagaggagtttttgacaattaagaaaagaaaactgagtgaagacggcgttacggacggggacggtaagccaattccagagagtgaaagaagacctcatcttaatgaatttaaggatttagatcctcaatttttggatactaataaagtttttaatgtgtttaattctgctatttcagaagaaggtagaaacagattatggctgttaccaaaaaatataaataaaagttctatcttccagattcagtatttgattgaacgtgatcctttcctattcaaattcttcaatgacttgaatatattaattgaaacgcaatttaatggacctttgcacgatttggtagcaagccgtaacagtattgagcgcaacagtggcatatctcaaatattaaagtttccttcacaatcgataacacagacccttatcaacaaatacttatccacgataacggaaacgaattcaatacttccaatattaaaaccaaagagactattacccatagttgagcagctttttccttctaacaccattaataagccaaattctaaagattttgaaactatttttcaagtttttagtgtgaccaatgatcagctactaaatctaggatttattactctctgtctcctgattctttttgaatcgttgaattctacggttttgattcctcttagagatgatgaacacttgcaattattcaatgtgttattcaactacttgcctttgttgaagtctaatttaacaacgcttagatttgaaattgaaaaaaggtcaatgtgtaatatagagaccctgcggtttatttctttgtggaaatattaccaatttgtgatggacacgtcgtcatcgtcctctttcgtaattgattacgacgaagatatgcatatggcatgtttactatcgttaaatcatgaaactcaaaatcaatctcatattttgacctggaatttcatatttaagaactactgctggagacaccttttcttaggtcaattgccgttgctaatgtctgaacctttcacaaattctaccccaattattgatcctttgttgaacaacgattttgaattgattgattttgaagtaaacttgatgaaatatttgcaaagtaaagatcaacaactatccattgataaaattatacagttaatcaagcttttgaaaaataagaatatcgaggtcagccaaggatgtttaacgactccttcaataattaataatatcatggattctctaatctacaggaattcaatgttatatttgaacttttacctcttattgcaatttgaaacattgaaaaattatgctaaatttaacgaaattttggaagactttttggaattgtcgagggagaccttgttctttgttttctcgaacttagccaatattaaatttgctggtcatgaattcacattcatcaataaatctattgtggttctgcaaactttagttttaatgcttttggcgctctatcaaaggtcttttgattcttcaaagaggacgaatgatgctaatgaaatcagtgagcaaacagatattcatagtaataacgacaatagtaagagaataaagaataaaaatgttattcatttaattatcaacaaaattgcaatgttgttaagtgattataccaagaattgtaaaaagcaaaataaactcatcgaaaatctgattattaaaattaagacaatctccaagtatatcaaaaatcttgaggagaataaggtaacgactagcgccgattcaaattattccattaataacggattttctggcatatctgcagagcagttgattaaattaaatcacgagttgagtaaaatttcagaatctctgataaaaacggatttttatgaacagaggaaaaatagcacagtttctaatggagttttaggcgcagcagctcctgttgatagcgacgcaaattcggatactttcggtttaacaaaggagaatttcaacgaagtttttgaggctattcgtagctaa

SEQ ID NO: 2378 - DNA, 2658 bp, Artificial Sequence
  Description of Artificial Sequence: Synthetic polynucleotide
atggatattcgtggtagaaaaatgaaaaaaccgcctgcatgcgtgcagtgccgtaagaggaagataggctgcgatcgtgttaagccgatttgtgggaactgtatgaagcataataaaatggactgcttttatccggacgttcccggacaatacgttccctctagttcttcctcttccaatacacgccaagtagccaacggtccgtacttaaactcttattacgcttctcgtcgtgtctccaaggaaactgctgcacttttgcagaaaaatccagaattggcttctttggagcaaataagagaatacaacacgcgtttacaattgctcaatgctcaaaatcaacttaataatagatcttctgcggcaaatgcaaccttgaatcaacaacacactcaatatattccaaaatctgtgccttccttggaaagtaagccagtcacttctgcaaacgaatcttctactccactcaattgggttcaaggccctgcaatttttcatatgttgacctctccttacacacaagatgaaatcatcaatcatgaaatgaatttcttgaaaggcagattattggaattgcaagaaattacaggtaagaaaattacgggagtaaatcttgatctcaagcaggattcctctgcgcaaatgcagtcttctcactccaatagaaaccaagaggagtttttgacaattaagaaaagaaaattaagtgaagacggcgttacggacggggacggtaagccaattccagagagtgaaagaagacctcatcttaatgaatttaaggatttagatcctcaatttttggatactaataaagtttttaatgtgtttaattctgctatttctgaagaaggtagaaacagattatggttgttaccaaaaaatataaataaaagttctatcttccagattcagtatttgattgaacgtgatcctttccttttcaaattcttcaatgacttgaatatattaattgaaacgcaatttaatggacctttgcacgatttggtagcaagccgtaacagtattgagcgcaacagtggcatatctcaaatattaaagtttccttctcaaagtataacacagacccttatcaacaaatacttatccacgataacggaaacgaattctatacttccaatattaaaaccaaagagattattacccatagttgagcagctttttccttctaacaccattaataagccaaattctaaagattttgaaactatttttcaagtttttagtgtgaccaatgatcagttgttgaatttaggatttattactctctgtctcttgattctttttgaatctttgaattctacggttttgattcctcttagagatgatgaacacttgcaattattcaatgtgttattcaactacttgcctttgttgaagtctaatttaacaacgcttagatttgaaattgaaaaaaggtctatgtgtaatatagagaccttgagatttatttctttgtggaaatattaccaatttgtgatggacacgtcttcttcttcctctttcgtaattgattacgacgaagatatgcatatggcatgtttattatctttaaatcatgaaactcaaaatcaatctcatattttgacctggaatttcatatttaagaactactgctggagacaccttttcttaggtcaattgccgttgttgatgtctgaacctttcacaaattctaccccaattattgatcctttgttgaacaacgattttgaattgattgattttgaagtaaacttgatgaaatatttgcaaagtaaagatcaacaattatccattgataaaattatacagttaatcaagcttttgaaaaataagaatatcgaggtcagccaaggatgtttaacgactccttccataattaataatatcatggattctttgatctacaggaattctatgttatatttgaacttttacctcttattgcaatttgaaacattgaaaaattatgctaaatttaacgaaattttggaagactttttggaattgagtagggagaccttgttctttgttttcagtaacttagccaatattaaatttgctggtcatgaattcacattcatcaataaatctattgtggttttgcaaactttagttttaatgcttttggcgctctatcaaaggtcttttgattcttccaagaggacgaatgatgctaatgaaatcagtgagcaaacagatattcatagtaataacgacaatagtaagagaataaagaataaaaatgttattcatttaattatcaacaaaattgcaatgttgttaagtgattataccaagaattgtaaaaagcaaaataaactcatcgaaaatttaattattaaaattaagacaatctccaagtatatcaaaaatcttgaggagaataaggtaacgactagcgccgattctaattattccattaataacggattttctggcatatctgcagagcagttgattaaattaaatcacgagttgagtaaaatttctgaatctttgataaaaacggatttttatgaacagaggaaaaatagcacagtttctaatggagttttaggcgcagcagctcctgttgatagcgacgcaaattctgatactttcggtttaacaaaggagaatttcaacgaagtttttgaggctattcgtagctga

SEQ ID NO: 2379 - DNA, 678 bp, Saccharomyces cerevisiae
atgaagcttcaatttttttcctttattaccttatttgcttgtctcttcacaacagccatttttgcgaaagaggacacggcagaagatcctgagatcacacacaaggtctactttgacattaatcacggtgataaacaaattggtagaattgttatgggattgtatggtctcaccacaccccaaaccgttgaaaacttttaccagttgaccatttccagggaccctaagatgggttatttgaactctatcttccatcgcgttattcctaacttcatgattcaaggtggcgatttcactcacagatcaggtattgggggtaagtctatcttcggaaacacgttcaaagatgagaattttgatgtcaaacatgacaaaccaggcagattgtctatggccaatcgtggtaaaaacaccaacggatcccaatttttcatcaccaccgtcccatgcccatggttggacggtaagcacgttgtctttggagaagtcttggatggtatggacgtagttcactacattgaaaacgttaagaccgacagtagaaatatgcctgtaaaggaagttattattgtggaaagtggtgaactggaaactgttcctttggacaataaagacgccgccaagctacaggaagagatcaaagcggaagctagcgaagcagcccacgatgaactctaa

SEQ ID NO: 2380 - DNA, 678 bp, Artificial Sequence
  Description of Artificial Sequence: Synthetic polynucleotide
atgaagcttcaatttttttcctttattaccttatttgcttgtctcttcacaacagccatttttgcgaaagaggacacggcagaagatcctgagatcacacacaaggtctactttgacattaatcacggtgataaacaaattggtagaattgttatgggattgtatggtctcaccacaccccaaaccgttgaaaacttttaccagttgaccatttccagggaccctaagatgggttatttgaactctatcttccatcgcgttattcctaacttcatgattcaaggtggcgatttcactcacagatctggtattgggggtaagtctatcttcggaaacacgttcaaagatgagaattttgatgtcaaacatgacaaaccaggcagattgtctatggccaatcgtggtaaaaacaccaacggatcccaatttttcatcaccaccgtcccatgcccatggttggacggtaagcacgttgtctttggagaagtcttggatggtatggacgtagttcactacattgaaaacgttaagaccgacagtagaaatatgcctgtaaaggaagttattattgtggaaagtggtgaattggaaactgttcctttggacaataaagacgccgccaagttacaggaagagatcaaagcggaagctagcgaagcagcccacgatgaactctga

SEQ ID NO: 2381 - DNA, 654 bp, Saccharomyces cerevisiae
atgatcttaagcaaaacaaagaaacctaaaagcatgaataagccaatatatttcagcaagtttcttgtaactgaacaagttttctataagtcaaaatatacgtatgcattggtaaacttgaaaccaattgtacccggacatgtactgatcgttccactgagaactacggttttaaacttatcagatctgaccatgcctgaatctcaagattatttcaagactttacagttaatacatagatttattaagtggcaatataaggctgactctatcaacgttgccatccaagatggacctgaggccggacagtcggtaccccacttgcatacacacattattccacgttataaaataaacaatgtaggggatttaatatacgataaattagatcattgggatggtaatgggactttgactgattggcaaggaagaagagacgaatatttgggtgttggtggtaggcaagcaagaaaaaataactctacatcggccactgtagacggggatgaactctcacaaggtcctaatgtcttgaagccagacagtcaaaggaaggttcgagctttaaccgaaatgaaaaaagaagctgaggatcttcaagccagactagaagaatttgtatcttctgatcctggtttaacacaatggttatag

SEQ ID NO: 2382 - DNA, 654 bp, Artificial Sequence
  Description of Artificial Sequence: Synthetic polynucleotide
atgatcttaagcaaaacaaagaaacctaaaagcatgaataagccaatatatttcagcaagtttcttgtaactgaacaagttttctataagagtaaatatacgtatgcattggtaaacttgaaaccaattgtacccggacatgtattgatcgttccattgagaactacggttttaaacttaagtgatttgaccatgcctgaatctcaagattatttcaagactttacagttaatacatagatttattaagtggcaatataaggctgactctatcaacgttgccatccaagatggacctgaggccggacagtctgtaccccacttgcatacacacattattccacgttataaaataaacaatgtaggggatttaatatacgataaattagatcattgggatggtaatgggactttgactgattggcaaggaagaagagacgaatatttgggtgttggtggtaggcaagcaagaaaaaataactctacatctgccactgtagacggggatgaactctctcaaggtcctaatgtcttgaagccagacagtcaaaggaaggttagagctttaaccgaaatgaaaaaagaagctgaggatcttcaagccagattagaagaatttgtatcttctgatcctggtttaacacaatggttatga

SEQ ID NO: 2383 - DNA, 1437 bp, Saccharomyces cerevisiae
atggcaaacaaatcacgacccaagaaaatcaaggctccttacaggaagtacgtggcgggagagggtttctcctctacaagaaatgataataaggctaaagaattcactatcactataccggaggatgcagaactcattgagactccacaggggtcttattactatgatgaaaccaatgatactatagtgaaattgacacgactgagtaatgaaaaaaaggataaaaaaggacgtaagcagtcgccatcgtcatcatcgacatcgtcctccaaaggagaaaaaaatggcaaagtcatagagagtgaggaagcgaggatgcattcagtatcagtaaagatggttttgccatgggagatacagcatagaataattcattatcttgatataccagagaaagaagaaaaattaaataaaactgctaatggaaaaaaaactacgactggtataaatatgaactacttactagtttgcagaaactggtacgccatgtgtctaccaaagctttattatgcaccagcgttaacaagtaagaatttcaacgggtttgttgatacaataatcataaataaaaagaagaatttaggacactatgtttttgagttgaacttgtctacaattttacaaagtggtagaaattcatttgtctccaagcttttacgacgatgctgttctaacctaactaaattcatcgcaccacagacaagctttggttacgcgcctttgatttcattgaaatcgtgtcatgatttgaaatttttagacttgggtttagtatcggaaacagttaagctgaaggagttattttctgccattaaaaatttcactaaattaacgcatttatcttttcccagatcgtcgattgactgccaagggttccaagatattcaatggccacagaatctcaggtacttgaaattgagtggaggtataacaaatgaatttgtgattgatacgaaatggccaacaactattacaactttagaattctcttattgtcctcaaataacggaattgtctatttattcgttgttatcacagatcggtgataatttaaagcatttattttttcattatccgatgccatctctggcagaaaattccctagaccatgtcttcacgtactgtgctaatttaatttctttgcagctcatggttgattactgttctaagtggtgcttttctgaattcatgctaagtaaattggtggaatatgataggcctcttaaaacattgtacttagaatgcagcggatccttgggattagcttctaagattcatcccgatgacttgactatagccatactggaatccaggctgccctgcctaaagaatatttgtgtttctcccaagctggggtggaacatgaaaagcgatgaagtcgctgatttggtagtctctttggaagatcaagatggcagtttatatcttaattattaa

SEQ ID NO: 2384 - DNA, 1437 bp, Artificial Sequence
  Description of Artificial Sequence: Synthetic polynucleotide
atggcaaacaaatctagacccaagaaaatcaaggctccttacaggaagtacgtggcgggagagggtttctcctctacaagaaatgataataaggctaaagaattcactatcactataccggaggatgcagaactcattgagactccacaggggtcttattactatgatgaaaccaatgatactatagtgaaattgacaagattaagtaatgaaaaaaaggataaaaaaggacgtaagcagtctccatcttcttcttctacatcttcctccaaaggagaaaaaaatggcaaagtcatagagagtgaggaagcgaggatgcattctgtatctgtaaagatggttttgccatgggagatacagcatagaataattcattatcttgatataccagagaaagaagaaaaattaaataaaactgctaatggaaaaaaaactacgactggtataaatatgaactacttattggtttgcagaaactggtacgccatgtgtttgccaaagctttattatgcaccagcgttaacaagtaagaatttcaacgggtttgttgatacaataatcataaataaaaagaagaatttaggacactatgtttttgagttgaacttgtctacaattttacaaagtggtagaaattcttttgtctccaagcttttaaggagatgctgttctaacttgactaaattcatcgcaccacagacaagctttggttacgcgcctttgatttctttgaaaagttgtcatgatttgaaatttttagacttgggtttagtatctgaaacagttaagttgaaggagttattttctgccattaaaaatttcactaaattaacgcatttatcttttcccagatcttccattgactgccaagggttccaagatattcaatggccacagaatctcaggtacttgaaattgagtggaggtataacaaatgaatttgtgattgatacgaaatggccaacaactattacaactttagaattctcttattgtcctcaaataacggaattgtctatttattctttgttatctcagatcggtgataatttaaagcatttattttttcattatccgatgccatctttggcagaaaattccttggaccatgtcttcacgtactgtgctaatttaatttctttgcagctcatggttgattactgttctaagtggtgcttttctgaattcatgttaagtaaattggtggaatatgataggcctcttaaaacattgtacttagaatgcagcggatccttgggattagcttctaagattcatcccgatgacttgactatagccatattggaatccaggttaccctgcttgaagaatatttgtgtttctcccaagttagggtggaacatgaaaagcgatgaagtcgctgatttggtagtctctttggaagatcaagatggcagtttatatcttaattattga

SEQ ID NO: 2385 - DNA, 1989 bp, Saccharomyces cerevisiae
atgaaggacttgagattacaggggccctacagaaagtacattccctataatattttccaacaatgtggaattggtcacttaaagacgcttgattatattttcgcgtttttgattgttattaccaatttcacattaatatggaaatcgcactcttcttcattctggaaccgaccatgggacaataatagtgaacaagaactttcccaattaattcagttttacctagacaaggctttttacatccatgaattgccaccatttacaatacagttctactccattattcgaagattaaagatcgcagaaaatttaagatacgtttctttgtttttgaattcatcgactttaggttttcttttcctgataacaaggagaatcaattgctctcgtttaatttcagcaacaggtttgctgatattatccaactgggaaactttcagaaatgagggcactattatatcatttgacagtttagaatggtgtctgttctcagtagtaatttacagttttataagcatttcaattgcaaaactgggaactacgaattggtttgctaatgtgattacattatctatttctttagggctggcaatctcttctaaatttattggaattgtcacttgggccttcgtaattctttcttttgtacgtcaatttgatagactgataagcgacgttaaagttacgaccatccaaataataaaatttgtcattctctgtctattattcgttttgattatccctggttccatcttcataataagttattcgaacttactttcgaattttaagacagacacgccacaattttcaaaatatatgagcacatatttcaagtcctatttaagaggccctcaagtacaaccgagtcgattgtactatggatcaacgatcacattacgtcatttagattctatggtcggatatcttgcttctcacgatatttcgtatccatcagatgttgacgaacagttagtagcgttatcatttgaagaattcgcggcagacaatgaatggttaatagaacatcctacattaaatttgagtttttctgaggtataccatgctgatcaattgatacctgtagaatttggtcaaagtataaaactaagacacaaatctactggaaaattattgagagccagcactgctaaacctcccatcagcgagcaggactatgactttcaaatttcatgcacgaaagattcaaactacgaaggaggaatggatgagagatgggatgttctcctgattaaagatgaaatcaacaatgataaaaaggataacgcagatgataaatacattaaaccgcttcaatcagagatacgcttttacaataacggccagagatgtgggctattgggccatgatcttcggttacctgaatggggccgctttgagcaagaagtcctatgtatggagtacccagtaataccaagaaccacttttctaatagactcagtacaactaccagtcgatttccaagtcccaatgatagaatattatatcggcaaaataagttcttcagcagaattcaatcataccttatcttggtcacaatttctttatcttttcaaagaatatattttcaaacaatacaagtacaattactatattaaatacggtaaaaataaggtcacttttgaagatgcgttcgccgtggaaaaatggccaattacgttagacacagactctccagtttggtttaattttgcatggtatggatccttactctcgatgatcattttcatgtgcgtgcaatgtaagagaatgatatcttggaatccgtggacaactgctgaaccttccttttctatcaaatgggaggtctacaatgaatttggctgggagtgcattgtcggttggtttttacatttttacatcttcacaatgagtccacacttcaacttggggaaaaaactgtacttccaaagttttttctttagtgtattgtgtcttttagaatcgttagattgccttgcaaagtaa

SEQ ID NO: 2386 - DNA, 1989 bp, Artificial Sequence
  Description of Artificial Sequence: Synthetic polynucleotide
atgaaggacttgagattacaggggccctacagaaagtacattccctataatattttccaacaatgtggaattggtcacttaaagacgcttgattatattttcgcgtttttgattgttattaccaatttcacattaatatggaaatctcactcttcttctttctggaacagaccatgggacaataatagtgaacaagaactttcccaattaattcagttttacttggacaaggctttttacatccatgaattgccaccatttacaatacagttctactccattattagaagattaaagatcgcagaaaatttaagatacgtttctttgtttttgaattcttctactttaggttttcttttcttgataacaaggagaatcaattgctctcgtttaatttctgcaacaggtttgttaatattatccaactgggaaactttcagaaatgagggcactattatatcctttgacagtttagaatggtgtttgttcagtgtagtaatttacagttttataagcatttccattgcaaaattaggaactacgaattggtttgctaatgtgattacattatctatttctttagggttagcaatctcttctaaatttattggaattgtcacttgggccttcgtaattctttcttttgtacgtcaatttgatagattaataagcgacgttaaagttacgaccatccaaataataaaatttgtcattctctgtcttttattcgttttgattatccctggttccatcttcataataagttattccaacttactttctaattttaagacagacacgccacaattttccaaatatatgagcacatatttcaagtcctatttaagaggccctcaagtacaaccgagtagattgtactatggaagtacgatcacattacgtcatttagattctatggtcggatatcttgcttctcacgatatttcttatccaagtgatgttgacgaacagttagtagcgttatcttttgaagaattcgcggcagacaatgaatggttaatagaacatcctacattaaatttgagtttttctgaggtataccatgctgatcaattgatacctgtagaatttggtcaaagtataaaattgagacacaaatctactggaaaattattgagagccagcactgctaaacctcccatcagcgagcaggactatgactttcaaatttcttgcacgaaagattccaactacgaaggaggaatggatgagagatgggatgttctcttgattaaagatgaaatcaacaatgataaaaaggataacgcagatgataaatacattaaaccgcttcaaagtgagatacgcttttacaataacggccagagatgtgggttattgggccatgatcttcgtttacctgaatggggccgctttgagcaagaagtcttatgtatggagtacccagtaataccaagaaccacttttttaatagactctgtacaattaccagtcgatttccaagtcccaatgatagaatattatatcggcaaaataagttcttctgcagaattcaatcataccttatcttggtctcaatttctttatcttttcaaagaatatattttcaaacaatacaagtacaattactatattaaatacggtaaaaataaggtcacttttgaagatgcgttcgccgtggaaaaatggccaattacgttagacacagactctccagtttggtttaattttgcatggtatggatccttactctctatgatcattttcatgtgcgtgcaatgtaagagaatgatatcttggaatccgtggacaactgctgaaccttccttttctatcaaatgggaggtctacaatgaatttggctgggagtgcattgtcggttggtttttacatttttacatcttcacaatgagtccacacttcaacttggggaaaaaactttacttccaaagttttttctttagtgtattgtgtcttttagaatctttagattgccttgcaaagtga

SEQ ID NO: 2387 - DNA, 423 bp, Saccharomyces cerevisiae
atgacagatagattaacacaattgcagatatgtttagaccaaatgacggagcaattctgtgctactttaaactacatagataagaaccatggttttgaacgattgaccgtaaatgaacctcagatgtccgataagcatgccacagtagtacctcctgaggaattttctaacacgatagatgagctatccacggacattatacttaaaacaagacagataaacaagcttattgactcgttacctggtgttgacgtttcagctgaagagcaattaaggaagattgatatgttgcagaaaaagctagttgaagtggaagacgaaaaaattgaggccatcaaaaagaaggagaaacttttaaggcacgttgattctttaattgaagattttgtagatggcattgcaaactcaaaaaagagcacataa

SEQ ID NO: 2388 - DNA, 423 bp, Artificial Sequence
  Description of Artificial Sequence: Synthetic polynucleotide
atgacagatagattaacacaattgcagatatgtttagaccaaatgacggagcaattctgtgctactttaaactacatagataagaaccatggttttgaaagattgaccgtaaatgaacctcagatgtccgataagcatgccacagtagtacctcctgaggaattttctaacacgatagatgagctttccacggacattatacttaaaacaagacagataaacaagcttattgactctttacctggtgttgacgtttctgctgaagagcaattaaggaagattgatatgttgcagaaaaagttggttgaagtggaagacgaaaaaattgaggccatcaaaaagaaggagaaacttttaaggcacgttgattctttaattgaagattttgtagatggcattgcaaactccaaaaagagcacatga

SEQ ID NO: 2389 - DNA, 1152 bp, Saccharomyces cerevisiae
atgactagtgcaagtattaccaatactggaaacgaaaccatgaaccttccacagatgcggtcgatttggctggatgaagatgaagaagctgaaaaactctacggtctgcaggcccagcaattcatgggatctgatgatgaagaaaacctaggcattactttcatcaacagcgataaacctgtgctgagtaacaagaaaaacattgagttgcctccactttcaccaaattcacatccgtcttgccaccacaggagaagtaattctaactctgcaaagtctaaagaatcatcgtcatcatcgtccagcgccaacaagacaaatcacaaaaaggttttccttaagcttaatttgttgaagaaaaagttgcttggtgcccaaccggacataagaggtaaaggtatctccacaccatttgattttcaacatatttcacatgctgacactagaaatggattccaagatgagcaattgcaggaaccttcatcgctgtccacagagattaaggacgactatacctcctcctcaagcaagcgggattcgaaatcactaaataaagcttttgtcactgaaaggatccctgctaatcgtgaaagcaaactcatttcaagatcgcacgaaaataagacatcaagactatcagtcgcgcgttcgatctcagtaacgtcctccaattactctaaaaacacacaaggaaacaatcattccattaatgggagagtcgtatctacgtcaactatggctacatctatttttgagtattccccaaacgcatctccaaaacaatttaaaaataagtcacacgctctgggtcatagatacactaattccacggattctagtgagtcttcgctggattttttgaagaactacaacttccccacactacttgaagataagcctattttagacttcttgcctcgttctcagaggtcaagcgcttatcgtagccttttagagaccccaaactcaaataaggactcagcaaaagccttctttccttcacgccaaagccctcttcccaagagaagaaactctatagctacgccttctccacaatctaaattttcctactctgactcccctgtaaaccatagaaaatctttcgatgatgttctttattctttcaaccagctcgagcccctgcaaacttaa

SEQ ID NO: 2390 - DNA, 1152 bp, Artificial Sequence
  Description of Artificial Sequence: Synthetic polynucleotide
atgactagtgcaagtattaccaatactggaaacgaaaccatgaaccttccacagatgaggtctatttggcttgatgaagatgaagaagctgaaaaactctacggtttacaggcccagcaattcatgggatctgatgatgaagaaaacttgggcattactttcatcaacagcgataaacctgtgttgagtaacaagaaaaacattgagttgcctccactttctccaaattctcatccgtcttgccaccacaggagaagtaattctaactctgcaaagtctaaagaaagttcttcttcttcttccagcgccaacaagacaaatcacaaaaaggttttccttaagcttaatttgttgaagaaaaagttgcttggtgcccaaccggacataagaggtaaaggtatctccacaccatttgattttcaacatatttctcatgctgacactagaaatggattccaagatgagcaattgcaggaaccttcttctttatccacagagattaaggacgactatacctcctcctctagcaagagagattctaaatctttgaataaagcttttgtcactgaaaggatccctgctaatcgtgaaagcaaactcatttctagaagtcacgaaaataagacatctagattaagtgtcgcgcgttccatctctgtaacgtcctccaattactctaaaaacacacaaggaaacaatcattccattaatgggagagtcgtatctacgtctactatggctacatctatttttgagtattccccaaacgcatctccaaaacaatttaaaaataagtctcacgctttgggtcatagatacactaattccacggattctagtgagtcttctttagattttttgaagaactacaacttccccacattgcttgaagataagcctattttagacttcttgcctcgttctcagaggagcagcgcttatcgtagccttttagagaccccaaacagtaataaggactctgcaaaagccttctttccttcccgccaaagccctcttcccaagagaagaaactctatagctacgccttctccacaatctaaattttcctactctgactcccctgtaaaccatagaaaatctttcgatgatgttctttattctttcaaccagctcgagcccttgcaaacttga

SEQ ID NO: 2391 - DNA, 3189 bp, Saccharomyces cerevisiae
atgtctgagaacaccacagccccttctgataacataaccaatgaacagagacttccgtctggacccaaagatgacgtagatacgttagcacttaccagtgctcaaaatcaagctaatagtttgaggaagctagatacagatgcgaacgctaaagctttgccatccatcacagacataccagtcagtgatgattctgatataaaacgacaagttggctctggttttggttcaaatccgcttcatataaaagattccgaggcctttccacattcatctattgaagccctaaaagagggtatggacaaagtcacaaaacaatgcaacgatttgaagacggctttgctttccaaagacacttccctcactgattctgtgcaggatttgtttaactcattaaaagttttatcacacaaccaatcagttttggaaaataagctggatgatgtcatgaagaatcaagtaaatactgacatattggtcaataatttgaatgaacgattgaacaaattatcgacaatgttgcaaaatacttcgaaagtaaatcactctaaccttctcatagaaaattcatccaacaataccagttcacagcataatacctcttcttctcgaaggggacctggcaggccaagaaaagatgcctcgacctccacaatgaataagttagtgtcaaacgcagcctcggtcaatctcaaaagtgcatccaatcagggtgctcctttctcaccagtaaatattactttaccgactgccgtagtacaaacgtctaaatccaaaaggtattttgtggaaccatcaacgaaacaagagtcgcttttattatctgccccttcatcatcaagagatgatgctgatatgtccttgacttccgtaccgcaaagaacgaacaatgaaaatggtaaagagcgaccatccactgctaattctagctccatcacaccaacacctgttacgccgaacaacttaattcaaatcaaaagaaaaagaggcaggcccccaaaaaagagaacagtggaaacaatgatatccaattccacggatacgatagataagtcagatgcatctaatcggattaaaaacgagattccaataaattccttgcttccatcttccaaatttcatcaaataccatcatctccatccaatcctgtgtcacaaccggctccggttcggacttcaaggtcagccacacaagaaatagacattaaaagtttagaactggcctctctaatttcaactaatggtgatccaaacgcagaggattcgaatactactgatactgttcataataacgtggaaggaaaggtaaatgttgaagaaaataaaaccgagaaggagaaaataataaccatcaaatcatccagcgaaaatagtggtaataatacgaccaataataataatactgacaacgtcattaaattttcagctaattcagatatcaatagtgatattcgccgattaatggttaacgatcagttttcattaagttatgacgccagcggtaatattacggtcaaattaccacccgtttcctctccagcagcagcaacagctgccgctgctgcggcggttacgtcagagatgaatagacaacaaagagaattagataaaagacgtgattcaagggagaaaatgcttgttaatatgaaatataacgatcgcgataaagcaaagtcatttatggagtctaataagaaactcttaaaagcaatgaaagaagaagagaggaggaaaagaatgacttcgataatacatgataatcacttgaacttaaatttgaatgagatctccacccgttcaaagataaaaagtgcagaaaaaccaacaactaaaggttcttcaatgtcgccaaaaccaagatcggcctccatcagcggcatttcagaccaccaacaggaaggatatcaaccattagagcaagaaaaactcgtcgatattgacaatgagggctcaaacgcaaacagcgactctctcaagatgggtctaaccatatccgctgccgatacggttcacaaagttggaatacagtccatgctaaattctggggaagaggcaattaccaaggagaatgcagaatatgaaagaaagaccccgggagatgaagaaactaccacgttcgttccattagaaaactcacaaccttcggacacgataaggaaaagaacagcaggcgatgacggtgcattggatcaaacagagaatacgagcatatcaccaaagaagagacgcacagaagatcatacaaaaggtgaagaagatgagggagaaaggggtgttggtaatagcggaacgctggccaccgtggagaatgtctcaggagacatctccgcagatttatccaaaggtacttcatctatccataacgatactgagtctgctaacgatagtagcaatggcaacggaaacctcggtttgggtacagagtcacgcaatacattgttaacggcaactcccattgaattaatctgccgggaaggcttcttctaccggagagatattccggacgttcccattaccacaggagcgtacctggaatttaaattcaaggcgaaagaagaggaattgatcaactctagcatcaatgaggaggattatgctgctaaatcaaagcatgaaaaaatgaatgcgcatttcttcaagcctgatattcaagaagagacggaacttgcctttgaaattttgagcaagacaacgctgacagagaaatacgttaacagtttggagtacttcttgatggaattcaggtgggagaataaactagttggtctaggcttaaaacttcgggaatccaaaagaacctggcaaaggagaaaggcgttatttgcccttttcgaattttggagagaccaatcaagagacaaaagaagattccacaactacaccatcctgcatgcggtgaaagagatggaaaactacagaatatttattaatcgatccgtttcatggttctacaaccatattaccctgctaaaaatgatcctctacgacctctgcgacaatgtgaccactcaatggagagagtggatgtttccccataacgaaacactgccggcattgggtcaggacggcattaacgaagacaatctgaatgaaaccatcgacaacatgttaatttttgacttccttgatgacggttcagaaaacaaccaggtcaaatattccagaatcataccgccagatatccgttaa

SEQ ID NO: 2392 - DNA, 3189 bp, Artificial Sequence
  Description of Artificial Sequence: Synthetic polynucleotide
atgtctgagaacaccacagccccttctgataacataaccaatgaacagagacttccgtctggacccaaagatgacgtagatacgttagcacttaccagtgctcaaaatcaagctaatagtttgaggaagttggatacagatgcgaacgctaaagctttgccatccatcacagacataccagtcagtgatgattctgatataaaaagacaagttggctctggttttggtagtaatccgcttcatataaaagattccgaggcctttccacattcttctattgaagccttgaaagagggtatggacaaagtcacaaaacaatgcaacgatttgaagacggctttgctttccaaagacacttccctcactgattctgtgcaggatttgtttaactctttaaaagttttatcccacaaccaatctgttttggaaaataagttggatgatgtcatgaagaatcaagtaaatactgacatattggtcaataatttgaatgaaagattgaacaaattatctacaatgttgcaaaatacttctaaagtaaatcactctaaccttctcatagaaaattcttccaacaataccagttctcagcataatacctcttcttctagaaggggacctggcaggccaagaaaagatgccagcacctccacaatgaataagttagtgtctaacgcagcctctgtcaatctcaaaagtgcatccaatcagggtgctcctttctctccagtaaatattactttaccgactgccgtagtacaaacgtctaaatccaaaaggtattttgtggaaccatctacgaaacaagagtctcttttattatctgccccttcttcttctagagatgatgctgatatgtccttgacttccgtaccgcaaagaacgaacaatgaaaatggtaaagagagaccatccactgctaattctagctccatcacaccaacacctgttacgccgaacaacttaattcaaatcaaaagaaaaagaggcaggcccccaaaaaagagaacagtggaaacaatgatatccaattccacggatacgatagataagagtgatgcatctaatagaattaaaaacgagattccaataaattccttgcttccatcttccaaatttcatcaaataccatcttctccatccaatcctgtgagtcaaccggctccggttagaacttctaggtctgccacacaagaaatagacattaaaagtttagaattggcctctttgatttctactaatggtgatccaaacgcagaggattctaatactactgatactgttcataataacgtggaaggaaaggtaaatgttgaagaaaataaaaccgagaaggagaaaataataaccatcaaatcttccagcgaaaatagtggtaataatacgaccaataataataatactgacaacgtcattaaattttctgctaattctgatatcaatagtgatattcgcagattaatggttaacgatcagttttctttaagttatgacgccagcggtaatattacggtcaaattaccacccgtttcctctccagcagcagcaacagctgccgctgctgcggcggttacgagtgagatgaatagacaacaaagagaattagataaaagacgtgatagtagggagaaaatgcttgttaatatgaaatataacgatcgcgataaagcaaagagctttatggagtctaataagaaactcttaaaagcaatgaaagaagaagagaggaggaaaagaatgacttccataatacatgataatcacttgaacttaaatttgaatgagatctccacccgttccaagataaaaagtgcagaaaaaccaacaactaaaggttcttctatgtctccaaaaccaagatctgcctccatcagcggcatttctgaccaccaacaggaaggatatcaaccattagagcaagaaaaactcgtcgatattgacaatgagggctctaacgcaaacagcgactctctcaagatgggtttgaccatatccgctgccgatacggttcacaaagttggaatacagtccatgttgaattctggggaagaggcaattaccaaggagaatgcagaatatgaaagaaagaccccgggagatgaagaaactaccacgttcgttccattagaaaactctcaaccttctgacacgataaggaaaagaacagcaggcgatgacggtgcattggatcaaacagagaatacgagcatatctccaaagaagagacgcacagaagatcatacaaaaggtgaagaagatgagggagaaaggggtgttggtaatagcggaacgttggccaccgtggagaatgtcagtggagacatctccgcagatttatccaaaggtacttcttctatccataacgatactgagtctgctaacgatagtagcaatggcaacggaaacctcggtttgggtacagagtcccgcaatacattgttaacggcaactcccattgaattaatctgcagagaaggcttcttctacagaagagatattccggacgttcccattaccacaggagcgtacttggaatttaaattcaaggcgaaagaagaggaattgatcaactctagcatcaatgaggaggattatgctgctaaatccaagcatgaaaaaatgaatgcgcatttcttcaagcctgatattcaagaagagacggaacttgcctttgaaattttgagcaagacaacgttgacagagaaatacgttaacagtttggagtacttcttgatggaattcaggtgggagaataaattggttggtcttggcttaaaacttagagaatccaaaagaacctggcaaaggagaaaggcgttatttgcccttttcgaattttggagagaccaatctagagacaaaagaagattccacaactacaccatcttgcatgcggtgaaagagatggaaaactacagaatatttattaatagatccgtttcctggttctacaaccatattaccttattgaaaatgatcctctacgacctctgcgacaatgtgaccactcaatggagagagtggatgtttccccataacgaaacattgccggcattgggtcaggacggcattaacgaagacaatttgaatgaaaccatcgacaacatgttaatttttgacttccttgatgacggttctgaaaacaaccaggtcaaatattccagaatcataccgccagatatccgttga

SEQ ID NO: 2393 - DNA, 1929 bp, Saccharomyces cerevisiae
atgtcacattccggagctgccatttttgagaaagtttctgggataattgccataaatgaggatgtttcacccgcagaattgacatggaggtctacggacggtgacaaggttcacacagttgtcttatccactattgacaagttacaagctacccctgcttccagtgaaaaaatgatgttgaggctaatcgggaaagtggatgagtcaaaaaagagaaaagacaacgaaggaaatgaggttgtgcccaaaccgcaacgtcatatgttttcgtttaacaatagaacagttatggataatatcaagatgacccttcaacaaatcatctcacggtataaagatgcagatatctacgaagaaaagagaagaagagaggagtctgcgcaacacacagaaacaccaatgagctcttcttctgttactgcagggactcccacaccacatctcgatacaccacaattgaataatggggctccgttgattaatacagccaaactagatgattctctctctaaagaaaaattgttgaccaatttaaagctacagcaatctttactgaaaggaaacaaagttctaatgaaggtttttcaggaaacagtcattaacgccggtttgcctccatctgaattttggtcaactagaattccgttattgagggcttttgccttatctacttctcaaaaagttgggccttacaacgttttgtcaactatcaagccggtggcttcatcggaaaacaaagtcaatgttaatttgtcaagagaaaaaattttgaatatttttgagaactatccaattgtaaagaaagcttacactgataatgtgcccaaaaatttcaaagaaccagagttctgggcaaggttcttctcttcgaagttattcagaaaattaaggggtgaaaagatcatgcaaaatgatagaggtgacgtaatcattgacaggtacttgacattggatcaagagttcgacagaaaagatgatgacatgctattgcatcctgtgaaaaaaattatagatttagatggtaacatacaggacgacccagttgtacgaggcaacaggcccgacttcactatgcagccaggtgtggatattaatggtaatagcgatggtaccgtggacatcttaaagggtatgaatagattgagtgaaaaaatgattatggctttgaagaatgagtattcaaggacaaatctacagaacaaatctaatattacaaacgatgaggaagatgaagataatgatgaaagaaatgaactgaaaatcgatgacttaaacgaaagctacaagacaaactatgcaatcatacatctgaaaaggaacgcacatgaaaagacaaccgacaacgatgcgaaaagctcggcagactcgataaagaatgcagatttgaaggtttctaatcaacaaatgttacaacagttgtcattggtcatggataatttaattaataagctagacttgaaccaagtagttcctaacaacgaagtcagcaacaagatcaataaaagagtcataactgcaatcaagattaacgccaaacaggctaagcataacaatgttaattcagcactcggctcttttgtcgacaacacttctcaagcaaatgaattagaggtgaaaagtaccctaccaatagacctattagaaagttgtagaatgctacacacaacgtgctgtgaatttctaaagcacttttatattcattttcagagcggtgaacaaaagcaagccagtaccgtcaaaaaactttataatcatttgaaggactgtattgaaaagctgaatgagctatttcaagacgtccttaatggtgatggtgaatctatgtcaaacacatgtaccgcctatttgaagccagttttgaactccattactttggctactcataagtacgatgagtacttcaacgaatataacaacaattcgaactag

SEQ ID NO: 2394 - DNA, 1929 bp, Artificial Sequence
  Description of Artificial Sequence: Synthetic polynucleotide
atgtcccattccggagctgccatttttgagaaagtttctgggataattgccataaatgaggatgtttctcccgcagaattgacatggaggtctacggacggtgacaaggttcacacagttgtcttatccactattgacaagttacaagctacccctgcttccagtgaaaaaatgatgttgaggttgatcgggaaagtggatgagagtaaaaagagaaaagacaacgaaggaaatgaggttgtgcccaaaccgcaacgtcatatgttttcttttaacaatagaacagttatggataatatcaagatgacccttcaacaaatcatcagtagatataaagatgcagatatctacgaagaaaagagaagaagagaggagtctgcgcaacacacagaaacaccaatgagctcttcttctgttactgcagggactcccacaccacatctcgatacaccacaattgaataatggggctccgttgattaatacagccaaattggatgattctctctctaaagaaaaattgttgaccaatttaaagttacagcaatctttattgaaaggaaacaaagttttgatgaaggtttttcaggaaacagtcattaacgccggtttgcctccatctgaattttggtctactagaattccgttattgagggcttttgccttatctacttctcaaaaagttgggccttacaacgttttgtctactatcaagccggtggcttcttctgaaaacaaagtcaatgttaatttgtccagagaaaaaattttgaatatttttgagaactatccaattgtaaagaaagcttacactgataatgtgcccaaaaatttcaaagaaccagagttctgggcaaggttcttctcttccaagttattcagaaaattaaggggtgaaaagatcatgcaaaatgatagaggtgacgtaatcattgacaggtacttgacattggatcaagagttcgacagaaaagatgatgacatgcttttgcatcctgtgaaaaaaattatagatttagatggtaacatacaggacgacccagttgtaagaggcaacaggcccgacttcactatgcagccaggtgtggatattaatggtaatagcgatggtaccgtggacatcttaaagggtatgaatagattgagtgaaaaaatgattatggctttgaagaatgagtattctaggacaaatttacagaacaaatctaatattacaaacgatgaggaagatgaagataatgatgaaagaaatgaattgaaaatcgatgacttaaacgaaagctacaagacaaactatgcaatcatacatttgaaaaggaacgcacatgaaaagacaaccgacaacgatgcgaaaagcagcgcagacagtataaagaatgcagatttgaaggtttctaatcaacaaatgttacaacagttgtctttggtcatggataatttaattaataagttggacttgaaccaagtagttcctaacaacgaagtcagcaacaagatcaataaaagagtcataactgcaatcaagattaacgccaaacaggctaagcataacaatgttaattctgcactcggctcttttgtcgacaacacttctcaagcaaatgaattagaggtgaaaagtaccttgccaatagacttattagaaagttgtagaatgttgcacacaacgtgctgtgaatttttgaagcacttttatattcattttcagagcggtgaacaaaagcaagccagtaccgtcaaaaaactttataatcatttgaaggactgtattgaaaagttgaatgagttatttcaagacgtccttaatggtgatggtgaatctatgtccaacacatgtaccgcctatttgaagccagttttgaactccattactttggctactcataagtacgatgagtacttcaacgaatataacaacaatagcaactga

SEQ ID NO: 2395 - DNA, 1362 bp, Saccharomyces cerevisiae
atggctaaaagaaggcagaaaaagagaacgcatgcgcagatcacacccgagcaggaacgagatattcctaaatccatggtaatcagagtgggacaaacttcattggctaaccattctctaaaccaattagtaaaggattttcgccagatcatgcaaccgcatacggccgtaaaactaaaagagcgcaagtccaataaactgaaggattttgttgttatgtgtggcccattaggtgttacgcatcttttcatgttcactcaatctgaaaaaacaggaaatgtctcgctaaagatagctagaactccacaaggtcctactgttacttttcaagtattggactattcactgggtagagatatcaaaaaatttttgaagagacctaaatcgttaaataatgatgatgtattaaatcctccattgctagtgttaaatgggttttccacatcgaaaagatctgatgaagacgatcaggatgtaaacgtggagaaggttattgtttccatgttccagaatattttcccacctctgaatcctgcaagaacttcgttgaattctatcaaacgtatatttatgatcaataaagacagagaaacgggggaaatttctatgcgccactattttattgacattcgagaagtagagatctctagaaatctaaaaaggctttataaagccaaaaataatctaagtaaaacagtgccgaatttgcatcgaaaagaagatatttcttctttgatattagatcatgacttaggcgcctatacatcagaatctgaaattgaagatgacgctattgtgagagtggttgataatcaggacgtgaaggcaaaacattctcaaacttcgctgtcgcaaaaaacacccgttaaaatgacagataacgaagaacgtgaaaaaggaattgaagaagaagatgtggaaatggaggaacctaagccttcagaaaattcgcaaccaactccacgtaagaaggctatcaaactgactgaattaggaccaagattaactctaaaactggtcaaaatagaagatggtatttgttcaggtaaagtattacatcatgaatttgttcaaaaatcaagcgaagaaatcaaagccttagaaaagagacacgctgcaaaaatgaggctgaaggaacaaagaagaaaggaacaagaagaaaacattgctaaaaaaaaggctgttaaagatgctaaaaagcaacgtaaattggaaagaagaaaagctagagcagaagaacagggtgaaggtcaagggaaagatggtgcaatgagcgatgatggatcttcatcgagtgaagatgagcattatagtgatgtaccagaggatttggatagtgacttattcagtgaagtagaataa

SEQ ID NO: 2396 - DNA, 1362 bp, Artificial Sequence
  Description of Artificial Sequence: Synthetic polynucleotide
atggctaaaagaaggcagaaaaagagaacgcatgcgcagatcacacccgagcaggaaagagatattcctaaatccatggtaatcagagtgggacaaacttctttggctaaccattctttgaaccaattagtaaaggattttcgccagatcatgcaaccgcatacggccgtaaaattgaaagagcgcaagtccaataaattgaaggattttgttgttatgtgtggcccattaggtgttacgcatcttttcatgttcactcaatctgaaaaaacaggaaatgtctctttgaagatagctagaactccacaaggtcctactgttacttttcaagtattggactattctttgggtagagatatcaaaaaatttttgaagagacctaaatctttaaataatgatgatgtattaaatcctccattgttggtgttaaatgggttttccacaagtaaaagatctgatgaagacgatcaggatgtaaacgtggagaaggttattgtttccatgttccagaatattttcccacctttaaatcctgcaagaacttctttgaattctatcaaacgtatatttatgatcaataaagacagagaaacgggggaaatttctatgcgccactattttattgacattagagaagtagagatctctagaaatttgaaaaggctttataaagccaaaaataatttgagtaaaacagtgccgaatttgcatagaaaagaagatatttcttctttgatattagatcatgacttaggcgcctatacaagtgaatctgaaattgaagatgacgctattgtgagagtggttgataatcaggacgtgaaggcaaaacattctcaaacttctttatctcaaaaaacacccgttaaaatgacagataacgaagaacgtgaaaaaggaattgaagaagaagatgtggaaatggaggaacctaagccttctgaaaattctcaaccaactccacgtaagaaggctatcaaattaactgaattaggaccaagattaactttgaaattggtcaaaatagaagatggtatttgttctggtaaagtattacatcatgaatttgttcaaaaaagtagcgaagaaatcaaagccttagaaaagagacacgctgcaaaaatgaggttaaaggaacaaagaagaaaggaacaagaagaaaacattgctaaaaaaaaggctgttaaagatgctaaaaagcaacgtaaattggaaagaagaaaagctagagcagaagaacagggtgaaggtcaagggaaagatggtgcaatgagcgatgatggatcttcttccagtgaagatgagcattatagtgatgtaccagaggatttggatagtgacttattcagtgaagtagaatga

SEQ ID NO: 2397 - DNA, 861 bp, Saccharomyces cerevisiae
atggttattaaagaggactgtatcaataatcttgccaggtggcaggcagacgaggaagctcacagctgttttcaatgcaagacgaacttttcgtttctcgtaagaagacaccattgtaggtgttgtggaaggatattttgttcgtcttgtaccgaaaattttgttaattataataaaaagagagtccatgccttgcagaaaaaaaatagcgacgtggaatcgcctccatatagaacttgtaatgagtgctacgataacctccttcatttaaatctactagtatcctccaccaacagagatgtacgactatcgcaaacttcggtaccaccaaatgcacttgcactttctgcaccagatagcaacactgatgaagacgcggaaatcctggaagattcggtagatcaatccggtacggcatgcaggagcgaagaaagttcacaaaacgaggaggatcacttctgccctatttgtaactcagatctcacacagtttcctgatgaagaagagaccagaaagcacgtagaggattgcatacagagagctgaaaatgcccaacaacatacgaatacgtcagatgcagcagatgactccgtaaaagaaagccctgcctttcaaaatagaatgttagtgtacaagatatcgcctaatacaacagataatgcaattaaggagtgcccgatttgttttgagaatatggaacccggtgagaaagttgggagactagaatgcttgtgtgttttccattataagtgtattaagaactggtttcacaaaagggcgcaaatgactgcagcccagaagggaaatggacatgcttttgttaaaaggaacttttgtcctttccatgatgccgtattttaa

SEQ ID NO: 2398 - DNA, 861 bp, Artificial Sequence
  Description of Artificial Sequence: Synthetic polynucleotide
atggttattaaagaggactgtatcaataatcttgccaggtggcaggcagacgaggaagctcacagctgttttcaatgcaagacgaacttttcttttctcgtaagaagacaccattgtaggtgttgtggaaggatattttgttcttcttgtaccgaaaattttgttaattataataaaaagagagtccatgccttgcagaaaaaaaatagcgacgtggaatctcctccatatagaacttgtaatgagtgctacgataacctccttcatttaaatttattggtatcctccaccaacagagatgtaagattatctcaaacttctgtaccaccaaatgcacttgcactttctgcaccagatagcaacactgatgaagacgcggaaatcttggaagattctgtagatcaatccggtacggcatgcaggagcgaagaaagttctcaaaacgaggaggatcacttctgccctatttgtaacagtgatctcacacagtttcctgatgaagaagagaccagaaagcacgtagaggattgcatacagagagctgaaaatgcccaacaacatacgaatacgtctgatgcagcagatgactccgtaaaagaaagccctgcctttcaaaatagaatgttagtgtacaagatatctcctaatacaacagataatgcaattaaggagtgcccgatttgttttgagaatatggaacccggtgagaaagttgggagattagaatgcttgtgtgttttccattataagtgtattaagaactggtttcacaaaagggcgcaaatgactgcagcccagaagggaaatggacatgcttttgttaaaaggaacttttgtcctttccatgatgccgtattttga

SEQ ID NO: 2399 - DNA, 2079 bp, Saccharomyces cerevisiae
atggccaagagactgttagaatcaagccaaaatgatcaggccaatcgaaaaaactcaaagattgagaagaaagaagtatcgttttatgaggaggaagaaacagatgattcttttgatagtttttaccaggatgaagaagatgatttaagtgatattgattgggaagaagtttctttagatggaagcttaactgtcacatttggcaatatacgcagagacagggagaaagtcagcaagtacaaaagaaagcataataaaaaagcattcaattatcagcgacttaaatatggactccatttgataatgattccatttatgttatttttgttaaaatctaggatgaaatggatagacgatgaaagactaaataggcgactaagaaggtctgtaccaaaattaattggcaaaaaattcaaagattgggatgtaagggatccagcttttaaaatggattctttaagaacccttttgcttggtttggtcttatggttccgttccaattacaaaatgaatagcaatggcattagacagaatttcaacaggctgcaataccttatcaagtatgccgataaccaaaacgaaaattcaatctctgaatctacatataaaaaagttcttgaaaatcaacaagaattttatggaaataggccgttgataaatcatggtgttgaagatattcgcaagatggctaaaaggaaaatggccaacagagatattctaacgttgttcttctttattatcttagaaaatgtgctaccggggcctaagaagctttacttatgctttgccttgcccttgcacgattacgatattaggtgcaataaggtgaagtggcaaatcgaacatggtattggcaaagttcccaacagatttgactctgacctaatacaaccttatttttggattgaattagaagttcctactttgagcgatggtgaattatacatcattgaccctatagcccatctgggtgaacgtgaaatggtcttgaaaacacgcgaagatcagtttgtccctacttatcaaccttcggtagacatgaagtacaacctaaaccaaaagtttcattatgtagtccgtatcaatcatgctgaaaaggtactacaagatgtttcaccaagatatgtgccaaatgtttgttacaggtactttgaattatctgagtcttctcctattttgaaatcgaagcattacactagctaccaatatctatctaagtggttgaaagtcttgaacaagaaaaaagcatctgttcatcattacgcaataatgaaaaagattgctttaactaattttacattaccaaagagtgtgacagagattaaaagaacagataatttcgtgattccctctctgttaaagtctaatgaagtattaaaagcatgtgcaaaacaagccgcaacatttactaagggagacaattcacaagagcccatattttggagaagagacgtcattcaattaaagagtaaacagcactgggcaatattagggcgttccattctacctaatgctcaaccattaaaacgtaaaaagtatctaccgatgagggaaaggatggtaagaaacctagacaagtacgttatcaaagaattgttttcgtatgagcaaacaatgaagtctcctaaataccccagcacgtattgcgatcatttaggacaggaacatgtgataacagatttgtcgcattataaaaataaatttggcaacatcgaaatttactcgaaagaaactaagcctgatggatttgaattaataccgcttagcaaagaagttgatattaaatgcctgataaaggagtataacaaaggtaaaagaaagatgcaaaaaatcaagtatttggatgtggtaagtggatttgattttaaacagaaaaaaggccatgccattccgaaaattgaaagcattctagtcaaagagacagactataaagcagtccagcttttgaagcagcaaactaaagtactactgggactctcgttctgggacattctattaagaaagctacgagttaacgatcgattaaatgctgagtacggtaatgttggaaataatgaagaaacgttggacgaccattga

SEQ ID NO: 2400 - DNA, 2079 bp, Artificial Sequence
  Description of Artificial Sequence: Synthetic polynucleotide
atggccaagagattattagaaagtagccaaaatgatcaggccaatagaaaaaactccaagattgagaagaaagaagtatccttttatgaggaggaagaaacagatgattcttttgatagtttttaccaggatgaagaagatgatttaagtgatattgattgggaagaagtttctttagatggaagcttaactgtcacatttggcaatatacgcagagacagggagaaagtcagcaagtacaaaagaaagcataataaaaaagcattcaattatcagagacttaaatatggactccatttgataatgattccatttatgttatttttgttaaaatctaggatgaaatggatagacgatgaaagattgaataggagattgagaaggtctgtaccaaaattaattggcaaaaaattcaaagattgggatgtaagggatccagcttttaaaatggattctttaagaacccttttgcttggtttggtcttatggttccgttccaattacaaaatgaatagcaatggcattagacagaatttcaacaggttacaataccttatcaagtatgccgataaccaaaacgaaaattccatctctgaatctacatataaaaaagttcttgaaaatcaacaagaattttatggaaataggccgttgataaatcatggtgttgaagatattcgcaagatggctaaaaggaaaatggccaacagagatattttaacgttgttcttctttattatcttagaaaatgtgttgccggggcctaagaagctttacttatgctttgccttgcccttgcacgattacgatattaggtgcaataaggtgaagtggcaaatcgaacatggtattggcaaagttcccaacagatttgactctgacttgatacaaccttatttttggattgaattagaagttcctactttgagcgatggtgaattatacatcattgaccctatagcccatttaggtgaacgtgaaatggtcttgaaaacacgcgaagatcagtttgtccctacttatcaaccttctgtagacatgaagtacaacttgaaccaaaagtttcattatgtagtccgtatcaatcatgctgaaaaggtattacaagatgtttctccaagatatgtgccaaatgtttgttacaggtactttgaattatctgagtcttctcctattttgaaatccaagcattacactagctaccaatatttatctaagtggttgaaagtcttgaacaagaaaaaagcatctgttcatcattacgcaataatgaaaaagattgctttaactaattttacattaccaaagagtgtgacagagattaaaagaacagataatttcgtgattccctctttattaaagtctaatgaagtattaaaagcatgtgcaaaacaagccgcaacatttactaagggagacaattctcaagagcccatattttggagaagagacgtcattcaattaaagagtaaacagcactgggcaatattagggcgttccattttacctaatgctcaaccattaaaacgtaaaaagtatttaccgatgagggaaaggatggtaagaaacttggacaagtacgttatcaaagaattgttttcttatgagcaaacaatgaagtctcctaaataccccagcacgtattgcgatcatttaggacaggaacatgtgataacagatttgtctcattataaaaataaatttggcaacatcgaaatttactctaaagaaactaagcctgatggatttgaattaataccgcttagcaaagaagttgatattaaatgcttaataaaggagtataacaaaggtaaaagaaagatgcaaaaaatcaagtatttggatgtggtaagtggatttgattttaaacagaaaaaaggccatgccattccgaaaattgaaagcattttagtcaaagagacagactataaagcagtccagcttttgaagcagcaaactaaagtattgttgggactctctttctgggacattttattaagaaagttaagagttaacgatagattaaatgctgagtacggtaatgttggaaataatgaagaaacgttggacgaccattga

SEQ ID NO: 2401 - DNA, 846 bp, Saccharomyces cerevisiae
atgcaagtcatcggacgtggtggggcaaatatactgattgattatggggatcctacgtggttgtggcgatgctgcatccgttggcccgatctgttatcatcaaataattcttatacaatcaaaaacatcagttatattaaagattatgtagaacctcttctacatggcttgctttgcccgatgtatctgattgacgtcgatatagaagctataaggccaattctcagtgactttattctaaatttagacgataaggtagtcaaagttatcaaaattaaaaatctcaccaataatacctcaaatctgatattaaataaccactttttaaaatcttattgttcacaaaatctgcaaacagttattttagaattgaagcctaaatggttatactatgatacagattactgtaggaactgtactcataatgcatttaagggtagaggcactaagtactgttacaatcaattactaatgaatccagcacacttggaattaatatttggagaatgtaatatatttccggttaagtttaaagatgccatgcatgagtacttgcgcaatgacaataacattttcaagatcctttatgatttacagaaaaaacttacaaagaacacaactccaataagtgacataaaatcaatcaacgatgtaaacgatgagcatctgctactcatgacactcagagacgtgacatgtttcattgaatggaacagtgctgaaaatgcgttgcacgtgaatataatagatgtagatctaaagccaaaagaaaaatggacccattggacaaaaacttacagccagttgacatcaagccaaaaaatttatcatacttcaaataaataa

SEQ ID NO: 2402 - DNA, 846 bp, Artificial Sequence
  Description of Artificial Sequence: Synthetic polynucleotide
atgcaagtcatcggacgtggtggggcaaatatattgattgattatggggatcctacgtggttgtggaggtgctgcatccgttggcccgatttattatcttccaataattcttatacaatcaaaaacatcagttatattaaagattatgtagaacctcttttacatggcttgctttgcccgatgtatttgattgacgtcgatatagaagctataaggccaattctcagtgactttattttgaatttagacgataaggtagtcaaagttatcaaaattaaaaatctcaccaataatacctctaatttgatattaaataaccactttttaaaatcttattgttctcaaaatttacaaacagttattttagaattgaagcctaaatggttatactatgatacagattactgtaggaactgtactcataatgcatttaagggtagaggcactaagtactgttacaatcaattattgatgaatccagcacacttggaattaatatttggagaatgtaatatatttccggttaagtttaaagatgccatgcatgagtacttgcgcaatgacaataacattttcaagatcctttatgatttacagaaaaaacttacaaagaacacaactccaataagtgacataaaatctatcaacgatgtaaacgatgagcatttacttctcatgacactcagagacgtgacatgtttcattgaatggaacagtgctgaaaatgcgttgcacgtgaatataatagatgtagatttgaagccaaaagaaaaatggacccattggacaaaaacttacagccagttgacatctagccaaaaaatttatcatacttccaataaatga

SEQ ID NO: 2403 - DNA, 1416 bp, Saccharomyces cerevisiae
atgatcgtatttcgtcgctttcctacgtgccttttacatcacattcgacaaccggcatccaggagtcttttgttggaatcacaaaggcgatcattatcttttacatcttataaatataacagcagccacattgatgatgataaaagtaaaaaaaagcttaaaaatgttttccaaatgaatagcaatagagtcattcgtaagcaaaaaacaaaagaagaattggccaaagagaggttcgaagaacaactgaggtcacctaatagatttgtgaggtggggagctattgcgagatcagaaaagttttcaaagggaatgaccaagtacatgatcggtgcttatgtgatatttttaatctatggtctcttctttaccaaaaaactgtttgcgaaagacaaagaactggaaagattgttgaagaaacaagaagaagggaatgccaatgaatacgaagcattaaggattaaagaattgaaaggaaaactaaggaggagagatgaattgaaattagaagaatacaaaaaaatgcaagaagaaggcattgaaaacttcgatgatattcgggtacagaattttgatcaaaacaaattgaatgaacaaatattgccagcaagagacacaacaaacttttaccaagaaaaagctaacgaatatgataaggcaattaatatggaagagagagtaatatttctcggtaaaagaaggaaatggttaatgaaacattgtcaaggggatgttttggaagtttcatgcggtacaggaagaaatatcaagtaccttgatatgtcacgcatcaactctataacattcttagactcttctgaaaatatgatggaaattacacataaaaaattccgagaaaagtttcctaagtataaaaaagttgcatttgttgttggaaaggcggaaaatctagtagacttagcagagaaaggtaagccctctctagagaatgaaaaggaaaaccaagtaaaatatgatactatcgtggaggcgtttggtttgtgttcccatgaagatccggttaaggcacttaataattttggcaagttattaaagccagatggaagaattattttactggaacatggtagaggtcaatacgattttataaataagatattagacaacagagctgaaagaagactgaatacttggggctgtcgatggaatctcgacttaggcgaagtgttagatgattctgacctagaattggtggaagaaaaacggactcacttaggcactacttggtgtatcgttgcaaagagaaaaggtgatgtgaaaaagaaagacgagcttgggtttgtagaaaaatacttgcaatcaagtattagaaagagaatggaatcattcgaaaaaaaagacgatatggcatctaaaaaagaacttgagccagtacctcctgtaagtaaaagttaa

SEQ ID NO: 2404 - DNA, 1416 bp, Artificial Sequence
  Description of Artificial Sequence: Synthetic polynucleotide
atgatcgtatttcgtcgctttcctacgtgccttttacatcacattagacaaccggcatccaggagtcttttgttggaatctcaaaggagatctttatcttttacatcttataaatataacagcagccacattgatgatgataaaagtaaaaaaaagcttaaaaatgttttccaaatgaatagcaatagagtcattcgtaagcaaaaaacaaaagaagaattggccaaagagaggttcgaagaacaattaaggtctcctaatagatttgtgaggtggggagctattgcgagaagtgaaaagttttccaagggaatgaccaagtacatgatcggtgcttatgtgatatttttaatctatggtctcttctttaccaaaaaattatttgcgaaagacaaagaattggaaagattgttgaagaaacaagaagaagggaatgccaatgaatacgaagcattaaggattaaagaattgaaaggaaaattgaggaggagagatgaattgaaattagaagaatacaaaaaaatgcaagaagaaggcattgaaaacttcgatgatattagagtacagaattttgatcaaaacaaattgaatgaacaaatattgccagcaagagacacaacaaacttttaccaagaaaaagctaacgaatatgataaggcaattaatatggaagagagagtaatatttctcggtaaaagaaggaaatggttaatgaaacattgtcaaggggatgttttggaagtttcttgcggtacaggaagaaatatcaagtaccttgatatgtctcgcatcaactctataacattcttagactcttctgaaaatatgatggaaattacacataaaaaattcagagaaaagtttcctaagtataaaaaagttgcatttgttgttggaaaggcggaaaatttggtagacttagcagagaaaggtaagccctctttggagaatgaaaaggaaaaccaagtaaaatatgatactatcgtggaggcgtttggtttgtgttcccatgaagatccggttaaggcacttaataattttggcaagttattaaagccagatggaagaattattttattggaacatggtagaggtcaatacgattttataaataagatattagacaacagagctgaaagaagattgaatacttggggctgtcgttggaatctcgacttaggcgaagtgttagatgattctgacttggaattggtggaagaaaaaagaactcacttaggcactacttggtgtatcgttgcaaagagaaaaggtgatgtgaaaaagaaagacgagcttgggtttgtagaaaaatacttgcaaagtagtattagaaagagaatggaatctttcgaaaaaaaagacgatatggcatctaaaaaagaacttgagccagtacctcctgtaagtaaaagttga

SEQ ID NO: 2405 - DNA, 1245 bp, Saccharomyces cerevisiae
atgagttatagtgtcaacacgtttacagattacgttttattgtttggatcatctagtttagtaggaaaaggtattttagagaacctgttggacataaatttatatattaaaaatgtttcggacctacaaggcaagcttgatagcttaagtgaaataaagggaaatgtcgttctcaataaacatgtcttttgtgttaatagaaggtgcatcaatgaggagaaatcatttatgaagaccattgattatataaatatgagatcagttacttggcaaggtggcagatattacttgagaagcaggaaagaaaaagacactgaaaaagtaccgtctagtcctaatactttttgttatgataattttgaagaaggatttattaaaaatacgcctgaagagaggggaaaagatggttattcttttgtttataatcagaaacagttcagttacacactacattatgcatgcggaaaggaaaaaggtattgagatcatttgtaattttactgtaacgcaattgatcatccccagatctgaaacttggccaaaattgcttccacggatattctcaggaacacaaaagctggaaaagtttgacattgacaacaaaaattacgttcccggtagaagtttgcctagtctgtgtgatattagcactatggtgtgctctttgggctccacctcagctagagtgcggagaactcaggtaccaagttcctttgctgactattacttaccttttaatttagcacaagaattcacgaatacaactaacaaaaggttggtggttacaactgcctttaataatgattttcttagtaaaactttcgagtattttagaataaaagctaaattagaaaatgacttggatgaagctttgccaaataagctaaaggagctagttattttgaggccaggtccgatgtgtggacagcacggaaatcctataaacgttgaattgggtaaagaaaactccactttcttggaaaaaattttttattatcctcactatcttttagtttataaaaagaaatatatcagtgaggccagaaggattggcttaagaacaaagttaagcgaaataattgcttccagtatatataggatgccaggatctgcattattaggatacgctgtcccagtttcaaaggtttcttatgttgcctctttgatggcgattgaaaggaaaagtaaagaggcgggacctaagctggaagtaattagcagttatcaaattgatatgattgtgtga

SEQ ID NO: 2406 - DNA, 1245 bp, Artificial Sequence
  Description of Artificial Sequence: Synthetic polynucleotide
atgagttatagtgtcaacacgtttacagattacgttttattgtttggatcttctagtttagtaggaaaaggtattttagagaaccttttggacataaatttatatattaaaaatgtttctgacttgcaaggcaagcttgatagcttaagtgaaataaagggaaatgtcgttctcaataaacatgtcttttgtgttaatagaaggtgcatcaatgaggagaaaagttttatgaagaccattgattatataaatatgagatctgttacttggcaaggtggcagatattacttgagaagcaggaaagaaaaagacactgaaaaagtaccgtctagtcctaatactttttgttatgataattttgaagaaggatttattaaaaatacgcctgaagagaggggaaaagatggttattcttttgtttataatcagaaacagttcagttacacattgcattatgcatgcggaaaggaaaaaggtattgagatcatttgtaattttactgtaacgcaattgatcatccccagatctgaaacttggccaaaattgcttccaagaatattcagtggaacacaaaagttggaaaagtttgacattgacaacaaaaattacgttcccggtagaagtttgcctagtctttgtgatattagcactatggtgtgctctttgggctccaccagtgctagagtgagaagaactcaggtaccaagttcctttgctgactattacttaccttttaatttagcacaagaattcacgaatacaactaacaaaaggttggtggttacaactgcctttaataatgattttcttagtaaaactttcgagtattttagaataaaagctaaattagaaaatgacttggatgaagctttgccaaataagttgaaggagttagttattttgaggccaggtccgatgtgtggacagcacggaaatcctataaacgttgaattgggtaaagaaaactccactttcttggaaaaaattttttattatcctcactatcttttagtttataaaaagaaatatatcagtgaggccagaaggattggcttaagaacaaagttaagcgaaataattgcttccagtatatataggatgccaggatctgcattattaggatacgctgtcccagtttccaaggtttcttatgttgcctctttgatggcgattgaaaggaaaagtaaagaggcgggacctaagttggaagtaattagcagttatcaaattgatatgattgtgtga

SEQ ID NO: 2407 - DNA, 1107 bp, Saccharomyces cerevisiae
atgagtagaatcgatgatttacagcaggacattgaatctttactcagtgaaatcaattcattagaagaaagtcgtgagaagctcaaagcgaagataaaagataaaagaaaaaatgaggagagcgctaatcctatagtacaagaatttgaagatctattcgatcaattcccacagttgaataattttttatttaatgagcatccagaattggaagagacagatgacaaggacatatcaagggcgcaagcggatataccagcaacgccaataccgtatgaaccaaagaaaagagctaagctggagaatgaggaaattttaccagaacaagaatgggttttaaagacccagccaatggttcagcatcaaatgtttgatcctggggtggcagatttattggatacagacattctaacgtcaccttcaaaaagaaagcgaaaactaaaaatagacgatattagtacaagtgatagaagtgagttggaagattatattgtcctggaaaatgtttatagaatgtttggtataacatttttccctcttgtggaccctattgaccttaagataaaagatgctagcggtgaaatatttgttgatagagaaatgctgggaatacgactggaagtcttcagcgaacggacatcccaatttgaaaaacctcactatgtattgttgaaaaagaggatcaaatcgaatagttggttcctgttcaagcatacaatcccgagtttcattgatgtccaaggtatatttgatgacaccaatgggggactagtgatatctcatgatgacgcctatttatttgctaaaagagtcttcctgcaacttgtggaagtacagaaaagacgacagatttttaaggacttagaagctaagaagataatccacgacttagatttagatttagaatcttcaatggtttcgttttttgtgaaggatattaaagtcgagttgtttgtaaaacaaaatgaaatagtttcatgttcaatattggacgatattcatgattttagtcaaaataataaaagtaaatgggaaattgcattgctcggttctttggatgatttggaattaaaattaaaccattctttcgcgacaatattcaagtga

SEQ ID NO: 2408 - DNA, 1107 bp, Artificial Sequence
  Description of Artificial Sequence: Synthetic polynucleotide
atgagtagaatcgatgatttacagcaggacattgaatctttactcagtgaaatcaattctttagaagaaagtcgtgagaagctcaaagcgaagataaaagataaaagaaaaaatgaggagagcgctaatcctatagtacaagaatttgaagatcttttcgatcaattcccacagttgaataattttttatttaatgagcatccagaattggaagagacagatgacaaggacatatctagggcgcaagcggatataccagcaacgccaataccgtatgaaccaaagaaaagagctaagttggagaatgaggaaattttaccagaacaagaatgggttttaaagacccagccaatggttcagcatcaaatgtttgatcctggggtggcagatttattggatacagacattttaacgtctccttccaaaagaaagagaaaattgaaaatagacgatattagtacaagtgatagaagtgagttggaagattatattgtcttggaaaatgtttatagaatgtttggtataacatttttccctcttgtggaccctattgaccttaagataaaagatgctagcggtgaaatatttgttgatagagaaatgcttggaataaggttagaagtcttcagcgaaagaacatcccaatttgaaaaacctcactatgtattgttgaaaaagaggatcaaatctaatagttggttccttttcaagcatacaatcccgagtttcattgatgtccaaggtatatttgatgacaccaatgggggattggtgatatctcatgatgacgcctatttatttgctaaaagagtcttcttacaacttgtggaagtacagaaaagaagacagatttttaaggacttagaagctaagaagataatccacgacttagatttagatttagaatcttctatggtttctttttttgtgaaggatattaaagtcgagttgtttgtaaaacaaaatgaaatagtttcttgttctatattggacgatattcatgattttagtcaaaataataaaagtaaatgggaaattgcattgctcggttctttggatgatttggaattaaaattaaaccattctttcgcgacaatattcaagtga

SEQ ID NO: 2409 - DNA, 825 bp, Saccharomyces cerevisiae
atgatacgtcagctcaattattggtcaaggaaggcgtatctcatttacccctttcaagtttttgtaggcgcattattatcaatagtagtatcttcagaaacattaaaccatcaaaaagagacatgcgctctattgaaatcgtccaatattttcaatgttatttttgcatacaaagcgaaccaactgtggccatttttattctttagtttggcttttctgcaaatatacttccactatctagcaagaatggatatattgcctttaccaatatcaagtaccgaaactagctcttcctatttaacatatactaaccattggcctctgctcaaaaatagaataatcagtattatgatcactcaatatgcttgcaagttcgttctaaaatatctattattgtttttgaatttccaatttatcgatcatgttttcatttggacagggggagaatgcagttctggtagtaaaacgacatcagctgaaaagtgccgtctagaaaatgggaaatgggatggtgggtttgacattagtggacacttctgctttcttgtgagtataagcatgattctttggatggaacttcacttattcagtagatttgttcaagctgaagatatgttttgggttgtgaataagtgggtacgagcttgccttgccattgtttgcgctgtcctagtaatttggatatgtattctctgggttaccgctatttattatcatactatcttggaaaaagtgttaggttgccttatgggtttcatatgccctgttttcatataccacattctacccaaaattgggatactacacaattacttatatctatga

SEQ ID NO: 2410 - DNA, 825 bp, Artificial Sequence
  Description of Artificial Sequence: Synthetic polynucleotide
atgatacgtcagctcaattattggagcaggaaggcgtatctcatttacccctttcaagtttttgtaggcgcattattatctatagtagtatcttctgaaacattaaaccatcaaaaagagacatgcgctttattgaaatcttccaatattttcaatgttatttttgcatacaaagcgaaccaattatggccatttttattctttagtttggcttttttgcaaatatacttccactatttggcaagaatggatatattgcctttaccaatatctagtaccgaaactagctcttcctatttaacatatactaaccattggcctttactcaaaaatagaataatcagtattatgatcactcaatatgcttgcaagttcgttttgaaatatcttttattgtttttgaatttccaatttatcgatcatgttttcatttggacagggggagaatgcagttctggtagtaaaacgacatctgctgaaaagtgccgtttagaaaatgggaaatgggatggtgggtttgacattagtggacacttctgctttcttgtgagtataagcatgattctttggatggaacttcacttattcagtagatttgttcaagctgaagatatgttttgggttgtgaataagtgggtaagagcttgccttgccattgtttgcgctgtcttggtaatttggatatgtattctctgggttaccgctatttattatcatactatcttggaaaaagtgttaggttgccttatgggtttcatatgccctgttttcatataccacattttgcccaaaattgggatattacacaattacttatatttatga

SEQ ID NO: 2411 - DNA, 2007 bp, Saccharomyces cerevisiae
atgtcagatccatttgcacatttactgacttctttgaagaataaggactctgcatctgcatccaaggaaacaactcctcagagcagcaattcgccttccattactggttccgctgttgcagatgttgcaaggacggataaaagccccaatgatagtctgcattcaatttcagctcctccgctgataccgtcaccgaaggtagatttttctgcacctcctttggtcccaactaatagcaccactaaatctaatactgccaacaacacacctccctcggctcttgccaataccgatgacgacttcaatcaactatttggtatgggcacagtaactacaacggatacgatccaaaaaccggatgaggattactatggaagcaaggaagaccacctttacaatggtgatgacgccttagttgatgaagttaaggatatggaaatagcaagattgatgtctctaggtttatcaattgaagaagccactgagttttacgaaaatgacgtaacttatgaaagatatttggagattttaaagtcaaagcaaaaggagcgcaacgatctagctataagaaagaaagaaagtggtataaaaatggaaaagtcaggattatccaacattgttggtacagatagcaataatttattcagcatggccactgattttttcaataagggtaagaaactggtagaccaatggacctccttcccacctgaggcaaatgatagactgaataattactcaaaaactcatgataaggttgaggattatgatttgcctcaagtaaacgactcacccaatagaattttgtttgaagataatgaagtcgtagagaacttaccacctgccgataatccggatcaagatcttttaactgatttcgaaacaaagattgatataacaaagaggacagcgcctgatgtctcccactcctcctcaccgacttctggtatactaattgaagaaaattcgcgaagaaatgagcccctgatagaggatagtcttctcgacttttcagaaggaaatctcaccaatagtaaaagcaatgaagatagcaccctcttcaatgaaaacagcaacactgactctacaatacccatctcagatattgaattatcggggtataacgaatttaaggcgaaaggtactagtttgttcaagaacggggattatattaactcattacaagaatatgaaaagtctttaaatacattgcctttaaatcatccattgaggatcattgcattatcaaacattattgcctcgcaactgaaaatcggtgagtactctaagtccatagaaaactccagcatggctttggaattattcccatcaagcaaagctaagtggaagaataaaatctcaaatagtgaccctgaaagatcatttaacgacatctggccaaagattatgattaggcgtgctgagtcttttgaacatttagaaagtttcaaaaaagcactagaaacataccaagagctgattaagaagaatttttttgatgataaaatcatgcagggaaaaagaagatgccaagactttattaatcctccccctgttaaaaaatccatgcccgttaagaagaagacaacgacaacctcgcctgcaacaaaaaaacagaacttaaccgcttcttcttcaaattctccaatttctgttgatagcacttcagaaataaaaaaacgggagctagaaaacgctaaactggcgctatatgataaagtatttgagaaaattagctcctggaaggatggcaaagacgatgacattcgtcatctgttagcaaatttatccagcttactaacatggtgcaattggaaggatgtctctatgcaagatttggttatgcctaagagggtcaaaattacatacatgaaagctgtagccaagacacatcctgataagataccagagtccttgtccctggaaaataagatgattgcagagaatattttcagtactttaagtattgcttgggataagttcaaactgcagaatgacattaactga

SEQ ID NO: 2412 - DNA, 2007 bp, Artificial Sequence
  Description of Artificial Sequence: Synthetic polynucleotide
atgagtgatccatttgcacatttattaacttctttgaagaataaggactctgcatctgcatccaaggaaacaactcctcagagcagcaattctccttccattactggttccgctgttgcagatgttgcaaggacggataaaagccccaatgatagtttgcattctatttctgctcctccgttgataccgtctccgaaggtagatttttctgcacctcctttggtcccaactaatagcaccactaaatctaatactgccaacaacacacctccctctgctcttgccaataccgatgacgacttcaatcaattatttggtatgggcacagtaactacaacggatacgatccaaaaaccggatgaggattactatggaagcaaggaagaccacctttacaatggtgatgacgccttagttgatgaagttaaggatatggaaatagcaagattgatgtctttgggtttatccattgaagaagccactgagttttacgaaaatgacgtaacttatgaaagatatttggagattttaaagtccaagcaaaaggagcgcaacgatttggctataagaaagaaagaaagtggtataaaaatggaaaagagtggattatccaacattgttggtacagatagcaataatttattcagcatggccactgattttttcaataagggtaagaaattagtagaccaatggacctccttcccacctgaggcaaatgatagattgaataattactctaaaactcatgataaggttgaggattatgatttgcctcaagtaaacgactctcccaatagaattttgtttgaagataatgaagtcgtagagaacttaccacctgccgataatccggatcaagatcttttaactgatttcgaaacaaagattgatataacaaagaggacagcgcctgatgtctcccactcctcctctccgacttctggtatattgattgaagaaaattctagaagaaatgagcccttgatagaggatagtcttctcgacttttctgaaggaaatctcaccaatagtaaaagcaatgaagatagcaccctcttcaatgaaaacagcaacactgactctacaatacccatcagtgatattgaattaagtgggtataacgaatttaaggcgaaaggtactagtttgttcaagaacggggattatattaactctttacaagaatatgaaaagtctttaaatacattgcctttaaatcatccattgaggatcattgcattatctaacattattgcctctcaattgaaaatcggtgagtactctaagtccatagaaaactccagcatggctttggaattattcccatccagcaaagctaagtggaagaataaaatctctaatagtgaccctgaaagatcttttaacgacatctggccaaagattatgattaggcgtgctgagtcttttgaacatttagaaagtttcaaaaaagcattggaaacataccaagagttgattaagaagaatttttttgatgataaaatcatgcagggaaaaagaagatgccaagactttattaatcctccccctgttaaaaaatccatgcccgttaagaagaagacaacgacaacctctcctgcaacaaaaaaacagaacttaaccgcttcttcttccaattctccaatttctgttgatagcacttctgaaataaaaaaaagagagttagaaaacgctaaattagcgttatatgataaagtatttgagaaaattagctcctggaaggatggcaaagacgatgacattcgtcatcttttagcaaatttatccagcttattaacatggtgcaattggaaggatgtctctatgcaagatttggttatgcctaagagggtcaaaattacatacatgaaagctgtagccaagacacatcctgataagataccagagtccttgtccttagaaaataagatgattgcagagaatattttcagtactttaagtattgcttgggataagttcaaattacagaatgacattaactga

SEQ ID NO: 2413 - DNA, 219 bp, Saccharomyces cerevisiae
atggagaaccctcatgaacaagtgcaggctaacatactttcgcgaataattggtaatgtcaaaaggctcaatgagagcgtggcaattcttaaccaggagcttgtgaccattaataatcggaacaaaaatctagaaatcatgggcgcaatttgtgataactaccatagtagcgtccaattcaacctggaagcgaccaataacaagaagccacctctttaa

SEQ ID NO: 2414 - DNA, 219 bp, Artificial Sequence
  Description of Artificial Sequence: Synthetic polynucleotide
atggagaaccctcatgaacaagtgcaggctaacatactttctagaataattggtaatgtcaaaaggctcaatgagagcgtggcaattcttaaccaggagcttgtgaccattaataatagaaacaaaaatttggaaatcatgggcgcaatttgtgataactaccatagtagcgtccaattcaacttggaagcgaccaataacaagaagccacctctttga

SEQ ID NO: 2415 - DNA, 1146 bp, Saccharomyces cerevisiae
atgaaaagcgattcagttgaaatcactaccatctgcccagatgttgaaaattctcagtttgttgtgcaaagcaactgtccagagactattccagagattctaaagtctcaaaatgccgctgtgaatggcagcggcatcgcttgccaacaacgtagcttaccaagaatcaaaatcttgggtaccggtggtactattgcatcgaaagctatagactcctctcaaactgccggctatcatgttgacctgaccatccaagatctattggatgccattccagatatatccaaggtctgtgacattgaatatgagcaactatgcaacgtggattctaaagacataaacgaggatattctttataaaatttataagggcgtctcagaatcgttgcaggcttttgacggtatagttattacccatgggactgatacgctatctgaaactgcattctttattgaaagtactattgatgctggcgacgttcctattgtttttgttggttcgatgcgtccttcaaccagcgtttctgctgatggccctatgaacctttaccaagcaatttgcattgcttcaaatccaaaatctagaggaagaggtgttcttgtttccttgaatgaccaaatttcctctggttactacattactaagacgaatgcaaatagtttggattcttttaatgttagacaaggctatttaggaaattttgtcaacaatgaaattcactactattatcctcctgtgaaaccgcaaggttgccacaaattcaaactgagagtggacggtaagcattttaaattaccagaggtttgcattttatatgctcaccaagcctttccgccagctatagtcaacttagtggcagataagtatgatggtattgttcttgctaccatgggtgctggttcattgccggaggaggtcaatgaaacctgcatgaaattgagtttgccgatcgtatattccaagagatcgatggatggtatggtgcctattgccaacgtaccaaagaaaggttcaaaggaggataatctcatcgcatctggttatctaagccctgaaaagagcagaatcttgttacaattatgtttggcaggtaactacacgttggaagaaattaaacatgttttcactggcgtctatggtgggtga

SEQ ID NO: 2416 - DNA, 1146 bp, Artificial Sequence
  Description of Artificial Sequence: Synthetic polynucleotide
atgaaaagcgattctgttgaaatcactaccatctgcccagatgttgaaaattctcagtttgttgtgcaaagcaactgtccagagactattccagagattttgaagtctcaaaatgccgctgtgaatggcagcggcatcgcttgccaacaacgtagcttaccaagaatcaaaatcttgggtaccggtggtactattgcatccaaagctatagactcctctcaaactgccggctatcatgttgacttgaccatccaagatttattggatgccattccagatatatccaaggtctgtgacattgaatatgagcaattatgcaacgtggattctaaagacataaacgaggatattctttataaaatttataagggcgtcagtgaatctttgcaggcttttgacggtatagttattacccatgggactgatacgttgtctgaaactgcattctttattgaaagtactattgatgctggcgacgttcctattgtttttgttggttctatgcgtccttctaccagcgtttctgctgatggccctatgaacctttaccaagcaatttgcattgcttctaatccaaaatctagaggaagaggtgttcttgtttccttgaatgaccaaatttcctctggttactacattactaagacgaatgcaaatagtttggattcttttaatgttagacaaggctatttaggaaattttgtcaacaatgaaattcactactattatcctcctgtgaaaccgcaaggttgccacaaattcaaattgagagtggacggtaagcattttaaattaccagaggtttgcattttatatgctcaccaagcctttccgccagctatagtcaacttagtggcagataagtatgatggtattgttcttgctaccatgggtgctggttctttgccggaggaggtcaatgaaacctgcatgaaattgagtttgccgatcgtatattccaagagaagtatggatggtatggtgcctattgccaacgtaccaaagaaaggttccaaggaggataatctcatcgcatctggttatttgagccctgaaaagagcagaatcttgttacaattatgtttggcaggtaactacacgttggaagaaattaaacatgttttcactggcgtctatggtgggtga

SEQ ID NO: 2417 - DNA, 1104 bp, Saccharomyces cerevisiae
atgttacgaagatctattcataccactaaaatcctccaaaaacctaatgctacttcgcatatttggtcggactttaccacaaggcctagttcactttctatccaatcttcaaaagtgaaaaattaccttttccagaagaaagcttctctagacccaccatctatcagcagaagaagtaaccgtatcaaatattcacctccagaacacattgatgagattttcaggatgagttatgattttcttgagcaaagatccagtaagttttatgagttggccaataagactaaaaatcccttgaagaaggatgcacttctcataaaagcagagatcaataatcctgaggtacaatacaattttcagtttaataacaagttgaacaatgttaaggatataatagattatgatgtgccagtgtacagacatttggggaaacaacattgggaatcgtacggccagatgttattgatgcaaaggttagaaacgttggctgccattcctgatactcttccaactctggttccacgggcagaagtgaatatcaaatttcccttctctactggtgtaaataagtggatcgaacctggtgaatttctatcgtccaatgtcacatccatgcgtcccattttcaaaattcaagaatatgaacttgtgaacgttgaaaaacaattgtatacggtactgatagtcaatcctgatgttccagatttgagtaatgactcatttaaaacggctttgtgttacggattggtgaatattaatttgacttataatgacaatttaatagatccaagaaagttccacagttctaatattatcgctgactacttacctccggtacctgaaaagaatgctggaaaacagagattcgttgtttgggtattcagacaacccttaatcgaggataagcaaggtcctaacatgttagagattgaccgaaaggaactaagtagagatgattttgatatcaggcaatttacgaagaaatacaatctaaccgctattggggcacatatctggagaagcgaatgggatgccaaagtcgccgccgtcagagaaaaatatggcctaccacctggaagggtttttagcagagttagaaggtga

SEQ ID NO: 2418 - DNA, 1104 bp, Artificial Sequence
  Description of Artificial Sequence: Synthetic polynucleotide
atgttaagaagatctattcataccactaaaatcctccaaaaacctaatgctacttctcatatttggtctgactttaccacaaggcctagttctctttctatccaatcttctaaagtgaaaaattaccttttccagaagaaagcttctttggacccaccatctatcagcagaagaagtaaccgtatcaaatattctcctccagaacacattgatgagattttcaggatgagttatgattttcttgagcaaagatccagtaagttttatgagttggccaataagactaaaaatcccttgaagaaggatgcacttctcataaaagcagagatcaataatcctgaggtacaatacaattttcagtttaataacaagttgaacaatgttaaggatataatagattatgatgtgccagtgtacagacatttggggaaacaacattgggaatcttacggccagatgttattgatgcaaaggttagaaacgttggctgccattcctgatactcttccaactttggttccaagagcagaagtgaatatcaaatttcccttctctactggtgtaaataagtggatcgaacctggtgaatttttatcttccaatgtcacatccatgcgtcccattttcaaaattcaagaatatgaacttgtgaacgttgaaaaacaattgtatacggtattaatagtcaatcctgatgttccagatttgagtaatgactcttttaaaacggctttgtgttacggattggtgaatattaatttgacttataatgacaatttaatagatccaagaaagttccacagttctaatattatcgctgactacttacctccggtacctgaaaagaatgctggaaaacagagattcgttgtttgggtattcagacaacccttaatcgaggataagcaaggtcctaacatgttagagattgacagaaaggaattaagtagagatgattttgatatcaggcaatttacgaagaaatacaatttgaccgctattggggcacatatctggagaagcgaatgggatgccaaagtcgccgccgtcagagaaaaatatggcttaccacctggaagggtttttagcagagttagaaggtga

SEQ ID NO: 2419 - DNA, 291 bp, Saccharomyces cerevisiae
atgtcgacagttaatgttttgagatactctgcgttgggtttggggctattttttggttttagaaatgatatgattttgaagtgtaatgctaagaagaaagaggagcaggcacagtacgaggagaaattgaagctggtagaggaggcaaagaaggaatacgccaagctacaccctgtagtaactcctaaagatgtgcctgcgaacgcctcatttaatttggaagatcctaatatagattttgaaagagttattcttaacgccgttgaatccctgaaggaagcttcaacataa

SEQ ID NO: 2420 - DNA, 291 bp, Artificial Sequence
  Description of Artificial Sequence: Synthetic polynucleotide
atgtctacagttaatgttttgagatactctgcgttgggtttggggttgttttttggttttagaaatgatatgattttgaagtgtaatgctaagaagaaagaggagcaggcacagtacgaggagaaattgaagttggtagaggaggcaaagaaggaatacgccaagttgcaccctgtagtaactcctaaagatgtgcctgcgaacgcctcttttaatttggaagatcctaatatagattttgaaagagttattcttaacgccgttgaatccttgaaggaagcttctacatga

SEQ ID NO: 2421 - DNA, 1548 bp, Saccharomyces cerevisiae
atggatcttgaaaatgtttcatgtcccatttgtctaaggaagtttgataacttacaagcactaaatgcacatttagatgttgagcatgggtttaacgataatgaagattcactcggttccaatgacagtcgtttagtcaatggtaaacaaaaaaaggccagatctgttgatagcagtgcgcaaaagttgaaaagaagccattgggaaaaattcaaaaaagggaagagctgctgtcacacatgtggaaggactttgaataacaatattggcgccattaattgtaggaaatgtggtaaactgtattgcagaaggcatcttcctaatatgattaaacttaatctttccgcacagtatgaccccagaaacgggaaatggtacaattgctgccatgattgtttcgtcacaaaacctggctataacgattatggcgaagtaatagatttaacaccagaattctttaaggtacgaaatataaaaagagaggacaaaaacttaaggctattacaattagaaaatcggtttgtccgtctagttgatggtctgattacactctataacacatattctagatccattattcataatttgaagatgaatagtgaaatgtccaagttagaacgtacagttactccatggagagatgatagaagtgtactcttttgtaacatatgttccgaaccatttgggctattactaaggaagcatcactgcagattatgtggtatggttgtttgtgatgatgcaaacaggaactgctcaaacgaaataagcataggttatttaatgtctgcagcgtcagatctgccattcgaatacaatatacagaaggatgatttacttcatattcctatatccataagattgtgctcgcactgtatcgatatgctatttattggcaggaaatttaacaaggacgttagaatgccgctaagtggaatatttgctaaatatgatagcatgcaaaatatatccaaagtaattgatagtctcctgcccatttttgaagactcattgaatagcctgaaggtggagactgccaaggattctgaaaatacacttgatccaaagaatctgaatgatctcgctcgattaagacataaattactcaattcttttaacttgtataatacactaacaagacagctcttaagtgtagaacctcaaagtcatctagagagacaacttcaaaattcgatcaagatagcttccgctgcatacataaacgaaaaaatcctaccgttgaagtcgcttccggcaattttgaacccagagggccataaaacgaatgaagatgggcaaaaagctgaaccagaggtaaagaaattatcgcaactaatgatcgaaaacttgaccataaaagaagtgaaagagctgagagaagaattgatggtcctaaaggaacaaagctaccttattgagtccacaattcaggactataagaagcagcgtagattggaggagatcgtcacacttaataagaacttagaagaattgcactcaagaatacataccgttcaatcgaagctgggtgaccatgggtttaattaa

SEQ ID NO: 2422 - DNA, 1548 bp, Artificial Sequence
  Description of Artificial Sequence: Synthetic polynucleotide
atggatcttgaaaatgtttcttgtcccatttgtttgaggaagtttgataacttacaagcattgaatgcacatttagatgttgagcatgggtttaacgataatgaagattctctcggttccaatgacagtcgtttagtcaatggtaaacaaaaaaaggccagatctgttgatagcagtgcgcaaaagttgaaaagaagccattgggaaaaattcaaaaaagggaagagctgctgtcacacatgtggaaggactttgaataacaatattggcgccattaattgtaggaaatgtggtaaactttattgcagaaggcatcttcctaatatgattaaacttaatctttccgcacagtatgaccccagaaacgggaaatggtacaattgctgccatgattgtttcgtcacaaaacctggctataacgattatggcgaagtaatagatttaacaccagaattctttaaggtaagaaatataaaaagagaggacaaaaacttaaggttattacaattagaaaatagatttgtccgtttagttgatggtttgattacactctataacacatattctagatccattattcataatttgaagatgaatagtgaaatgtccaagttagaacgtacagttactccatggagagatgatagaagtgtactcttttgtaacatatgttccgaaccatttgggttattattgaggaagcatcactgcagattatgtggtatggttgtttgtgatgatgcaaacaggaactgcagcaacgaaataagcataggttatttaatgtctgcagcgtctgatttaccattcgaatacaatatacagaaggatgatttacttcatattcctatatccataagattgtgctcccactgtatcgatatgttatttattggcaggaaatttaacaaggacgttagaatgccgttaagtggaatatttgctaaatatgatagcatgcaaaatatatccaaagtaattgatagtctcttgcccatttttgaagactctttgaatagcttgaaggtggagactgccaaggattctgaaaatacacttgatccaaagaatttgaatgatctcgctagattaagacataaattactcaattcttttaacttgtataatacattaacaagacagctcttaagtgtagaacctcaaagtcatttagagagacaacttcaaaattccatcaagatagcttccgctgcatacataaacgaaaaaatcttaccgttgaagtctcttccggcaattttgaacccagagggccataaaacgaatgaagatgggcaaaaagctgaaccagaggtaaagaaattatctcaattgatgatcgaaaacttgaccataaaagaagtgaaagagttaagagaagaattgatggtcttgaaggaacaaagctaccttattgagtccacaattcaggactataagaagcagcgtagattggaggagatcgtcacacttaataagaacttagaagaattgcactccagaatacataccgttcaatccaagttgggtgaccatgggtttaattga

SEQ ID NO: 2423 - DNA, 2331 bp, Saccharomyces cerevisiae
atgagctcatcgctactttcagttttaaaagaaaagtcaagaagcctgaaaatacgaaacaaaccggtgaagatgaccagtcaggaaaggatgatagtgcatagatgcagatttgtggatttcactcctgccacaatcacatctctagcattttcacataaatcaaatataaataagttaactccgtccgatttgagattagctattggtagatctaatggtaacatagaaatctggaatcctagaaacaattggtttcaggaaatggttatcgaaggtggcaaagacagatcaattgaaggcctttgctggagcaacgttaacggcgagtctctaaggctattttctattggcggctcgactgtggtaacagaatgggatttagcaacaggtttaccattaagaaactatgattgcaattcaggtgtgatatggtctatttccatcaacgattcacaagacaagctgtctgtgggttgcgataatgggacggtggtcctcatagatatctctggcgggcctggtgtcttggaacacgatactattttgatgagacaagaagccagagtattgactttggcttggaaaaaggatgacttcgtgattggtggttgttctgatggtagaataaggatttggtctgcacaaaaaaatgacgaaaacatgggtcgtctattacacactatgaaggtcgacaaggccaaaaaagaatcaactctagtttggtcagttatatatttaccaagaactgatcagattgcctctggtgattctacaggctccattaaattctgggatttccagtttgccacgctaaaccagtcatttaaggcgcacgatgcagacgtactgtgtctaactaccgatactgataataattatgtttttagtgctggtgtggacagaaaaatctttcaattttctcaaaacactaacaaatctcaaaagaacaacagatgggtaaattcttctaataggttgcttcatggaaacgacattagagcaatatgtgcataccaatctaaaggtgcagattttctagtttcaggaggtgttgaaaaaacactagtcatcaactcacttacttctttttctaatggaaactacaggaagatgccaactgtcgaaccttattcaaagaatgttttagttaacaaagagcaacgccttgttgtttcatggagcgaatctactgttaagatatggacaatgggaaccgattctagtacagaacagaattataagctagtttgcaagttaactttaaaagatgaccagaatatctcaacttgttctttatcacctgatggacaagttttagtcgtagggaggccctctaccactaaagtttttcatttacagcccgtaggtaataaattgaaagtgactaaactagataatgacctattattgagaacttccacaaaattagtcaagttcatcgataattccaaaattgtcatatgctcttgcgaagatgatgtatttattgtggatctagaatctgaagaagatgaaaaaccgcaagaagttgaacttttggaggttacttcaactaagagcagtatcaaagttccctatattaacaggatcaaccatttggaagtagaccagaacattgcagtaatttctcgtggctgtggagtcgtagacatattagacttaaaagcaaggatttctaaaccacttgctcgtttgaataatttcatcaccgctgttcatatcaatacttctagaaaatctgtagtagtaattactgcagacaataagatttatgaattcaatatgaatttgaattcggaagccgagaatgaagatagcgaaagcgtattaactcaatggtcaaaaaacaatacggataacttaccaaaagaatggaagacattaaaagagaactgtgtagggatattttcagacatagaaaatagtagcagattatggttttggggggctacttggatatcaagaatagactttgatgttgacttccctataaataagagaagaaaacagaaaaaacgtacacacgaagggctaactatcacagatgaaagtaatttcatgaacgacgaggaagatgacgaagatgacgatattgatatggaaatcagcgaaaacttgaatgtattattaaaccaaggaaacaaaataaagtccacagatgtacaaagaaacgaagaaagctccggtcacttcttctttactgataaatataaacctttactgtttgttgacttaatttctagtaatgaattggcaataattgaaagaaatccattaacttttcactccaaacaaaaggcgtttattcaaccaaagttagtgttttga

SEQ ID NO: 2424 - DNA, 2331 bp, Artificial Sequence
  Description of Artificial Sequence: Synthetic polynucleotide
atgagctcctctttactttctgttttaaaagaaaagtctagaagcttgaaaataagaaacaaaccggtgaagatgaccagtcaggaaaggatgatagtgcatagatgcagatttgtggatttcactcctgccacaatcacatctttggcattttctcataaatctaatataaataagttaactccgtccgatttgagattagctattggtagatctaatggtaacatagaaatctggaatcctagaaacaattggtttcaggaaatggttatcgaaggtggcaaagacagatctattgaaggcctttgctggagcaacgttaacggcgagtctttgaggttattttctattggcggctccactgtggtaacagaatgggatttagcaacaggtttaccattaagaaactatgattgcaattctggtgtgatatggtctatttccatcaacgattctcaagacaagttatctgtgggttgcgataatgggacggtggtcctcatagatatctctggcgggcctggtgtcttggaacacgatactattttgatgagacaagaagccagagtattgactttggcttggaaaaaggatgacttcgtgattggtggttgttctgatggtagaataaggatttggtctgcacaaaaaaatgacgaaaacatgggtcgtttattacacactatgaaggtcgacaaggccaaaaaagaatctactttggtttggtctgttatatatttaccaagaactgatcagattgcctctggtgattctacaggctccattaaattctgggatttccagtttgccacgttgaaccagtcttttaaggcgcacgatgcagacgtattatgtttaactaccgatactgataataattatgtttttagtgctggtgtggacagaaaaatctttcaattttctcaaaacactaacaaatctcaaaagaacaacagatgggtaaattcttctaataggttgcttcatggaaacgacattagagcaatatgtgcataccaatctaaaggtgcagattttttggtttctggaggtgttgaaaaaacattggtcatcaactctcttacttctttttctaatggaaactacaggaagatgccaactgtcgaaccttattccaagaatgttttagttaacaaagagcaacgccttgttgtttcctggagcgaatctactgttaagatatggacaatgggaaccgattctagtacagaacagaattataagttggtttgcaagttaactttaaaagatgaccagaatatctctacttgttctttatctcctgatggacaagttttagtcgtagggaggccctctaccactaaagtttttcatttacagcccgtaggtaataaattgaaagtgactaaattggataatgacttattattgagaacttccacaaaattagtcaagttcatcgataattccaaaattgtcatatgctcttgcgaagatgatgtatttattgtggatttggaatctgaagaagatgaaaaaccgcaagaagttgaacttttggaggttacttctactaagagcagtatcaaagttccctatattaacaggatcaaccatttggaagtagaccagaacattgcagtaatttctcgtggctgtggagtcgtagacatattagacttaaaagcaaggatttctaaaccacttgctcgtttgaataatttcatcaccgctgttcatatcaatacttctagaaaatctgtagtagtaattactgcagacaataagatttatgaattcaatatgaatttgaattctgaagccgagaatgaagatagcgaaagcgtattaactcaatggtccaaaaacaatacggataacttaccaaaagaatggaagacattaaaagagaactgtgtagggatattttctgacatagaaaatagtagcagattatggttttggggggctacttggatatctagaatagactttgatgttgacttccctataaataagagaagaaaacagaaaaaacgtacacacgaagggttgactatcacagatgaaagtaatttcatgaacgacgaggaagatgacgaagatgacgatattgatatggaaatcagcgaaaacttgaatgtattattaaaccaaggaaacaaaataaagtccacagatgtacaaagaaacgaagaaagctccggtcacttcttctttactgataaatataaacctttactttttgttgacttaatttctagtaatgaattggcaataattgaaagaaatccattaacttttcactccaaacaaaaggcgtttattcaaccaaagttagtgttttga

SEQ ID NO: 2425 - DNA, 3108 bp, Saccharomyces cerevisiae
atgcaagatcctgatggtattgacattaatacgaaaatctttaactcagttgctgaagtatttcaaaaggcacagggttcttatgcaggacacaggaagcatatagcagttttgaagaaaattcagtcaaaggctgttgagcaaggctatgaagatgcttttaacttttggttcgataaattagttactaagatccttcctctgaaaaagaatgagattatcggagacaggatagtaaagttagtagctgcatttatagcttctttagaaagggagttgatattggccaaaaaacaaaactataagctcacgaatgatgaagaagggatattctcaaggttcgtcgatcagttcataagacatgttttgcgtggtgtggaaagccctgacaagaacgtcagatttagagttttacagttattagccgttataatggataatataggggaaatcgatgaatcacttttcaatttattaatattgtctttaaataagaggatttatgatagagaaccaacggttaggatacaggctgtgttttgtttaactaaatttcaggatgaagagcaaactgaacatttaactgagctttctgataatgaagaaaattttgaagctacgagaactctagttgcttctatccagaacgatccgtcagctgaagtacggagggctgcaatgctgaatttgatcaatgataataatactagaccgtatatcttggagagggctagagatgtaaacatcgttaatagaaggctcgtgtattcgagaattttgaaatcaatgggaagaaagtgtttcgatgatattgagccgcatatttttgatcaattgattgagtggggtttagaagatagggaattatcagtgagaaatgcgtgtaagagactcattgctcatgattggttaaatgctctggatggcgatttgatagaattactagaaaaattggatgtctcaagatcctcagtgtgtgttaaggctatagaagcactttttcaatcaaggccagatatattatctaaaatcaaatttcctgaaagtatttggaaagactttaccgtagaaattgccttcctctttcgggctatttatttgtactgtttggataataatataacagaaatgctggaagaaaactttccagaagcctcaaaattatccgagcatttaaaccattatattcttctcagatatcatcacaacgacatttctaatgactctcagtcgcattttgattataacactttagagtttattattgagcaactatcgattgccgccgaaaggtatgattatagcgatgaggttggaaggagatcgatgcttacagtggtacgaaatatgctggccttaactacactctccgaacctcttattaaaattggtattcgtgtaatgaaaagtctgtccataaatgaaaaagattttgtaacaatggcaatagaaatcattaatgatattagagacgacgatattgaaaaacaagaacaagaagagaaaataaaaagcaagaagattaatcgcagaaatgagacttccgtcgatgaagaggacgaaaacggcacacataatgacgaagttaacgaggatgaagaagacgacaatatttcatccttccattctgctgtagaaaacttagtgcagggaaacggcaacgtatctgagagtgacataataaataatctcccacccgaaaaggaagcgtcctcagcaacaattgttctctgtcttacaaggtcatcatatatgctagaactagttaacacaccgttaacagaaaacattttaattgcgtcgttgatggacactttgatcacaccagcggttagaaataccgcgccaaatattagggagcttggtgtcaagaaccttggtttatgttgtctcttggatgtgaagttggctattgataacatgtacatcttaggtatgtgcgtttcgaaaggtaatgcatcattaaagtatattgcgttacaagtcattgtagatattttttccgtacatgggaacactgtggtagacggagaaggcaaagttgactcaatctcgttgcacaaaatattttacaaggttttaaagaataacggtttaccggaatgtcaggtgatagcagcggagggtttatgcaaactatttttggcagacgtgttcactgatgatgatttgtttgaaacgttggttttgtcatatttttcgccgataaattcctcaaacgaagcgctggtacaggcatttgccttctgcattccagtctattgtttttcacatcctgctcatcaacaacgtatgtctaggacggctgcggacatactcttaagactatgtgttctttgggacgatttacagagctctgtaatacctgaggtagaccgtgaagctatgctaaagcctaacataatatttcaacagttgctattttggactgatccacgtaacttagttaaccagacaggttcaacaaaaaaagatacagtgcagcttacattcttgatcgatgtgctcaaaatatacgctcaaattgagaagaaagaaataaagaagatgatcatcactaatataaacgctatatttctttcttctgaacaagattattctactttgaaagaacttcttgagtattctgacgatattgcagaaaatgataatttagacaatgttagcaaaaatgctctggacaagctaaggaataatttgaattcgctgattgaagagatcaatgaaaggtcagaaactcagacaaaagatgagaacaacactgcgaatgaccaatactcgtctattttggggaattcattcaataaatcttcaaatgacaccatagaacacgctgctgatataactgatggaaataacacagaattgactaaaacaactgttaatatttcggcagttgacaatacaacagagcaaagtaactcaaggaaaagaacgagatcagaagcggagcaaattgacacatccaaaaacctggaaaacatgagtattcaagacacgtcaactgtagcaaaaaatgtaagttttgttttacctgacgagaaatcagatgcaatgtccatagatgaagaagataaggattcagagtctttcagcgaggtctgttaa

SEQ ID NO: 2426 - DNA, 3108 bp, Artificial Sequence
  Description of Artificial Sequence: Synthetic polynucleotide
atgcaagatcctgatggtattgacattaatacgaaaatctttaactctgttgctgaagtatttcaaaaggcacagggttcttatgcaggacacaggaagcatatagcagttttgaagaaaattcagtccaaggctgttgagcaaggctatgaagatgcttttaacttttggttcgataaattagttactaagatccttcctttgaaaaagaatgagattatcggagacaggatagtaaagttagtagctgcatttatagcttctttagaaagggagttgatattggccaaaaaacaaaactataagctcacgaatgatgaagaagggatattctctaggttcgtcgatcagttcataagacatgttttgcgtggtgtggaaagccctgacaagaacgtcagatttagagttttacagttattagccgttataatggataatataggggaaatcgatgaatctcttttcaatttattaatattgtctttaaataagaggatttatgatagagaaccaacggttaggatacaggctgtgttttgtttaactaaatttcaggatgaagagcaaactgaacatttaactgagctttctgataatgaagaaaattttgaagctacgagaactttggttgcttctatccagaacgatccgagtgctgaagtaagaagggctgcaatgttgaatttgatcaatgataataatactagaccgtatatcttggagagggctagagatgtaaacatcgttaatagaaggctcgtgtattctagaattttgaaatctatgggaagaaagtgtttcgatgatattgagccgcatatttttgatcaattgattgagtggggtttagaagatagggaattatctgtgagaaatgcgtgtaagagactcattgctcatgattggttaaatgctttagatggcgatttgatagaattattggaaaaattggatgtctctagatcctctgtgtgtgttaaggctatagaagcactttttcaatccaggccagatatattatctaaaatcaaatttcctgaaagtatttggaaagactttaccgtagaaattgccttcctctttagagctatttatttgtactgtttggataataatataacagaaatgttggaagaaaactttccagaagcctccaaattatccgagcatttaaaccattatattcttctcagatatcatcacaacgacatttctaatgactctcagtctcattttgattataacactttagagtttattattgagcaattatccattgccgccgaaaggtatgattatagcgatgaggttggaaggagaagtatgcttacagtggtaagaaatatgttggccttaactacactctccgaacctcttattaaaattggtattcgtgtaatgaaaagtttatccataaatgaaaaagattttgtaacaatggcaatagaaatcattaatgatattagagacgacgatattgaaaaacaagaacaagaagagaaaataaaaagcaagaagattaatcgcagaaatgagacttccgtcgatgaagaggacgaaaacggcacacataatgacgaagttaacgaggatgaagaagacgacaatatttcttccttccattctgctgtagaaaacttagtgcagggaaacggcaacgtatctgagagtgacataataaataatctcccacccgaaaaggaagcgtcctctgcaacaattgttctctgtcttacaaggagttcttatatgttggaattggttaacacaccgttaacagaaaacattttaattgcgtctttgatggacactttgatcacaccagcggttagaaataccgcgccaaatattagggagcttggtgtcaagaaccttggtttatgttgtctcttggatgtgaagttggctattgataacatgtacatcttaggtatgtgcgtttccaaaggtaatgcatctttaaagtatattgcgttacaagtcattgtagatattttttccgtacatgggaacactgtggtagacggagaaggcaaagttgactctatctctttgcacaaaatattttacaaggttttaaagaataacggtttaccggaatgtcaggtgatagcagcggagggtttatgcaaattatttttggcagacgtgttcactgatgatgatttgtttgaaacgttggttttgagttatttttctccgataaattccagtaacgaagcgttggtacaggcatttgccttctgcattccagtctattgtttttctcatcctgctcatcaacaacgtatgtctaggacggctgcggacatactcttaagattatgtgttctttgggacgatttacagagctctgtaatacctgaggtagaccgtgaagctatgttgaagcctaacataatatttcaacagttgttattttggactgatccacgtaacttagttaaccagacaggttctacaaaaaaagatacagtgcagcttacattcttgatcgatgtgctcaaaatatacgctcaaattgagaagaaagaaataaagaagatgatcatcactaatataaacgctatatttctttcttctgaacaagattattctactttgaaagaacttcttgagtattctgacgatattgcagaaaatgataatttagacaatgttagcaaaaatgctttggacaagttaaggaataatttgaattctttgattgaagagatcaatgaaaggtctgaaactcagacaaaagatgagaacaacactgcgaatgaccaatactcttctattttggggaattctttcaataaatcttccaatgacaccatagaacacgctgctgatataactgatggaaataacacagaattgactaaaacaactgttaatatttctgcagttgacaatacaacagagcaaagtaacagcaggaaaagaacgagaagtgaagcggagcaaattgacacatccaaaaacttggaaaacatgagtattcaagacacgtctactgtagcaaaaaatgtaagttttgttttacctgacgagaaatctgatgcaatgtccatagatgaagaagataaggattctgagtctttcagcgaggtctgttga

SEQ ID NO: 2427 - DNA, 4317 bp, Saccharomyces cerevisiae
atgagggatgaagctactcgcaaaaaaaggtcatttagtgatggtcattttttcaagaaactgaaattgatgtcaaggaaaaagcaacctgttatggaaagaagtaagaccactcgtacaaggaaggaatctaccaattccgcagcaaaatcatccctatcattaagaagggccaacaatggcagaaagaccatcgctaagagaagagtactgaccgacataggctctactaatgaaggtgttgccggtaactctggttcaaactctcctgctcaatattctcatactcctcattttagtgattctatcccaccactgcctttagagctaccagatatcgtctcaataaggagtagtagaagtcatattagtaataagagtaataagaacaaacatggtatagacttgactttcatacctcgaagatcgctacaaaattctaaggctggcttgaagaaaccgaatacttctccacaaggttattttaatattccagtgactatagatagagcaagtgagaaagtcaaacatactgatactaaaaatacattcaattcttcgtcttctgagaatgaacgaccagttttgagcatcttacagaaggatgactctcaaagttcttcgcacccagctatcgattcaatgtcagcacccaataatattaacaacaataacgacattgagaattcttcaaacagtctatttgatactattctatcaattgctcatagtgccatatctcatgtccctaaaatttcagccttaaatactgagatacaacgtgaattttcgcattcaggtgaaagtcatacaggttcaactcgccatccttatttccatatccaccacgcgcagcagcaacatcccttgtcacagcaacaagggcccttacctgtttccgaaaatgctaaccaaaatcccaatgacacagtgctcattcattccccctccgctaacacagcccaccgcagttcatcatttttgcgtcatttagattatttactatcccccacttctggtccagcctctgataaacatactcaagtagaggaaggggatgacgaggaagagttatcgcctctttccaaagcatttctttcaccatcaactcaactggtacctacaaatacatcgactacgcccctttcaggttctttgacacctaacaatagaaacgtaaatgcaaactctaactctgaaaccgagaacgacaatgatagggatgatagatcaaatgttggcaaagtgaaatttcagcccttgaaagtacacgagcctgcaatctcaacctttggtaaaggcaacttaactttagaggcagtggcaggatcctctgatattgataatacaactattgatctggacgagaataataccaataataatccaaatgcaagttcaacaaacttgagtcatattagcaaaagtaacgtaaacaataatctcggtccaaaagaattaaacacaagttatcgtaatagtacctatatcgacatggcaaggtttgaaaattcacaatcgaacctttctagccatagggcaagaagtaagacactgcccgcgaacaaagcattagagaatgccgttggtgatgaaggtaatagtaaaagaaattcaagatattcttcttattcaaacgatatggcctttgatgatgccgacgaaagaaaattcagaagtatgtccaaaaaattcttaaacaggagatctttttcaccttcgaacttaggcaataaagtgatccctggaattaatttaagaaattcattcaacaaaaataggaatagtagttctgatttctttagtacaaatcagggacagcaaatgccaagaacaagtactgcgggctcaggtaatatccatgcaataatgggtttggattctggcaatgatgatttcaagttagaaggtattgaatatgcttcagaaaagaaaaacagcgaatttcatacccttttcaaggactgcgatattaatcctaacgaaaagttaattgtcgatcatagttgtgcactatctcgtgatattcttttacaaggaaggatgtatatatctgatgcacacattggatttttctcaaacattttgggatgggtcagtacagttttcattccgtttaaggaaatcgttcagattgagaaaaagactaccgccggaattttccccaatggtattgtaattgatacgttgcatacaaagtacatcttcgcctcttttatgtcaagggatgctacctttgatttaattacagatgtatggaatcagatcatcttaggtaaaaaatataggaatggcttcggtaataatgacgacggtacgataagcgattcgagcagtgcattttttgatgattccgatgacaatgacgacgatggagacctggatgacgatgaccctgatattaatagcacagatatgacatctagtgacgatattgatgctgatgttttcaatgaatcaaatgatcttggtaaaaaccaaaaatctacgaactacttattgggtcccaataaacactctccaaccactgctgatttcaaaccttccaataatgatcatttggttattgaagcaaatattaatgcaccattaggaaaagtagtaaatcttttatacggtgaagacgtctcttactatgaaaggatccttaaagctcagaaaaattttgaaatatcgccaatccctaacaatttcctcacaaagaaaattcgtgactatgcatatacgaaaccgttatcaggcagcattggtccaagtaaaacaaaatgtttgatcacagatactttagagcattatgatttggaagactatgttaaagtgctcagtattaccaagaacccggatgttccttcagggaatatcttttcagtgaaaactgttttccttttctcttgggataaaaacaactccaccaaattaacagtttacaattctgttgattggactggtaaaagttggatcaaaagtatgattgaaaagggaacatttgatggtgttgcggacaccacaaagataatgatatctgaaattaagaaaatcttaagtgatgaagactcaaacataaactcaaagcatcaagccagcaataatgaatcagaagaagaaattattaatctgccaactattggacctccagttcatgatccgacggaacctgattttcaaaaaggaaaagacgatacagttatcgatgaaaaaattaatataccagttcctttaggaacagtgttttcactattgtatggtgatgacacatcatatattaagaaaatcatcgaaaaccagaataactttaatgtttgtgatattccaaagtttgtgaataacgcaagagagatcacctataccaaaaaattgaacaattcattcggtccgaagcaaactaaatgtatagtcacagagaccatcgagcatatggatttgaacagtttttttatggtaaaacaaatagtcagatctccggatgttccttacggtagttcattttcagtacatacgagatttttctattcctggggtgatcacaacacaacgaacatgaaagttgtcaccaatgttgtctggacaggtaaatcaatgctgaaaggaaccattgagaaaggttcaattgatggacaaagaagttcaacaaagcaactcgtagatgatctcaaaaaaataatttctaatgctagttcaacgaagaaaaaatcgaggagaagaggaaagacggtaaataaaaggaaatcatcaccatccactatcaagaatgagaagaatgaagaaaacttcgaagatacaagtaccaaaaattcatttttttccgctttctcaatgttacaacaagtaaacataacatccgttcaaggaattatgacaattatctctttttttatttgcttgattttcttctttagattattattccattctaagaatacttcgaacatccagattattactccaggaacaatcttaattaatggaaatgaatataattacgttcctaattttaaaacactctatcatgtttacgaagataatattataaaagatgcccgccgtaaagactcgaataaaaataacatagtcaccgatacggagggtctcatatgggactggttgatagatcgtggaaatggaaccgttcaaaatagtgtcttgtccaatcatattaaggagagtaataacaagaaggttaagctcgtaaatggagttagtgatcataaaatacagcagctagttgaatctataaaaatcaccgaattgcagctgcaagaaatgaaagaattattggcccaaacggataacacgtcggctactaaccaattactttga

SEQ ID NO: 2428 - DNA, 4317 bp, Artificial Sequence
  Description of Artificial Sequence: Synthetic polynucleotide
atgagggatgaagctactcgcaaaaaaaggtcttttagtgatggtcattttttcaagaaattgaaattgatgtctaggaaaaagcaacctgttatggaaagaagtaagaccactcgtacaaggaaggaatctaccaattccgcagcaaaatcttccttatctttaagaagggccaacaatggcagaaagaccatcgctaagagaagagtattaaccgacataggctctactaatgaaggtgttgccggtaactctggttccaactctcctgctcaatattctcatactcctcattttagtgattctatcccaccattgcctttagagttaccagatatcgtcagtataaggagtagtagaagtcatattagtaataagagtaataagaacaaacatggtatagacttgactttcatacctagaagatccttacaaaattctaaggctggcttgaagaaaccgaatacttctccacaaggttattttaatattccagtgactatagatagagcaagtgagaaagtcaaacatactgatactaaaaatacattcaattcttcttcttctgagaatgaaagaccagttttgagcatcttacagaaggatgactctcaaagttcttctcacccagctatcgattctatgtctgcacccaataatattaacaacaataacgacattgagaattcttccaacagtttatttgatactattttatccattgctcatagtgccatatctcatgtccctaaaatttctgccttaaatactgagatacaacgtgaattttctcattctggtgaaagtcatacaggttctactcgccatccttatttccatatccaccacgcgcagcagcaacatcccttgtctcagcaacaagggcccttacctgtttccgaaaatgctaaccaaaatcccaatgacacagtgctcattcattccccctccgctaacacagcccaccgcagttcttcttttttgcgtcatttagattatttattatcccccacttctggtccagcctctgataaacatactcaagtagaggaaggggatgacgaggaagagttatctcctctttccaaagcatttctttctccatctactcaattggtacctacaaatacatctactacgcccctttctggttctttgacacctaacaatagaaacgtaaatgcaaactctaactctgaaaccgagaacgacaatgatagggatgatagatctaatgttggcaaagtgaaatttcagcccttgaaagtacacgagcctgcaatctccacctttggtaaaggcaacttaactttagaggcagtggcaggatcctctgatattgataatacaactattgatttggacgagaataataccaataataatccaaatgcaagttctacaaacttgagtcatattagcaaaagtaacgtaaacaataatctcggtccaaaagaattaaacacaagttatcgtaatagtacctatatcgacatggcaaggtttgaaaattctcaaagtaacctttctagccatagggcaagaagtaagacattacccgcgaacaaagcattagagaatgccgttggtgatgaaggtaatagtaaaagaaattctagatattcttcttattccaacgatatggcctttgatgatgccgacgaaagaaaattcagaagtatgtccaaaaaattcttaaacaggagatctttttctccttccaacttaggcaataaagtgatccctggaattaatttaagaaattctttcaacaaaaataggaatagtagttctgatttctttagtacaaatcagggacagcaaatgccaagaacaagtactgcgggcagtggtaatatccatgcaataatgggtttggattctggcaatgatgatttcaagttagaaggtattgaatatgcttctgaaaagaaaaacagcgaatttcatacccttttcaaggactgcgatattaatcctaacgaaaagttaattgtcgatcatagttgtgcattatctcgtgatattcttttacaaggaaggatgtatatatctgatgcacacattggatttttcagtaacattttgggatgggtcagtacagttttcattccgtttaaggaaatcgttcagattgagaaaaagactaccgccggaattttccccaatggtattgtaattgatacgttgcatacaaagtacatcttcgcctcttttatgtctagggatgctacctttgatttaattacagatgtatggaatcagatcatcttaggtaaaaaatataggaatggcttcggtaataatgacgacggtacgataagcgattctagcagtgcattttttgatgattccgatgacaatgacgacgatggagacttggatgacgatgaccctgatattaatagcacagatatgacatctagtgacgatattgatgctgatgttttcaatgaaagtaatgatcttggtaaaaaccaaaaatctacgaactacttattgggtcccaataaacactctccaaccactgctgatttcaaaccttccaataatgatcatttggttattgaagcaaatattaatgcaccattaggaaaagtagtaaatcttttatacggtgaagacgtctcttactatgaaaggatccttaaagctcagaaaaattttgaaatatctccaatccctaacaatttcctcacaaagaaaattcgtgactatgcatatacgaaaccgttaagtggcagcattggtccaagtaaaacaaaatgtttgatcacagatactttagagcattatgatttggaagactatgttaaagtgctcagtattaccaagaacccggatgttccttctgggaatatcttttctgtgaaaactgttttccttttctcttgggataaaaacaactccaccaaattaacagtttacaattctgttgattggactggtaaaagttggatcaaaagtatgattgaaaagggaacatttgatggtgttgcggacaccacaaagataatgatatctgaaattaagaaaatcttaagtgatgaagactccaacataaactccaagcatcaagccagcaataatgaaagtgaagaagaaattattaatttaccaactattggacctccagttcatgatccgacggaacctgattttcaaaaaggaaaagacgatacagttatcgatgaaaaaattaatataccagttcctttaggaacagtgttttctttgttgtatggtgatgacacatcttatattaagaaaatcatcgaaaaccagaataactttaatgtttgtgatattccaaagtttgtgaataacgcaagagagatcacctataccaaaaaattgaacaattctttcggtccgaagcaaactaaatgtatagtcacagagaccatcgagcatatggatttgaacagtttttttatggtaaaacaaatagtcagatctccggatgttccttacggtagttcttttagcgtacatacgagatttttctattcctggggtgatcacaacacaacgaacatgaaagttgtcaccaatgttgtctggacaggtaaatctatgttgaaaggaaccattgagaaaggttccattgatggacaaagaagttctacaaagcaactcgtagatgatctcaaaaaaataatttctaatgctagttccacgaagaaaaaatctaggagaagaggaaagacggtaaataaaaggaaatcttctccatccactatcaagaatgagaagaatgaagaaaacttcgaagatacaagtaccaaaaattcttttttttccgctttctccatgttacaacaagtaaacataacatccgttcaaggaattatgacaattatctctttttttatttgcttgattttcttctttagattattattccattctaagaatacttctaacatccagattattactccaggaacaatcttaattaatggaaatgaatataattacgttcctaattttaaaacactctatcatgtttacgaagataatattataaaagatgcccgccgtaaagactctaataaaaataacatagtcaccgatacggagggtctcatatgggactggttgatagatcgtggaaatggaaccgttcaaaatagtgtcttgtccaatcatattaaggagagtaataacaagaaggttaagctcgtaaatggagttagtgatcataaaatacagcagttggttgaatctataaaaatcaccgaattgcagttacaagaaatgaaagaattattggcccaaacggataacacgagcgctactaaccaattactttga

SEQ ID NO: 2429 - DNA, 585 bp, Saccharomyces cerevisiae
atggtgacttctaatgttgtcctagtgagtggtgagggtgaacgattcaccgtagacaagaaaatcgcggagagatccctgctattgaaaaactatctgaacgatatgcatgacagcaacctacaaaacaactcagattcagaatcagattcagactcggaaacgaaccacaaaagcaaagacaacaataacggtgacgacgacgatgaggatgacgacgagattgtgatgcccgtgcccaatgttcggtcttccgttttgcagaaggttatcgaatgggccgagcaccacagagactctaacttccctgacgaagatgacgacgattccagaaagagtgctcccgtggactcatgggacagagaattcctgaaagtggaccaagagatgctatacgaaattattctggcggcaaactacctcaacatcaagcccttgcttgacgctggctgcaaggtggttgctgaaatgatcaggggaaggtctcccgaggaaattagaagaacgtttaatatcgtcaacgacttcactccagaggaggaggctgccattaggcgtgaaaatgaatgggctgaagaccgttag

SEQ ID NO: 2430 - DNA, 585 bp, Artificial Sequence
  Description of Artificial Sequence: Synthetic polynucleotide
atggtgacttctaatgttgtcttggtgagtggtgagggtgaaagattcaccgtagacaagaaaatcgcggagagatccttattattgaaaaactatttgaacgatatgcatgacagcaacttacaaaacaacagtgattctgaaagtgattctgactctgaaacgaaccacaaaagcaaagacaacaataacggtgacgacgacgatgaggatgacgacgagattgtgatgcccgtgcccaatgttagatcttccgttttgcagaaggttatcgaatgggccgagcaccacagagactctaacttccctgacgaagatgacgacgattccagaaagagtgctcccgtggactcttgggacagagaattcttgaaagtggaccaagagatgctttacgaaattattttggcggcaaactacctcaacatcaagcccttgcttgacgctggctgcaaggtggttgctgaaatgatcaggggaaggtctcccgaggaaattagaagaacgtttaatatcgtcaacgacttcactccagaggaggaggctgccattaggcgtgaaaatgaatgggctgaagaccgttga

SEQ ID NO: 2431 - DNA, 1326 bp, Saccharomyces cerevisiae
atggccccaaatcaaagatcacgttcgcttctgcagagacatcgaggaaaggtactcatttcattgactggaatagctgctttatttaccacagggtcggtggtagtgtttttcgtgaagagatggttgtataaacagcagttacggattactgagcaacacttcatcaaagaacagatcaaaagaaggttcgagcagacacaggaagactcgttgtacacaatatacgagctacttcctgtatggagaatggttttgaatgaaaacgatttgaatttggacagcatcgttacccaattaaaggaccaaaagaaccagttgactagagcaaagtctagtgaaagcagagaaagttcgccgttaaaaagtaaagctgagttgtggaacgagttagaactaaagagtttgatcaagctggtgacagtgacgtacacagtatcgtcgctgattcttttaacaagactgcaactaaatatcctgacaagaaacgagtacctggactccgcaataaaattaaccatgcagcaggaaaactgcaacaaactacagaataggttctataactgggttacatcgtggtggagcgatccggaggacaaagcggatgatgcaatggtaatggcagcaaaaaagtcaaagaaagaaggccaggaagtgtatattaatgagcaagctttcctatcactatcatggtggattcttaacaaggggtggttgagttacaatgaaataattacaaatcaaatcgaaattgaatttgacggcatacacccaagagatactctaacgttagaagaatttagttctcgtctcacgaacatattccggaacacgaattcccaaatattccagcaaaataataataacctcacgtctattttgcttcctaaagattccagtggacaggagtttcttctgtcacagacgcttgacgcggatgctttaacaagttttcactctaacacactagtttttaatcaattggtgaatgaactgacccaatgtatcgaaagcacagcaacatccatagtgttagagtctctaataaatgaatcattccatttcataatgaacaaggtcggcataaagacaatagccaagaaaaaacctggccaagaagatcagcaacagtatcaaatggcagttttcgctatgtcgatgaaagactgttgccaagaaatgcttcaaacaactgccgggtcttcccatagcggcagcgtgaacgaatacctggccactctggattctgtgcagccgctcgatgatctgagcgccagcgtatacagcaactttggcgtctccagctcgttttccttcaagccttaa

SEQ ID NO: 2432 - DNA, 1326 bp, Artificial Sequence
  Description of Artificial Sequence: Synthetic polynucleotide
atggccccaaatcaaagatctcgttctcttttacagagacatagaggaaaggtactcatttctttgactggaatagctgctttatttaccacagggtctgtggtagtgtttttcgtgaagagatggttgtataaacagcagttaagaattactgagcaacacttcatcaaagaacagatcaaaagaaggttcgagcagacacaggaagactctttgtacacaatatacgagttgcttcctgtatggagaatggttttgaatgaaaacgatttgaatttggacagcatcgttacccaattaaaggaccaaaagaaccagttgactagagcaaagtctagtgaaagcagagaaagttctccgttaaaaagtaaagctgagttgtggaacgagttagaattgaagagtttgatcaagttagtgacagtgacgtacacagtatcttctttgattcttttaacaagattacaattgaatatcttaacaagaaacgagtacttggactccgcaataaaattaaccatgcagcaggaaaactgcaacaaattacagaataggttctataactgggttacatcttggtggagcgatccggaggacaaagcggatgatgcaatggtaatggcagcaaaaaagtccaagaaagaaggccaggaagtgtatattaatgagcaagctttcttaagtttatcttggtggattcttaacaaggggtggttgagttacaatgaaataattacaaatcaaatcgaaattgaatttgacggcatacacccaagagatactttaacgttagaagaatttagttctcgtctcacgaacatattcagaaacacgaattcccaaatattccagcaaaataataataacctcacgtctattttgcttcctaaagattccagtggacaggagtttcttttatctcagacgcttgacgcggatgctttaacaagttttcactctaacacattagtttttaatcaattggtgaatgaattgacccaatgtatcgaaagcacagcaacatccatagtgttagagtctttgataaatgaatctttccatttcataatgaacaaggtcggcataaagacaatagccaagaaaaaacctggccaagaagatcagcaacagtatcaaatggcagttttcgctatgtccatgaaagactgttgccaagaaatgcttcaaacaactgccgggtcttcccatagcggcagcgtgaacgaatacttggccactttagattctgtgcagccgctcgatgatttgagcgccagcgtatacagcaactttggcgtctccagctccttttccttcaagccttga

SEQ ID NO: 2433 - DNA, 1503 bp, Saccharomyces cerevisiae
atgtcagagggaaaagtagacgaatttatggccatcactggcgctgatgacgctgctattgccactcaattcatcgaaatggcagacgggaacttgaacacagccatatcattgtttttcgaaaatggtggggctgctttactgagcagtaacaacacacctactccgtctaattcgactcctatggcgcccacctctgtagattcagatgccgatgcacaattagcggagaggttgcaaagggaagcttaccaacaacaacagcctgaccaagattatgtcaggccacctgatgaggcaagacatgaagtacttactgaaacttcaggattcccaatttcttacggcggcattggcggaagatttgaaccattgcatagggtgaacgacatgtttgacgaaggaagacctgaaagcatttttaatcaacgattggatgacacaaatactaatacatacatcaatgacaactcttcagattccttggactccgaggaagaaaatgacgacgacgaatatgagtatgtggaagagccggtcatcgaacttgatgaagacggcaatatcaaggagtacaccaaattagtgagaaagcctaaaaccatttccaaggagcagaaattagctttgttatttaggcctccattttcaatcatgtccaaactcgacttagacgctgcaaagcaaaaggcaagggcaaagcaaaaatggataatgattaacattcaggattcaggaatcttccaatgccaagccctcaacagggatttgtggtcgtccagaccggtaaaaactataatcaaagagaacttcgttttcctacagtatcaatatgaatcacgtaatgcccaaccctatcttcagttctatcacttgaataataaggatgatttgccccatatcgcgatactggatccaattaccggtgaacgtgtcaagcaatggaatagggttgttcccattccagagcaattcatctcagaaatcaacgagtttttggcctcattttcgctagatccaaaggtccctaatcccacggttaatgaacctcttcctaaagtggatccaacaactttgaccgaagagcaacaaatggaattagccattaaagagtcattaaataataactcgagcaaatcaaaccaagaagaagtgccgagtactggcgaagaacagaaacgagtacaagaaccggatccattcagtaccattgaagccagggtgcatccagaaccgccaaataaaccagggatcactacaagaattcaaattcgtaccggtgatggctccagactagttcgtagattcaatgctctggaagacactgtgcgtactatttacgaggttatcaagacagaaatggatggttttgccgattcaagattcacactaaatgatcaccaaagagaggacttgattgataaattaaacatgaccatagcggacgccggcttaaaaaatagttctttactacttgagaagcttgaccctgaaatagaataa

SEQ ID NO: 2434 - DNA, 1503 bp, Artificial Sequence
  Description of Artificial Sequence: Synthetic polynucleotide
atgtctgagggaaaagtagacgaatttatggccatcactggcgctgatgacgctgctattgccactcaattcatcgaaatggcagacgggaacttgaacacagccatatctttgtttttcgaaaatggtggggctgctttattaagcagtaacaacacacctactccgtctaattctactcctatggcgcccacctctgtagattctgatgccgatgcacaattagcggagaggttgcaaagggaagcttaccaacaacaacagcctgaccaagattatgtcaggccacctgatgaggcaagacatgaagtacttactgaaacttctggattcccaatttcttacggcggcattggcggaagatttgaaccattgcatagggtgaacgacatgtttgacgaaggaagacctgaaagcatttttaatcaaagattggatgacacaaatactaatacatacatcaatgacaactcttctgattccttggactccgaggaagaaaatgacgacgacgaatatgagtatgtggaagagccggtcatcgaacttgatgaagacggcaatatcaaggagtacaccaaattagtgagaaagcctaaaaccatttccaaggagcagaaattagctttgttatttaggcctccattttctatcatgtccaaactcgacttagacgctgcaaagcaaaaggcaagggcaaagcaaaaatggataatgattaacattcaggattctggaatcttccaatgccaagccctcaacagggatttgtggtcttccagaccggtaaaaactataatcaaagagaacttcgttttcttacagtatcaatatgaatcccgtaatgcccaaccctatcttcagttctatcacttgaataataaggatgatttgccccatatcgcgatattggatccaattaccggtgaacgtgtcaagcaatggaatagggttgttcccattccagagcaattcatcagtgaaatcaacgagtttttggcctctttttctttagatccaaaggtccctaatcccacggttaatgaacctcttcctaaagtggatccaacaactttgaccgaagagcaacaaatggaattagccattaaagagtctttaaataataactccagcaaaagtaaccaagaagaagtgccgagtactggcgaagaacagaaaagagtacaagaaccggatccattcagtaccattgaagccagggtgcatccagaaccgccaaataaaccagggatcactacaagaattcaaattcgtaccggtgatggctccagattggttcgtagattcaatgctttggaagacactgtgcgtactatttacgaggttatcaagacagaaatggatggttttgccgattccagattcacattaaatgatcaccaaagagaggacttgattgataaattaaacatgaccatagcggacgccggcttaaaaaatagttctttattacttgagaagcttgaccctgaaatagaatga

SEQ ID NO: 2435 - DNA, 1236 bp, Saccharomyces cerevisiae
atgcgtatagcgatgcatctgccgctgttgcttttatacatattcttactacccctttcaggtgcaaataacacagatgctgcacacgaagttatagcaacgaacacaaataattgggccgtattagtatccacgtcgcggttctggttcaattacaggcacatggctaatgtccttagtatgtataggactgtaaagaggttaggtataccggattcacaaataatattgatgctgagtgatgatgtggcctgcaattcaaggaatctatttcctggaagtgtttttaacaataaggatcacgctattgacctttacggagactctgtagaggttgactacagaggttacgaagttaccgtggaaaactttataaggctgttaacggatagatggacagaagaccatcctaaatctaaacggttgttgacggatgaaaattcaaatatattcatctatatgacaggacatggtggcgatgattttttaaagttccaagatgctgaagagattgcttctgaagatattgcagatgcattccagcaaatgtacgaaaagaaaagatacaatgaaatcttctttatgatagatacatgtcaggcaaacacaatgtattccaagttttattctccaaatattctggctgtaggctctagtgaaatggatgaaagctcgtactcgcatcactcggacgtagaaataggggttgctgttattgatagattcacctattactgtttggatttcctagaacaaatcgataaaaattccacgttaactttgcaggacctcttcgattcattcaccttcgaaaagattcactctcatgtgggtgtcaggactgatctgtttgataggaatccgtcagaagtattgattactgatttttttgcgaatgtgcaaaacgtaattcctgatgattcaaaacctctttccgtaagtcattatcatcattacaaagatcatatcgatactgctcagtatgagcttaacaataatgtgctggatttggccttggagacttaccgcaaaaacaatcaatcctccaagattgaaaaaaaaatcaaagacatcaagtctactagtgtattggatgttgatatagattccaacgaatgtttcttcacctccttcaaacaatcagctaccataatactggcgcttatagtaactattctgtggttcatgctgagaggaaacactgctaaagcaacctatgacctgtacactaattaa

SEQ ID NO: 2436 - DNA, 1236 bp, Artificial Sequence
  Description of Artificial Sequence: Synthetic polynucleotide
atgcgtatagcgatgcatttaccgttattgcttttatacatattcttattgcccctttctggtgcaaataacacagatgctgcacacgaagttatagcaacgaacacaaataattgggccgtattagtatccacgtccagattctggttcaattacaggcacatggctaatgtccttagtatgtataggactgtaaagaggttaggtataccggattctcaaataatattgatgttaagtgatgatgtggcctgcaattctaggaatttatttcctggaagtgtttttaacaataaggatcacgctattgacctttacggagactctgtagaggttgactacagaggttacgaagttaccgtggaaaactttataaggttattaacggatagatggacagaagaccatcctaaatctaaaagattgttgacggatgaaaatagtaatatattcatctatatgacaggacatggtggcgatgattttttaaagttccaagatgctgaagagattgcttctgaagatattgcagatgcattccagcaaatgtacgaaaagaaaagatacaatgaaatcttctttatgatagatacatgtcaggcaaacacaatgtattccaagttttattctccaaatattttggctgtaggctctagtgaaatggatgaaagctcttactctcatcactctgacgtagaaataggggttgctgttattgatagattcacctattactgtttggatttcttggaacaaatcgataaaaattccacgttaactttgcaggacctcttcgattctttcaccttcgaaaagattcactctcatgtgggtgtcaggactgatttatttgataggaatccgagtgaagtattgattactgatttttttgcgaatgtgcaaaacgtaattcctgatgattctaaacctctttccgtaagtcattatcatcattacaaagatcatatcgatactgctcagtatgagcttaacaataatgtgttggatttggccttggagacttaccgcaaaaacaatcaatcctccaagattgaaaaaaaaatcaaagacatcaagtctactagtgtattggatgttgatatagattccaacgaatgtttcttcacctccttcaaacaatctgctaccataatattggcgcttatagtaactattttatggttcatgttgagaggaaacactgctaaagcaacctatgacttgtacactaattga

SEQ ID NO: 2437 - DNA, 2070 bp, Saccharomyces cerevisiae
atgacctcaacactagccactagactctcgacatattctatttcattaatactgcagcgcatcaaaattataaaacgttgttactcagctcccgtactcagagattaccaacaagatgctatagatgcatgtgtgaattctattcgacagggcaccaagagaattggtgtatcattagccactggtggtggtaagacagtgatattctcaaatcttatcaatcaattgcgccaaaactattttaaagaacgtcaaggaaattttaaatcgttgatcctggttcacaggagggagctggccttacaagcgacggccactcttaaaaaaatattccccgacttaaaggttcacatagaaatgggaaaatatgattgcgatattgaagattctgacgtgattgttgcatctgttcagacgttgattagaagactccataaatatgatactaattcagtgaatctcatcatcattgatgaagcacatcattctgtggctaattcttatagaagtatcttagatcatttcaaagcttcaactgcagaaaccaaaatccctgttattggctttagtgcgactttcgaaagagcagataaaagagctttgtcaatggtaatggataaaattgtgtaccaccggggaatactggaaatgatcgatgacaagtggctatgtgaggcaaaattcacgtcagtcaaaattgaagcagacttatcagatgtaaaaagcactgcagatgacttccagctggcaccgttatcgtctctaatgaatacgaaagaaattaatgaagtaattctgaaaacttaccttcataaaaagcaagagaaatcactaaaatcaacattactgtttggcgttgataaagcccatgtacaaagtttgcataaattatttaaagacaacggtattaatacggactatgtcacctcggatacaaaacagatagaacgagataatataattcaaaaattcaaaaatggggaaactgaagtactcatgaactgtggaatattcacagaaggaacggacatgccaaatattgattgtatactactgtgtaggcccacaaaatcgcgttcacttttgattcaaatgattggaagaggtttacggttacaccattcgaaagaccactgtcatatcatcgacttcattggagcttctagtgttggagtggtttcagcgcccactctactgggtataaggagtgatgatatcgaatttgatgatgctacagttgaagatttaaaagcaatccaaggagagataatagctaaacaacaaaaaatcgacgaaaggttaagggctttatttcagactgatgaagcagcaatggaaaatgtaactgaaagaaatagcgttgccgattggattcacagtgcaaattcggttgatttaaccttgtgctcctttgatagttttaggaattttacacagagcaataactcatatccatctggcaaggagtttgatgaagcttctgaagctgtaaaagaaatggagctgttgatgaactcacaatatccgtgggtgaaatttgcctcaaatgcgtggggcctccctttaaaaggtaagaatcatttgagaatatacaaagaaaaatccgaagacaaattgtcgatggtatatcatctaaaaatgtatcgacaattaccgtgttttataacaaataaatacgcggactatgttccaaaaagtataataaaagacgctaatctttggaatgtaatgtcaaaggtggaaaaaatcataaatactctaaattcggacttggaaggacaaacaatgcaataccaggcaatatctagtaaatactcgaaatggagacaaacagttcctacgtcaaaacaaagagactttgttttcagaaagctaaagaaagtatatggtgagtcctcaaaagattttattagattatctttggatgatgttactacttatgtaaatactaagatgacgaaaggagatgcttccaacttaatctttgccagcagtttggcacctgtctacccgttgaaatcattgttacgaatattagaatatcaaaaaagaagatcttttataaagtga

SEQ ID NO: 2438 - DNA, 2070 bp, Artificial Sequence
  Description of Artificial Sequence: Synthetic polynucleotide
atgacctctacattggccactagactctccacatattctatttctttaatattacagcgcatcaaaattataaaacgttgttactctgctcccgtactcagagattaccaacaagatgctatagatgcatgtgtgaattctattagacagggcaccaagagaattggtgtatctttagccactggtggtggtaagacagtgatattcagtaatcttatcaatcaattgcgccaaaactattttaaagaacgtcaaggaaattttaaatctttgatcttggttcacaggagggagttggccttacaagcgacggccactcttaaaaaaatattccccgacttaaaggttcacatagaaatgggaaaatatgattgcgatattgaagattctgacgtgattgttgcatctgttcagacgttgattagaagactccataaatatgatactaattctgtgaatctcatcatcattgatgaagcacatcattctgtggctaattcttatagaagtatcttagatcatttcaaagcttccactgcagaaaccaaaatccctgttattggctttagtgcgactttcgaaagagcagataaaagagctttgtccatggtaatggataaaattgtgtaccacagaggaatattggaaatgatcgatgacaagtggttatgtgaggcaaaattcacgagtgtcaaaattgaagcagacttaagtgatgtaaaaagcactgcagatgacttccagttagcaccgttatcttctttgatgaatacgaaagaaattaatgaagtaattttgaaaacttaccttcataaaaagcaagagaaatctttgaaatctacattactttttggcgttgataaagcccatgtacaaagtttgcataaattatttaaagacaacggtattaatacggactatgtcacctctgatacaaaacagatagaaagagataatataattcaaaaattcaaaaatggggaaactgaagtactcatgaactgtggaatattcacagaaggaacggacatgccaaatattgattgtatattattatgtaggcccacaaaatctcgttctcttttgattcaaatgattggaagaggtttaagattacaccattctaaagaccactgtcatatcatcgacttcattggagcttctagtgttggagtggtttctgcgcccactttattgggtataaggagtgatgatatcgaatttgatgatgctacagttgaagatttaaaagcaatccaaggagagataatagctaaacaacaaaaaatcgacgaaaggttaagggctttatttcagactgatgaagcagcaatggaaaatgtaactgaaagaaatagcgttgccgattggattcacagtgcaaattctgttgatttaaccttgtgctcctttgatagttttaggaattttacacagagcaataacagttatccatctggcaaggagtttgatgaagcttctgaagctgtaaaagaaatggagttattgatgaactctcaatatccgtgggtgaaatttgcctctaatgcgtggggcctccctttaaaaggtaagaatcatttgagaatatacaaagaaaaatccgaagacaaattgtccatggtatatcatttgaaaatgtatagacaattaccgtgttttataacaaataaatacgcggactatgttccaaaaagtataataaaagacgctaatctttggaatgtaatgtccaaggtggaaaaaatcataaatactttgaatagtgacttggaaggacaaacaatgcaataccaggcaatatctagtaaatactctaaatggagacaaacagttcctacgtccaaacaaagagactttgttttcagaaagttgaagaaagtatatggtgagtcctctaaagattttattagattatctttggatgatgttactacttatgtaaatactaagatgacgaaaggagatgcttccaacttaatctttgccagcagtttggcacctgtctacccgttgaaatctttgttaagaatattagaatatcaaaaaagaagatcttttataaagtga

SEQ ID NO: 2439 - DNA, 2172 bp, Saccharomyces cerevisiae
atgagctctagagcattaaggagattacaagatgataatgctctgctagagtcgctgctatcgaattcaaatgcgaataaaatgacgagtggtaaaagtactgccggtaatattcagaaacgggagaacatcttctctatgatgaataacgtacgtgattcagataatagcactgatgaaggacaaatgtctgagcaggatgaagaagctgctgctgctggggagcgtgatactcaaagtaatggtcaacctaaaagaattacactagcatccaagtcttctagaaggaaaaagaataaaaaggcaaaaaggaagcaaaaaaaccataccgccgaggctgcaaaagacaagggttccgatgatgatgatgatgatgaagaattcgacaagattatccaacagttcaaaaaaactgatatattgaagtacggtaagactaaaaatgatgacactaatgaggaaggtttcttcacggcatctgaaccagaggaagcatctagccaaccttggaagtcatttttaagcttagaaagtgatccgggcttcacaaagttccccatttcatgtttgaggcattcttgcaaattttttcaaaatgatttcaagaaattggacccccatacggaattcaaacttttatttgacgatatatctccagagtctcttgaagatattgattcgatgacatccacacctgtctcccctcagcagctgaaacagattcagagactgaaaagattaattagaaactggggcggaaaagatcatagattggcacctaatggccccggaatgcacccgcaacatttgaagtttaccaagatcagagatgattggatcccaactcaaagaggtgagctctctatgaaacttttaagttctgatgatcttttagattggcaattatgggaaaggccgttagattggaaggatgttatccaaaacgatgtcagtcagtggcaaaaattcatttctttttataagttcgaacctttaaattccgacctgagcaagaaatcaatgatggacttctacttaagtgttattgttcaccctgatcatgaagcccttataaatttgatttcttctaaatttccgtatcatgtgcctggactgctacaagttgctttgatatttattaggcaaggtgatagatcaaacactaatggattgttacaaagagcactctttgtctttgatagagctttgaaagcaaatattattttcgattccttgaattgtcaactaccttatatatacttcttcaacagacagttttacttggcaatatttagatacatccaatctcttgctcaaagaggtgttataggaactgctagtgaatggacaaaagttctctggtcactgagcccattggaagatcctttaggatgcaggtatttcctcgatcactattttctattgaataatgactatcagtacattatagaattatccaactctccattaatgaactgttataaacagtggaatactttaggattttccttggcggtagtactaagcttcctaagaataaatgagatgagttccgcccgcaatgcgcttctaaaagcctttaagcatcatcctttacaactgtcagaacttttcaaggagaaactcttgggcgatcatgcgctaactaaagatttatccattgatggccattcggcagaaaacttggaattaaaggcatatatggcccgcttcccgttactttggaatagaaacgaagaggtaacatttttgcatgatgaaatgtcgagtattttacaggattaccatagaggaaacgttacaatcgattcaaatgatgggcaagatcacaataacattaacaacttgcaatcacctttctttattgcgggaatcccaattaacttattaagattcgccatactatctgaggagtcttctgtaatggctgcaattccatcatttatctggtctgataatgaagtatatgagtttgacgtattaccaccaatgcctacgtcaaaagaatcaatcgaagtggttgaaaacatcaaaacctttattaatgaaaaggatttagctgtccttcaggcagaaagaatgcaagatgaggacctgttgaatcaaattagacaaatatctttgcaacagtacattcatgaaaatgaagagtcaaatgaaaatgagggttaa

SEQ ID NO: 2440 - DNA, 2172 bp, Artificial Sequence
  Description of Artificial Sequence: Synthetic polynucleotide
atgagctctagagcattaaggagattacaagatgataatgctttgttggagtctttattatccaatagtaatgcgaataaaatgacgagtggtaaaagtactgccggtaatattcagaaaagagagaacatcttctctatgatgaataacgtacgtgattctgataatagcactgatgaaggacaaatgtctgagcaggatgaagaagctgctgctgctggggagcgtgatactcaaagtaatggtcaacctaaaagaattacattagcatccaagtcttctagaaggaaaaagaataaaaaggcaaaaaggaagcaaaaaaaccataccgccgaggctgcaaaagacaagggttccgatgatgatgatgatgatgaagaattcgacaagattatccaacagttcaaaaaaactgatatattgaagtacggtaagactaaaaatgatgacactaatgaggaaggtttcttcacggcatctgaaccagaggaagcatctagccaaccttggaagagctttttaagcttagaaagtgatccgggcttcacaaagttccccattagttgtttgaggcattcttgcaaattttttcaaaatgatttcaagaaattggacccccatacggaattcaaacttttatttgacgatatatctccagagtctcttgaagatattgattctatgacatccacacctgtctcccctcagcagttgaaacagattcagagattgaaaagattaattagaaactggggcggaaaagatcatagattggcacctaatggccccggaatgcacccgcaacatttgaagtttaccaagatcagagatgattggatcccaactcaaagaggtgagctctctatgaaacttttaagttctgatgatcttttagattggcaattatgggaaaggccgttagattggaaggatgttatccaaaacgatgtcagtcagtggcaaaaattcatttctttttataagttcgaacctttaaattccgacttgagcaagaaatctatgatggacttctacttaagtgttattgttcaccctgatcatgaagcccttataaatttgatttcttctaaatttccgtatcatgtgcctggattattacaagttgctttgatatttattaggcaaggtgatagatctaacactaatggattgttacaaagagcactctttgtctttgatagagctttgaaagcaaatattattttcgattccttgaattgtcaattaccttatatatacttcttcaacagacagttttacttggcaatatttagatacatccaatctcttgctcaaagaggtgttataggaactgctagtgaatggacaaaagttctctggtctttaagcccattggaagatcctttaggatgcaggtatttcctcgatcactattttttattgaataatgactatcagtacattatagaattatccaactctccattaatgaactgttataaacagtggaatactttaggattttccttggcggtagtattgagcttcttaagaataaatgagatgagttccgcccgcaatgcgcttttgaaagcctttaagcatcatcctttacaattatctgaacttttcaaggagaaactcttgggcgatcatgcgttgactaaagatttatccattgatggccattctgcagaaaacttggaattaaaggcatatatggcccgcttcccgttactttggaatagaaacgaagaggtaacatttttgcatgatgaaatgagcagtattttacaggattaccatagaggaaacgttacaatcgattctaatgatgggcaagatcacaataacattaacaacttgcaaagtcctttctttattgcgggaatcccaattaacttattaagattcgccatattatctgaggagtcttctgtaatggctgcaattccatcttttatctggtctgataatgaagtatatgagtttgacgtattaccaccaatgcctacgtccaaagaaagtatcgaagtggttgaaaacatcaaaacctttattaatgaaaaggatttagctgtccttcaggcagaaagaatgcaagatgaggacttgttgaatcaaattagacaaatatctttgcaacagtacattcatgaaaatgaagagagcaatgaaaatgagggttga

SEQ ID NO: 2441 - DNA, 4545 bp, Saccharomyces cerevisiae
atgaccacatctcgtaaatcgcatgcgaaagacaaaaaggctggtggtgaacaggatctggcggatttgaagtttaggtatgatcttctgacgaatgaactgttccatttaagagagtttgtttcattggtagattatgatccaacccattttaatgattctgaaagttttcagaagtttctcagggaaacacacttgtcgttagaggagagaggagaaaaattcactgatgacgtagccaagaaaggcacgaatggtgatcttactcgcagaaggcgaaacctcaggacatcgacagttgttagttcagaaacgactaatgagaaaaagggtgatatagaactgaagttagaaagcatagcaccattagtacgaaataaatgtgaggagctaaaatacaaactaagtgatcattcaaataggaaatctatagtaccgcaaaaaagaccaatacaacatttgaagaagagagaagcagcgaagtccttgaagttcaaaagtgaaagaaaggaaaatccactgccattgcatgaacatatagctgaagagagatatgatcacatcgcaaaagttgaagaaccctctgaagccttcactataaagtgtccttctgatgatagctcctttgaaaatactagtgaacattatagtgataatttttatttcaccacatcatccgaagaggaagatataaagaaaaaaagaggtagaaagaaaaagaagcctagaataaaactggtagtccatcctccaaagcaaaccataacgaacccgttgcatgtagtcaagccgggatacgaaagcttgcacgaatacatcgcttcctttaagtcattagaagacgatttaacgctggaagaatataataaatacatcgacgaacaaagacggcttttatcgagactcaaaaaaggtattgaaaatggcgcattgaagtatgacaaagaaacggactcactacaacctataacatccaaggaaatcaagactatcataacatataaaccagacccgatttcatatttctataaacaacaagatctgcaaatccataccgatcacttaattaaccaaggtattcatatgagtaagctgtttagaagttcaacaaaggcaagaatagcaagagccaaaaaggtttctcaaatgatagaacaacattttaaacacgtagccggagcagaagaaagaaaggcaaaggaggaggagaggcacaaaaagtcgctagccaggttcgcagttcaagctgttaaaaaaagatggaatatggctgagaaggcttataggattttgagaaaagatgaagaagaacagttaaaaaggattgaaggtaagcaacacctttctaaaatgttggagaaaagtacacaattgttggaagctcagctaaaccaagtaaatgacgatgggagaagcagtaccccgtcttctgactcaaacgatgtattgagtgaaagtgacgatgatatggatgacgaattatcaacatcttccgatgaagacgaagaggtcgatgctgatgtggggctagaaaatagtccagcatcgacggaagctactccaacagacgaatcattaaatctgatacaattgaaagaaaaatacgggcattttaatggttcatcgacagtatatgactcaagaaataaagatgagaagtttccgacattggataaacatgaaagttcaagtagtgaaagttctgtaatgactggagaggagtcctccatatattcatcctctgaaaatgaaagtcaaaacgaaaatgatcgagaatcggacgacaagactccatctgtgggtttaagtgcattatttggtaaaggtgaggaatcggatggggatttagaccttgacgatagtgaagattttacggttaatagctcatctgtagaaggtgaagaacttgaaaaagaccaagttgacaattcagctgctacatttgaaagagcaggtgattttgttcacactcaaaatgaaaatagggacgatataaaagatgtcgaggaagatgctgaaacaaaagtacaagaagaacagttatcagtggtggatgtacctgtgccatctttattaagaggaaacttaagaacgtaccagaaacaaggtttgaattggttagcctctctttataacaatcacacaaatggtatcctggcagacgagatggggttaggtaaaactattcagacaatttctctgctagcatatttagcttgtgaaaaggaaaactgggggccacatcttattgttgttcctacatcagttctgttgaactgggagatggaattcaaaaggttcgcgcctgggtttaaggttttaacatattatggttctccccagcaacgtaaagaaaaaaggaaaggttggaataagcctgatgctttccatgtttgtattgtttcttaccaacttgtagttcaagatcaacattcctttaagagaaagagatggcaatatatggtgctggatgaagcacacaatatcaaaaacttcagatctacaagatggcaggctctattgaatttcaacacacaaagaaggcttctgttgactggtacacctttacagaataaccttgctgagctgtggtcattattatatttcttaatgccccagactgttattgacgggaaaaaggtttctggatttgctgatcttgatgcatttcaacaatggtttggacgccctgtcgataaaattattgaaacgggtcagaattttggacaggacaaggaaacgaagaagacagttgccaagttgcatcaagttttacgtccatacctcttaagaaggttaaaggccgatgttgagaaacaaatgccagcgaagtatgagcatattgtttattgtaagctatctaaaagacaaaggttcttatatgatgattttatgtctagagctcaaacgaaagcaacactagccagtggaaattttatgtcaattgtcaactgtttgatgcaattgagaaaggtgtgtaaccatcccaatttatttgaagtgaggccaatattaacatcatttgtccttgaacattgtgtagcttccgactacaaggatgtagaaaggactctgcttaaattgttcaaaaaaaacaatcaagttaaccgggttgacttggatttcttgaacttggtgtttacgcttaatgacaaagatttaacttcttatcatgccgaggaaatctcaaaactgacgtgtgtaaaaaacttcgttgaagaagtcaataaattgagggaaaccaataaacagcttcaggaggagtttggagaggcgtcttttttaaattttcaagatgcaaatcaatatttcaagtattctaataagcagaaacttgaagggacagttgacatgctaaactttctaaagatggtaaataaacttagatgcgacagaagacccatattcggaaagaaccttattgacctattaacgaaagatagaagggttaaatatgataaatcaagcattattgataatgaactaataaaacccttgcaaaccagggtattggataatagaaagatcatagatacctttgcagtgttaaccccaagtgccgtctcactagatatgagaaagttggcattgggattaaatgatgacagttcggtaggcgaaaacacaaggctaaaggtaatgcagaactgttttgaagtatccaacccattacaccaactgcaaaccaaattaacaatcgcattcccggacaaatcgctgcttcaatacgattgtggtaaattgcagaagttagcaattttattacagcagctgaaggacaatggacatagggcacttatcttcacacaaatgacaaaagttttggacgttctggaacagtttttaaactatcatggttatttgtatatgagactagatggtgccacaaagatcgaagaccgtcaaatcctaacagagagattcaacactgactcaagaataacggtatttatcctatcaagtagatcaggagggctaggtatcaatctgactggggcagatacagttattttttacgattcagattggaatccagccatggacaaacagtgtcaagatagatgtcacagaattggacagactcgagatgtgcatatttacagatttgtcagcgaacataccatagaaagcaatatcttaaaaaaagccaaccaaaaaagacaattggataatgttgttattcaagagggtgacttcacaacagattatttcagcaaactttcggtgagagatttattgggatccgaattgcccgaaaatgcttcaggtggagataaaccactaatagcagatgcagatgtggcagccaaagatcccagacaactggaaagacttcttgcgcaagcggaagatgaggatgatgttaaagctgcaaacttagccatgagagaagtcgaaattgacaatgacgatttcgacgaaagcacagaaaaaaaagcagctaatgaagaggaagaaaatcatgctgaacttgatgagtatgagggcactgcccatgttgacgagtacatgatcaggtttattgccaacggttattattattga

SEQ ID NO: 2442 - DNA, 4545 bp, Artificial Sequence
  Description of Artificial Sequence: Synthetic polynucleotide
atgaccacatctcgtaaatctcatgcgaaagacaaaaaggctggtggtgaacaggatttggcggatttgaagtttaggtatgatcttttgacgaatgaattattccatttaagagagtttgtttctttggtagattatgatccaacccattttaatgattctgaaagttttcagaagtttctcagggaaacacacttgtctttagaggagagaggagaaaaattcactgatgacgtagccaagaaaggcacgaatggtgatcttactcgcagaaggagaaacctcaggacatctacagttgttagttctgaaacgactaatgagaaaaagggtgatatagaattgaagttagaaagcatagcaccattagtaagaaataaatgtgaggagttgaaatacaaattaagtgatcattctaataggaaatctatagtaccgcaaaaaagaccaatacaacatttgaagaagagagaagcagcgaagtccttgaagttcaaaagtgaaagaaaggaaaatccattaccattgcatgaacatatagctgaagagagatatgatcacatcgcaaaagttgaagaaccctctgaagccttcactataaagtgtccttctgatgatagctcctttgaaaatactagtgaacattatagtgataatttttatttcaccacatcttccgaagaggaagatataaagaaaaaaagaggtagaaagaaaaagaagcctagaataaaattagtagtccatcctccaaagcaaaccataacgaacccgttgcatgtagtcaagccgggatacgaaagcttgcacgaatacatcgcttcctttaagtctttagaagacgatttaacgttagaagaatataataaatacatcgacgaacaaagaagacttttatctagactcaaaaaaggtattgaaaatggcgcattgaagtatgacaaagaaacggactctttacaacctataacatccaaggaaatcaagactatcataacatataaaccagacccgatttcttatttctataaacaacaagatttgcaaatccataccgatcacttaattaaccaaggtattcatatgagtaagttatttagaagttctacaaaggcaagaatagcaagagccaaaaaggtttctcaaatgatagaacaacattttaaacacgtagccggagcagaagaaagaaaggcaaaggaggaggagaggcacaaaaagtctttggccaggttcgcagttcaagctgttaaaaaaagatggaatatggctgagaaggcttataggattttgagaaaagatgaagaagaacagttaaaaaggattgaaggtaagcaacacctttctaaaatgttggagaaaagtacacaattgttggaagctcagttgaaccaagtaaatgacgatgggagaagcagtaccccgtcttctgactccaacgatgtattgagtgaaagtgacgatgatatggatgacgaattatctacatcttccgatgaagacgaagaggtcgatgctgatgtggggttggaaaatagtccagcaagcacggaagctactccaacagacgaatctttaaatttgatacaattgaaagaaaaatacgggcattttaatggttcttctacagtatatgacagtagaaataaagatgagaagtttccgacattggataaacatgaaagtagtagtagtgaaagttctgtaatgactggagaggagtcctccatatattcttcctctgaaaatgaaagtcaaaacgaaaatgatagagaaagtgacgacaagactccatctgtgggtttaagtgcattatttggtaaaggtgaggaaagtgatggggatttagaccttgacgatagtgaagattttacggttaatagctcttctgtagaaggtgaagaacttgaaaaagaccaagttgacaattctgctgctacatttgaaagagcaggtgattttgttcacactcaaaatgaaaatagggacgatataaaagatgtcgaggaagatgctgaaacaaaagtacaagaagaacagttatctgtggtggatgtacctgtgccatctttattaagaggaaacttaagaacgtaccagaaacaaggtttgaattggttagcctctctttataacaatcacacaaatggtatcttggcagacgagatggggttaggtaaaactattcagacaatttctttattggcatatttagcttgtgaaaaggaaaactgggggccacatcttattgttgttcctacatctgttttattgaactgggagatggaattcaaaaggttcgcgcctgggtttaaggttttaacatattatggttctccccagcaacgtaaagaaaaaaggaaaggttggaataagcctgatgctttccatgtttgtattgtttcttaccaacttgtagttcaagatcaacattcctttaagagaaagagatggcaatatatggtgttggatgaagcacacaatatcaaaaacttcagatctacaagatggcaggctttattgaatttcaacacacaaagaaggcttttattgactggtacacctttacagaataaccttgctgagttatggtctttattatatttcttaatgccccagactgttattgacgggaaaaaggtttctggatttgctgatcttgatgcatttcaacaatggtttggacgccctgtcgataaaattattgaaacgggtcagaattttggacaggacaaggaaacgaagaagacagttgccaagttgcatcaagttttacgtccatacctcttaagaaggttaaaggccgatgttgagaaacaaatgccagcgaagtatgagcatattgtttattgtaagttatctaaaagacaaaggttcttatatgatgattttatgtctagagctcaaacgaaagcaacattggccagtggaaattttatgtctattgtcaactgtttgatgcaattgagaaaggtgtgtaaccatcccaatttatttgaagtgaggccaatattaacatcttttgtccttgaacattgtgtagcttccgactacaaggatgtagaaaggactttacttaaattgttcaaaaaaaacaatcaagttaacagagttgacttggatttcttgaacttggtgtttacgcttaatgacaaagatttaacttcttatcatgccgaggaaatctccaaattaacgtgtgtaaaaaacttcgttgaagaagtcaataaattgagggaaaccaataaacagcttcaggaggagtttggagaggcgtcttttttaaattttcaagatgcaaatcaatatttcaagtattctaataagcagaaacttgaagggacagttgacatgttgaactttttgaagatggtaaataaacttagatgcgacagaagacccatattcggaaagaaccttattgacttattaacgaaagatagaagggttaaatatgataaaagtagcattattgataatgaattgataaaacccttgcaaaccagggtattggataatagaaagatcatagatacctttgcagtgttaaccccaagtgccgtctctttagatatgagaaagttggcattgggattaaatgatgacagttctgtaggcgaaaacacaaggttaaaggtaatgcagaactgttttgaagtatccaacccattacaccaattacaaaccaaattaacaatcgcattcccggacaaatctttacttcaatacgattgtggtaaattgcagaagttagcaattttattacagcagttgaaggacaatggacatagggcacttatcttcacacaaatgacaaaagttttggacgttttggaacagtttttaaactatcatggttatttgtatatgagattagatggtgccacaaagatcgaagaccgtcaaatcttaacagagagattcaacactgacagtagaataacggtatttatcttatccagtagatctggagggttaggtatcaatttaactggggcagatacagttattttttacgattctgattggaatccagccatggacaaacagtgtcaagatagatgtcacagaattggacagactagagatgtgcatatttacagatttgtcagcgaacataccatagaaagcaatatcttaaaaaaagccaaccaaaaaagacaattggataatgttgttattcaagagggtgacttcacaacagattatttcagcaaactttctgtgagagatttattgggatccgaattgcccgaaaatgcttctggtggagataaaccattgatagcagatgcagatgtggcagccaaagatcccagacaattggaaagacttcttgcgcaagcggaagatgaggatgatgttaaagctgcaaacttagccatgagagaagtcgaaattgacaatgacgatttcgacgaaagcacagaaaaaaaagcagctaatgaagaggaagaaaatcatgctgaacttgatgagtatgagggcactgcccatgttgacgagtacatgatcaggtttattgccaacggttattattattga

SEQ ID NO: 2443 - DNA, 3675 bp, Saccharomyces cerevisiae
atggattccacaggcgcttctcagattgttagcgcactagatgttatttactcccccaagtctaacaattctcaacggcaagaagctcagaaatttttagatgaagtgaaattatgctcagaatcgcccttttggggctacgaaattgcattgcaaaaccccactaattctatattgaaatactttggactaggattactagaccatgcagtgaagaaaaactggaatgattatgacgaggggaaaagagtggccctgagaaaatgggtcatggaacttaattttggggtgcaagattatgataccagatatattaaggaaaaattagccactttatgggtagaggtggcaaaaagaacatggggtgaggctcttaagcagacaaaccctacggaagaacagttactcacatcttgggtggacatggacaataaccttttcgaactttggaacataaatcaatcgtcaagagaactagcattaataattttcagaatcctttttgaagatgttttcttgttggacgacctaattgttttgaaaaggatgacggttattcaacccttatgtgtaatgattgtttgccctattgaagttttcgcaataaaatacaaattcagtgataaatggaccaaatttaaagctaatgaagagggctggttttctgtttggattccagagttgaataatgcattacaacagaataattctgaatacatcataaggcttttagaaactctgaagacgtgtttaaactggccattaacagaggtcattgtaagaaatgacgtgttatcctccttattgacttgtttatccagcaatatcccaagggcgcagtcaatggcattagactcgatacatattctgttgacccgtccctatagtaatgaaagccattaccaaatgaccatagatcgagtttttgataatatggacttattagatagcgtttatgaaagcttgttgtttgatcctacagatgatatagatgaaacgaaatatcctataattaaaaagttcgtggatatgatcagttgtctctatgtttgtgtcccaaagattaaggagacaaatggccaaattcaaaaatattttaagcttgtattaaagacaacttataacccaagcttaatcgttagcggattaacattagacctatggtgtacctgtcttcgaaacgatgaatacttacccaagctggagaaatatgtcattcctgatctactacagtttgccgcggatgctttagtctattatgaacagattgatggtcatatttccaaaaaatttgcggagattgattttcaatccaagtccgaatttcaaacattttgttccacttataggaaaagaataagagacatcattaggttgatttcttgcgtcgaattagaccttacttatgattggttgaacaacagattaaacaattatttcagctctccatttggtcagcaggtcttaagttccacatttttggaccataaattagagccttatttaggtgccctctcccaatacatgattgttgaatgtttcatcaatggttgtataagatggaagatctggtatccaacaggagatgattatgacgaaaaactagattccatattacaaaaactggaaattttgtcaaaccagttaattgcattaaatttaagagaaccattgttattgaagaaacaaatccaaaattttgcactttttttgacaatgttaaaagataatgtgcttttcacacttttagaaaaaatcataacaagcgccacgatggactatccagaaattaatttggaagagagaggcgctgaatcagacgcagttagagatttgagatatgcttgtggtatcgagttgaataggatggctttattaatgcccgaatctctgaaaaaaatatacccagaccttgaaagtgtcattgccagaatcatgcccaacttatcttaccatgaaaaaatttccttcaaatccttcttattgatcattgtattgaagtcttcattagatatgaaagaggaaagatttgcggctattgtggatccagaacttttagcctggtctgataaaacaacagttgttggtctttctgatttgcattggtttatggaacgcttaggtattgttcagatcgcagaatatttccagaggcgtgatatcgacgaaaatagtgaccttttatcaattccaattgatgatgagggtaaagagctgaagtcggaattgaccaaacgttggcaaagcttgtttcctgttcgtgcaacaagaatgttcattcattattcaatgcaaagtataaagacagatgaagaattcaaaatgctacaagatctgtggagacctaggattgtcccaatattaccttacatcacgagactactgtaccaattgcaatcctaccacgatccagataattggaaaggattacctacggttgtgcaatccttcgtcaagtattccactattgaaagattttgggaggccggagcttcaaataaatcaaaggatgagtttattgatgaacatatgaaagcgatgcaaaccttacgagacttcgccgactccgtaggacacatcattaggtatacaagggaatacactctacttgttttaagtgccatatcatcacttggtagtgttttttaccttttggacgaatcgcccgacctactactgaactctattgccatatttaagccaggtagcaatgagataagccctggagtttcaacacatggatggaaacacataatgaatatagccattcgtcctatattaaaaggttgtccaaaagattgtctggggaaattcatgcccgcatttttgcctaaattatttgaaatcctggacctgctgctatgtcagaaatggtcctcgcatatgaatgatatggacatgaacccagttccaactgacgatgatcaaatgactgaagaaattttggaagagaatttgttgagacaactaaccacagttgttgttagaatagtaattgattgtgttggtcaaggcaatgccaatccaaacagtgctaaaagcaggctaaataaccatcaaatggagatgagaaaaattatatttaatgatttaaacacccttgctccatttttgaaacttttgaaccatttaatttccttcaaggatacaaaatgttcatttaactccatcctagtaatgaaatgctgcttaacctcagtccttaatcaaaacaacacggtggatgaatatttcacatttgaagtgatgaaaaatctgttgctaaatgtgctgtgtaatagtgcgtttaaggattctttccatgaggcactatatgctttcactgtgatttttttgactctgtgcaaagaatatccctctgctagagcgttcctttttgagatatctaatggttataatattgatgagttatacagaaatttaaggagcgtggacgaatacaaaacacaaagggcactcatgattgattttatagattgggttaaatccaccagtgggaaagaagatggtaatgtggaccatgcaggcgatgagagaaaaagacaagagaaaagggaagctatcctcaagaaggcaaatgagagattaattaagaagaataaagaaaacggagacatgctggatgatccgaacattgaagacggtgctgtgggtaatctctttgatgacaactga

SEQ ID NO: 2444 - DNA, 3675 bp, Artificial Sequence
  Description of Artificial Sequence: Synthetic polynucleotide
atggattccacaggcgcttctcagattgttagcgcattggatgttatttactcccccaagtctaacaattctcaaagacaagaagctcagaaatttttagatgaagtgaaattatgcagtgaaagtcccttttggggctacgaaattgcattgcaaaaccccactaattctatattgaaatactttggacttggattattagaccatgcagtgaagaaaaactggaatgattatgacgaggggaaaagagtggccttgagaaaatgggtcatggaacttaattttggggtgcaagattatgataccagatatattaaggaaaaattagccactttatgggtagaggtggcaaaaagaacatggggtgaggctcttaagcagacaaaccctacggaagaacagttactcacatcttgggtggacatggacaataaccttttcgaactttggaacataaatcaatcttctagagaattggcattaataattttcagaatcctttttgaagatgttttcttgttggacgacttgattgttttgaaaaggatgacggttattcaacccttatgtgtaatgattgtttgccctattgaagttttcgcaataaaatacaaattcagtgataaatggaccaaatttaaagctaatgaagagggctggttttctgtttggattccagagttgaataatgcattacaacagaataattctgaatacatcataaggcttttagaaactttgaagacgtgtttaaactggccattaacagaggtcattgtaagaaatgacgtgttatcctccttattgacttgtttatccagcaatatcccaagggcgcagtccatggcattagacagtatacatattttattgacccgtccctatagtaatgaaagccattaccaaatgaccatagatagagtttttgataatatggacttattagatagcgtttatgaaagcttgttgtttgatcctacagatgatatagatgaaacgaaatatcctataattaaaaagttcgtggatatgatcagttgtctctatgtttgtgtcccaaagattaaggagacaaatggccaaattcaaaaatattttaagcttgtattaaagacaacttataacccaagcttaatcgttagcggattaacattagacttatggtgtacctgtcttagaaacgatgaatacttacccaagttggagaaatatgtcattcctgatttattgcagtttgccgcggatgctttagtctattatgaacagattgatggtcatatttccaaaaaatttgcggagattgattttcaatccaagtccgaatttcaaacattttgttccacttataggaaaagaataagagacatcattaggttgatttcttgcgtcgaattagaccttacttatgattggttgaacaacagattaaacaattatttcagctctccatttggtcagcaggtcttaagttccacatttttggaccataaattagagccttatttaggtgccctctcccaatacatgattgttgaatgtttcatcaatggttgtataagatggaagatctggtatccaacaggagatgattatgacgaaaaattggattccatattacaaaaattagaaattttgtctaaccagttaattgcattaaatttaagagaaccattgttattgaagaaacaaatccaaaattttgcactttttttgacaatgttaaaagataatgtgcttttcacacttttagaaaaaatcataacaagcgccacgatggactatccagaaattaatttggaagagagaggcgctgaaagtgacgcagttagagatttgagatatgcttgtggtatcgagttgaataggatggctttattaatgcccgaatctttgaaaaaaatatacccagaccttgaaagtgtcattgccagaatcatgcccaacttatcttaccatgaaaaaatttccttcaaatccttcttattgatcattgtattgaagtcttctttagatatgaaagaggaaagatttgcggctattgtggatccagaacttttagcctggtctgataaaacaacagttgttggtctttctgatttgcattggtttatggaacgcttaggtattgttcagatcgcagaatatttccagaggcgtgatatcgacgaaaatagtgaccttttatccattccaattgatgatgagggtaaagagttgaagtctgaattgaccaaacgttggcaaagcttgtttcctgttcgtgcaacaagaatgttcattcattattccatgcaaagtataaagacagatgaagaattcaaaatgttacaagatttatggagacctaggattgtcccaatattaccttacatcacgagattattgtaccaattgcaatcctaccacgatccagataattggaaaggattacctacggttgtgcaatccttcgtcaagtattccactattgaaagattttgggaggccggagcttctaataaatccaaggatgagtttattgatgaacatatgaaagcgatgcaaaccttaagagacttcgccgactccgtaggacacatcattaggtatacaagggaatacactttacttgttttaagtgccatatcttctcttggtagtgttttttaccttttggacgaaagtcccgacttattattaaactctattgccatatttaagccaggtagcaatgagataagccctggagtttctacacatggatggaaacacataatgaatatagccattcgtcctatattaaaaggttgtccaaaagattgtttagggaaattcatgcccgcatttttgcctaaattatttgaaatcttggacttattattatgtcagaaatggtcctctcatatgaatgatatggacatgaacccagttccaactgacgatgatcaaatgactgaagaaattttggaagagaatttgttgagacaattgaccacagttgttgttagaatagtaattgattgtgttggtcaaggcaatgccaatccaaacagtgctaaaagcaggttgaataaccatcaaatggagatgagaaaaattatatttaatgatttaaacacccttgctccatttttgaaacttttgaaccatttaatttccttcaaggatacaaaatgttcctttaactccatccttgtaatgaaatgctgcttaacctctgtccttaatcaaaacaacacggtggatgaatatttcacatttgaagtgatgaaaaatttattgttgaatgtgttgtgtaatagtgcgtttaaggattctttccatgaggcattatatgctttcactgtgatttttttgactttgtgcaaagaatatccctctgctagagcgttcctttttgagatatctaatggttataatattgatgagttatacagaaatttaaggagcgtggacgaatacaaaacacaaagggcactcatgattgattttatagattgggttaaatccaccagtgggaaagaagatggtaatgtggaccatgcaggcgatgagagaaaaagacaagagaaaagggaagctatcctcaagaaggcaaatgagagattaattaagaagaataaagaaaacggagacatgcttgatgatccgaacattgaagacggtgctgtgggtaatctctttgatgacaactga

SEQ ID NO: 2445 - DNA, 945 bp, Saccharomyces cerevisiae
atggaacaactgtgtaagaggtacgtgcatacaccggcggcttttatacaaaacattgttgctaacactaaaagaacaacgctagccacgcaattatctgttgaaaaagctaaaaaaaaagttcccaagacagctcttaaaaagaaacttaatagtaggccaaaagaaaggcttccgaattggctaaaactaaacgatgtttttaacatacattacgaaaagccatctaactctgatataaataaggttaacagattcttcaacaaggctaaagtggaatttgaatggtgtgcagctagttttgatgacataccagaaaatcccttcctgaataagaaatctcataaggacatattgaaagatcatggggaatgtggaactacattgattgatactttgccagaagtcatctttctcggaggaactaatgtggggaagtcctctatcttgaacaacataaccacctcgcatgtaagcagagatttaggaagtttggcaagagtgtctaaaacaacaggattcacaaaaactctcaactgttataatgtgggaaatagactcagaatgatcgattcgcctggttatggctttaatagtagtaaagagcaaggaaaagtcactttgcagtacctcctggagaggaaacaacttgtcagatgctttctcttactcgctggagataaggagataaataacacagataatatgatcattcaatacattcatgaacacggagttccttttgaagttgtttttacgaaaatggacaaggttaaagatttaaataagtttaagaagaaggttatgagttcagggttaatggacttaccaactctacccagacttgtattgactaactcgcttacgtccagtacatctcctaaacggttcggtatagatcttctaagatatgtaatatttcaaagctgtggtttgattttatga

SEQ ID NO: 2446 - DNA, 945 bp, Artificial Sequence
  Description of Artificial Sequence: Synthetic polynucleotide
atggaacaattatgtaagaggtacgtgcatacaccggcggcttttatacaaaacattgttgctaacactaaaagaacaacgttggccacgcaattatctgttgaaaaagctaaaaaaaaagttcccaagacagctcttaaaaagaaacttaatagtaggccaaaagaaaggcttccgaattggttgaaattgaacgatgtttttaacatacattacgaaaagccatctaactctgatataaataaggttaacagattcttcaacaaggctaaagtggaatttgaatggtgtgcagctagttttgatgacataccagaaaatcccttcttgaataagaaatctcataaggacatattgaaagatcatggggaatgtggaactacattgattgatactttgccagaagtcatctttctcggaggaactaatgtggggaagtcctctatcttgaacaacataaccaccagtcatgtaagcagagatttaggaagtttggcaagagtgtctaaaacaacaggattcacaaaaactctcaactgttataatgtgggaaatagactcagaatgatcgattctcctggttatggctttaatagtagtaaagagcaaggaaaagtcactttgcagtacctcttggagaggaaacaacttgtcagatgctttctcttactcgctggagataaggagataaataacacagataatatgatcattcaatacattcatgaacacggagttccttttgaagttgtttttacgaaaatggacaaggttaaagatttaaataagtttaagaagaaggttatgagttccgggttaatggacttaccaactttacccagacttgtattgactaactctcttacgtccagtacatctcctaaaagattcggtatagatcttttgagatatgtaatatttcaaagctgtggtttgattttatga

SEQ ID NO: 2447 - DNA, 861 bp, Saccharomyces cerevisiae
atgtcgattgttggaaggaatgctattctgaatctaagaatttcactatgtcctctgtttatgggcaaaagatcgtttgtatcctctccggttagcaatagtgcaaaagctgtgaaattcttaaaggctcaaagacgaaaacagaaaaatgaagccaaacaagccactttgaaagcgtcaaccgataaggttgatccagttctgggccgggcggacactccctttataacacgtattatggcagagttaaaagagcctttagttctatcgaaaggttataatattgaagaggtagacaagttccttgcagccattgagtctgctaagcgtgaaagagctgagttgtcaggtttaaatacagaagttgtgggtattgaagacatagaaaaactggaagacagacgtgaagccatcttgagaatattgagcatgaggaactccgagaataaaaatgccattaaaatggctgtagaactcgcacgtaaggaatttgagaggttcccaggcgatactggctccagtgaagtccaagcagcttgcatgactgttcgtatccagaatatggcaaaccatattaaagagcatcgtaaggattttgctaacaccagaaatttgaggatattagtccagcaaaggcaggcaatattaagatatttgaaaagagataatcctgaaaaatactactggactattcaaaaactaggattgaatgatgcggccataacggatgaattcaatatggacaggcgttacatgcaagattatgaattttttggtgataaaatattgataagagattctaagaaagtggcaaatcaaaagcgtaaggagataagaaaacaaaaaagggctacattttag

SEQ ID NO: 2448 - DNA, 861 bp, Artificial Sequence
  Description of Artificial Sequence: Synthetic polynucleotide
atgtctattgttggaaggaatgctattttgaatttaagaatttctttatgtcctttatttatgggcaaaagatcttttgtatcctctccggttagcaatagtgcaaaagctgtgaaattcttaaaggctcaaagaagaaaacagaaaaatgaagccaaacaagccactttgaaagcgagtaccgataaggttgatccagttttaggcagggcggacactccctttataacacgtattatggcagagttaaaagagcctttagttttatccaaaggttataatattgaagaggtagacaagttccttgcagccattgagtctgctaagcgtgaaagagctgagttgtctggtttaaatacagaagttgtgggtattgaagacatagaaaaattagaagacagacgtgaagccatcttgagaatattgagcatgaggaactccgagaataaaaatgccattaaaatggctgtagaactcgcacgtaaggaatttgagaggttcccaggcgatactggctccagtgaagtccaagcagcttgcatgactgttcgtatccagaatatggcaaaccatattaaagagcatcgtaaggattttgctaacaccagaaatttgaggatattagtccagcaaaggcaggcaatattaagatatttgaaaagagataatcctgaaaaatactactggactattcaaaaattaggattgaatgatgcggccataacggatgaattcaatatggacaggcgttacatgcaagattatgaattttttggtgataaaatattgataagagattctaagaaagtggcaaatcaaaagcgtaaggagataagaaaacaaaaaagggctacattttga

SEQ ID NO: 2449 - DNA, 2088 bp, Saccharomyces cerevisiae
atggctggaattttgtcaaagactctttcagaagtgcatccttccctccgaacaaatggtatgggtatcggtaacactcacaggaggatatcgctaggcttcctacctcccaacaagaagaatcctctggtacgaaaatttcgtgcaagaacgagaaatattgatcagaggagtttcagatctttaacagatgattttggaagtaacgtccatgaaccaaatccgtacttaggtaatattgatgaggaacctgacctttactatcatgatgaagaagatggcgaactgagcagaacgatttctctaccatcaagggtatcagaaactcctgagctttcgccacaagatgttgattggattctacatgaacatgaacgacgatactcatcggtatgcaactctgataatgaggaagcaagtcaaagcaacacaccagatagaatacaagaatattctggaagagaactagaatatgacgaatttatgaatagactccaagctcagaaacagaaattaactcgaagtgcggtaacagacgctaaaggcacctcacatcacagaagaccatcattcgtatctgtgactagccgaggctcagttcccacaatttaccaagagatcgacgagaacgattctgaggcactagcagaattggctcacagccacgtcaccttcaaatcagaagcaagagttttggcatcttattccttccctctaattttcacattcttattggaacagattttccctatggtatgttcattaactgtgggccacttaggcaaaaatgaactagcagctgtgtccttagcatccatgacttctaatataacactagcgatattcgagggtattgccactagtctagatactctatgccctcaagcgtatggctctgggagattctacagtgtaggagttcaccttcaacgttgcattgctttttcattggtcatatatataccttttgctgtcatgtggtggtattctgaacctcttctttcttatatcatccctgagaaagaattaatcaacctaacgtcacgatttttaagagtactaatattgggagcgccagcgtatattttttttgaaaatttaaaacgatttttacaagcccaaggtattttcgatgcaggcatctacgttttgacaatatgtgctcccttaaacgtattagtcagttacactctcgtttggaacaagtacattggtgttggatttattggggctgcaattgccgttgtgcttaacttctggctaatgtttttcttactattgttttatgcattgtatattgatggaagaaaatgctggggtggattctcaaggaaggctttcacccattggaatgatttagggcatttagccttctcaggtattattatgttggaggcggaagagctgtcatatgaactattgacgttatttagtgcatattacggtgtcagttatctagcagctcagtcggcagtatctactatggctgcattgctctatatgatcccatttgcaataggtatatctacctctacgagaattgcgaacttcattggtgcaaaaagaaccgatttcgcgcacatctcttctcaagttgggttgtcattttcgtttattgcggggttcatcaattgctgcatactagtatttggacgtaatctaatcgccaacatttactcaaaagatcccgaagtcatcaaattaattgcgcaagtattgcccttggtgggtattgtgcaaaatttcgactcgcttaatgccgttgctgggtcttgcctcaggggtcaaggcatgcaatctctaggaagtatagtaaatttaatggcttactatctatttggaattcccctggctctcatcctaagttggttctttgacatgaaattgtatggtctttggattggtattggaagtgccatgcttttaattgggctagttgaggcttattacgtattatttcccgattgggacaaaattatgacctatgctgagattttgaaagaaaccgaagatgatgaagtagatagcgatgagtatttaacagactcagacgatcctgatgaaaacacagccctcttaggggcttaa

SEQ ID NO: 2450 - DNA, 2088 bp, Artificial Sequence
  Description of Artificial Sequence: Synthetic polynucleotide
atggctggaattttgtccaagactctttctgaagtgcatccttccctcaggacaaatggtatgggtatcggtaacactcacaggaggatatctttaggcttcttacctcccaacaagaagaatcctttggtaagaaaatttcgtgcaagaacgagaaatattgatcagaggagtttcagatctttaacagatgattttggaagtaacgtccatgaaccaaatccgtacttaggtaatattgatgaggaacctgacctttactatcatgatgaagaagatggcgaattgagcagaacgatttctttaccatctagggtatctgaaactcctgagctttctccacaagatgttgattggattttgcatgaacatgaaagaagatactcttctgtatgcaactctgataatgaggaagcaagtcaaagcaacacaccagatagaatacaagaatattctggaagagaattggaatatgacgaatttatgaatagactccaagctcagaaacagaaattaactagaagtgcggtaacagacgctaaaggcaccagtcatcacagaagaccatctttcgtatctgtgactagcagaggctctgttcccacaatttaccaagagatcgacgagaacgattctgaggcattggcagaattggctcacagccacgtcaccttcaaaagtgaagcaagagttttggcatcttattccttccctttgattttcacattcttattggaacagattttccctatggtatgttctttaactgtgggccacttaggcaaaaatgaattggcagctgtgtccttagcatccatgacttctaatataacattagcgatattcgagggtattgccactagtttggatactttgtgccctcaagcgtatggctctgggagattctacagtgtaggagttcaccttcaacgttgcattgctttttctttggtcatatatataccttttgctgtcatgtggtggtattctgaacctcttctttcttatatcatccctgagaaagaattaatcaacttgacgtctagatttttaagagtattaatattgggagcgccagcgtatattttttttgaaaatttaaaaagatttttacaagcccaaggtattttcgatgcaggcatctacgttttgacaatatgtgctcccttaaacgtattagtcagttacactctcgtttggaacaagtacattggtgttggatttattggggctgcaattgccgttgtgcttaacttctggttaatgtttttcttattattgttttatgcattgtatattgatggaagaaaatgctggggtggattctctaggaaggctttcacccattggaatgatttagggcatttagccttctctggtattattatgttggaggcggaagagttatcttatgaattattgacgttatttagtgcatattacggtgtcagttatttggcagctcagtctgcagtatctactatggctgcattgctctatatgatcccatttgcaataggtatatctacctctacgagaattgcgaacttcattggtgcaaaaagaaccgatttcgcgcacatctcttctcaagttgggttgagtttttcttttattgcggggttcatcaattgctgcatattagtatttggacgtaatttgatcgccaacatttactctaaagatcccgaagtcatcaaattaattgcgcaagtattgcccttggtgggtattgtgcaaaatttcgactctcttaatgccgttgctgggtcttgcctcaggggtcaaggcatgcaatctttgggaagtatagtaaatttaatggcttactatttatttggaattcccttggctctcatcttaagttggttctttgacatgaaattgtatggtctttggattggtattggaagtgccatgcttttaattgggttggttgaggcttattacgtattatttcccgattgggacaaaattatgacctatgctgagattttgaaagaaaccgaagatgatgaagtagatagcgatgagtatttaacagacagtgacgatcctgatgaaaacacagccctcttaggggcttga

SEQ ID NO: 2451 - DNA, 570 bp, Saccharomyces cerevisiae
atgggtaaagctaagaaaacaagaaagtttggcctcgtaaaaagaactttgaacaccaagaaagaccaaagattgaagaaaaaccaggaaaatatcaaaactaaagaagaccctgagctaaccaggaatataccacaagtatcaagtgcacttttctttcaatacaatcaagctataaagccaccttatcaagtactgatagataccaattttataaatttttctatccagaaaaaagtcgatattgttagaggaatgatggactgtctactcgcaaaatgtaacccgttaatcacagattgtgtgatggcagagttagaaaaattgggccccaagtaccgtatcgccttgaaactggctcgagatcctagaataaagagactaagctgttcgcacaagggtacgtacgcggatgactgtttagtgcatcgagtcttacaacataagtgttacatcgtagctacaaacgatgccggcctgaaacaaagaattagaaaaatccctggaattcctttgatgagcgtaggcggtcacgcatacgtcattgaaaaattgccagatgtcttttaa

SEQ ID NO: 2452 - DNA, 570 bp, Artificial Sequence
  Description of Artificial Sequence: Synthetic polynucleotide
atgggtaaagctaagaaaacaagaaagtttggcctcgtaaaaagaactttgaacaccaagaaagaccaaagattgaagaaaaaccaggaaaatatcaaaactaaagaagaccctgagttgaccaggaatataccacaagtatctagtgcacttttctttcaatacaatcaagctataaagccaccttatcaagtattaatagataccaattttataaatttttctatccagaaaaaagtcgatattgttagaggaatgatggactgtttactcgcaaaatgtaacccgttaatcacagattgtgtgatggcagagttagaaaaattgggccccaagtaccgtatcgccttgaaattggctagagatcctagaataaagagattgagctgttctcacaagggtacgtacgcggatgactgtttagtgcatagagtcttacaacataagtgttacatcgtagctacaaacgatgccggcttgaaacaaagaattagaaaaatccctggaattcctttgatgagcgtaggcggtcacgcatacgtcattgaaaaattgccagatgtcttttga

SEQ ID NO: 2453 - DNA, 1824 bp, Saccharomyces cerevisiae
atggctagcacagcaaatatgatttctcaactaaagaaactatctatcgcggaacctgcggttgccaaggattctcatcctgatgtaaatatcgtggatttgatgagaaattacatttcacaagaattaagcaagatttccggcgtagactcgtctcttatttttccagcattagaatggacaaatactatggagagaggcgatttgttgattcctatcccaagattgagaatcaaaggtgccaatccaaaggatttggcagtccaatgggctgaaaaatttccatgtggagatttcttggagaaagttgaagcgaatggcccgttcatccagtttttcttcaaccctcaatttttagcaaaacttgtcatcccagatatcttaaccagaaaggaggattatggttcttgcaaattggttgaaaacaagaaagttattattgaattctcctctcccaacattgccaagccatttcatgctggtcatttaagatccactattattggtggctttttggccaacctttatgaaaaattaggttgggaggttatcagaatgaactacctgggtgactggggtaaacaatttggtcttttagctgttggttttgaaagatacggtaatgaagaggctttagttaaggatccaattcaccacctgttcgatgtttacgttcgtatcaacaaggatattgaggaagaaggtgacagtattccattagaacaatccaccaatggaaaagctcgtgaatatttcaagagaatggaagatggtgacgaggaagctttaaaaatttggaagagattccgtgaattttctattgaaaaatatattgacacatatgcacgtttgaacatcaaatatgatgtttactctggtgaatctcaagtttctaaagaatccatgctcaaagctatcgacctgttcaaggaaaagggcttaacacatgaggataagggtgcagttttgatcgatttgacaaaatttaacaaaaagttaggaaaggctattgttcaaaaatcggacggtactacgttatatctaactagagacgttggtgcagctatggaccgttatgaaaagtatcattttgacaagatgatttacgttatcgcttctcaacaagatttgcacgctgcccaattcttcgaaattttgaagcagatgggctttgagtgggctaaagatctacagcatgtcaactttggtatggtccaaggtatgtcaacaagaaaaggtactgttgtcttcttagataatatcttggaggaaactaaggaaaaaatgcacgaagttatgaaaaagaatgagaacaaatacgcgcaaattgagcatccagaagaagttgccgatttagttggtatctctgccgtcatgattcaagatatgcaaggtaagcgtatcaacaactacgagtttaaatgggaaagaatgctttcattcgaaggtgacactggtccataccttcaatatgctcactcaaggttaagatcagttgaaagaaatgcttctggtatcacccaagaaaaatggataaatgccgatttttcgttattaaaagaacctgccgcaaaactgttgattagactgctaggccaataccccgatgttttgagaaatgcaatcaaaacccacgagccaacaaccgtggtcacatatttattcaaattgactcaccaggtttcttcttgttatgacgtcttatgggttgctggtcaaactgaagaattagcaactgcccgtctggctctatatggtgctgcaagacaagttttatacaacggtatgcgcttgttaggtttaactcccgtagaaagaatgtaa

SEQ ID NO: 2454 - DNA, 1824 bp, Artificial Sequence
  Description of Artificial Sequence: Synthetic polynucleotide
atggctagcacagcaaatatgatttctcaattgaagaaattatctatcgcggaacctgcggttgccaaggattctcatcctgatgtaaatatcgtggatttgatgagaaattacatttctcaagaattaagcaagatttccggcgtagactcttctcttatttttccagcattagaatggacaaatactatggagagaggcgatttgttgattcctatcccaagattgagaatcaaaggtgccaatccaaaggatttggcagtccaatgggctgaaaaatttccatgtggagatttcttggagaaagttgaagcgaatggcccgttcatccagtttttcttcaaccctcaatttttagcaaaacttgtcatcccagatatcttaaccagaaaggaggattatggttcttgcaaattggttgaaaacaagaaagttattattgaattctcctctcccaacattgccaagccatttcatgctggtcatttaagatccactattattggtggctttttggccaacctttatgaaaaattaggttgggaggttatcagaatgaactacttgggtgactggggtaaacaatttggtcttttagctgttggttttgaaagatacggtaatgaagaggctttagttaaggatccaattcaccaccttttcgatgtttacgttcgtatcaacaaggatattgaggaagaaggtgacagtattccattagaacaatccaccaatggaaaagctcgtgaatatttcaagagaatggaagatggtgacgaggaagctttaaaaatttggaagagattccgtgaattttctattgaaaaatatattgacacatatgcacgtttgaacatcaaatatgatgtttactctggtgaatctcaagtttctaaagaatccatgctcaaagctatcgaccttttcaaggaaaagggcttaacacatgaggataagggtgcagttttgatcgatttgacaaaatttaacaaaaagttaggaaaggctattgttcaaaaaagtgacggtactacgttatatttgactagagacgttggtgcagctatggaccgttatgaaaagtatcattttgacaagatgatttacgttatcgcttctcaacaagatttgcacgctgcccaattcttcgaaattttgaagcagatgggctttgagtgggctaaagatttacagcatgtcaactttggtatggtccaaggtatgtctacaagaaaaggtactgttgtcttcttagataatatcttggaggaaactaaggaaaaaatgcacgaagttatgaaaaagaatgagaacaaatacgcgcaaattgagcatccagaagaagttgccgatttagttggtatctctgccgtcatgattcaagatatgcaaggtaagcgtatcaacaactacgagtttaaatgggaaagaatgctttctttcgaaggtgacactggtccataccttcaatatgctcactctaggttaagatctgttgaaagaaatgcttctggtatcacccaagaaaaatggataaatgccgatttttctttattaaaagaacctgccgcaaaacttttgattagattattaggccaataccccgatgttttgagaaatgcaatcaaaacccacgagccaacaaccgtggtcacatatttattcaaattgactcaccaggtttcttcttgttatgacgtcttatgggttgctggtcaaactgaagaattagcaactgcccgtttggctttgtatggtgctgcaagacaagttttatacaacggtatgcgcttgttaggtttaactcccgtagaaagaatgtga

SEQ ID NO: 2455 - DNA, 1713 bp, Saccharomyces cerevisiae
atgtcacaagacgctgctattgcagagcaaactcctgtggagcatctctctgctgttgactcagcctcccactcggttttatctacaccatcaaacaaggctgaaagagatgaaataaaagcttatggtgaaggtgaagagcacgaacctgtcgttgaaattccaaagagaccagcttctgcctatgtcactgtctctattatgtgtatcatgatcgcctttggtggtttcgttttcggttgggatactggtaccatttctggtttcatcaatcaaaccgatttcatcagaagatttggtatgaagcataaagatggtactaattatttgtctaaggttagaactggtttgattgtctccattttcaacattggttgtgccattggtggtattattctttccaaattgggtgatatgtacggtcgtaaggtgggtttgattgtcgttgttgtcatctacatcatcggtattattattcaaattgcatctatcaacaaatggtaccaatatttcatcggtagaattatttccggtttgggtgttggtggtattgccgttttatctcctatgttgatttctgaagtatccccaaagcatttaaggggtactttagtctcttgctaccaattgatgattactgccggtattttcttgggttactgtaccaacttcggtactaagaactactccaactctgtgcaatggagagttccattaggtttgtgttttgcctgggctttgtttatgattggtggtatgacatttgttccagagtctccacgttatttggctgaagtcggtaagatcgaagaagccaaacgttctattgccgtttctaacaaggttgctgttgatgatccatctgttttggctgaagtcgaagctgtcttggctggtgtagaggcagagaaattagctggtaatgcatcctggggtgaattgtttagtagcaagacaaaggtccttcagcgtttgatcatgggtgctatgattcaatctctacaacaattgacaggtgataactatttcttctactatggtactactattttcaaggctgttggtttgagtgactctttcgaaacctctattgtcttgggtattgttaactttgcttccacctttgttggtatttacgttgttgagagatatggtcgtcgtacttgtttgctatggggtgctgcatccatgactgcttgtatggttgtctatgcttccgtgggtgtcaccagattatggccaaatggtcaagaccaaccatcttccaagggtgctggtaactgtatgattgtctttgcctgtttctatattttctgttttgctactacatgggctccaattccttatgtcgttgtttctgaaactttcccattgagagtcaagtctaaggctatgtctattgctacagctgctaattggttgtggggtttcttgattggtttcttcactccatttattactggtgctattaacttctactacggttacgttttcatgggctgtttggtcttcatgttcttctatgttttgttagttgttccagaaactaagggtttgactttggaagaagtcaacaccatgtgggaagaaggtgttctaccatggaagtctgcctcatgggttccaccatccagaagaggtgccaactacgacgctgaagaaatgactcacgatgacaagccattgtacaagagaatgttcagcaccaaataa

SEQ ID NO: 2456 - DNA, 1713 bp, Artificial Sequence
  Description of Artificial Sequence: Synthetic polynucleotide
atgtctcaagacgctgctattgcagagcaaactcctgtggagcatctctctgctgttgactctgcctcccactctgttttatctacaccatctaacaaggctgaaagagatgaaataaaagcttatggtgaaggtgaagagcacgaacctgtcgttgaaattccaaagagaccagcttctgcctatgtcactgtctctattatgtgtatcatgatcgcctttggtggtttcgttttcggttgggatactggtaccatttctggtttcatcaatcaaaccgatttcatcagaagatttggtatgaagcataaagatggtactaattatttgtctaaggttagaactggtttgattgtctccattttcaacattggttgtgccattggtggtattattctttccaaattgggtgatatgtacggtcgtaaggtgggtttgattgtcgttgttgtcatctacatcatcggtattattattcaaattgcatctatcaacaaatggtaccaatatttcatcggtagaattatttccggtttgggtgttggtggtattgccgttttatctcctatgttgatttctgaagtatccccaaagcatttaaggggtactttagtctcttgctaccaattgatgattactgccggtattttcttgggttactgtaccaacttcggtactaagaactactccaactctgtgcaatggagagttccattaggtttgtgttttgcctgggctttgtttatgattggtggtatgacatttgttccagagtctccacgttatttggctgaagtcggtaagatcgaagaagccaaacgttctattgccgtttctaacaaggttgctgttgatgatccatctgttttggctgaagtcgaagctgtcttggctggtgtagaggcagagaaattagctggtaatgcatcctggggtgaattgtttagtagcaagacaaaggtccttcagcgtttgatcatgggtgctatgattcaatctttacaacaattgacaggtgataactatttcttctactatggtactactattttcaaggctgttggtttgagtgactctttcgaaacctctattgtcttgggtattgttaactttgcttccacctttgttggtatttacgttgttgagagatatggtcgtcgtacttgtttgttatggggtgctgcatccatgactgcttgtatggttgtctatgcttccgtgggtgtcaccagattatggccaaatggtcaagaccaaccatcttccaagggtgctggtaactgtatgattgtctttgcctgtttctatattttctgttttgctactacatgggctccaattccttatgtcgttgtttctgaaactttcccattgagagtcaagtctaaggctatgtctattgctacagctgctaattggttgtggggtttcttgattggtttcttcactccatttattactggtgctattaacttctactacggttacgttttcatgggctgtttggtcttcatgttcttctatgttttgttagttgttccagaaactaagggtttgactttggaagaagtcaacaccatgtgggaagaaggtgttttgccatggaagtctgccagttgggttccaccatccagaagaggtgccaactacgacgctgaagaaatgactcacgatgacaagccattgtacaagagaatgttcagcaccaaatga

SEQ ID NO: 2457 - DNA, 1713 bp, Saccharomyces cerevisiae
atgtcacaagacgctgctattgcagagcaaactcctgtggagcatctctctgctgttgactcagcctcccactcggttttatctacaccatcaaacaaggctgaaagagatgaaataaaagcttatggtgaaggtgaagagcacgaacctgtcgttgaaattccaaagagaccagcttctgcctatgtcactgtctctattatgtgtatcatgatcgcctttggtggtttcgttttcggttgggatactggtaccatttctggtttcatcaatcaaaccgatttcatcagaagatttggtatgaagcataaagatggtactaattatttgtctaaggttagaactggtttgattgtctccattttcaacattggttgtgccattggtggtattattctttccaaattgggtgatatgtacggtcgtaaggtgggtttgattgtcgttgttgtcatctacatcatcggtattattattcaaattgcatctatcaacaaatggtaccaatatttcatcggtagaattatttccggtttgggtgttggtggtattgccgttttatctcctatgttgatttctgaagtatccccaaagcatttaaggggtactttagtctcttgctaccaattgatgattactgccggtattttcttgggttactgtaccaacttcggtactaagaactactccaactctgtgcaatggagagttccattaggtttgtgttttgcctgggctttgtttatgattggtggtatgacatttgttccagagtctccacgttatttggctgaagtcggtaagatcgaagaagccaaacgttctattgccgtttctaacaaggttgctgttgatgatccatctgttttggctgaagtcgaagctgtcttggctggtgtagaggcagagaaattagctggtaatgcatcctggggtgaattgtttagtagcaagacaaaggtccttcagcgtttgatcatgggtgctatgattcaatctctacaacaattgacaggtgataactatttcttctactatggtactactattttcaaggctgttggtttgagtgactctttcgaaacctctattgtcttgggtattgttaactttgcttccacctttgttggtatttacgttgttgagagatatggtcgtcgtacttgtttgctatggggtgctgcatccatgactgcttgtatggttgtctatgcttccgtgggtgtcaccagattatggccaaatggtcaagaccaaccatcttccaagggtgctggtaactgtatgattgtctttgcctgtttctatattttctgttttgctactacatgggctccaattccttatgtcgttgtttctgaaactttcccattgagagtcaagtctaaggctatgtctattgctacagctgctaattggttgtggggtttcttgattggtttcttcactccatttattactggtgctattaacttctactacggttacgttttcatgggctgtttggtcttcatgttcttctatgttttgttagttgttccagaaactaagggtttgactttggaagaagtcaacaccatgtgggaagaaggtgttctaccatggaagtctgcctcatgggttccaccatctagaagaggtgccaactacgacgctgaagaaatggctcacgatgataagccattgtacaagagaatgttcagcaccaaataa

SEQ ID NO: 2458 - DNA, 1713 bp, Artificial Sequence
  Description of Artificial Sequence: Synthetic polynucleotide
atgtctcaagacgctgctattgcagagcaaactcctgtggagcatctctctgctgttgactctgcctcccactctgttttatctacaccatctaacaaggctgaaagagatgaaataaaagcttatggtgaaggtgaagagcacgaacctgtcgttgaaattccaaagagaccagcttctgcctatgtcactgtctctattatgtgtatcatgatcgcctttggtggtttcgttttcggttgggatactggtaccatttctggtttcatcaatcaaaccgatttcatcagaagatttggtatgaagcataaagatggtactaattatttgtctaaggttagaactggtttgattgtctccattttcaacattggttgtgccattggtggtattattctttccaaattgggtgatatgtacggtcgtaaggtgggtttgattgtcgttgttgtcatctacatcatcggtattattattcaaattgcatctatcaacaaatggtaccaatatttcatcggtagaattatttccggtttgggtgttggtggtattgccgttttatctcctatgttgatttctgaagtatccccaaagcatttaaggggtactttagtctcttgctaccaattgatgattactgccggtattttcttgggttactgtaccaacttcggtactaagaactactccaactctgtgcaatggagagttccattaggtttgtgttttgcctgggctttgtttatgattggtggtatgacatttgttccagagtctccacgttatttggctgaagtcggtaagatcgaagaagccaaacgttctattgccgtttctaacaaggttgctgttgatgatccatctgttttggctgaagtcgaagctgtcttggctggtgtagaggcagagaaattagctggtaatgcatcctggggtgaattgtttagtagcaagacaaaggtccttcagcgtttgatcatgggtgctatgattcaatctttacaacaattgacaggtgataactatttcttctactatggtactactattttcaaggctgttggtttgagtgactctttcgaaacctctattgtcttgggtattgttaactttgcttccacctttgttggtatttacgttgttgagagatatggtcgtcgtacttgtttgttatggggtgctgcatccatgactgcttgtatggttgtctatgcttccgtgggtgtcaccagattatggccaaatggtcaagaccaaccatcttccaagggtgctggtaactgtatgattgtctttgcctgtttctatattttctgttttgctactacatgggctccaattccttatgtcgttgtttctgaaactttcccattgagagtcaagtctaaggctatgtctattgctacagctgctaattggttgtggggtttcttgattggtttcttcactccatttattactggtgctattaacttctactacggttacgttttcatgggctgtttggtcttcatgttcttctatgttttgttagttgttccagaaactaagggtttgactttggaagaagtcaacaccatgtgggaagaaggtgttttgccatggaagtctgccagttgggttccaccatctagaagaggtgccaactacgacgctgaagaaatggctcacgatgataagccattgtacaagagaatgttcagcaccaaatga

SEQ ID NO: 2459 - DNA, 444 bp, Saccharomyces cerevisiae
atggcctttctgtcctggacattttttccttccttttttcatttccttgaaaggaacagattttttttgacttttgccacacagctgcactatctcaaccccttttacattttaagttttcgggttgaatggcatcaaatttgggaaaatttagcttactcagacaccaacacattttttcatgagtattgttggaaaatctttccatgcttatcagccggaatacggaacaacggctgctgtgatgccgcaaaggggcaaggaaaaaataagcaacacacaccgaaacaggaggaagaaattccgaacacaagcctaagaagacaccgcagttgttgcaacatgttcacatgttcatccccctgctactacttggaaattaatgtaggggtaattggagtgcgccggcccgtgctttcagaggaacaaaggaagaattgttaa

SEQ ID NO: 2460 - DNA, 444 bp, Artificial Sequence
  Description of Artificial Sequence: Synthetic polynucleotide
atggcctttctttcctggacattttttccttccttttttcatttccttgaaaggaacagattttttttgacttttgccacacagttgcactatctcaaccccttttacattttaagttttagagttgaatggcatcaaatttgggaaaatttagcttacagtgacaccaacacattttttcatgagtattgttggaaaatctttccatgcttatctgccggaataagaaacaacggctgctgtgatgccgcaaaggggcaaggaaaaaataagcaacacacaccgaaacaggaggaagaaattccgaacacaagcttaagaagacaccgcagttgttgcaacatgttcacatgttcttccccctgctactacttggaaattaatgtaggggtaattggagtgcgccgtcccgtgctttctgaggaacaaaggaagaattgttga

SEQ ID NO: 2461 - DNA, 1704 bp, Saccharomyces cerevisiae
atgaattcaactccagatttaatatctccacaaaagtcaagtgagaattcgaatgctgacctgccttcgaatagctctcaggtaatgaacatgcctgaagaaaaaggtgttcaagatgatttccaagctgaggccgaccaagtacttaccaacccaaatacaggtaaaggtgcatatgtcactgtgtctatctgttgtgttatggttgccttcggtggtttcgttttcggttgggatactggtaccatttctggtttcgtcgcccaaactgatttcttgagaagattcggtatgaagcataaagatggtagttattatttgtctaaggttagaactggtttaattgtctccattttcaacattggttgtgccattggtggtattattttggctaaattgggtgatatgtacggtcgtaaaatgggtttgattgtcgttgttgttatctacatcatcggtattattattcaaattgcatccatcaacaaatggtaccaatatttcatcggtagaattatttccggtttgggtgttggtggtattgccgttttatctcctatgttgatttctgaagtcgctcctaaggaaatgagaggtactttagtctcctgttaccaactgatgattaccttgggtattttcttgggttactgtaccaacttcggtactaagaactactccaactctgtgcaatggagagttccattaggtttgtgttttgcctgggctttgtttatgatcggtggtatgactttcgttccagaatccccacgttatttggttgaagctggtcaaattgacgaagcaagagcatctctttccaaagttaacaaggttgccccagaccatccattcattcaacaagagttggaagttattgaagctagtgttgaagaagctagagctgctggttcagcatcatggggtgagttgttcactggtaagccggccatgtttaagcgtactatgatgggtatcatgatccaatctctacaacaattgactggtgataactatttcttctactatggtactaccgtttttaacgctgttggtatgagtgattctttcgaaacttctattgttttcggtgtcgtcaacttcttctctacttgttgttctttgtacactgtcgatcgttttggacgtcgtaactgtttgttatatggtgccattggtatggtctgctgttatgtagtttacgcttctgttggtgtcaccagactatggccaaatggtgaaggtaatggttcatccaagggtgctggtaactgtatgattgtctttgcctgtttctatattttctgttttgctaccacttgggctccaattgcttatgttgttatttctgaaactttcccattgagagtcaagtctaaggctatgtctattgctacagctgctaattggttgtggggtttcttgattggtttcttcactccatttattactggtgctattaacttctactacggttacgttttcatgggctgtatggttttcgcctacttctacgttttcttctttgtgccagaaactaagggtttgactttggaagaagtcaatgatatgtacgctgaaggtgttctaccatggaagtctgcttcatgggttccaacatctcaaagaggtgctaactacgatgctgatgcattgatgcatgatgaccagccattctacaagaaaatgttcggcaagaaataa

SEQ ID NO: 2462 - DNA, 1704 bp, Artificial Sequence
  Description of Artificial Sequence: Synthetic polynucleotide
atgaattctactccagatttaatatctccacaaaagagtagtgagaatagtaatgctgacttgccttccaatagctctcaggtaatgaacatgcctgaagaaaaaggtgttcaagatgatttccaagctgaggccgaccaagtacttaccaacccaaatacaggtaaaggtgcatatgtcactgtgtctatctgttgtgttatggttgccttcggtggtttcgttttcggttgggatactggtaccatttctggtttcgtcgcccaaactgatttcttgagaagattcggtatgaagcataaagatggtagttattatttgtctaaggttagaactggtttaattgtctccattttcaacattggttgtgccattggtggtattattttggctaaattgggtgatatgtacggtcgtaaaatgggtttgattgtcgttgttgttatctacatcatcggtattattattcaaattgcatccatcaacaaatggtaccaatatttcatcggtagaattatttccggtttgggtgttggtggtattgccgttttatctcctatgttgatttctgaagtcgctcctaaggaaatgagaggtactttagtctcctgttaccaattgatgattaccttgggtattttcttgggttactgtaccaacttcggtactaagaactactccaactctgtgcaatggagagttccattaggtttgtgttttgcctgggctttgtttatgatcggtggtatgactttcgttccagaatccccacgttatttggttgaagctggtcaaattgacgaagcaagagcatctctttccaaagttaacaaggttgccccagaccatccattcattcaacaagagttggaagttattgaagctagtgttgaagaagctagagctgctggttctgcatcttggggtgagttgttcactggtaagccggccatgtttaagcgtactatgatgggtatcatgatccaatctttacaacaattgactggtgataactatttcttctactatggtactaccgtttttaacgctgttggtatgagtgattctttcgaaacttctattgttttcggtgtcgtcaacttcttctctacttgttgttctttgtacactgtcgatcgttttggacgtcgtaactgtttgttatatggtgccattggtatggtctgctgttatgtagtttacgcttctgttggtgtcaccagattatggccaaatggtgaaggtaatggttcttccaagggtgctggtaactgtatgattgtctttgcctgtttctatattttctgttttgctaccacttgggctccaattgcttatgttgttatttctgaaactttcccattgagagtcaagtctaaggctatgtctattgctacagctgctaattggttgtggggtttcttgattggtttcttcactccatttattactggtgctattaacttctactacggttacgttttcatgggctgtatggttttcgcctacttctacgttttcttctttgtgccagaaactaagggtttgactttggaagaagtcaatgatatgtacgctgaaggtgttttgccatggaagtctgcttcttgggttccaacatctcaaagaggtgctaactacgatgctgatgcattgatgcatgatgaccagccattctacaagaaaatgttcggcaagaaatga

SEQ ID NO: 2463 - DNA, 1446 bp, Saccharomyces cerevisiae
atgttgaagtggataaaaggtgggatctcagcagtcactggtatggctgagcctgaatatgggaaagattacattcatagtgttgctgatagggtaaaaaataagcagccttacagagaaaccagtcgtgaagattttttttggcaagctcctgaccatacaaacgttgaatcggttatcttttatttcagtgacttgaaaacaggtatctttggatttgcccaggttattcattcgaacatcattgggttgcacactgcatcccaatttactttcagaatttttgactcgaagaatccagaggatttgaatatctggacttccaccaagttggaaaatttttacatcgaaggtccaaacttctatgccgacaatctttctgtagaattaagtgaagacggtgaaagctatcacattcaatccagtgtttgtgatttatctgtcgttgacttgcatataagaaggttaacccctggagccaagataggcgatgatcctgcgacttattatggtaacaatatcaatgaaccatggggtagcatgagacacgttttctggccaaggaatgcttgtcacggtactatcaaagttaagaaagaagttattccagaatctgatgaagaagaatcctcagctgatgaggatgataatgaagacgaagatgaagagtctggtgattctgaggaggaatctggtagtgaagaagaaagcgacagtgaagaagtcgaaatcacctatgaagatcgtacgattacttttaaagaggaagaccctgcgatttcgacatttataatggccttccaaggcatgaagcctcatcacgcagctaaggcatggaacttcatgtttttccattccgaaaagtattccgcggtgttgatggagttcactacaccaaaatcatatgccaacactaaaatttctgctggtattattaccgatgataaagaagttttagcgatgacaactaacaatcttgttgagcacttaaactcagaaattgattctgttggttggaaagttccaaaagatattaagatcaccttcaaaggtatcaataccaaagtcaaggatgaacaattggaatccgagaatgggactgaacaagctttacaaggagaggatgaaaaggaagatgaaaaggaagatgaagaggaagaagaatacaagaacgtcgcagaagaaaataagatctgtgctgttgtggagggtccgttgaacaacctagttgaaagaattgatgtgatgggcgaaattccaagttttgttaaaaacatcgtctctggtgttgctggtactaagccatttatataccaatatgctgatccaaaaagctcaactttacaaataaatggcggggagaaaattcacggtgtagcttggaccgaagtaacattcatttctgaatcagatgtgattagtgaggagtcttacaatgaagcatga

SEQ ID NO: 2464 - DNA, 1446 bp, Artificial Sequence
  Description of Artificial Sequence: Synthetic polynucleotide
atgttgaagtggataaaaggtgggatctctgcagtcactggtatggctgagcctgaatatgggaaagattacattcatagtgttgctgatagggtaaaaaataagcagccttacagagaaaccagtcgtgaagattttttttggcaagctcctgaccatacaaacgttgaatctgttatcttttatttcagtgacttgaaaacaggtatctttggatttgcccaggttattcattccaacatcattgggttgcacactgcatcccaatttactttcagaatttttgactccaagaatccagaggatttgaatatctggacttccaccaagttggaaaatttttacatcgaaggtccaaacttctatgccgacaatctttctgtagaattaagtgaagacggtgaaagctatcacattcaatccagtgtttgtgatttatctgtcgttgacttgcatataagaaggttaacccctggagccaagataggcgatgatcctgcgacttattatggtaacaatatcaatgaaccatggggtagcatgagacacgttttctggccaaggaatgcttgtcacggtactatcaaagttaagaaagaagttattccagaatctgatgaagaagaatcctctgctgatgaggatgataatgaagacgaagatgaagagtctggtgattctgaggaggaatctggtagtgaagaagaaagcgacagtgaagaagtcgaaatcacctatgaagatcgtacgattacttttaaagaggaagaccctgcgatttctacatttataatggccttccaaggcatgaagcctcatcacgcagctaaggcatggaacttcatgtttttccattccgaaaagtattccgcggtgttgatggagttcactacaccaaaaagttatgccaacactaaaatttctgctggtattattaccgatgataaagaagttttagcgatgacaactaacaatcttgttgagcacttaaactctgaaattgattctgttggttggaaagttccaaaagatattaagatcaccttcaaaggtatcaataccaaagtcaaggatgaacaattggaatccgagaatgggactgaacaagctttacaaggagaggatgaaaaggaagatgaaaaggaagatgaagaggaagaagaatacaagaacgtcgcagaagaaaataagatctgtgctgttgtggagggtccgttgaacaacttggttgaaagaattgatgtgatgggcgaaattccaagttttgttaaaaacatcgtctctggtgttgctggtactaagccatttatataccaatatgctgatccaaaaagctctactttacaaataaatggcggggagaaaattcacggtgtagcttggaccgaagtaacattcatttctgaaagtgatgtgattagtgaggagtcttacaatgaagcatga

SEQ ID NO: 2465 - DNA, 966 bp, Saccharomyces cerevisiae
atgcttcgctttactggtgctcgcgctattagaaagtactctactaggtatgcactcgagcacctgaaagaaggtgctcctctgaaagggctgttttctattgaaggattacagaaagcatggttcgaccgagtgaaatatctcgatgcaaaattgaacgattgtacaaatgaagcgcaacaaaaacccttagaaactctcatccatgaaaattcgaaatctgcttcaaagaaacatatcgtgaactatgcgtcatcattgtacaacttgaaatttagcatgtcttcccttcagggatgtatcaggactccgccagaggaatgccccaggctaggtccagaggcgctacttcagacccctgatttcaataggacaataagcaatgagccattgaccactggcaacgaacgtttgcaagcagctctaatttcttcatttgggtctttgatggagttcagaacattattaataaattcaaatcttgctatatcaggcgacgggtttacgtggttagtcgcaagacggcagctcgacaaacgtgctatgcgcaacgacatgccaaacagggatattgaatatgataagctgtttatattgaatacgtacaatgcgggaactcccttcaacttctctacatctggggtaatgaatgagctcaataaccaatataccaacatggaaaaacaacgagccaaagaagccggtaatcttgaagattctgagatgactgccaagcaagccaagacaaaatttatttatgaaacccaacagaaaggtttttctgggaaagaggtttcatatatcccgcttttagccattgatgcgtcaccaaaaacatggttaactgattatggcgtatttgggaaacgagaatatttagaaagggtatgggactctatagaatggaaaattgtagagtcaaggttacctcaacgtactaagatccaagcattcaacacgttatga

SEQ ID NO: 2466 - DNA, 966 bp, Artificial Sequence
  Description of Artificial Sequence: Synthetic polynucleotide
atgcttcgctttactggtgctcgcgctattagaaagtactctactaggtatgcactcgagcacttgaaagaaggtgctcctttgaaagggttgttttctattgaaggattacagaaagcatggttcgacagagtgaaatatctcgatgcaaaattgaacgattgtacaaatgaagcgcaacaaaaacccttagaaactctcatccatgaaaattctaaatctgcttccaagaaacatatcgtgaactatgcgagttctttgtacaacttgaaatttagcatgtcttcccttcagggatgtatcaggactccgccagaggaatgccccaggcttggtccagaggcgttacttcagacccctgatttcaataggacaataagcaatgagccattgaccactggcaacgaacgtttgcaagcagctttgatttcttcttttgggtctttgatggagttcagaacattattaataaatagtaatcttgctatatctggcgacgggtttacgtggttagtcgcaagaagacagctcgacaaacgtgctatgcgcaacgacatgccaaacagggatattgaatatgataagttatttatattgaatacgtacaatgcgggaactcccttcaacttctctacatctggggtaatgaatgagctcaataaccaatataccaacatggaaaaacaaagagccaaagaagccggtaatcttgaagattctgagatgactgccaagcaagccaagacaaaatttatttatgaaacccaacagaaaggtttttctgggaaagaggtttcttatatcccgcttttagccattgatgcgtctccaaaaacatggttaactgattatggcgtatttgggaaaagagaatatttagaaagggtatgggactctatagaatggaaaattgtagagtccaggttacctcaacgtactaagatccaagcattcaacacgttatga

SEQ ID NO: 2467 - DNA, 1500 bp, Saccharomyces cerevisiae
atggagaatagaaacagtagtacctctagtaggccattttctgttaataacccgtttagaaatgccacagttgattcaagtattaatcagtataaaaatgactcccagtttcaggagtgggcgaaaaaccaatctcgtaccaattcatttgatatgccacaattgaacacaagaacttcttcacaattatcattcccaaacattccagaggatgaaccccagcgaaacgcagatcagcagggtgctttttattctggtttggagagctttagtagtggtagtttatcaccaccttcgagacctctttcctcaaagaatcctttcctagacgatgtgagttctgcaaccgattttagaaggtctcccccacctgtttcaaggaataaaaatcatcccactgctaaagaagaaaaagaacaattaaggcaaagatatttggaggaaagtgacgtaagtacagtaggtaacacaagagaaaacactgacctaccaccctcatacgaagagatcacttcaaccaatggatcaaggcgtgcatatccaaaggaaaaggtttctcgtccttcttctcaccgcgaacatagcaacagcggcacatatatttcacgcagatcttcatcccaccatcaccgtgaagcttcctcatcttcaacgccttctaagaagggaaagagaaaaagtaaggttattgttcctaagaacgtcgatactatcgataagttagatgtaactggattgttcggtggctcatttcatcatgacggcccattcgatgcagtaacacctcatagaaataaaaataacaaagctgcgcctgttttagcatttccggtcgatggtccaaacagtaccatcggtggcgcttcaaccaagaagtctgccctggatgaggtttttgggagagatgatacagatgattctgatatataccagtacagttcgcagactctaaggagaggtggtgatacgcaggacgcaataaaagcaaacgtgggtaacgtccaacaaatggatgccaaaaataagacagaattggttcatgggccagttactgcgggattaggttctagtacgtttttagatggggcgccggcctcctcagctgccattagaaacgacataaaagcccattcctatcataatcgtaacggtggtttacaaagaaataagtcactttctcaacgattaggtctcggaggatccggtgatagcaatgcccccatgacaggcgttagaagaaacttgagtttaagtagagacaactatgatgttggtcacagcaatgaaggtgttagaaggtcgaaaaccgttaattctcctaacagaacgcataagtccaattatactactgatttcgacggccaagatgatcacaatgaagatgaggaagacgtttatttgggtgtgcgctacaatgagcccaatatgaaaaagaaatcgacgggcagcaaattactgagcagagtaaaaagtctaaaggtcggcaggaaaagtcagtaa

SEQ ID NO: 2468 - DNA, 1500 bp, Artificial Sequence
  Description of Artificial Sequence: Synthetic polynucleotide
atggagaatagaaacagtagtacctctagtaggccattttctgttaataacccgtttagaaatgccacagttgattctagtattaatcagtataaaaatgactcccagtttcaggagtgggcgaaaaaccaatctcgtaccaattcttttgatatgccacaattgaacacaagaacttcttctcaattatctttcccaaacattccagaggatgaaccccagagaaacgcagatcagcagggtgctttttattctggtttggagagctttagtagtggtagtttatctccaccttccagacctctttcctccaagaatcctttcttggacgatgtgagttctgcaaccgattttagaaggtctcccccacctgtttccaggaataaaaatcatcccactgctaaagaagaaaaagaacaattaaggcaaagatatttggaggaaagtgacgtaagtacagtaggtaacacaagagaaaacactgacttaccaccctcttacgaagagatcacttctaccaatggatctaggcgtgcatatccaaaggaaaaggtttctcgtccttcttctcaccgcgaacatagcaacagcggcacatatatttctcgcagatcttcttcccaccatcaccgtgaagcttcctcttcttctacgccttctaagaagggaaagagaaaaagtaaggttattgttcctaagaacgtcgatactatcgataagttagatgtaactggattgttcggtggctcttttcatcatgacggcccattcgatgcagtaacacctcatagaaataaaaataacaaagctgcgcctgttttagcatttccggtcgatggtccaaacagtaccatcggtggcgctagcaccaagaagtctgccttggatgaggtttttgggagagatgatacagatgattctgatatataccagtacagttctcagactttgaggagaggtggtgatacgcaggacgcaataaaagcaaacgtgggtaacgtccaacaaatggatgccaaaaataagacagaattggttcatgggccagttactgcgggattaggttctagtacgtttttagatggggcgccggcctcctctgctgccattagaaacgacataaaagcccattcctatcataatcgtaacggtggtttacaaagaaataagtctctttctcaaagattaggtctcggaggatccggtgatagcaatgcccccatgacaggcgttagaagaaacttgagtttaagtagagacaactatgatgttggtcacagcaatgaaggtgttagaaggtccaaaaccgttaattctcctaacagaacgcataagtccaattatactactgatttcgacggccaagatgatcacaatgaagatgaggaagacgtttatttgggtgtgcgctacaatgagcccaatatgaaaaagaaatctacgggcagcaaattattaagcagagtaaaaagtttgaaggtcggcaggaaaagtcagtga

SEQ ID NO: 2469 - DNA, 1791 bp, Saccharomyces cerevisiae
atgacatgcctaattttatggtatctgtggctcatatcaacttttcagttagagtttgcaacggctagtactgcaaatacaacaactacagcaaagtctggaacctcttcgtcaacggaggagccgtttcctgtactagccgtgggtaaagatggtagaggaaactactatgttaatagcacatttggcactcccggtcaacgccaacgtttgctagtggatattatccaaccgtacataaatctggtttccggaacaagcgaaagtcataacgaatactccggtgtatatcataagcatcccagctacctcatgaatgactctacatcatctgttcctgtttctcctggccaaatatatgagatttctttcattgatggtagagctgttaactgtactttggtgacagacgatatgaattttacaaatgtttcctcagaaaattcctcgaccgctttgataaccgatttaatggtaactcgagataacgtacaatttaactcggggagcctatccatttcaaacgtttccttctttgatattcagtcctcgaactttaagacttcaggcttgttaggtttaagcgggaaggtcacaaacccaggcaatgctatcgatagctcacaatacacagaacagtcttattttctatccttattgaaagatgcagatatcattgaaagttcgtcatattcactgtggttggctggagacacttccacgtacaaaacatatagagatccaatatctaattgtgggaagctacttcttggaggggtggatccttcgctgtttaccggtacactgggaaaatttgacttaattccttacgttgacccagtgagtaatgctgttagtgttgggtacccaattgtgccattaggccctatttatattgtgtctaacagcggacaaagtttgaatatgacttcgaaggactttctgagcccagccttacttgattcaacttcttcggtcagttacctgccaactagtaccattattcagattgccgttcaaattgcggccacttatgtggaatcactagataggtggctagtccaatgttctatagcagatatgggtgtctccttgggtttcaggcttcgagaattgacaattgaaatacccctacgtgatttattatcatctacttacgatacatccaccaattcttcaatgtttttcagttctggacaggaagcttgttttctaacactatacgctaatacaaatactggagtaaacatactcggagaagccttcataaaaaatatatatatggcaatggacttagaggataacactatagccattgcacaggcaaagaaggttgaagatgacgcagttactgaagagacaaatgaaactaccgcgtccactatcatcaagaagatcaaatctggttacattccttacgcaaaagtgatgaatagtagtaatacaagaaacttgactctttatccatcctataggtcaggctatatgttcactgtcccaggtcaactgacagcagcatactcaaacggtgtgattacaggtgcgggccggtcattctatgatacttcaagagcaagcacaagtgctagaccatccagtactcaattcgacagcttttctgtgtcagcctcagaagagtggtcaaattcaactaatagaaccagcagtgcttcgggagcaggcgttcgattgagcagtccttatacatttaacaaagatccagctggacatgtaactcgtatagcttccttgctactactttcgatattctcgatacttattgttctttga

SEQ ID NO: 2470 - DNA, 1791 bp, Artificial Sequence
  Description of Artificial Sequence: Synthetic polynucleotide
atgacatgcttgattttatggtatttatggctcatatctacttttcagttagagtttgcaacggctagtactgcaaatacaacaactacagcaaagtctggaacctcttcttctacggaggagccgtttcctgtattggccgtgggtaaagatggtagaggaaactactatgttaatagcacatttggcactcccggtcaacgccaacgtttgttggtggatattatccaaccgtacataaatttggtttccggaacaagcgaaagtcataacgaatactccggtgtatatcataagcatcccagctacctcatgaatgactctacatcttctgttcctgtttctcctggccaaatatatgagatttctttcattgatggtagagctgttaactgtactttggtgacagacgatatgaattttacaaatgtttccagtgaaaattcctccaccgctttgataaccgatttaatggtaactagagataacgtacaatttaactctgggagcctttccatttccaacgtttccttctttgatattcagtccagtaactttaagacttctggcttgttaggtttaagcgggaaggtcacaaacccaggcaatgctatcgatagctctcaatacacagaacagtcttattttctttccttattgaaagatgcagatatcattgaaagttcttcttattctctttggttggctggagacacttccacgtacaaaacatatagagatccaatatctaattgtgggaagcttcttcttggaggggtggatccttctttatttaccggtacattaggaaaatttgacttaattccttacgttgacccagtgagtaatgctgttagtgttgggtacccaattgtgccattaggccctatttatattgtgtctaacagcggacaaagtttgaatatgacttctaaggactttttgagcccagccttacttgattctacttcttctgtcagttacttgccaactagtaccattattcagattgccgttcaaattgcggccacttatgtggaatctttagataggtggttagtccaatgttctatagcagatatgggtgtctccttgggtttcaggcttagagaattgacaattgaaatacccttacgtgatttattatcttctacttacgatacatccaccaattcttctatgtttttcagttctggacaggaagcttgttttttaacattgtacgctaatacaaatactggagtaaacatactcggagaagccttcataaaaaatatatatatggcaatggacttagaggataacactatagccattgcacaggcaaagaaggttgaagatgacgcagttactgaagagacaaatgaaactaccgcgtccactatcatcaagaagatcaaatctggttacattccttacgcaaaagtgatgaatagtagtaatacaagaaacttgactctttatccatcctataggagtggctatatgttcactgtcccaggtcaattgacagcagcatactctaacggtgtgattacaggtgcgggcagatctttctatgatacttccagagcaagcacaagtgctagaccatccagtactcaattcgacagcttttctgtgtctgccagtgaagagtggtctaattctactaatagaaccagcagtgcttctggagcaggcgttagattgagcagtccttatacatttaacaaagatccagctggacatgtaactcgtatagcttccttgttattactttccatattctctatacttattgttctttga

SEQ ID NO: 2471 - DNA, 2055 bp, Saccharomyces cerevisiae
atgttaaaatgtatatgccgtgtctattcccagcctttggctcaaatggtcacttcaccgctgtttaaacatatgggtagcgcagggacatacacaattctacctattacaaatctgcgccatttatctacgaaaaactgtccattgaaaattaaatcaaatcgttcagaacctttgcagtttggcgattttgaacgacaggtgccatgttctaggaagagcggatcttcgaaaaatgttcagaagcgtttatacgagctccgacaattgaaaactgtattaagtgagacttttggagtaactgaatacgcctctttttttgaatctctacgaaatgccctgcatataaataattgctcagaaaatgaaaagaagaaacttttatatgatatcattttgcatcaacacgagttatacccagaggtggcaagaaaaattggattttatctaccaggtgaggtccacagatggttctggtatcatattccaaaatcagaatcttttaatcactatctttttcttttgaaaagtgatgttcttctctttacttctaactactgtacgagatttaccaataggctgataaaaggaactgagatggagaggcagttagccacgttccaaatatttttgcatgatgagacaaacataaaatttataatggaaaaagttctgaagttgcatacatttgacagcttaatcgctctagtaaatggccttgttaaggcgaaaaattttaggttcattaaagtatttattcaagctctactacagaagttggaacagcactgttattctggtaaagatggagcaaagcaaaagaacctgcgttatgtcaagttcaacaataccttactttattaccttttgaaaagtggaaatgttgagttattcatcaaaacctttcaagaggaactgaaattcattgtaagctcaggattgcttaatcacattgatggaaacgaacacatattgaattttcccattcaccactacttgaatctgctccgaatatctaataggcaggaggagcttttcaatgtaatttcctgcttacaaagcagcccactgatgaaatataaattgttcaaggagtttttaatgggtgaattaattgcatcttttcaagcctttcgtgacccgaaattggtgtgtaaatatctcctctcatcatacagctcaaaggcgtctgctaatattctgaatgccctagggatttgggggtggctctatcattcaaaatcaacgactttgacagctcctacgttagcaagagagctgaagaacaaaaataatattctaccgaacacaatgcgaataggatcaccagtgactgttccaattttaactgaactgtatagaagccttttatcttcgagttctgtttcactggaaagtggtcaattcaagaattgtcttcttgatttatattacaagtacaagagttttctttccgaggaagctcataaatacaggtattggagaaatgataccggaatcctcaatgttttcctaaattatattagattccaagctcgtgaaccaaggctggcctacaatgttcttctggatttttattctcaacctttcgccaaaaaagtggttttaactaccacgctatgtcccttttccatagtagcctataaaaatcatacattaacgcaggctgaactatcagaattgctacaggtgatgcataaaaatggggtgcctttaacgtttaaattttgttctgcaatggtaatgcattatgtcaaaatgagagacgaaaaaggagcacgctcctggtacaataagatactcttcgggggctttgaaatcaggcatatggctttgatacagataataaaagaccaaggctggccgtttcccaaaaactttgacgaaactttactgacggaattggtggaaaataataacattaaagaacctactgatagcaccctgtttactgacgaagatatgttcgaagaagatggcaagcctagatttaatgatgatgatgttaataaatgtacaaatattataagagagacgttgaaaagtctaaattaa

SEQ ID NO: 2472 - DNA, 2055 bp, Artificial Sequence
  Description of Artificial Sequence: Synthetic polynucleotide
atgttaaaatgtatatgccgtgtctattcccagcctttggctcaaatggtcacttctccgttgtttaaacatatgggtagcgcagggacatacacaattttacctattacaaatttacgccatttatctacgaaaaactgtccattgaaaattaaatctaatcgttctgaacctttgcagtttggcgattttgaaagacaggtgccatgttctaggaagagcggatcttctaaaaatgttcagaagcgtttatacgagctcagacaattgaaaactgtattaagtgagacttttggagtaactgaatacgcctctttttttgaatctttaagaaatgccttgcatataaataattgcagtgaaaatgaaaagaagaaacttttatatgatatcattttgcatcaacacgagttatacccagaggtggcaagaaaaattggattttatttaccaggtgaggtccacagatggttctggtatcatattccaaaaagtgaatcttttaatcactatctttttcttttgaaaagtgatgttcttctctttacttctaactactgtacgagatttaccaataggttgataaaaggaactgagatggagaggcagttagccacgttccaaatatttttgcatgatgagacaaacataaaatttataatggaaaaagttttgaagttgcatacatttgacagcttaatcgctttggtaaatggccttgttaaggcgaaaaattttaggttcattaaagtatttattcaagctttgttacagaagttggaacagcactgttattctggtaaagatggagcaaagcaaaagaacttgcgttatgtcaagttcaacaataccttactttattaccttttgaaaagtggaaatgttgagttattcatcaaaacctttcaagaggaattgaaattcattgtaagcagtggattgcttaatcacattgatggaaacgaacacatattgaattttcccattcaccactacttgaatttactcagaatatctaataggcaggaggagcttttcaatgtaatttcctgcttacaaagcagcccattaatgaaatataaattgttcaaggagtttttaatgggtgaattaattgcatcttttcaagcctttcgtgacccgaaattggtgtgtaaatatctcctctcttcctacagctctaaggcgtctgctaatattttgaatgccttggggatttgggggtggctctatcattctaaatctacgactttgacagctcctacgttagcaagagagttgaagaacaaaaataatattttaccgaacacaatgagaataggatctccagtgactgttccaattttaactgaattgtatagaagccttttatcttccagttctgtttctttggaaagtggtcaattcaagaattgtcttcttgatttatattacaagtacaagagttttctttccgaggaagctcataaatacaggtattggagaaatgataccggaatcctcaatgttttcttgaattatattagattccaagctcgtgaaccaaggttggcctacaatgttcttttagatttttattctcaacctttcgccaaaaaagtggttttaactaccacgttgtgtcccttttccatagtagcctataaaaatcatacattaacgcaggctgaattatctgaattgttacaggtgatgcataaaaatggggtgcctttaacgtttaaattttgttctgcaatggtaatgcattatgtcaaaatgagagacgaaaaaggagcacgctcctggtacaataagatactcttcgggggctttgaaatcaggcatatggctttgatacagataataaaagaccaaggctggccgtttcccaaaaactttgacgaaactttattgacggaattggtggaaaataataacattaaagaacctactgatagcaccttatttactgacgaagatatgttcgaagaagatggcaagcctagatttaatgatgatgatgttaataaatgtacaaatattataagagagacgttgaaaagtttgaattga

SEQ ID NO: 2473 - DNA, 2595 bp, Saccharomyces cerevisiae
atgacagcacgtcgtttgattaatatagttcctaatacgtctaagctagaccctttaaaggaggaggactcaacgcatctgaaacaaaatcaacctaagaagttttccacaaaggagttgatgctttcagaatataccgaacgcaaaagttgcagccttccgttgtctaaatcccgatcaggcagtagtgcatccagtagcactacaggttcgaacggaaagaatattggaacaagacgccctagctccaacctagatttcaatttcgctagccaagatgttgttaaaaatgtattaggtaataataatccacacgtacccacagcgaagtgcattaggccaatatcagatgattctataggtacatcgagcacagagatattttcttcatcgcactcaaatacgacatctgattctttatgtacatcagatataagctcagaagagggtgaaatagcaaacagtaagatggaggataactgcttcttcaaaagtatgagagaagctgaccatagaagcaatattacgcccttaaagaaaagccgaccgggatcaatactacagaaaacacgtacagcaagtagcgctgataaaacaatctgctcaatgagtaccataactacatgcattccatctcgtcaaaattcggtgtcaactcctaaactctccaggacagtagggctgcctggatcgagcaatacaaccaacagtatagccgcatcacaaacttcattcataagcgagaatgactctcctcttaaacatcattgcatgagtaccgcaactatccaagaaccaaaactcatgccgatcacaaaaacgccgtatgtgcattccaatagtacttctgtaatattaccatataaaacaacccaacttactccttctcaacgttaccgtttaaggaaagagcaaaatgaccaatctttgcgtaaagccataaaaatgaaagaaaaattttatgaagatcaagacgttaacttggaacttcaagagggcgatgtcgacggctcgttaatttggaacattccaatggcatctttatcgaccagttcttttttaacattatctaagtttaatagaaaagaaatgagtttagattcagcgcggggggatgaagagatattaatacaggagaacaattgcgaaggcaaacaacactcatcttcggctctctgtgtggacaaaactttccatcaggttcatagtactagaaaacatacatcaaattcaagtaacactttaaaagaatcatgtctggactataaggagcttccgccaacatgcattcctggtatatctcctgtgtctgattcacagtacatccaggatacaatgaaaaatctctcccaaatatacctgcatagttccgaaaaaatctccaaaagtattctttctggtcgttcaagatctgtacagagtttaccactggaatttaaagaagccagtagtcagggaatggaagacctaatgctagtttcagaggacaaactaaaggccgtaagtcatttccgtccgagttggctcccgcccaaggatttcaaagagaggaaattgcaagataaacaaatctacaaaaatatcgacttagcatcaatggaagagttgcaaaaaaataaagaacgtgacgaaaaagccaaaaagaatgagcagaataaggtcaaattccagcatttactggaccgaggcattactcgtaactcgtcattaagtgaattaaagaaaattatttgggaaacacctttgatatctaaagtacggcttcaaatatatagtcaacttctacaaagtgacaattgcttgataacaaaatgttttattgaatcatttgaggaagtaatgcagctactcaacaaaatggattttcccaaagataaagaatttgaaataagacagcttattgaacacgatgtacaggaaaaggttttttataaaaatggaacagataagcaagtggtttctgacttgatgctattactgcaactgaaatctatatctcaacaaggtttggttactggtgatgagatgctattctaccattttttaactgatcaatcttttgggactttgaaggaaacatgggaaatggtcaacttgatacagatgacgtgcttcagtgaaatttgcaaggaaaaatacgattcaagaatattaaatcccagaggaattgttgcccatcttttacgaaaagatgagttcaaaaatgaattcaatggcggatgtttgaatagcaatacatggtggaacatattgcaaagaatggaccataaactttttatgtgggtaatggatgtaattatcgttcataatggccaaaactttgcaaactaccccgtaaaaatggaaatattcaaagacaaagtatgggaatactatagatctaagaaggttattgtaaattataagattttggtttcactaacagttaacgtattgttaaactaccacttcggatatgataatctgaaacatttatcagatttggatgataagcatttttgtattccactgtatacggaggatagtatcgaagaggaaaacctcaataatattttcacaaagtggtggttgcactactaccgaaaattacgttag

SEQ ID NO: 2474 - DNA, 2595 bp, Artificial Sequence
  Description of Artificial Sequence: Synthetic polynucleotide
atgacagcacgtcgtttgattaatatagttcctaatacgtctaagttggaccctttaaaggaggaggacagtacgcatttgaaacaaaatcaacctaagaagttttccacaaaggagttgatgctttctgaatataccgaacgcaaaagttgcagccttccgttgtctaaatccagaagcggcagtagtgcatccagtagcactacaggttccaacggaaagaatattggaacaagacgccctagctccaaccttgatttcaatttcgctagccaagatgttgttaaaaatgtattaggtaataataatccacacgtacccacagcgaagtgcattaggccaatatctgatgattctataggtacatctagcacagagatattttcttcttctcactctaatacgacatctgattctttatgtacatctgatataagctctgaagagggtgaaatagcaaacagtaagatggaggataactgcttcttcaaaagtatgagagaagctgaccatagaagcaatattacgcccttaaagaaaagcagaccgggatccatattacagaaaacacgtacagcaagtagcgctgataaaacaatctgctctatgagtaccataactacatgcattccatctcgtcaaaattctgtgtccactcctaaactctccaggacagtagggttgcctggaagcagcaatacaaccaacagtatagccgcatctcaaacttctttcataagcgagaatgactctcctcttaaacatcattgcatgagtaccgcaactatccaagaaccaaaactcatgccgatcacaaaaacgccgtatgtgcattccaatagtacttctgtaatattaccatataaaacaacccaacttactccttctcaacgttaccgtttaaggaaagagcaaaatgaccaatctttgcgtaaagccataaaaatgaaagaaaaattttatgaagatcaagacgttaacttggaacttcaagagggcgatgtcgacggctctttaatttggaacattccaatggcatctttatctaccagttcttttttaacattatctaagtttaatagaaaagaaatgagtttagattctgcgagaggggatgaagagatattaatacaggagaacaattgcgaaggcaaacaacactcttcttctgctctctgtgtggacaaaactttccatcaggttcatagtactagaaaacatacaagtaatagtagtaacactttaaaagaaagttgtttggactataaggagcttccgccaacatgcattcctggtatatctcctgtgtctgattctcagtacatccaggatacaatgaaaaatctctcccaaatatacttgcatagttccgaaaaaatctccaaaagtattctttctggtcgttccagatctgtacagagtttaccattggaatttaaagaagccagtagtcagggaatggaagacttgatgcttgtttctgaggacaaattgaaggccgtaagtcatttccgtccgagttggctcccgcccaaggatttcaaagagaggaaattgcaagataaacaaatctacaaaaatatcgacttagcatctatggaagagttgcaaaaaaataaagaacgtgacgaaaaagccaaaaagaatgagcagaataaggtcaaattccagcatttattagaccgtggcattactcgtaactcttctttaagtgaattaaagaaaattatttgggaaacacctttgatatctaaagtacgtcttcaaatatatagtcaacttttacaaagtgacaattgcttgataacaaaatgttttattgaaagttttgaggaagtaatgcagttgctcaacaaaatggattttcccaaagataaagaatttgaaataagacagcttattgaacacgatgtacaggaaaaggttttttataaaaatggaacagataagcaagtggtttctgacttgatgcttttattacaattgaaatctatatctcaacaaggtttggttactggtgatgagatgcttttctaccattttttaactgatcaatcttttgggactttgaaggaaacatgggaaatggtcaacttgatacagatgacgtgcttcagtgaaatttgcaaggaaaaatacgattccagaatattaaatcccagaggaattgttgcccatcttttaagaaaagatgagttcaaaaatgaattcaatggcggatgtttgaatagcaatacatggtggaacatattgcaaagaatggaccataaactttttatgtgggtaatggatgtaattatcgttcataatggccaaaactttgcaaactaccccgtaaaaatggaaatattcaaagacaaagtatgggaatactatagatctaagaaggttattgtaaattataagattttggtttctttaacagttaacgtattgttaaactaccacttcggatatgataatttgaaacatttaagtgatttggatgataagcatttttgtattccattgtatacggaggatagtatcgaagaggaaaacctcaataatattttcacaaagtggtggttgcactactacagaaaattacgttga

SEQ ID NO: 2475 - DNA, 954 bp, Saccharomyces cerevisiae
atgtcgtgctcaaacggcatctggcctactgtatctaatttgtgcggatcattatccttcttcacctctgttatttcattgtttccacaaataattgagacttatcgagataaatctgtcgatgggctatcgccatattttttgctggcttggttatgtggggatattacctcgctgataggggcaaagctaacagggcaattgttatttcagatacttttagcaatttattttctattgaatgattcttttgtatgtggtcaatattattactatggcgtgctgcatgaaaataaattggcgactgtcggccatgagcctaaacctcttcttcccgaactggttgaaaatggtgagcttttgagggaggaagaggacatgatacaaggtggtagcagtgcagaaagccctagaagcagtagaagaaggtctgccattacagcagccttggctatagctcatactataagtacagctagcgcatatccgctaaatgtaggctccacccaatcacaagtggggcctcccggagatggtaaaaacagccagctgggtacaattttatcttggattggcgcttccttctacgtaggcgcacgtatcccacaactaatcaagaattacaatagaaagtctacagacggcttatctcccttcctatttgctactacactactctgcaatatcacgtataatttgagcatcttcacaagctgtagatttttagataatcagaacaagagggaattcatcgtgaatgagttgccctttatatttggaagtgctggaacaattgcgtttgatttgatatacttctaccaatactatatcctttatgcaactgatatgcaactacgtgaactggaaagagaactatacagtcctgaagaagacagtgcagcgcaactagtgacagaacgtacatcactgttgtctggtgaaacgcaaacatag

SEQ ID NO: 2476 - DNA, 954 bp, Artificial Sequence
  Description of Artificial Sequence: Synthetic polynucleotide
atgagttgcagcaacggcatctggcctactgtatctaatttgtgcggatctttatccttcttcacctctgttatttctttgtttccacaaataattgagacttatagagataaatctgtcgatgggctttctccatattttttgttggcttggttatgtggggatattacctccttgataggggcaaagttaacagggcaattgttatttcagatacttttagcaatttattttttattgaatgattcttttgtatgtggtcaatattattactatggcgtgttacatgaaaataaattggcgactgtcggccatgagcctaaacctcttcttcccgaattggttgaaaatggtgagcttttgagggaggaagaggacatgatacaaggtggtagcagtgcagaaagccctagaagcagtagaagaaggtctgccattacagcagccttggctatagctcatactataagtacagctagcgcatatccgttaaatgtaggctccacccaatctcaagtggggcctcccggagatggtaaaaacagccagttgggtacaattttatcttggattggcgcttccttctacgtaggcgcacgtatcccacaattgatcaagaattacaatagaaagtctacagacggcttatctcccttcttatttgctactacattactctgcaatatcacgtataatttgagcatcttcacaagctgtagatttttagataatcagaacaagagggaattcatcgtgaatgagttgccctttatatttggaagtgctggaacaattgcgtttgatttgatatacttctaccaatactatatcctttatgcaactgatatgcaattgcgtgaattggaaagagaattatacagtcctgaagaagacagtgcagcgcaattagtgacagaacgtacatctttgttgtctggtgaaacgcaaacatga

SEQ ID NO: 2477 - DNA, 960 bp, Saccharomyces cerevisiae
atggttcacaacaaagttactatcattggttcaggtccagctgcacacaccgccgccatctatttggccagggcagaaatcaagccaatcctatatgaaggtatgatggcgaacggtattgctgccggtggccagctaaccaccactacagaaatcgaaaacttcccaggtttcccagatggtctaacaggtagcgaactgatggacagaatgagagaacaatccacgaagtttggcactgaaattatcacggaaacagtttccaaagttgatctgtcttccaaaccattcaagctatggaccgaatttaacgaagacgcagaacctgtgacgactgacgctataatcttggccacaggcgcttctgctaagagaatgcatttgccgggcgaggaaacctactggcaaaaaggtatttctgcctgtgccgtgtgtgatggtgccgtccccattttcagaaacaagccattggccgtcattggtggtggtgactctgcatgtgaagaagctcagttcttgaccaagtacggctcaaaagtgtttatgcttgtcagaaaagaccatttgcgtgcttctaccattatgcaaaagcgtgctgagaagaacgaaaaaattgaaatcctttacaacactgttgcgctagaagctaagggggatggtaaattattgaatgccttgaggattaagaacactaaaaagaatgaagaaaccgatttgccagtcagcggtttattttatgcaattggccacactccagcaacaaagattgtcgctggccaagtcgacactgatgaagcgggctacattaaaactgtcccaggcagctcattaacctccgttccaggatttttcgctgctggtgatgttcaggattctaaatacagacaagctattacttctgctggctctggttgtatggccgctttggatgctgagaaatacttaacttccctagaatag

SEQ ID NO: 2478 - DNA, 960 bp, Artificial Sequence
  Description of Artificial Sequence: Synthetic polynucleotide
atggttcacaacaaagttactatcattggttctggtccagctgcacacaccgccgccatctatttggccagggcagaaatcaagccaatcttatatgaaggtatgatggcgaacggtattgctgccggtggccagttgaccaccactacagaaatcgaaaacttcccaggtttcccagatggtttaacaggtagcgaattgatggacagaatgagagaacaatccacgaagtttggcactgaaattatcacggaaacagtttccaaagttgatttatcttccaaaccattcaagttatggaccgaatttaacgaagacgcagaacctgtgacgactgacgctataatcttggccacaggcgcttctgctaagagaatgcatttgccgggcgaggaaacctactggcaaaaaggtatttctgcctgtgccgtgtgtgatggtgccgtccccattttcagaaacaagccattggccgtcattggtggtggtgactctgcatgtgaagaagctcagttcttgaccaagtacggctctaaagtgtttatgcttgtcagaaaagaccatttgcgtgcttctaccattatgcaaaagcgtgctgagaagaacgaaaaaattgaaatcctttacaacactgttgcgttagaagctaagggggatggtaaattattgaatgccttgaggattaagaacactaaaaagaatgaagaaaccgatttgccagtcagcggtttattttatgcaattggccacactccagcaacaaagattgtcgctggccaagtcgacactgatgaagcgggctacattaaaactgtcccaggcagctctttaacctccgttccaggatttttcgctgctggtgatgttcaggattctaaatacagacaagctattacttctgctggctctggttgtatggccgctttggatgctgagaaatacttaacttccttagaatga

SEQ ID NO: 2479 - DNA, 1143 bp, Saccharomyces cerevisiae
atgtccgaggcgactttgctatcttacaccaagaaattattggcttctccgccgcaattgagtagcacagacctacacgatgcgttgctggttatattaagtcttttgcaaaaatgtgatacaaatagcgatgagagtctttccatctataccaaagtttcgagttttctcacggccttgagagttactaaacttgatcacaaggctgaatacattgcggaagctgcaaaggctgtgctcagacattccgaccttgttgatctacctttacccaagaaggacgaattacacccggaagatggaccagtaatcttagatattgtaggtactggtggtgacggacagaatacttttaatgtttccacgtctgctgctatcgttgcctccggaattcagggcctaaaaatttgtaagcacggtggtaaagcttctacatccaatagtggagctggtgacctaattggaactttaggctgtgacatgttcaaggttaattcatcgacagtgcccaaactttggcctgataatacgttcatgtttctacttgctcctttttttcatcatggaatgggccacgtttctaagatacgcaaatttcttggaattccgactgttttcaacgtactgggaccacttctacatccagttagccacgtaaacaagagaatattgggcgtttactcaaaggaacttgcgcctgaatatgccaaggcagccgctttggtatatccaggaagcgaaacttttatagtttggggacatgttgggttagacgaagtatcacctataggcaaaactactgtctggcatattgatccgacatcgtccgaacttaaattgaagaccttccaattagaaccttctatgtttggtttagaagaacacgagttgtcgaagtgtgcttcatacggccctaaagagaatgcgagaattctaaaagaagaagtcttgtccggcaagtaccaccttggcgacaataatcctatttatgactacatcttgatgaacaccgccgtgttatattgtttaagccaaggtcaccagaactggaaggaagggatcattaaggcagaagaaagcatacattctggtaatgcattacgttctttagaacactttatagatagtgtgagctccttgtag

SEQ ID NO: 2480 - DNA, 1143 bp, Artificial Sequence
  Description of Artificial Sequence: Synthetic polynucleotide
atgtccgaggcgactttgttatcttacaccaagaaattattggcttctccgccgcaattgagtagcacagacttgcacgatgcgttgttggttatattaagtcttttgcaaaaatgtgatacaaatagcgatgagagtctttccatctataccaaagtttctagttttctcacggccttgagagttactaaacttgatcacaaggctgaatacattgcggaagctgcaaaggctgtgctcagacattccgaccttgttgatttacctttacccaagaaggacgaattacacccggaagatggaccagtaatcttagatattgtaggtactggtggtgacggacagaatacttttaatgtttccacgtctgctgctatcgttgcctccggaattcagggcttgaaaatttgtaagcacggtggtaaagcttctacatccaatagtggagctggtgacttgattggaactttaggctgtgacatgttcaaggttaattcttctacagtgcccaaactttggcctgataatacgttcatgtttttacttgctcctttttttcatcatggaatgggccacgtttctaagatacgcaaatttcttggaattccgactgttttcaacgtattgggaccacttttacatccagttagccacgtaaacaagagaatattgggcgtttactccaaggaacttgcgcctgaatatgccaaggcagccgctttggtatatccaggaagcgaaacttttatagtttggggacatgttgggttagacgaagtatctcctataggcaaaactactgtctggcatattgatccgacatcttccgaacttaaattgaagaccttccaattagaaccttctatgtttggtttagaagaacacgagttgtccaagtgtgcttcttacggccctaaagagaatgcgagaattttgaaagaagaagtcttgtccggcaagtaccaccttggcgacaataatcctatttatgactacatcttgatgaacaccgccgtgttatattgtttaagccaaggtcaccagaactggaaggaagggatcattaaggcagaagaaagcatacattctggtaatgcattacgttctttagaacactttatagatagtgtgagctccttgtga

SEQ ID NO: 2481 - DNA, 2835 bp, Saccharomyces cerevisiae
atggacgaagcgtcacatctcccaaatgggagcttgaagaacatggaatttacgcctgtaggatttatcaaatccaagcgaaacaccacgcaaacacaagttgtatcgcctactaaggttccaaatgccaataatggtgatgagaacgaaggccctgttaagaaaaggcagagaagaagcattgatgatacaattgactccacaaggctatttagtgaagcttcacaattcgatgacagctttccagaaattaaggctaacattccgcctagtccaaggtcaggcaatgttgacaaaagtcgcaagagaaatttgattgatgatttgaagaaagatgtgccaatgtctcagcccttgaaagaacaagaagtaagagaacaccaaatgaagaaagagcgatttgaccgtgctttagagagtaaattactaggaaaaagacacataacatacgcaaattctgatatttctaataaggaactttacattaatgaaatcaagagtttgaagcatgaaatcaaagaattaagaaaggaaaaaaacgatactctcaataattatgatacccttgaagaagaaacagatgacttgaagaacagattacaagcgctggaaaaagagctggacgccaaaaataaaattgtgaattcaagaaaagtagatgatcattctggatgcatagaagaacgtgaacaaatggaaagaaagttggctgaattagaaagaaaactgaaaactgtgaaagaccaagtgctagaattagagaataatagtgacgtacaaagtttaaaattgagatctaaggaggatgaattgaagaatttaatgaatgagttgaatgaattgaagagcaatgcagaagaaaaggatacacagttggaattcaagaaaaatgaactgaggaaacgaacaaatgaattaaatgagttgaaaatcaagtctgatgagatggatttacaactaaaacaaaaacaaaatgaatcaaaaagattaaaagatgaattaaatgagcttgaaaccaaattcagcgaaaatggttctcagtcttctgcaaaagaaaatgaattgaaaatgctgaaaaataaaatagccgagctagaggaagagattagcacgaaaaattcacagttaatcgcaaaagaaggtaagttagcatcattaatggctcagctaactcaattggagagtaaacttaatcaaagagactcccagttgggctcaagggaagaagaattgaaaaaaacaaacgataagctacaaaaagatatcaggatagcaagagaggaaacagtttcaaaggatgaacggataattgatcttcaaaaaaaggttaaacagctagaaaatgacttatttgtgataaaaaaaacgcacagtgagtctaaaactattactgataatgaactagaatctaaagataaacttattaaaattttagaaaacgatttaaaggttgcacaagagaagtactctaaaatggaaaaagagctcaaagaaagggaatttaactataaaatttccgaatcaaagttggaagatgaaaagaccacgctaaatgaaaaaatttctaacttagccgcagaaaactcacagctaaaaaataaaatagaggacaattcgactgccactcaccatatgaaagaaaactatgagaagcagttagaatcgctaaggaaagatattgaagagtacaaagaaagcgcaaaagattctgaagacaaaattgaggaactaaaaattaggattgctgaaaattctgctaaagtatcggagaaaagatcaaaggatataaaacaaaaagatgaacagatcagcgacctcactcagaatctaaaactacaagaagatgagataagctcattaaaatccataattgacaggtacaaaaaagatttcaatcaattgaaatctgaacagagtaatatccaacatgacctaaatttacaaatactaaatctggaaaataagttaatagagagcgaggatgaattaaagtcactaagagattctcaaaaaattgaaatagaaaactggaagagaaagtataacaatctttcactggaaaatgacagattgttgacagaaaaagaatccgcatcagacaaagagcgcgagatatccatcttgaacagaaaacttgatgaaatggataaagaaaaatggaacttacaggaatctaaagaaaaatataaacgcgaactacagaaggtgattactgctaatgatcgtttgagaagagagaaagaggagttgaatgaaaacagcaataatattcgtatcatggaagacaagatgactaggataaaaaaaaattatttgagtgaaatcacttctttacaagaggaaaataggagacttgaagaacgcctcatattaaatgagaggcgtaaagacaatgattcaactatgcaattaaatgacatcataagctattataaattgaagtatcactcagaagtaagacacaacaacgatcttaaggtgatcaatgattatttaaacaaggttcttgctttggggacccgtcgtttaagattggacacaaggaaaggtgagcacagtctaaacatttcacttccagacgatgatgaactagatcgtgattactacaatagccatgtttatacaaggtatcatgactatgaatacccgcttagattcaatttaaacagaagaggtccctatttcgaacgccgcttaagcttcaaaacagttgcccttttagtgcttgcttgtgtgaggatgaaaaggattgctttttacaggagatcagacgataacagattgcgaatactaagagatagaattgagagtagcagcgggcgtatatcttggtag

SEQ ID NO: 2482 - DNA, 2835 bp, Artificial Sequence
  Description of Artificial Sequence: Synthetic polynucleotide
atggacgaagcgtctcatctcccaaatgggagcttgaagaacatggaatttacgcctgtaggatttatcaaatccaagagaaacaccacgcaaacacaagttgtatctcctactaaggttccaaatgccaataatggtgatgagaacgaaggccctgttaagaaaaggcagagaagaagcattgatgatacaattgactccacaaggttatttagtgaagcttctcaattcgatgacagctttccagaaattaaggctaacattccgcctagtccaaggagtggcaatgttgacaaaagtcgcaagagaaatttgattgatgatttgaagaaagatgtgccaatgtctcagcccttgaaagaacaagaagtaagagaacaccaaatgaagaaagagagatttgaccgtgctttagagagtaaattattaggaaaaagacacataacatacgcaaattctgatatttctaataaggaactttacattaatgaaatcaagagtttgaagcatgaaatcaaagaattaagaaaggaaaaaaacgatactctcaataattatgatacccttgaagaagaaacagatgacttgaagaacagattacaagcgttagaaaaagagttggacgccaaaaataaaattgtgaattctagaaaagtagatgatcattctggatgcatagaagaacgtgaacaaatggaaagaaagttggctgaattagaaagaaaattgaaaactgtgaaagaccaagtgttggaattagagaataatagtgacgtacaaagtttaaaattgagatctaaggaggatgaattgaagaatttaatgaatgagttgaatgaattgaagagcaatgcagaagaaaaggatacacagttggaattcaagaaaaatgaattgaggaaaagaacaaatgaattaaatgagttgaaaatcaagtctgatgagatggatttacaattgaaacaaaaacaaaatgaaagtaaaagattaaaagatgaattaaatgagcttgaaaccaaattcagcgaaaatggttctcagtcttctgcaaaagaaaatgaattgaaaatgttgaaaaataaaatagccgagttagaggaagagattagcacgaaaaattctcagttaatcgcaaaagaaggtaagttagcatctttaatggctcagttgactcaattggagagtaaacttaatcaaagagactcccagttgggctccagggaagaagaattgaaaaaaacaaacgataagttacaaaaagatatcaggatagcaagagaggaaacagtttccaaggatgaaagaataattgatcttcaaaaaaaggttaaacagttagaaaatgacttatttgtgataaaaaaaacgcacagtgagtctaaaactattactgataatgaattggaatctaaagataaacttattaaaattttagaaaacgatttaaaggttgcacaagagaagtactctaaaatggaaaaagagctcaaagaaagggaatttaactataaaatttccgaatccaagttggaagatgaaaagaccacgttgaatgaaaaaatttctaacttagccgcagaaaactctcagttgaaaaataaaatagaggacaattctactgccactcaccatatgaaagaaaactatgagaagcagttagaatctttgaggaaagatattgaagagtacaaagaaagcgcaaaagattctgaagacaaaattgaggaattgaaaattaggattgctgaaaattctgctaaagtatctgagaaaagatccaaggatataaaacaaaaagatgaacagatcagcgacctcactcagaatttgaaattacaagaagatgagataagctctttaaaatccataattgacaggtacaaaaaagatttcaatcaattgaaatctgaacagagtaatatccaacatgacttgaatttacaaatattgaatttggaaaataagttaatagagagcgaggatgaattaaagtctttgagagattctcaaaaaattgaaatagaaaactggaagagaaagtataacaatctttctttggaaaatgacagattgttgacagaaaaagaatccgcaagtgacaaagagcgcgagatatccatcttgaacagaaaacttgatgaaatggataaagaaaaatggaacttacaggaatctaaagaaaaatataaacgcgaattacagaaggtgattactgctaatgatcgtttgagaagagagaaagaggagttgaatgaaaacagcaataatattcgtatcatggaagacaagatgactaggataaaaaaaaattatttgagtgaaatcacttctttacaagaggaaaataggagacttgaagaacgcctcatattaaatgagaggcgtaaagacaatgattctactatgcaattaaatgacatcataagctattataaattgaagtatcacagtgaagtaagacacaacaacgatcttaaggtgatcaatgattatttaaacaaggttcttgctttggggacccgtcgtttaagattggacacaaggaaaggtgagcacagtttgaacatttctcttccagacgatgatgaattagatcgtgattactacaatagccatgtttatacaaggtatcatgactatgaatacccgcttagattcaatttaaacagaagaggtccctatttcgaacgccgcttaagcttcaaaacagttgcccttttagtgcttgcttgtgtgaggatgaaaaggattgctttttacaggagaagtgacgataacagattgagaatattaagagatagaattgagagtagcagcgggcgtatatcttggtga

SEQ ID NO: 2483 - DNA, 369 bp, Saccharomyces cerevisiae
atgcaagacaactcaagtcattccagagagtcggcttcggctggtgacgatcctcttggaattgataaattgacagtcgactacgattacttactttataaaatgagagactatgtacagagtatacaattggatactacggagctatgtaaaaaacaaaatgaagtgatggtgaatggtattattgaaaacaccatagataaaaatattgcgaagttcaaagaactccttgaaaaatgcgatacgttggaaaatcactatgaaatgttaaaccaactggcgataataacagatactttcaaggaaagaatcgcagaggccgtaaataattacaatagcttaaaaaagggcgccagtaaatctaagtaa

SEQ ID NO: 2484 - DNA, 369 bp, Artificial Sequence
  Description of Artificial Sequence: Synthetic polynucleotide
atgcaagacaacagtagtcattccagagagtctgcttctgctggtgacgatcctcttggaattgataaattgacagtcgactacgattacttactttataaaatgagagactatgtacagagtatacaattggatactacggagctctgtaaaaaacaaaatgaagtgatggtgaatggtattattgaaaacaccatagataaaaatattgcgaagttcaaagaactccttgaaaaatgcgatacgttggaaaatcactatgaaatgttaaaccaattggcgataataacagatactttcaaggaaagaatcgcagaggccgtaaataattacaatagcttaaaaaagggcgccagtaaatctaagtga

SEQ ID NO: 2485 - DNA, 1674 bp, Saccharomyces cerevisiae
atgccacaaagaattgagcttacctccgaaccagtcagaaaaccgcggtctactgagagctcactactcagaaagatacaaagagcgtgtagatccacattgcctgaaccagatttgggcttgaacttagatgtagctgactatatcaactcaaagcaaggagcaacccctagagaggctgtgttagcaattgaaaaattggtcaataatggggacacgcaagcagctgtttttgcactttcactactagacgtgctggtaaaaaattgtggttactctatacatttgcaaatctccaggaaggaattcttaaatgatctagtgaaaagatttccagagcaaccaccattgagatattccaaggtgcaacaaatgattcttgaagccatcgaggaatggtaccaaaccatctgcaaacatgccagctacaaagatgatcttcaatatatcaacgacatgcataaattactgaaatacaagggttatactttcccaaaagttgggagtgaaaacttggcggtgttgagaccgaatgaccaactgaggacacctagtgagctacaggaagaacaggaaagagctcaagctgcaaaactagaagagctgctaagaagcggcaagcccgatgatttgaaagaagctaataaactgatgaaaattatggcgggatttaaggatgacactaaagtagcagtcaaacaagcaattaacaatgaactaaataaactcaaaagaaaagctgatttattcaacgaaatgttgacttcagccgatgagcctgatcttgaaaatgaagctattcaagaattgtatggcgacttaaaatcagcgcagccgaaattcaaaaagcttattgaggaagaacgcgatgacgatgcgcttgttagtaatctatcaaaatttaacgatctagtgatccaattgttaaaaaggtacaagtcaataaaaggtatgaaggaagaagaactaaatgtccccgatacgaatgaaccggcaaaagagcttaatttgatagattttgatgacgatacaacagcaaacactccatctgtgacatctccaagcaaatctttgcaaccttttgacgatcttttaggggattttaataaggtaagtttatcatccccaaagtctcctcaagaaaacgacactgttgttgatatacttggtgacgctcactcaaagtcatctggtatagatttattagattttgattcgcaacctggagaaagtaaaaccgctctgtccgcatattctaactcgattgttctacctaatggtttactaaatagttcaagtaactccaaggaaatcacagctcaatcgcaaagacatatacttaaccaatcggatcacttacgcattgattacgaattaactcgtgagtcgatgacaaaactacgattagttatcttctattcaaacataagcagtgatccaataactaattttgcacttttagtggcatcacctaaaggcacgacattgtctctgcaaccgcaatcgggcaatatgctccaaagtaactccagagatggtatcaaacagattgcttccgtagagggtatatctgttaatttaggtaagcccataaaattgaaatggaaggctaattactgcaccaagggtgattcgaaggaagaatcgggcacgaccagtttgcccacaatataa

SEQ ID NO: 2486 - DNA, 1674 bp, Artificial Sequence
  Description of Artificial Sequence: Synthetic polynucleotide
atgccacaaagaattgagcttacctccgaaccagtcagaaaaccgagatctactgagagctctttactcagaaagatacaaagagcgtgtagatccacattgcctgaaccagatttgggcttgaacttagatgtagctgactatatcaactccaagcaaggagcaacccctagagaggctgtgttagcaattgaaaaattggtcaataatggggacacgcaagcagctgtttttgcactttctttattagacgtgttagtaaaaaattgtggttactctatacatttgcaaatctccaggaaggaattcttaaatgatttggtgaaaagatttccagagcaaccaccattgagatattccaaggtgcaacaaatgattcttgaagccatcgaggaatggtaccaaaccatctgcaaacatgccagctacaaagatgatcttcaatatatcaacgacatgcataaattattgaaatacaagggttatactttcccaaaagttgggagtgaaaacttggcggtgttgagaccgaatgaccaattaaggacacctagtgagttacaggaagaacaggaaagagctcaagctgcaaaattagaagagttattaagaagcggcaagcccgatgatttgaaagaagctaataaattaatgaaaattatggcgggatttaaggatgacactaaagtagcagtcaaacaagcaattaacaatgaattgaataaactcaaaagaaaagctgatttattcaacgaaatgttgacttctgccgatgagcctgatcttgaaaatgaagctattcaagaattgtatggcgacttaaaatctgcgcagccgaaattcaaaaagcttattgaggaagaacgcgatgacgatgcgcttgttagtaatttatccaaatttaacgatttggtgatccaattgttaaaaaggtacaagagtataaaaggtatgaaggaagaagaattgaatgtccccgatacgaatgaaccggcaaaagagcttaatttgatagattttgatgacgatacaacagcaaacactccatctgtgacatctccaagcaaatctttgcaaccttttgacgatcttttaggggattttaataaggtaagtttatcttccccaaagtctcctcaagaaaacgacactgttgttgatatacttggtgacgctcactccaagtcttctggtatagatttattagattttgattctcaacctggagaaagtaaaaccgctttgtccgcatattctaactctattgttttacctaatggtttattgaatagtagtagtaactccaaggaaatcacagctcaatctcaaagacatatacttaaccaatctgatcacttacgcattgattacgaattaactcgtgagtccatgacaaaacttcgtttagttatcttctattccaacataagcagtgatccaataactaattttgcacttttagtggcatctcctaaaggcacgacattgtctttacaaccgcaaagtggcaatatgctccaaagtaactccagagatggtatcaaacagattgcttccgtagagggtatatctgttaatttaggtaagcccataaaattgaaatggaaggctaattactgcaccaagggtgattctaaggaagaaagtggcacgaccagtttgcccacaatatga

SEQ ID NO: 2487 - DNA, 2949 bp, Saccharomyces cerevisiae
atgtcctcacgtccaagttcagcagtgcctaattcagcatcactcagtgaggaccagagcagtgatagaagtaaatttcctaaggcagatgacttaattgatgaaagagatagaaaactgaccgaactatactgcgtatcccgcttgaaccagctgctagagttaacagatgaaaacaaacttcggaaggaaatagatgcatttttaaagaaaaacgatatacgaaggggtataaggtttgacgaggcgtcactgccgaagctcctacatacagctgcgactcccataacaaaaaagaaattgaaggatgtaaatttaataaatgtacctaaccagaggctatccgattctaaaatgagtagggaactgccagaaaatagcgaaaatgtatcagtcaaatcagagagtcattttgttccaagccacgataattcaatccgtgaaaatatgatggattctttgaggccagctgaaaagacaggaggtatgtggaacaaaaggccacttgagtcaactatgggaggtgaagaagagcgacatgaaaaaagacagaagatgcaatctcagtcattggaatcttctaataattcggaaatggcttcattacctatttcgccgcgtcccccagtgcctaatgcattagcacactacacttattatgagaacatcgagtacccaccagcagatcccactgaggtgcaacctgcagtaaaattcaaggatccgttgataaagaacattatggcgaaagagatagatacatcagaccattataacgagaacaatgttgacgcattagagaccgtatttttattaatgaacgattatataccatcgaaaataccccaggctttgcccttagcagaattgaagtacatgtcacaaactctgcctcttattaatctaataccgagagctcacaaggctttgaccactaatattataaacaacgccttaaacgaggccagaattactgttgttggctcgcgaatagaagaactaagaagacttggattatggtctttaagacaacctaaaagattcatcgatccgtggaaacaacacaatacgcatcaaaacatacttttagaagaagctaaatggatgcaagcagattttaaagagggccacaaatataaagtagctatctgcacagcaatggcacaggcaatcaaggactactggacctatggggaaatatgctgtgtaaaacgtaaaacacttctacctggtaaggaaaataaattatctgacgacgggcgcatatctgaaaagtccggtagaccatcggatacttcaagaaatgattccgatattagcatagccggtaaggatgacattggaattattgcgaacgttgacgatattactgaaaaagaaagtgctgctgctaacgataatgatgagaatggaaagaatgaagcaggagctaagagtgattttgattttgcagatggtttgttatctcaagaaggtgcccacgatcaaattatatcttctattgacaccaagttacttctaaaaaagccatcctcctcaagcgaagttgttttaatacaacatgaagtagctgcatcatcagcgttgatcgaaaccgaagaatcaaagaaagagctagcccccccatttaaactttcaatctttgttgacgaactcaatacttttgaaaaaacattaatacaggatttaccgctgtataatggtattaatgaagaacggccaaaaaaagatgattctttaccatttattccaatttccaaatcggtagtgtcactggatgataatggattttataagttacttgagcgtcaattgattgacgaagaaccatcaatatcacaattgagcaaaaggcggggtatgttctatggtaatagaagaaatcattatttaagaccaccagcagtaccttcattacgctatcttcaaaatagaacaccgactatatggctgtctgaggacgatcaggaactggtcaaaaatattaacacatatggctacaattgggaattgattagtgcacatatgacacatcgcctcacatattcttatttatcgaatattgaacgtagaacgccatggcagtgttttgagcgttttgtacaattaaatgaacgattcaattttagtgacctcaagggtcccagagcacatagtgctcaacagtggttgattgaagcccataaatttcagcagagacagaatagaagaatatcgcctttaggtgtaaatacagaatccatacaaagaggtcataggagactccgttgggcgagcatgtttgaggcgattagaaaatgtatgaaaaaaagagaaaatacgccgcgtcccaatccaacccagccaaggaaaccgttagattgtaaaaacatgaaggtccctaccccagcagaaatgtcgcttttgaaagcccaaagagatgaggcattgagaagggatatacaattgagaagaacagtgaaaaatagattacaacagaggcaacagcaaagtcagcaggcacattcatcccgagctcaaagtccaataccttcaaatggcaaatcttcttcaaatttggctagaaatgggcaagcgtcggctccaagaccaaaccagaaacagtatactgagcaagatatcattgaaagttactcgaggaagttgttggagcaaaaaccagacattggtcctgagatggcccttaaggcggcaaaaaactattatagaaccttgagagaacaacagcaacagctaaagcagcaccagattcaacagcaaaggcagcagttacaggaggagtccagtcatgtgcagcaactgcagcaactacaaccagggtctcaagctccgccaccgaaatcatctccatctcaatcttctctttccaatatttctaacattaattctgctccaaggataaagtcaccaactccacaggagattttacaaaggttccaaaaacaatga

SEQ ID NO: 2488 - DNA, 2949 bp, Artificial Sequence
  Description of Artificial Sequence: Synthetic polynucleotide
atgtcctctcgtccaagttctgcagtgcctaattctgcaagtctcagtgaggaccagagcagtgatagaagtaaatttcctaaggcagatgacttaattgatgaaagagatagaaaattgaccgaattatactgcgtatcccgcttgaaccagttgttggagttaacagatgaaaacaaacttagaaaggaaatagatgcatttttaaagaaaaacgatataagaaggggtataaggtttgacgaggcgtctttaccgaagctcttgcatacagctgcgactcccataacaaaaaagaaattgaaggatgtaaatttaataaatgtacctaaccagaggctttccgattctaaaatgagtagggaattaccagaaaatagcgaaaatgtaagtgtcaaaagtgagagtcattttgttccaagccacgataattccatccgtgaaaatatgatggattctttgaggccagctgaaaagacaggaggtatgtggaacaaaaggccacttgagtctactatgggaggtgaagaagagagacatgaaaaaagacagaagatgcaatctcagtctttggaatcttctaataattctgaaatggcttctttacctatttctccgcgtcccccagtgcctaatgcattagcacactacacttattatgagaacatcgagtacccaccagcagatcccactgaggtgcaacctgcagtaaaattcaaggatccgttgataaagaacattatggcgaaagagatagatacaagtgaccattataacgagaacaatgttgacgcattagagaccgtatttttattaatgaacgattatataccatctaaaataccccaggctttgcccttagcagaattgaagtacatgtctcaaactttacctcttattaatttgataccgagagctcacaaggctttgaccactaatattataaacaacgccttaaacgaggccagaattactgttgttggcagtagaatagaagaattgagaagacttggattatggtctttaagacaacctaaaagattcatcgatccgtggaaacaacacaatacgcatcaaaacatacttttagaagaagctaaatggatgcaagcagattttaaagagggccacaaatataaagtagctatctgcacagcaatggcacaggcaatcaaggactactggacctatggggaaatatgctgtgtaaaacgtaaaacacttttacctggtaaggaaaataaattatctgacgacgggcgcatatctgaaaagtccggtagaccaagtgatacttccagaaatgattccgatattagcatagccggtaaggatgacattggaattattgcgaacgttgacgatattactgaaaaagaaagtgctgctgctaacgataatgatgagaatggaaagaatgaagcaggagctaagagtgattttgattttgcagatggtttgttatctcaagaaggtgcccacgatcaaattatatcttctattgacaccaagttacttttgaaaaagccatcctcctctagcgaagttgttttaatacaacatgaagtagctgcatcttctgcgttgatcgaaaccgaagaatccaagaaagagttggcccccccatttaaactttctatctttgttgacgaactcaatacttttgaaaaaacattaatacaggatttaccgttatataatggtattaatgaagaaagaccaaaaaaagatgattctttaccatttattccaatttccaaatctgtagtgtctttagatgataatggattttataagttacttgagcgtcaattgattgacgaagaaccaagtatatctcaattgagcaaaaggagaggtatgttctatggtaatagaagaaatcattatttaagaccaccagcagtaccttctttacgctatcttcaaaatagaacaccgactatatggttatctgaggacgatcaggaattggtcaaaaatattaacacatatggctacaattgggaattgattagtgcacatatgacacatcgcctcacatattcttatttatccaatattgaacgtagaacgccatggcagtgttttgagcgttttgtacaattaaatgaaagattcaattttagtgacctcaagggtcccagagcacatagtgctcaacagtggttgattgaagcccataaatttcagcagagacagaatagaagaatatctcctttaggtgtaaatacagaatccatacaaagaggtcataggagactccgttgggcgagcatgtttgaggcgattagaaaatgtatgaaaaaaagagaaaatacgccgcgtcccaatccaacccagccaaggaaaccgttagattgtaaaaacatgaaggtccctaccccagcagaaatgtctcttttgaaagcccaaagagatgaggcattgagaagggatatacaattgagaagaacagtgaaaaatagattacaacagaggcaacagcaaagtcagcaggcacattcttccagagctcaaagtccaataccttccaatggcaaatcttcttccaatttggctagaaatgggcaagcgtctgctccaagaccaaaccagaaacagtatactgagcaagatatcattgaaagttactctaggaagttgttggagcaaaaaccagacattggtcctgagatggcccttaaggcggcaaaaaactattatagaaccttgagagaacaacagcaacagttgaagcagcaccagattcaacagcaaaggcagcagttacaggaggagtccagtcatgtgcagcaattgcagcaattacaaccagggtctcaagctccgccaccgaaatcttctccatctcaatcttctctttccaatatttctaacattaattctgctccaaggataaagtctccaactccacaggagattttacaaaggttccaaaaacaatga

SEQ ID NO: 2489 - DNA, 852 bp, Saccharomyces cerevisiae
atggttcaagctatcaaattaaatgatttaaaaaataggaagagaaaaaatgtggaggaagaaaatggcagtgacgagtctgaaattgacattagtagcaccgattcagaaaatgaagaagagcaaaatggagaagaagagatcgtaaatattgacttcgattttttcggtggtaacccagaagttgattttcatgctttaaagaatttactgcgtcagttatttggtcctcaagaaagtaccaggattcaactaagcagcttggcagatttgatcctaggttccccaaccaccacaattaaaacagacggcaaagaatctgatccatactgttttctttcattcgttgatttcaaagctaatcatctaagtgattatgtcaaatatttacaaaaagtggacatgagactttccactttcttcaaaactatgattgatagtggtaataaaaattgtgctttggttctcagtgaaaggctgattaatatgccaccggaagtcgttccacctttatacaagattacgttggaggatgttgccacggcacttggcgatgacaaacattatgacttctatatcatcgtcaccaggaagtatgaagtaaattttgacactgacgatgataccgactctggtaagaggaataaaaacaaagacgaaagatccaaaaaaagggtgaaggccgatgaagtagactactttcatgaggaggaccgattttttgaaaaatatgccaagattcacttcgaatcagaagctaaaaagggtgttatcagctcatacatgattcttgatcacgaaggccttgtcaaaagtatcgatgaattggaaacagaaatttccacttggtaa

SEQ ID NO: 2490 - DNA, 852 bp, Artificial Sequence
  Description of Artificial Sequence: Synthetic polynucleotide
atggttcaagctatcaaattaaatgatttaaaaaataggaagagaaaaaatgtggaggaagaaaatggcagtgacgagtctgaaattgacattagtagcaccgattctgaaaatgaagaagagcaaaatggagaagaagagatcgtaaatattgacttcgattttttcggtggtaacccagaagttgattttcatgctttaaagaatttattacgtcagttatttggtcctcaagaaagtaccaggattcaattgagcagcttggcagatttgatcttgggttccccaaccaccacaattaaaacagacggcaaagaatctgatccatactgttttctttctttcgttgatttcaaagctaatcatttgagtgattatgtcaaatatttacaaaaagtggacatgagactttccactttcttcaaaactatgattgatagtggtaataaaaattgtgctttggttctcagtgaaaggttgattaatatgccaccggaagtcgttccacctttatacaagattacgttggaggatgttgccacggcacttggcgatgacaaacattatgacttctatatcatcgtcaccaggaagtatgaagtaaattttgacactgacgatgataccgactctggtaagaggaataaaaacaaagacgaaagatccaaaaaaagggtgaaggccgatgaagtagactactttcatgaggaggacagattttttgaaaaatatgccaagattcacttcgaaagtgaagctaaaaagggtgttatcagctcttacatgattcttgatcacgaaggccttgtcaaaagtatcgatgaattggaaacagaaatttccacttggtga

SEQ ID NO: 2491 - DNA, 2019 bp, Saccharomyces cerevisiae
atggcagtaataccggcaaagaaaagaggaagacctagaaaatctgtggtagcagaagttccctatgatagcttggcaagcccagtatctgaaaactcaggcagtaaaaggccgaggagaaacgcatctaagaaagcagttgcaaatttcgcacaattagtgcatgctggtcgcgatgatgtgataaatactacacaagtcaataatgttgatgacaccgacgatgatgattttgtattgaatgatgaaggtgatggtgaggaaagtgacaatgttgagatagaatttgagaatgagttagagtctactaaaaatgaggtggcggatttaaacagtagtggaagtggagcttctgttagacccagtggaagaagaaatactgtacagaaacttcgtttgaagaagaattcgactaaaaatatgaagagcagctccccagggtcaagtctaggacagaagggccgtcccatcaggctcctaaaagatctttcgagtgcaagagacaagattgaaagaatttatggactgaataaggaaaagttattgttgctagcaaaagttaaggaaggctttgaaactagcgttttcgatttcccattcaagaatattcagcctgattctccatattttgtatgcttagatccaccgtgtaaaaaggaaagtgcatataataaagtcataggggataaaaacagaaccgtatatcatgaaattaataagactgaatttgagaatatgatcaaattgagaacgaagagattgaagttacttatcggggaagttgatgcagaggtatccactggcgataaaatagagtttccggtgcttgctaacggcaaaaggcgcggctttatttacaacgtaggaggattggtaacagatattgcatggcttaatatagaggaaaatactgatataggcaaggatatacaatatttagccgtcgcggtatcacagtacatggatgagcctttgaacgagcatttagaaatgtttgacaaggagaagcactcctcctgtatacaaattttcaaaatgaatacttctactctacattgcgtaaaagttcaaaccattgtacactcatttggtgaagtgtgggatcttaaatggcacgaaggatgtcacgcacctcatctggttggctgtttatcattcgtaagccaggaagggacaataaattttttggaaattattgataatgcaaccgatgttcacgtgtttaagatgtgtgagaagccttctttgactttatccctggcagacagtttgataactacttttgattttttatctcctactactgttgtttgtggctttaagaacggatttgtagcagagtttgacttgactgatcctgaagtgccttcattttatgaccaagtccatgactcctacatattatccgtttcaacagcctattcagattttgaagatacagtcgtcagtacagttgcggtggacggctacttttacattttcaatccaaaagacattgctacaacaaagaccacggtgtccagattcaggggaagtaatttggttccagttgtttattgtcctcaaatctactcgtatatttactcagatggtgcaagttccttaagggctgtgccgtctagggctgctttcgcagttcatcctttagtgtcgcgagagacgaccataacggccattggggtgtcaagattacatccaatggtccttgctggatcagcagatggaagtcttattataaccaacgcagctaggcgccttttgcatggcattaaaaacagttcagcaactcaaaagtcattaaggctttggaaatgggattatagcataaaagatgacaaatatagaattgatagttcttatgaagtgtatccgctgacggtcaacgatgttagtaaagctaaaatagatgcgcacggcattaatataacatgtacaaaatggaatgaaacgagcgctggaggcaaatgttatgcattttctaatagtgctggactattaacactcgaatacctgtcatga

SEQ ID NO: 2492 - DNA, 2019 bp, Artificial Sequence
  Description of Artificial Sequence: Synthetic polynucleotide
atggcagtaataccggcaaagaaaagaggaagacctagaaaatctgtggtagcagaagttccctatgatagcttggcaagcccagtatctgaaaacagtggcagtaaaaggccgaggagaaacgcatctaagaaagcagttgcaaatttcgcacaattagtgcatgctggtcgcgatgatgtgataaatactacacaagtcaataatgttgatgacaccgacgatgatgattttgtattgaatgatgaaggtgatggtgaggaaagtgacaatgttgagatagaatttgagaatgagttagagtctactaaaaatgaggtggcggatttaaacagtagtggaagtggagcttctgttagacccagtggaagaagaaatactgtacagaaacttcgtttgaagaagaattctactaaaaatatgaagagcagctccccagggagtagtttgggacagaagggccgtcccatcaggctcttgaaagatctttccagtgcaagagacaagattgaaagaatttatggattgaataaggaaaagttattgttgttggcaaaagttaaggaaggctttgaaactagcgttttcgatttcccattcaagaatattcagcctgattctccatattttgtatgcttagatccaccgtgtaaaaaggaaagtgcatataataaagtcataggggataaaaacagaaccgtatatcatgaaattaataagactgaatttgagaatatgatcaaattgagaacgaagagattgaagttacttatcggggaagttgatgcagaggtatccactggcgataaaatagagtttccggtgcttgctaacggcaaaaggcgcggctttatttacaacgtaggaggattggtaacagatattgcatggcttaatatagaggaaaatactgatataggcaaggatatacaatatttagccgtcgcggtatctcagtacatggatgagcctttgaacgagcatttagaaatgtttgacaaggagaagcactcctcctgtatacaaattttcaaaatgaatacttctactttacattgcgtaaaagttcaaaccattgtacacagttttggtgaagtgtgggatcttaaatggcacgaaggatgtcacgcacctcatttggttggctgtttatctttcgtaagccaggaagggacaataaattttttggaaattattgataatgcaaccgatgttcacgtgtttaagatgtgtgagaagccttctttgactttatccttggcagacagtttgataactacttttgattttttatctcctactactgttgtttgtggctttaagaacggatttgtagcagagtttgacttgactgatcctgaagtgccttctttttatgaccaagtccatgactcctacatattatccgtttctacagcctattctgattttgaagatacagtcgtcagtacagttgcggtggacggctacttttacattttcaatccaaaagacattgctacaacaaagaccacggtgtccagattcaggggaagtaatttggttccagttgtttattgtcctcaaatctactcctatatttactctgatggtgcaagttccttaagggctgtgccgtctagggctgctttcgcagttcatcctttagtgtccagagagacgaccataacggccattggggtgtccagattacatccaatggtccttgctggaagtgcagatggaagtcttattataaccaacgcagctaggcgccttttgcatggcattaaaaacagttctgcaactcaaaagtctttaaggctttggaaatgggattatagcataaaagatgacaaatatagaattgatagttcttatgaagtgtatccgttaacggtcaacgatgttagtaaagctaaaatagatgcgcacggcattaatataacatgtacaaaatggaatgaaacgagcgctggaggcaaatgttatgcattttctaatagtgctggattattaacactcgaatacctttcttga

SEQ ID NO: 2493 - DNA, 1371 bp, Saccharomyces cerevisiae
atgaccggtgattccagaagcatcagcgaaccctcaattaatctagatccagataatacaagtttttctgatgaaaacagcgatgacttctttatggacaattcctatgatatagatgaaatcgatcatagcgatgaaagtaataggcaaagtgtcatagttgactctaaagtcacggtaccgccatcaaagcattcaactctaacattatctgatagtgaagatagcgacgcaaaggaacaacatcagtccctgagcagatcatctagtaaaaatgtaaatatagaagatattacggagcccaagccagacaaaccatcgggtcgaactagaggaagatctgtgatgaaagagtctgtagttgaaataaactcatctgaatctgacttagacgaagacaaaaattttcccagatctaggtcaaggtccaggtcaagcataagatcaatatctccagcgggaaaatacaagcgacagaaaagttcattactgtatacctatgatgaaaacgatgactttttcaaggaacttgctaaagaagccaaaaaaagcaccactatttctaaagaatcgacacccgaccagcggaagcgagtttataacatcaaatttctctctaagctagaaggaactataaataaagcggtccaagtgaaggtcctcggaaaatacgaattttcaaaaatacttcctgctgctttggacggattgatgaagtcctataaaattccgaaggtaatgaaagatatatacaaggtagagaatgttactctttattggaacaatgcaaaattactcacttttatgacttgtaattcgctacatatcccacaggattttgaaaatgaagtctctgatatcgatgttactatcgtatccaaagaatacgaaaagaactttgaagcgacactggaatcaaagttaaaggaagaagaagctgctttactcataaaagaacgtcaggagatggaaaggaagttagagaaaaagagaaatgaacaagaagagtccgaatatcgcgagtttgaatccgaattaaaaaacgtagaagaaacacaagaaataaaagaaaatgatacagttatgaatacaaaacttctgcaagagggtggctctttgtcaggaaatagtagtagcatggaagaagttatgagaatcgctctcatgggtcaagataacaaaaaaatctatgtccatgttaggcgttcaacaccattttctaaaattgccgaatattacagaatccagaaacagttaccacaaaagacgagggttaaattactttttgatcatgatgaattggacatgaatgagtgtatagccgatcaggatatggaagatgaagacatggttgatgtcattattgattga

SEQ ID NO: 2494 - DNA, 1371 bp, Artificial Sequence
  Description of Artificial Sequence: Synthetic polynucleotide
atgaccggtgattccagaagcatcagcgaaccctctattaatttggatccagataatacaagtttttctgatgaaaacagcgatgacttctttatggacaattcctatgatatagatgaaatcgatcatagcgatgaaagtaataggcaaagtgtcatagttgactctaaagtcacggtaccgccatctaagcattctactttgacattatctgatagtgaagatagcgacgcaaaggaacaacatcagtccttaagcagatcttctagtaaaaatgtaaatatagaagatattacggagcccaagccagacaaaccatctggtagaactagaggaagatctgtgatgaaagagtctgtagttgaaataaactcttctgaatctgacttagacgaagacaaaaattttcccagatctaggagtaggtccaggagcagcataagaagtatatctccagcgggaaaatacaagagacagaaaagttctttattatatacctatgatgaaaacgatgactttttcaaggaacttgctaaagaagccaaaaaaagcaccactatttctaaagaatctacacccgaccagagaaagagagtttataacatcaaatttctctctaagttggaaggaactataaataaagcggtccaagtgaaggtcctcggaaaatacgaattttccaaaatacttcctgctgctttggacggattgatgaagtcctataaaattccgaaggtaatgaaagatatatacaaggtagagaatgttactctttattggaacaatgcaaaattactcacttttatgacttgtaattctttgcatatcccacaggattttgaaaatgaagtctctgatatcgatgttactatcgtatccaaagaatacgaaaagaactttgaagcgacattagaatccaagttaaaggaagaagaagctgctttactcataaaagaacgtcaggagatggaaaggaagttagagaaaaagagaaatgaacaagaagagtccgaatatcgcgagtttgaatccgaattaaaaaacgtagaagaaacacaagaaataaaagaaaatgatacagttatgaatacaaaacttttacaagagggtggctctttgagtggaaatagtagtagcatggaagaagttatgagaatcgctctcatgggtcaagataacaaaaaaatctatgtccatgttaggcgttccacaccattttctaaaattgccgaatattacagaatccagaaacagttaccacaaaagacgagggttaaattactttttgatcatgatgaattggacatgaatgagtgtatagccgatcaggatatggaagatgaagacatggttgatgtcattattgattga

SEQ ID NO: 2495 - DNA, 270 bp, Saccharomyces cerevisiae
atgagtacggacgttgctgctgcacaagcccaaagtaaaatagatttaacaaaaaaaaaaaatgaggaaataaataagaagtctctagaggaagacgatgaatttgaagatttccccattgacacatgggccaatggtgaaacaataaaaagcaatgctgtaacgcaaacaaacatatgggaagaaaactgggatgatgttgaagttgacgacgatttcaccaatgaattgaaggccgaattggatagatacaaacgggaaaatcagtga

SEQ ID NO: 2496 - DNA, 270 bp, Artificial Sequence
  Description of Artificial Sequence: Synthetic polynucleotide
atgagtacggacgttgctgctgcacaagcccaaagtaaaatagatttaacaaaaaaaaaaaatgaggaaataaataagaagtctttggaggaagacgatgaatttgaagatttccccattgacacatgggccaatggtgaaacaataaaaagcaatgctgtaacgcaaacaaacatatgggaagaaaactgggatgatgttgaagttgacgacgatttcaccaatgaattgaaggccgaattggatagatacaaaagagaaaatcagtga

SEQ ID NO: 2497 - DNA, 1368 bp, Saccharomyces cerevisiae
atgggtttagtagacggttatgacacaagctcagactctgatttgaacttcgacgaaggcaaatctgttcatgaaaagaaaaatggtaatttgcatgaagatacttcgtatgaaccttcttcaaataatattcataagagaaaatcacattttacaaagtcagaactaaaaagaagacggaaaactcgcaaaggagatgggccgtggggcagttggtcaagtagtgacgatgaaacttcacaagccagcgaaactcagaaagaagatcaggatatcttcgtgcacgcgctggctgaggacaacctagattcggaacagatagaggtagaggaagtctcccatttttatggtaaatcagaaaaggactatcaaggcagaggatatttatatccaccaaatgacgtcgatgttgatcttcgtgaggaaaggatatcctttcggtgttacttaccaaaaaaagttatacgtaattatccggggcatccagaaggaaccactgccctgaaattcttacctaaaactggacacttaattctctctggtggtaatgatcatactataaaaatttgggatttctaccatgactatgaatgcctacgagattttcaaggtcataacaagcctattaaagcattacgattcaccgaagactgtcaatcttttttgagctcttcctttgatagaagcgttaaaatttgggatactgaaactggtaaagtgaaaaccaggttgcaccttaattcaacgcctgcagatgttgaatctcggcccactaacccacatgagttcattgtaggtttatcgaattcgaaaatattacattatgatgatcgtgtttcagaaaatcaaggtcttgtgcagacatatgatcatcacctaagtagcattctggctctcaagtattttcccgatggttcgaagtttatttcttcttcagaggataagacggtaagaatttgggaaaatcagatcaatgtaccaataaaacaaataagtgacacggctcaacattctatgccatttttaaatgtacatccgtctcagaactatttctgtgcacaaagcatggataatagaatatattctttcagtttgaaacccaaatataagaggcatccaaaaaagatatttaaagggcattcatctgctggttatgggataagcttggctttttctggtgatggtcgttacatatgttcaggcgattcaaaaagcagactatttacttgggattggaatacgtcgcgcttattaaataacatcaagattccaggcaacaagcctataactcaagtggactggcatcctcaagaaacaagtaaagtcatttgcagcggagcggcaggtaagatatatgtatgtgactag

SEQ ID NO: 2498 - DNA, 1368 bp, Artificial Sequence
  Description of Artificial Sequence: Synthetic polynucleotide
atgggtttagtagacggttatgacacaagcagtgactctgatttgaacttcgacgaaggcaaatctgttcatgaaaagaaaaatggtaatttgcatgaagatacttcttatgaaccttcttccaataatattcataagagaaaatctcattttacaaagtctgaattgaaaagaagaagaaaaactcgcaaaggagatgggccgtggggcagttggtctagtagtgacgatgaaacttctcaagccagcgaaactcagaaagaagatcaggatatcttcgtgcacgcgttagctgaggacaaccttgattctgaacagatagaggtagaggaagtctcccatttttatggtaaaagtgaaaaggactatcaaggcagaggatatttatatccaccaaatgacgtcgatgttgatcttcgtgaggaaaggatatcctttagatgttacttaccaaaaaaagttatacgtaattatccggggcatccagaaggaaccactgccttgaaattcttacctaaaactggacacttaattctctctggtggtaatgatcatactataaaaatttgggatttctaccatgactatgaatgccttagagattttcaaggtcataacaagcctattaaagcattaagattcaccgaagactgtcaatcttttttgagctcttcctttgatagaagcgttaaaatttgggatactgaaactggtaaagtgaaaaccaggttgcaccttaattctacgcctgcagatgttgaatctagacccactaacccacatgagttcattgtaggtttatccaattctaaaatattacattatgatgatcgtgtttctgaaaatcaaggtcttgtgcagacatatgatcatcacttaagtagcattttggctctcaagtattttcccgatggttccaagtttatttcttcttctgaggataagacggtaagaatttgggaaaatcagatcaatgtaccaataaaacaaataagtgacacggctcaacattctatgccatttttaaatgtacatccgtctcagaactatttctgtgcacaaagcatggataatagaatatattctttcagtttgaaacccaaatataagaggcatccaaaaaagatatttaaagggcattcttctgctggttatgggataagcttggctttttctggtgatggtcgttacatatgttctggcgattctaaaagcagattatttacttgggattggaatacgtcccgcttattaaataacatcaagattccaggcaacaagcctataactcaagtggactggcatcctcaagaaacaagtaaagtcatttgcagcggagcggcaggtaagatatatgtatgtgactga

SEQ ID NO: 2499 - DNA, 1887 bp, Saccharomyces cerevisiae
atggctggagagaacccaaagaaggaaggtgtagatgctaggtttgccgggatctacagcgatcctaaatttaagaacacgaaaaccaaagatcataagatcaagttagattctaggttcagtaagaaggatctggaggtccagcataaatctaaggttgacaagtatggtagaaagatcaaaaatgcgcagaataacagggaattggaagatttcgacaaatatttcgaaaaggaagcagaaaatgatgaagattcagaagttaatgcgaaaacagtagtggaccgtgcccgtggtgaagttcctgatgattatgttagctcttctgatgaattcacttcttctgattctgaatcgtccggagaaagtgaagttgaaagcgaagaagaaaatgaagtagaaattgaaaatgccaaaccagaatctggtgacatctctaagaatttggccgtcgtaaatttagattgggaccatgttaaatctgaggatttgatgattaccttttccagtttcgttcctaaaggtggtaaaattgaaagagttgctatttatccaagtgaatttggtaaagaaagaatgcaacgcgaggaagttgaaggacctccaaaggaacttttccaaaagaaaaataagaacaaaacctccaaaaagaagaaaactgatgactctgattctgatatggacatcggtattaaggatctttatgaagagggagatgctgacaaggacgtggattccagagctttacgtcaataccagttggacagattaagatattattacgcaatagtttattgtagtgatacaaccacctccaaagctatctatgataactgtgatggtaccgaatatgagtcaaccgctaatatgttcgatttaaggtatgttcctgatggtatgacttttgatgatgatgtaagagatgaatgcagtatattgcctaagaactataggccacaccagtttagcacagatgctctacaacattcaagcgtcaaattgacctgggatgaaacgccagctgatagggtcgaagttgctaagagggcctttacccaaaaggaaattgatgatatggactttaaggcttacttggcgtcagatagtgatgaatcggatgggcaggtcgatgaagaggcgaaaaataaactaaagtcgttggttggtgactttgggtttaattccaagaaagaaacccctaacgatgaagatgaagaagttgatatggaaattacatttactccagccttggaaggaggaaacgagaaatcgtcggaagacaaagaagaaacgactatagagaaaataagaagaaaagagaaggaacgtcgtaaagcaagaaagcagaaagtaaaggaattgaaacagcagtcggagaaggataagaaaagcaagttgaaatctgttaataaaaagcatactaacgatgaagaggagatcgaaaagaatgccaaatcaaaggctgaattggagcttttaatggatgatgatgatgataccgaaactcagggcacaataaataacaaagcacatttcaacatgaacgaaatcttaagatcagaaaaagaaaaacacaagaaaggccggtatcaaaagaaagagagaattgttgaagacacctttacacctgatttagaagatcctagatttaaagaagtcttcgaagatcacgattttgctatcgacccgacccagcctgaattcaaaggtacacaagctatgagtaaaatcctaaaagaacgtagtaaacgtgttaagaataagaaaagaaaacttggcggtagtgaaaacaatatgaccaataacgcagatgataatgaagatattggtaacttggtaaacaagttgaaaaagaaaagcaaatcatccaagaaggtaaaggtttaa

SEQ ID NO: 2500 - DNA, 1887 bp, Artificial Sequence
  Description of Artificial Sequence: Synthetic polynucleotide
atggctggagagaacccaaagaaggaaggtgtagatgctaggtttgccgggatctacagcgatcctaaatttaagaacacgaaaaccaaagatcataagatcaagttagattctaggttcagtaagaaggatttagaggtccagcataaatctaaggttgacaagtatggtagaaagatcaaaaatgcgcagaataacagggaattggaagatttcgacaaatatttcgaaaaggaagcagaaaatgatgaagattctgaagttaatgcgaaaacagtagtggaccgtgcccgtggtgaagttcctgatgattatgttagctcttctgatgaattcacttcttctgattctgaatcttccggagaaagtgaagttgaaagcgaagaagaaaatgaagtagaaattgaaaatgccaaaccagaatctggtgacatctctaagaatttggccgtcgtaaatttagattgggaccatgttaaatctgaggatttgatgattaccttttccagtttcgttcctaaaggtggtaaaattgaaagagttgctatttatccaagtgaatttggtaaagaaagaatgcaacgcgaggaagttgaaggacctccaaaggaacttttccaaaagaaaaataagaacaaaacctccaaaaagaagaaaactgatgactctgattctgatatggacatcggtattaaggatctttatgaagagggagatgctgacaaggacgtggattccagagctttacgtcaataccagttggacagattaagatattattacgcaatagtttattgtagtgatacaaccacctccaaagctatctatgataactgtgatggtaccgaatatgagtctaccgctaatatgttcgatttaaggtatgttcctgatggtatgacttttgatgatgatgtaagagatgaatgcagtatattgcctaagaactataggccacaccagtttagcacagatgctttacaacattctagcgtcaaattgacctgggatgaaacgccagctgatagggtcgaagttgctaagagggcctttacccaaaaggaaattgatgatatggactttaaggcttacttggcgtctgatagtgatgaaagtgatgggcaggtcgatgaagaggcgaaaaataaattgaagtctttggttggtgactttgggtttaattccaagaaagaaacccctaacgatgaagatgaagaagttgatatggaaattacatttactccagccttggaaggaggaaacgagaaaagctctgaagacaaagaagaaacgactatagagaaaataagaagaaaagagaaggaacgtcgtaaagcaagaaagcagaaagtaaaggaattgaaacagcagtctgagaaggataagaaaagcaagttgaaatctgttaataaaaagcatactaacgatgaagaggagatcgaaaagaatgccaaatccaaggctgaattggagcttttaatggatgatgatgatgataccgaaactcagggcacaataaataacaaagcacatttcaacatgaacgaaatcttaagaagtgaaaaagaaaaacacaagaaaggcagatatcaaaagaaagagagaattgttgaagacacctttacacctgatttagaagatcctagatttaaagaagtcttcgaagatcacgattttgctatcgacccgacccagcctgaattcaaaggtacacaagctatgagtaaaatcttgaaagaacgtagtaaacgtgttaagaataagaaaagaaaacttggcggtagtgaaaacaatatgaccaataacgcagatgataatgaagatattggtaacttggtaaacaagttgaaaaagaaaagcaaatcttccaagaaggtaaaggtttga

SEQ ID NO: 2501 - DNA, 399 bp, Saccharomyces cerevisiae
atggttacaattggtagttcctccctggtattatttcttttcttcgtagtttttgtacagatcacttatacagctttacacagattttcccgcttgttgtgcacttttttttcgaagattattgaagagggatgcgtttggtacaataaaaaacataggttcccaaacctatataaatatatatatgtatatgtatatatactacatatatgctttgagaaatatgtgaatgttgagataattgttgggattccattgttgataaaggctataatattaggtatacagaatatactagaagttctcctcaaggatttaggaatccataaaagggaatctgcaattctacacaattctataaatattattatcatcattttatatgtttatattcattga

SEQ ID NO: 2502 - DNA, 399 bp, Artificial Sequence
  Description of Artificial Sequence: Synthetic polynucleotide
atggttacaattggtagttcctccttagtattatttcttttcttcgtagtttttgtacagatcacttatacagctttacacagattttcccgcttgttgtgcacttttttttccaagattattgaagagggatgcgtttggtacaataaaaaacataggttcccaaacttatataaatatatatatgtatatgtatatatattacatatatgctttgagaaatatgtgaatgttgagataattgttgggattccattgttgataaaggctataatattaggtatacagaatatattggaagttctcctcaaggatttaggaatccataaaagggaatctgcaattttacacaattctataaatattattatcatcattttatatgtttatattcattga

SEQ ID NO: 2503 - DNA, 666 bp, Saccharomyces cerevisiae
atgagatcatctcttctaacccttccaaaatcttttttggggtttatgccgctataccttgcagttgagattgtcttaggtatttccattctaaacaaatgcagtggtgcttatggtattttagcattgttcacgggtcatccgttggattttatgcaatggatagcatatctttggtcggtatttacattaatcgtattctcacaagggctgtatttgattcataagccaaacttgctggtattttcgcaaatctgcgtactttatacaatcgataccatttccacttgtttttttactctatggtttaccacgcaatggttcaccttggaagacactgctaatattgatggaaataatgcactacaaagtaacccaatatcgacaggtaagctgacagaacgtggtattgatataagtaaacaaagtgcaactgaaagctacgaatataccatgactattttaattacgttggtgtcattgatattcaggttctactttaacttcattttggcatcttttgttcaagaattgttacaccaccccaaatatttagttgatagggatgacgtagaacaaaacttgaaaaacaagcctatttggaaaagactgtgggctaagagccaaaaaggttgttataagctatgtaagaatttgttagagtaa

SEQ ID NO: 2504 - DNA, 666 bp, Artificial Sequence
  Description of Artificial Sequence: Synthetic polynucleotide
atgagatcttctcttttaacccttccaaaatcttttttggggtttatgccgttgtaccttgcagttgagattgtcttaggtatttccattttgaacaaatgcagtggtgcttatggtattttagcattgttcacgggtcatccgttggattttatgcaatggatagcatatctttggtctgtatttacattaatcgtattctctcaagggttatatttgattcataagccaaacttgttagtattttctcaaatctgcgtactttatacaatcgataccatttccacttgtttttttactttatggtttaccacgcaatggttcaccttggaagacactgctaatattgatggaaataatgcattacaaagtaacccaatatctacaggtaagttaacagaacgtggtattgatataagtaaacaaagtgcaactgaaagctacgaatataccatgactattttaattacgttggtgtctttgatattcaggttctactttaacttcattttggcatcttttgttcaagaattgttacaccaccccaaatatttagttgatagggatgacgtagaacaaaacttgaaaaacaagcctatttggaaaagattatgggctaagagccaaaaaggttgttataagttatgtaagaatttgttagagtga

SEQ ID NO: 2505 - DNA, 939 bp, Saccharomyces cerevisiae
atgcctgctacgttaaagaattcttctgctacattaaaactaaatactggtgcctccattccagtgttgggtttcggcacttggcgttccgttgacaataacggttaccattctgtaattgcagctttgaaagctggatacagacacattgatgctgcggctatctatttgaatgaagaagaagttggcagggctattaaagattccggagtccctcgtgaggaaatttttattactactaagctttggggtacggaacaacgtgatccggaagctgctctaaacaagtctttgaaaagactaggcttggattatgttgacctatatctgatgcattggccagtgcctttgaaaaccgacagagttactgatggtaacgttctgtgcattccaacattagaagatggcactgttgacatcgatactaaggaatggaattttatcaagacgtgggagttgatgcaagagttgccaaagacgggcaaaactaaagccgttggtgtctctaatttttctattaacaacattaaagaattattagaatctccaaataacaaggtggtaccagctactaatcaaattgaaattcatccattgctaccacaagacgaattgattgccttttgtaaggaaaagggtattgttgttgaagcctactcaccatttgggagtgctaatgctcctttactaaaagagcaagcaattattgatatggctaaaaagcacggcgttgagccagcacagcttattatcagttggagtattcaaagaggctacgttgttctggccaaatcggttaatcctgaaagaattgtatccaattttaagattttcactctgcctgaggatgatttcaagactattagtaacctatccaaagtgcatggtacaaagagagtcgttgatatgaagtggggatccttcccaattttccaatga

SEQ ID NO: 2506 - DNA, 939 bp, Artificial Sequence
  Description of Artificial Sequence: Synthetic polynucleotide
atgcctgctacgttaaagaattcttctgctacattaaaattgaatactggtgcctccattccagtgttgggtttcggcacttggcgttccgttgacaataacggttaccattctgtaattgcagctttgaaagctggatacagacacattgatgctgcggctatctatttgaatgaagaagaagttggcagggctattaaagattccggagtccctcgtgaggaaatttttattactactaagctttggggtacggaacaacgtgatccggaagctgctttgaacaagtctttgaaaagattgggcttggattatgttgacctttatttaatgcattggccagtgcctttgaaaaccgacagagttactgatggtaacgttttgtgcattccaacattagaagatggcactgttgacatcgatactaaggaatggaattttatcaagacgtgggagttgatgcaagagttgccaaagacgggcaaaactaaagccgttggtgtctctaatttttctattaacaacattaaagaattattagaatctccaaataacaaggtggtaccagctactaatcaaattgaaattcatccattgttaccacaagacgaattgattgccttttgtaaggaaaagggtattgttgttgaagcctactctccatttgggagtgctaatgctcctttattgaaagagcaagcaattattgatatggctaaaaagcacggcgttgagccagcacagcttattatcagttggagtattcaaagaggctacgttgttttggccaaatctgttaatcctgaaagaattgtatccaattttaagattttcactttacctgaggatgatttcaagactattagtaacctttccaaagtgcatggtacaaagagagtcgttgatatgaagtggggatccttcccaattttccaatga

SEQ ID NO: 2507 - DNA, 2565 bp, Saccharomyces cerevisiae
atgtgggtagtacgataccagaatacattggaagatggctctattagctttatatcatgttgtcttcaggccttcaaaacttatagtataggtagatcaagtaaaaacccactgataattaaaaatgataaaagtatttccagacagcatatcacattcaaatgggaaatcaataatagttcggatctgaaacacagtagcctgtgtttagttaacaagggtaaattgacatcattaaataaaaaattcatgaaagttggcgaaacatttactattaatgcctcggacgttttaaagtccacaataattgaactgggtacaactcctattcgtatagagttcgaatggataaatgaagtctggaacattcctcctcatttgacacaattcaggacgatgctttctgaatatggtatctccactgagatttctattaatgatattcccgctaatctgatgattagcgattacccaaagagcgaggacaacagcatacgggaattgtatgcccttgttagtactatacccatgaaaaaatcacggtttctgatggaattgtgtaatactcttcttcccacatctaaaactaatttaaaatttgatgaaatgtggaacgatatgattagtaatccggagtacaatgtttttgattttgatccaaatattttgctttcgaagtttatgaggctgaataatatcagagtgttaactactatcaaaagtgaaccacgtctatcatctctcctgcggacgttcaatataaatttatttgcatttgacaacattgatagtttatataaatatgttgacagcttggaagcatcaacagaatacctgattttgacaactacagataagaaagaaaatgggaaaattctatgtactatcaaaacgatgttaacatcaataatagatggcaccttaagcgcagtgattaatatgaagggtgcatcttcaagaactctagataacggtaaatttgatcaaatttctgaaggaatgtctactattttgaaaacatctcgtgcacctgaagttgaagctagtccagtagtctcgaagaagcgaaaattaaatagacgtagagtactaccactcgatagtcttgatttttttgctggaggtttgagtactaagactctatcagaaaataggtctttaactgacgctaagagacttaattgtggcgcagaatcaaagactgtcatttcaagtcccaacattgcagaggcagatgaaaagcacgccccatttcttcaaaacgcactaaagccgactgaagatattggaaagaaaagtggtcacagtagccctggtgctataattgtcagtagccccaacttaggtactgtgaacacgagtgaggattcgttggataagtcgctacagtcacataagttaccacagccgtcattgccggaggtagcagggattggctctcaaaccatatcttcgaactccgctgactatgaaacagctgctgtgaattcgatggatgatgctgaagttactaagaattttagggtgaatcatcaccagaatatagagcaaccctctaaaaacatccgtaaactttctaattattcacgagaaatttcatctccattacaagaaaattgtaagtcacctgtaaaagagttatctattaaagagaaatctggtacgccgcacgcatttgttgaagctattcaagaaactaaaaatagagaggtcaaaagagttaagtcaaccattgttgaattgaaggatgaggagttgagcgaggaagctattaatcagctaaaaaatttggctattgtagaacctagtaacaatttactgaggaaatcatttgatagtgagggaaacaaaacaagcagaacaactgaaaaatgggaaaatagcctaatggagccagaatggcataaacgcaagaatttcaagacttttgtcaaggtacgtccaaaatcaaaggcgcacaaagaagagggtaaaaataacactcaaagctcagattttatacgaaatgcagcctttttaatcactagaaattatgttccgttaaaaaaatactccaaaaaggatacaactacaaaatggggcacagaagaaaacgaagatatgtttgctttgacggagatggaaagatttggatcgaatacatttatgtccgataatataaactcaaacactatccagaaaagatctcaagctctaaacagattcacgaatgaggatagttcaaatgaaggagaagaagattcgttttctttttctcgttgttcaggtactgcagccagcgttcaaccactaaaaaacaaaatttttattactgatgaagatgatctgggtgatattgatgataaaagcgatagactaaatcacagagaaaataatcgtaatctttttgtggtgaaggaaatgaacttacggccaaacttgtcagaagaatgttccaagcaaagtagacacagtagaagcgcaactagtagatcacgtggctcttttggggcttctaataacggtgatggcgacgacgacgatgacgacggtccgaagtttacgttcaaaagaagaaaaggataa

SEQ ID NO: 2508 - DNA, 2565 bp, Artificial Sequence
  Description of Artificial Sequence: Synthetic polynucleotide
atgtgggtagtacgttaccagaatacattggaagatggctctattagctttatatcttgttgtcttcaggccttcaaaacttatagtataggtagaagtagtaaaaacccattgataattaaaaatgataaaagtatttccagacagcatatcacattcaaatgggaaatcaataatagttctgatttgaaacacagtagcttatgtttagttaacaagggtaaattgacaagtttaaataaaaaattcatgaaagttggcgaaacatttactattaatgccagtgacgttttaaagtccacaataattgaattgggtacaactcctattcgtatagagttcgaatggataaatgaagtctggaacattcctcctcatttgacacaattcaggacgatgctttctgaatatggtatctccactgagatttctattaatgatattcccgctaatttaatgattagcgattacccaaagagcgaggacaacagcataagagaattgtatgcccttgttagtactatacccatgaaaaaaagcagatttttgatggaattgtgtaatactcttcttcccacatctaaaactaatttaaaatttgatgaaatgtggaacgatatgattagtaatccggagtacaatgtttttgattttgatccaaatattttgctttccaagtttatgaggttgaataatatcagagtgttaactactatcaaaagtgaaccacgtttatcttctctcttgagaacgttcaatataaatttatttgcatttgacaacattgatagtttatataaatatgttgacagcttggaagcaagcacagaatacttgattttgacaactacagataagaaagaaaatgggaaaattctttgtactatcaaaacgatgttaacatctataatagatggcaccttaagcgcagtgattaatatgaagggtgcatcttctagaactttagataacggtaaatttgatcaaatttctgaaggaatgtctactattttgaaaacatctcgtgcacctgaagttgaagctagtccagtagtctccaagaagagaaaattaaatagacgtagagtattgccactcgatagtcttgatttttttgctggaggtttgagtactaagactttatctgaaaataggtctttaactgacgctaagagacttaattgtggcgcagaatccaagactgtcatttccagtcccaacattgcagaggcagatgaaaagcacgccccatttcttcaaaacgcattgaagccgactgaagatattggaaagaaaagtggtcacagtagccctggtgctataattgtcagtagccccaacttaggtactgtgaacacgagtgaggattctttggataagtctttgcagtctcataagttaccacagccgtctttgccggaggtagcagggattggctctcaaaccatatcttccaactccgctgactatgaaacagctgctgtgaattctatggatgatgctgaagttactaagaattttagggtgaatcatcaccagaatatagagcaaccctctaaaaacatccgtaaactttctaattattctagagaaatttcttctccattacaagaaaattgtaagtctcctgtaaaagagttatctattaaagagaaatctggtacgccgcacgcatttgttgaagctattcaagaaactaaaaatagagaggtcaaaagagttaagtctaccattgttgaattgaaggatgaggagttgagcgaggaagctattaatcagttgaaaaatttggctattgtagaacctagtaacaatttattgaggaaaagttttgatagtgagggaaacaaaacaagcagaacaactgaaaaatgggaaaatagcttgatggagccagaatggcataaacgcaagaatttcaagacttttgtcaaggtacgtccaaaatccaaggcgcacaaagaagagggtaaaaataacactcaaagcagtgattttataagaaatgcagcctttttaatcactagaaattatgttccgttaaaaaaatactccaaaaaggatacaactacaaaatggggcacagaagaaaacgaagatatgtttgctttgacggagatggaaagatttggaagtaatacatttatgtccgataatataaactccaacactatccagaaaagatctcaagctttgaacagattcacgaatgaggatagtagtaatgaaggagaagaagattctttttctttttctcgttgttctggtactgcagccagcgttcaaccattgaaaaacaaaatttttattactgatgaagatgatttaggtgatattgatgataaaagcgatagattgaatcacagagaaaataatcgtaatctttttgtggtgaaggaaatgaacttaagaccaaacttgagtgaagaatgttccaagcaaagtagacacagtagaagcgcaactagtagatctcgtggctcttttggggcttctaataacggtgatggcgacgacgacgatgacgacggtccgaagtttacgttcaaaagaagaaaaggatga

SEQ ID NO: 2509 - DNA, 1329 bp, Saccharomyces cerevisiae
atgtcaactgaacaagatgctgttcttggattggccaaagatttagaaggtataaatttgcttactgtgcccaatctcgagagaggacaccaaagtaaattatgcaaagagaaaactacttctgattcatcttcgtcaaggaagccttcacaacagagagacaattatagaaagagacgtccgaaacttatatgtatcccatatacgtcttttctgcatactggtatgcacaattttttgacgaaaccaccaagagatatatttcatgaaagtaaagaagtagctctgtttaccaatggccgggcttatacaatcctacgcaaagaccttataccaaatttgaaagaaagtattgctgaattgtatgaaagctcgcttcttgaggcaaaaaagcggaaagtcccgtatttaggccatgacttatttgctaatattgatgagttcgttcccatgacaatatccgaattagatagtgtatcaccgtgtttttcatacattgagaactggatactagataatcctggtaaggattttaagatcggcaagaaatttactgttgtaaccacaagacatcatatcgtagatttgactatgcatctctttaacaggcgaaatagacaaacgtcactaattgtaacttatatgggggcgggccttctttcattttgcagaaatgtaaaaaaagattctcaaatgtccaaagagggcatttattcaaatgatccaaatatgaagaaaatttgctattcaggatttgaatttgaaaattgggtaaccgaaaattccaaagtcgctgatttaactggctctaaatgtcctattttttctcttgtagagagtaaactttcagaagaaattggtcttttaattcgctgcgaaatggatgcattcaatcctgtttcggagacaaacacagaactaaagtgttttgccccattatcaatgcacaattccaatcataggagaaaacttctgaaaacgtgggtacagacgggtttattaccgaactcagatatcatgataggtttgagggacagtcatagcggtcaattactagacattcaatggtactcaagggacttattatgtaagaaattcaatcacccaggtctacctacaaataaaaaggaacttaactataatgcccaaattgcggtagaatggtgtcattattgtattgaagcaatttgtaagctggtggaggcaaatatctctgactatagcagtacaaaaccagaatcatttgaaatcggtatagatactaacaacgccatcgtcatcactaaacttaagactactccaagaaacgtagaattatttggaatgtag

SEQ ID NO: 2510 - DNA, 1329 bp, Artificial Sequence
  Description of Artificial Sequence: Synthetic polynucleotide
atgtctactgaacaagatgctgttcttggattggccaaagatttagaaggtataaatttgcttactgtgcccaatctcgagagaggacaccaaagtaaattatgcaaagagaaaactacttctgattcttcttcttccaggaagccttctcaacagagagacaattatagaaagagacgtccgaaacttatatgtatcccatatacgtcttttttacatactggtatgcacaattttttgacgaaaccaccaagagatatatttcatgaaagtaaagaagtagctttgtttaccaatggcagagcttatacaatcttacgcaaagaccttataccaaatttgaaagaaagtattgctgaattgtatgaaagctctcttcttgaggcaaaaaagagaaaagtcccgtatttaggccatgacttatttgctaatattgatgagttcgttcccatgacaatatccgaattagatagtgtatccccgtgtttttcttacattgagaactggatattggataatcctggtaaggattttaagatcggcaagaaatttactgttgtaaccacaagacatcatatcgtagatttgactatgcatctctttaacaggagaaatagacaaacgtctttgattgtaacttatatgggggcgggccttctttctttttgcagaaatgtaaaaaaagattctcaaatgtccaaagagggcatttattctaatgatccaaatatgaagaaaatttgctattctggatttgaatttgaaaattgggtaaccgaaaattccaaagtcgctgatttaactggctctaaatgtcctattttttctcttgtagagagtaaactttctgaagaaattggtcttttaattcgctgcgaaatggatgcattcaatcctgtttctgagacaaacacagaattgaagtgttttgccccattatctatgcacaattccaatcataggagaaaacttttgaaaacgtgggtacagacgggtttattaccgaacagtgatatcatgataggtttgagggacagtcatagcggtcaattattagacattcaatggtactctagggacttattatgtaagaaattcaatcacccaggtttgcctacaaataaaaaggaacttaactataatgcccaaattgcggtagaatggtgtcattattgtattgaagcaatttgtaagttagtggaggcaaatatctctgactatagcagtacaaaaccagaaagttttgaaatcggtatagatactaacaacgccatcgtcatcactaaacttaagactactccaagaaacgtagaattatttggaatgtga

SEQ ID NO: 2511 - DNA, 1536 bp, Saccharomyces cerevisiae
atggtaggacactcagctcagcacagatcaaaaagcagcttagtgtctcacctactaatactacttatctttataacgattattattgaaatgtgtttatataataaaatttttaagaaccaaaggtcggatgatattagagacaactttaacaatggcggacatcgagttcccagtaatgtccaaaatcatggaacccatataagagacgaagcctttatatcaggggtctattattccaattggtccccatacaaaccgaggtttcatttccctcacgacataaacttgaagcaagtgtctcacatttactatgcatttttcaaaataaactctagaactggtggtatagaaaacacggatagttggtctgatctagaaatgaatttgtataaatcgctggcaattaaaaattcagaactaattaaagaaagctcgaacaatagtgtccaaaacatcctacccttaggttgcattggtgaactattttatttgaagaatacctgttctgataagaaatttaaagttatcatgtcaattgggggctggtctgatagtgaaaatttcaaaatcataattaaagatgataaactcttacaaaattttgttgattcgtcggtggaaacaatgttcagattaggatttgatggcattgatctagactgggagttccctggtaacaatgaatcagaacctcgcggatatctgaaactggtcagaatgctgcgattaaaactaaacagcctcgaatcccaaatatttgggaaacgtactgaagatcattttcaattatctattgcggcacctgcattcaaggataaattattttacttgccaatcacagaaattgatcaatatgttgactactggaatatgatgacgtacgattattatggctcgtggtcagaaacaacaggatatcacagcaatctattcagtgagacggaattgaatggaaactttgccatgcattatatgatcgatagatttggcgtcaattctagaaaattagtactgggaatggccgcctacggaagaagtttccatatcaaagataacaaattcgaaccattcaatcaaaatactgtattaattaacaaaattttcaaaggagtgggcaagcccactaaagaaatagataaagctgatggcaaggagggcatctggccttacaaaaatttaccaaagattggtacaatagaacaatacgatccaaaatatgtttcagcatattgctttgatgaaaaaaattcaatatttatcagttatgataacactaaatcagtcaaaactaaggctgaatatgtgacacataacaatttaggcggaggcttttggtgggagtcatgtggtgaagcttatgcaaatgagtcaaggtcgttgataaacgcatttaatgaaggcttgcactttaatgtgtcatcaaaaccatcaatatttcaagatgtgagagttaaaaaatattacttgaataaatatggcgatggcggatttttatctccatatttaaagcatttggattcaagaaagcaatga

SEQ ID NO: 2512 - DNA, 1536 bp, Artificial Sequence
  Description of Artificial Sequence: Synthetic polynucleotide
atggtaggacactctgctcagcacagaagtaaaagcagcttagtgtctcacttattgatattacttatctttataacgattattattgaaatgtgtttatataataaaatttttaagaaccaaaggtctgatgatattagagacaactttaacaatggcggacatagagttcccagtaatgtccaaaatcatggaacccatataagagacgaagcctttataagcggggtctattattccaattggtccccatacaaaccgaggtttcatttccctcacgacataaacttgaagcaagtgtctcacatttactatgcatttttcaaaataaactctagaactggtggtatagaaaacacggatagttggtctgatttggaaatgaatttgtataaatctttggcaattaaaaattctgaattgattaaagaaagcagtaacaatagtgtccaaaacatcttgcccttaggttgcattggtgaattattttatttgaagaatacctgttctgataagaaatttaaagttatcatgtctattgggggctggtctgatagtgaaaatttcaaaatcataattaaagatgataaactcttacaaaattttgttgattcttctgtggaaacaatgttcagattaggatttgatggcattgatttggactgggagttccctggtaacaatgaaagtgaacctcgcggatatttgaaattggtcagaatgttaagattaaaattgaacagcctcgaatcccaaatatttgggaaacgtactgaagatcattttcaattatctattgcggcacctgcattcaaggataaattattttacttgccaatcacagaaattgatcaatatgttgactactggaatatgatgacgtacgattattatggctcctggtctgaaacaacaggatatcacagcaatttattcagtgagacggaattgaatggaaactttgccatgcattatatgatcgatagatttggcgtcaattctagaaaattagtattgggaatggccgcctacggaagaagtttccatatcaaagataacaaattcgaaccattcaatcaaaatactgtattaattaacaaaattttcaaaggagtgggcaagcccactaaagaaatagataaagctgatggcaaggagggcatctggccttacaaaaatttaccaaagattggtacaatagaacaatacgatccaaaatatgtttctgcatattgctttgatgaaaaaaattctatatttatcagttatgataacactaaatctgtcaaaactaaggctgaatatgtgacacataacaatttaggcggaggcttttggtgggagagttgtggtgaagcttatgcaaatgagtccaggtctttgataaacgcatttaatgaaggcttgcactttaatgtgtcttctaaaccaagtatatttcaagatgtgagagttaaaaaatattacttgaataaatatggcgatggcggatttttatctccatatttaaagcatttggattccagaaagcaatga

SEQ ID NO: 2513 - DNA, 1038 bp, Saccharomyces cerevisiae
atgtctactttacaacgtcgtagagtcaatagggcggattctggagatacttcctccattcattcttctgctaacaataccaaaggagacaaaatcgcaaatattgctgttgacggggatgatgacaatggaacaaacaaaaagattgcatatgacccagaagaatcgaaattgagagacaacatcaatatccctacgttaacgttgatggaagaagtcttattgatgggcttaagagatagagaaggatatttgtcgttttggaatgatagtatttcatatgctttgcgtggttgtataattatagaattagcgttaagaggtaaaatcagaatcttagatgattccgccaggaaaaggttcgatctttccgaaaggttgattgaagttattgacagttccaaaactggggaagttttactggatgaaactttgcaattgatgaaaaacgacgaacctttgtcaatttctaactggattgatcttttaagtggtgaaacatggaaccttttaaagatcaactatcaattgaaacaagtaagggaaagattggcaaaaggtttggtcgataaaggtgtattgagaacagaaatgaaaaatttctttttgtttgacatggcgacacaccccattgcagacgccagctgcaaagaagccattaagcgcagagtactttctgtactcgtatcgaggaacatggaattaagttacaatgaatattttccggagacaacatctttcaaaatcattagaactttagctttaatatgtggatcatatggggcaaacgtattggagaatgtcctgactacgttggaatatgagaagagagataaggcaattagtagagctgaagaaataatggcacaattttcgcaatacccatttgatttagaaaaggaaactgagttaggtgtctccgttaatttaaacaaggaagttaaagaagagatagaaaacaatcctggtcatgatttacaattggaagttattgctggtgtatttgaagtcttttcaagaatggatatgctattatga

SEQ ID NO: 2514 - DNA, 1038 bp, Artificial Sequence
  Description of Artificial Sequence: Synthetic polynucleotide
atgtctactttacaacgtcgtagagtcaatagggcggattctggagatacttcctccattcattcttctgctaacaataccaaaggagacaaaatcgcaaatattgctgttgacggggatgatgacaatggaacaaacaaaaagattgcatatgacccagaagaaagtaaattgagagacaacatcaatatccctacgttaacgttgatggaagaagtcttattgatgggcttaagagatagagaaggatatttgagtttttggaatgatagtatttcttatgctttgcgtggttgtataattatagaattagcgttaagaggtaaaatcagaatcttagatgattccgccaggaaaaggttcgatctttccgaaaggttgattgaagttattgacagttccaaaactggggaagttttattagatgaaactttgcaattgatgaaaaacgacgaacctttgtctatttctaactggattgatcttttaagtggtgaaacatggaaccttttaaagatcaactatcaattgaaacaagtaagggaaagattggcaaaaggtttggtcgataaaggtgtattgagaacagaaatgaaaaatttctttttgtttgacatggcgacacaccccattgcagacgccagctgcaaagaagccattaagcgcagagtactttctgtactcgtaagtaggaacatggaattaagttacaatgaatattttccggagacaacatctttcaaaatcattagaactttagctttaatatgtggatcctatggggcaaacgtattggagaatgtcttgactacgttggaatatgagaagagagataaggcaattagtagagctgaagaaataatggcacaattttctcaatacccatttgatttagaaaaggaaactgagttaggtgtctccgttaatttaaacaaggaagttaaagaagagatagaaaacaatcctggtcatgatttacaattggaagttattgctggtgtatttgaagtcttttccagaatggatatgcttttatga

SEQ ID NO: 2515 - DNA, 573 bp, Saccharomyces cerevisiae
atgggagccaagacgtcaaagctttccaaagatgacctgacatgtttgaaacaatccacctattttgatagaagagaaatccagcaatggcataaaggatttttgagggattgccctagtggccaactagctagggaagattttgttaagatatacaaacagttttttccatttggttctcctgaagattttgctaatcacctttttacagtttttgataaagacaacaatggattcatacattttgaagagtttatcacagttttgagtacaacgtccagaggaactttggaggaaaaactgagctgggctttcgaactttatgatttgaaccatgatggatatattacatttgatgaaatgctaaccattgtggcgagtgtttataaaatgatggggtctatggttacacttaatgaggatgaggcaacgcccgaaatgagggtaaagaagatcttcaagttgatggataagaacgaagatggttacattacgctggacgaattcagagaaggttctaaagtcgatccctctattattggtgccttaaacctttacgatggcttaatatga

SEQ ID NO: 2516 - DNA, 573 bp, Artificial Sequence
  Description of Artificial Sequence: Synthetic polynucleotide
atgggagccaagacgtccaagctttccaaagatgacttgacatgtttgaaacaatccacctattttgatagaagagaaatccagcaatggcataaaggatttttgagggattgccctagtggccaattggctagggaagattttgttaagatatacaaacagttttttccatttggttctcctgaagattttgctaatcacctttttacagtttttgataaagacaacaatggattcatacattttgaagagtttatcacagttttgagtacaacgtccagaggaactttggaggaaaaattaagctgggctttcgaactttatgatttgaaccatgatggatatattacatttgatgaaatgttgaccattgtggcgagtgtttataaaatgatggggtctatggttacacttaatgaggatgaggcaacgcccgaaatgagggtaaagaagatcttcaagttgatggataagaacgaagatggttacattacgcttgacgaattcagagaaggttctaaagtcgatccctctattattggtgccttaaacctttacgatggcttaatatga

SEQ ID NO: 2517 - DNA, 921 bp, Saccharomyces cerevisiae
atgaatcaaatctggtctacaggtcccccaaatttttacttcaactctgaatggaaagaaaataagagaaatgacaggacaattgaagactctttaagagaactagatgggttgatccattccttggagagaactcatattgaagtacaaacaaacccaaagctaaagaacgatgtcacagctttaaatgatattaacaagaaagaaaataaagaagagatcactcatgaaaactatacacaccagattaatagtattccattgacaagctcaaatttaaatcggcatttctccttttctagagactacaaccaatctgataatagcaataataattattacagggaatatttatccaaaccaaggtatttgcagcagtcaactaaagaacaaactttcaatgaaattaataaaagaaaaagtgctgcaattattcccccttggttaaatattccagaaaactcaagattttttgtaataaagtcctcgtctttgaagcatgtcaaaaggtcgttttacaacggaatttggtcgtctactcatttcggcaacaaaaggctatctgaggcatataaaaagcttaattcgggagccaaagtgtttttatttttttcaatcaacacatcaggaagattctgtggcgttgcagaaatggtatcggatttgaaaatggatttggacaccagtatatgggaagatgaacaaaaatatggcaaagcctttaaagtaagatgggtgatcgtgcgtgatataaataacagatcgttaaaaaggtttttgataccatccaatgaaatgaaaccgataacacattccagagatactcaagaaattccatattcgattggaatttcaataattaatctatttaaaactcaagattctgatattttctccttcttggatgagacgtatgaatag

SEQ ID NO: 2518 - DNA, 921 bp, Artificial Sequence
  Description of Artificial Sequence: Synthetic polynucleotide
atgaatcaaatctggtctacaggtcccccaaatttttacttcaactctgaatggaaagaaaataagagaaatgacaggacaattgaagactctttaagagaattagatgggttgatccattccttggagagaactcatattgaagtacaaacaaacccaaagttgaagaacgatgtcacagctttaaatgatattaacaagaaagaaaataaagaagagatcactcatgaaaactatacacaccagattaatagtattccattgacaagcagtaatttaaatagacatttctccttttctagagactacaaccaatctgataatagcaataataattattacagggaatatttatccaaaccaaggtatttgcagcagtctactaaagaacaaactttcaatgaaattaataaaagaaaaagtgctgcaattattcccccttggttaaatattccagaaaactctagattttttgtaataaagtcctcttctttgaagcatgtcaaaaggtctttttacaacggaatttggtcttctactcatttcggcaacaaaaggttatctgaggcatataaaaagcttaattctggagccaaagtgtttttatttttttctatcaacacatctggaagattctgtggcgttgcagaaatggtatctgatttgaaaatggatttggacaccagtatatgggaagatgaacaaaaatatggcaaagcctttaaagtaagatgggtgatcgtgcgtgatataaataacagatctttaaaaaggtttttgataccatccaatgaaatgaaaccgataacacattccagagatactcaagaaattccatattctattggaatttctataattaatttatttaaaactcaagattctgatattttctccttcttggatgagacgtatgaatga

SEQ ID NO: 2519 - DNA, 270 bp, Saccharomyces cerevisiae
atggatacggaagcattggccaattatttgctacggcagcttagtttagatgcggaggagaataagctagaagatcttctccaacggcaaaatgaagatcaagagtctagtcaagaatataacaagaaattattattggcatgtggatttcaggccattttaagaaaaattctgctggatgctagaacaagggcaactgcagaaggtttgagggaagtatatccttatcatattgaagctgcaacgcaggcttttctggatagtcaatga

SEQ ID NO: 2520 - DNA, 270 bp, Artificial Sequence
  Description of Artificial Sequence: Synthetic polynucleotide
atggatacggaagcattggccaattatttgttgagacagcttagtttagatgcggaggagaataagttggaagatcttctccaaagacaaaatgaagatcaagagtctagtcaagaatataacaagaaattattattggcatgtggatttcaggccattttaagaaaaattttattagatgctagaacaagggcaactgcagaaggtttgagggaagtatatccttatcatattgaagctgcaacgcaggcttttttggatagtcaatga

SEQ ID NO: 2521 - DNA, 1371 bp, Saccharomyces cerevisiae
atgtcggataagccgattgacatacaatatgataaacaggctactccaaatctgagtggtgtaattactccgccaacaaatgaaactggtaatgactcagtccgggaaaaactttcaaaactagttggcgatgctatgtcaaacaatccctattttgccgccggcggtggtcttatgatccttggtacaggtttagctgtagctagatccggtataataaaagccagcagggtcctataccgacaaatgattgtcgacttagagattcagtcgaaggacaaatcatacgcctggtttctaacatggatggccaaacatcctcaaagggtatctagacacttatccgttaggacaaactacatacaacatgacaatggatcagttagtacaaaattttcgctggttccgggtccgggaaatcattggattcgttataagggtgcttttatcctgattaaaagagaaaggtccgcaaaaatgatagatatcgcaaacgggtcaccatttgagaccgtaaccttaactacactgtaccgtgacaaacatttgttcgatgacattttgaacgaggctaaagacatagccctgaagactactgagggcaagactgttatttacacttctttcggccctgaatggagaaagtttggtcaaccaaaagctaaaaggatgctgccctccgtcattttggacagtggcatcaaagagggtattctcgatgacgtttatgattttatgaagaacggcaaatggtactctgacaggggtatcccatatcgcaggggatatttactctatggccctcccggatctggtaagactagctttatccaggctttagcgggcgaattagactacaacatttgtattttaaacctctccgaaaataatttaacagatgacagattaaaccacttaatgaataacatgccagaaaggagcatactattactggaagatattgacgcggcgttcaacaaaagaagtcaaactggtgaacaaggttttcattctagcgtaacatttagcggtttactgaatgccctggatggcgtcacatcttctgaagaaactattacattcatgactaccaatcatcctgaaaagctagacgcggctataatgagaccaggtcgtattgactacaaagtcttcgttggtaacgcaactccataccaggtagaaaaaatgtttatgaaattttacccaggtgagactgatatatgcaaaaagtttgtaaatagtgttaaagaattggatatcaccgtaagtaccgcccagttgcaaggacttttcgttatgaataaagatgcaccacacgatgcgttgaaaatggtctccagcttacggaacgctaatcatattttctag

SEQ ID NO: 2522 - DNA, 1371 bp, Artificial Sequence
  Description of Artificial Sequence: Synthetic polynucleotide
atgagtgataagccgattgacatacaatatgataaacaggctactccaaatttgagtggtgtaattactccgccaacaaatgaaactggtaatgactctgtcagagaaaaactttctaaattggttggcgatgctatgtccaacaatccctattttgccgccggcggtggtcttatgatccttggtacaggtttagctgtagctagatccggtataataaaagccagcagggtcttgtacagacaaatgattgtcgacttagagattcagtccaaggacaaatcttacgcctggtttttaacatggatggccaaacatcctcaaagggtatctagacacttatccgttaggacaaactacatacaacatgacaatggatctgttagtacaaaattttctttggttccgggtccgggaaatcattggattcgttataagggtgcttttatcttgattaaaagagaaaggtccgcaaaaatgatagatatcgcaaacgggtctccatttgagaccgtaaccttaactacattgtaccgtgacaaacatttgttcgatgacattttgaacgaggctaaagacatagccttgaagactactgagggcaagactgttatttacacttctttcggccctgaatggagaaagtttggtcaaccaaaagctaaaaggatgttgccctccgtcattttggacagtggcatcaaagagggtattctcgatgacgtttatgattttatgaagaacggcaaatggtactctgacaggggtatcccatatcgcaggggatatttactctatggccctcccggatctggtaagactagctttatccaggctttagcgggcgaattagactacaacatttgtattttaaacctctccgaaaataatttaacagatgacagattaaaccacttaatgaataacatgccagaaaggagcatattattattggaagatattgacgcggcgttcaacaaaagaagtcaaactggtgaacaaggttttcattctagcgtaacatttagcggtttattgaatgccttggatggcgtcacatcttctgaagaaactattacattcatgactaccaatcatcctgaaaagttggacgcggctataatgagaccaggtcgtattgactacaaagtcttcgttggtaacgcaactccataccaggtagaaaaaatgtttatgaaattttacccaggtgagactgatatatgcaaaaagtttgtaaatagtgttaaagaattggatatcaccgtaagtaccgcccagttgcaaggacttttcgttatgaataaagatgcaccacacgatgcgttgaaaatggtctccagcttaagaaacgctaatcatattttctga

SEQ ID NO: 2523 - DNA, 1482 bp, Saccharomyces cerevisiae
atgagctttgttcaaataaggcacatttcttcacaaataaaccgtaagactgtatccattgttggatcggggccttccggcttttatacagcgtaccatttactcaagaagtcaccgattccattaaatgttactatatgggaaaagttacctgttccttttggtttaagtagatatggtgtggcacctgatcatccagaagtcaaaaattgtgaagaaacgtttaccacatgtgcagaagagttttcttcccctacaaaccaaaagcataaattttcctttgttggtggtataaccattggaaaagaaatattgttgaaggaattgctggataatcaagatgctgttattttaagttatggttgtacaggggacagaaagctgaatatccctggcgaactcggaacaaaaggggtgtttagcagtagagaatttgtcaattggtacaatggtcatcctgatttcgcaaaggataagcgatttaccgattttgactggagcaaagtttcgaaagttggtattataggaaacggtaacgttgctcttgatattacgcgtgtacttatttctaatcaaattgatgaaatatgggaaaatacggacatctcatctcttgcactaaatttgctaagaagggcacctgtaaaggacgttaagctaattgcacgaagggatttcgttcattccaaattcaccaacaaagaattaagagaactatgggagttagaaaagtatggcatacgtggccgtattgatcctaaatttttccagaaagaaatgtttgacccatctaagtacgatcgtgcattcaatagacgagtagagatgtgtagtgagtatctcaagccatttaatgaacgttcgaagaaaaactataaaaaggctcctcctccaagcagcggatatgacaaattctgggagttagattatttgaagactcccttgaaaattaatagagacgattttggtgcaatcaactctttgagtttatgtaacaatcgattaaatgaagataacagtttgcaacccttgaaggacgtcaataatattatgacatataaagtggatttgctgattacttcattgggatatgcaggcgttcccatgcctgaattctctaagttgtctattggatttgacaaagatcatatagctaataaacagggtcgtgttttaacttccagcggagaaatattcccacatttatatgcatctggttggatccgtaagggcagccagggcgttattgcctcgacaatgcaagatgcttttgaagttggagacagagtaatacaagacttggtggtcagcggagcgctatccttagagaattctatcgacctctctaatatcaagcacaccacatggaaggattgggaaagaatcaacaagaaggaattgcttcggggcaaaaaggaacacaaaactcggtcaaagtttttaacttttgaagagttgtggaacggtgtagaaggcatataa

SEQ ID NO: 2524 - DNA, 1482 bp, Artificial Sequence
  Description of Artificial Sequence: Synthetic polynucleotide
atgagctttgttcaaataaggcacatttcttctcaaataaaccgtaagactgtatccattgttggatctgggccttccggcttttatacagcgtaccatttactcaagaagagcccgattccattaaatgttactatatgggaaaagttacctgttccttttggtttaagtagatatggtgtggcacctgatcatccagaagtcaaaaattgtgaagaaacgtttaccacatgtgcagaagagttttcttcccctacaaaccaaaagcataaattttcctttgttggtggtataaccattggaaaagaaatattgttgaaggaattgttggataatcaagatgctgttattttaagttatggttgtacaggggacagaaagttgaatatccctggcgaactcggaacaaaaggggtgtttagcagtagagaatttgtcaattggtacaatggtcatcctgatttcgcaaaggataagagatttaccgattttgactggagcaaagtttccaaagttggtattataggaaacggtaacgttgctcttgatattacgcgtgtacttatttctaatcaaattgatgaaatatgggaaaatacggacatctcttctcttgcattgaatttgttaagaagggcacctgtaaaggacgttaagttgattgcaagaagggatttcgttcattccaaattcaccaacaaagaattaagagaattatgggagttagaaaagtatggcatacgtggccgtattgatcctaaatttttccagaaagaaatgtttgacccatctaagtacgatcgtgcattcaatagaagagtagagatgtgtagtgagtatctcaagccatttaatgaacgttccaagaaaaactataaaaaggctcctcctccaagcagcggatatgacaaattctgggagttagattatttgaagactcccttgaaaattaatagagacgattttggtgcaatcaactctttgagtttatgtaacaatagattaaatgaagataacagtttgcaacccttgaaggacgtcaataatattatgacatataaagtggatttgttaattacttctttgggatatgcaggcgttcccatgcctgaattctctaagttgtctattggatttgacaaagatcatatagctaataaacagggtcgtgttttaacttccagcggagaaatattcccacatttatatgcatctggttggatccgtaagggcagccagggcgttattgcctctacaatgcaagatgcttttgaagttggagacagagtaatacaagacttggtggtcagcggagcgctttccttagagaattctatcgacctctctaatatcaagcacaccacatggaaggattgggaaagaatcaacaagaaggaattgcttaggggcaaaaaggaacacaaaactagatccaagtttttaacttttgaagagttgtggaacggtgtagaaggcatatga

SEQ ID NO: 2525 - DNA, 306 bp, Saccharomyces cerevisiae
atgatttttaaacgtgcagtatctacattgattcctccaaaagttgtgtcttccaagaatataggttcggcaccaaatgccaagcgcattgctaatgttgttcacttttataagtctttgcctcaaggaccagcaccagccatcaaggctaacactagattggccagatacaaagccaagtactttgatggggataatgctagtggtaaaccattgtggcattttgctctaggtataattgcctttggctattccatggaatattattttcatttgagacatcataaaggtgcggaagagcattga

SEQ ID NO: 2526 - DNA, 306 bp, Artificial Sequence
  Description of Artificial Sequence: Synthetic polynucleotide
atgatttttaaacgtgcagtatctacattgattcctccaaaagttgtgtcttccaagaatataggttctgcaccaaatgccaagcgcattgctaatgttgttcacttttataagtctttgcctcaaggaccagcaccagccatcaaggctaacactagattggccagatacaaagccaagtactttgatggggataatgctagtggtaaaccattgtggcattttgctttgggtataattgcctttggctattccatggaatattattttcatttgagacatcataaaggtgcggaagagcattga

SEQ ID NO: 2527 - DNA, 261 bp, Saccharomyces cerevisiae
atgtccggaaaagcttctacagagggtagcgttactacggagtttctctctgatatcattggtaagacagtgaacgtcaaacttgcctcgggtttactctacagcggaagattggaatccattgatggttttatgaatgttgcactatcgagtgccactgaacactacgagagtaataacaataagcttctaaataagttcaatagtgatgtctttttgaggggcacgcaggtcatgtatatcagtgaacaaaaaatatag

SEQ ID NO: 2528 - DNA, 261 bp, Artificial Sequence
  Description of Artificial Sequence: Synthetic polynucleotide
atgtccggaaaagcttctacagagggtagcgttactacggagtttctctctgatatcattggtaagacagtgaacgtcaaacttgcctctggtttactctacagcggaagattggaatccattgatggttttatgaatgttgcattatccagtgccactgaacactacgagagtaataacaataagcttttgaataagttcaatagtgatgtctttttgaggggcacgcaggtcatgtatatcagtgaacaaaaaatatga

SEQ ID NO: 2529 - DNA, 3030 bp, Saccharomyces cerevisiae
atgtcagctgaccctattaatgaccaatcgtctttatgtgtgaggtgcaataaatcaatcgcgtctagccaggtatacgaattagaaagcaaaaaatggcatgaccagtgctttacatgctacaaatgtgacaaaaaattgaacgcagattcagactttttggttctggatataggtacattaatttgttacgactgctcagataaatgtacaaattgtggcgataaaatagacgacacagcaattatactgccttcctcaaatgaggcctattgttccaattgtttcagatgctgtcggtgcagcaaccgtataaagaacttaaagtatgcaaagacaaaacgaggactatgttgtatggattgtcacgagaaattgttgagaaaaaaacaactattactggaaaatcaaacaaaaaattcatcgaaagaagattttcccataaaacttcctgaaagatcagtcaaaaggcccttgtcacccaccagaataaatggtaagtcagatgtcagtacaaacaacaccgcaataagtaagaaccttgtaagctcgaatgaggatcaacagctcactccacaagttttagtatcacaagaaagagatgaatcatcgttgaatgacaataatgataatgataacagcaaggacagggaggaaacatcttctcacgcaaggacggtttctattgacgacattctgaactctactttggaacacgatagtaatagcattgaagagcagagtttggtggataatgaggactacatcaacaaaatgggtgaagacgtaacctataggctattaaaaccacaaagagcaaatcgagattccatagtggtaaaggatccgaggatcccaaattcgaactcgaacgcgaatagattcttttcaatttatgataaagaagagacagacaaagatgatacagacaacaaagagaatgaaatcatcgtcaacacacccagaaatagcactgataaaattacaagtcctttgaacagccctatggctgtacaaatgaacgaagaggtcgaacctccgcatggactggcattaactttatcagaagctacgaaagaaaataacaaatcatctcaaggtattcaaacgtcaacttccaaatctatgaatcatgtctccccgattacaagaaccgataccgtagaaatgaaaacatcaacctcttcatcgacattacgtttgtctgataatggaagtttcagcaggcctcaaacagcagataacttattgccgcataaaaaagtagcaccctctccaaacaaaaaactttcaagatcgttttctttgaagtccaaaaattttgttcacaacctgaaaagtaaaacttcggaaatgctggacccaaagcatccccatcacagcacttctatacaggaatcagacactcattctggctggggtgtttcctctactcatacaaatataagaaaatcaaaagccaaaaaaaatcctgtatcaagaggccaaagtgacagtacaatatacaatactctaccacaacatggaaattttacagtaccggagtttaatcacaaaaaagcgcaaagcagccttggcagtatatccaaaaagcaaaattctaatgatacagccactaatagacgcataaatggttcatttacaagttcaagctcggggcatcatatagcaatgttccgtacgccgcctttggaatcagggccattatttaagaggccatctctgtcatctgagtccgcacaccacagatcttctagcttacagacgtctagatccactaatgcattgttggaagacgattccacgaaagtggatgctactgatgaaagcgctacaagcttggaaaaggacttttactttactgagttgactttaaggaagttaaaattagatgtgagggaactagaaggtacgaagaaaaaattattacaagatgttgaaaatctaagattagcgaaagagaggctgttaaatgatgttgacaatttaacaagagaaaaggataagcaatctgcatcttcccgggagtccttagaacaaaaagaaaacattgcaacatcaatcactgtaaagtcaccaagttcaaattccgacagaaaagggagcatatctaatgccagtcctaaaccacgcttctggaaaatattttcaagtgctaaggatcaccaggtaggcgatctagaatcacagcaacgttcgccaaattcatcttcaggcggaacgacaaatatagcacagaaagaaatatcatcaccgaaattaattcgagtacacgatgagcttccttctccaggcaaagtaccactgtcgccaagtccaaagagattagattatacgcctgatggttcccatttatatggatcttcgctacaagctcgatgtgcgtatgaaaaaagtactgttccaataattatcaggtgctgcattgatcgcattgaaaaagatgatataggcctgaacatggaaggcttatacagaaagtcgggctcacagactttggttgaggagatcgaaaatgaattcgctcagaataattcgttgcatagtgatacattaagtcccaaactgaatgctttactgaatcaagatattcatgcagtggctagcgtattaaaacgatatttgagaaaactaccagatccagttttatcattttccatatacgatgccttgatagatctagttagaaataaccaactaattgagaggctaccattaaacaacgacaagtttttggattcaccacaaaaagtgactatttatgaaatggtgctcaaaagcctacttgaaattttcaaaattttacccgtagagcatcaggaagtattgaaagtattggcagcacatatcggcaaagttcgaaggtgcagtgaaagaaatttaatgaacttacataacttgtcgttggtctttgcaccgagtcttatccacgattttgacggcgagaaagatattgtggacatgaaggagaggaattatatcgtggaatttatacttggaaactatagagacatatttaagcaagcataa

SEQ ID NO: 2530 - DNA, 3030 bp, Artificial Sequence
  Description of Artificial Sequence: Synthetic polynucleotide
atgtctgctgaccctattaatgaccaatcttctttatgtgtgaggtgcaataaatctatcgcgtctagccaggtatacgaattagaaagcaaaaaatggcatgaccagtgctttacatgctacaaatgtgacaaaaaattgaacgcagattctgactttttggttttggatataggtacattaatttgttacgactgctctgataaatgtacaaattgtggcgataaaatagacgacacagcaattatattaccttcctctaatgaggcctattgttccaattgtttcagatgctgtagatgcagcaaccgtataaagaacttaaagtatgcaaagacaaaaagaggattatgttgtatggattgtcacgagaaattgttgagaaaaaaacaattattattggaaaatcaaacaaaaaattcttctaaagaagattttcccataaaacttcctgaaagatctgtcaaaaggcccttgagccccaccagaataaatggtaagagtgatgtcagtacaaacaacaccgcaataagtaagaaccttgtaagcagtaatgaggatcaacagctcactccacaagttttagtatctcaagaaagagatgaaagttctttgaatgacaataatgataatgataacagcaaggacagggaggaaacatcttctcacgcaaggacggtttctattgacgacattttgaactctactttggaacacgatagtaatagcattgaagagcagagtttggtggataatgaggactacatcaacaaaatgggtgaagacgtaacctataggttattaaaaccacaaagagcaaatagagattccatagtggtaaaggatccgaggatcccaaatagcaactccaacgcgaatagattcttttctatttatgataaagaagagacagacaaagatgatacagacaacaaagagaatgaaatcatcgtcaacacacccagaaatagcactgataaaattacaagtcctttgaacagccctatggctgtacaaatgaacgaagaggtcgaacctccgcatggattagcattaactttatctgaagctacgaaagaaaataacaaatcttctcaaggtattcaaacgtctacttccaaatctatgaatcatgtctccccgattacaagaaccgataccgtagaaatgaaaacatctacctcttcttctacattacgtttgtctgataatggaagtttcagcaggcctcaaacagcagataacttattgccgcataaaaaagtagcaccctctccaaacaaaaaactttctagatctttttctttgaagtccaaaaattttgttcacaacttgaaaagtaaaacttctgaaatgttggacccaaagcatccccatcacagcacttctatacaggaaagtgacactcattctggctggggtgtttcctctactcatacaaatataagaaaatctaaagccaaaaaaaatcctgtatctagaggccaaagtgacagtacaatatacaatactttaccacaacatggaaattttacagtaccggagtttaatcacaaaaaagcgcaaagcagccttggcagtatatccaaaaagcaaaattctaatgatacagccactaatagacgcataaatggttcttttacaagtagtagcagtgggcatcatatagcaatgttccgtacgccgcctttggaatctgggccattatttaagaggccatctttatcttctgagtccgcacaccacagatcttctagcttacagacgtctagatccactaatgcattgttggaagacgattccacgaaagtggatgctactgatgaaagcgctacaagcttggaaaaggacttttactttactgagttgactttaaggaagttaaaattagatgtgagggaattggaaggtacgaagaaaaaattattacaagatgttgaaaatttaagattagcgaaagagaggttattaaatgatgttgacaatttaacaagagaaaaggataagcaatctgcatcttccagagagtccttagaacaaaaagaaaacattgcaacatctatcactgtaaagtctccaagtagtaattccgacagaaaagggagcatatctaatgccagtcctaaaccacgcttctggaaaatattttctagtgctaaggatcaccaggtaggcgatttggaatctcagcaacgttctccaaattcttcttctggcggaacgacaaatatagcacagaaagaaatatcttctccgaaattaattagagtacacgatgagcttccttctccaggcaaagtaccattatctccaagtccaaagagattagattatacgcctgatggttcccatttatatggatcttctttacaagctcgttgtgcgtatgaaaaaagtactgttccaataattatcaggtgctgcattgatcgcattgaaaaagatgatataggcttgaacatggaaggcttatacagaaagtctggctctcagactttggttgaggagatcgaaaatgaattcgctcagaataattctttgcatagtgatacattaagtcccaaattgaatgctttattgaatcaagatattcatgcagtggctagcgtattaaaaagatatttgagaaaattaccagatccagttttatctttttccatatacgatgccttgatagatttggttagaaataaccaattgattgagaggttaccattaaacaacgacaagtttttggattctccacaaaaagtgactatttatgaaatggtgctcaaaagcttgcttgaaattttcaaaattttacccgtagagcatcaggaagtattgaaagtattggcagcacatatcggcaaagttagaaggtgcagtgaaagaaatttaatgaacttacataacttgtctttggtctttgcaccgagtcttatccacgattttgacggcgagaaagatattgtggacatgaaggagaggaattatatcgtggaatttatacttggaaactatagagacatatttaagcaagcatga

SEQ ID NO: 2531 - DNA, 240 bp, Saccharomyces cerevisiae
atgcctaagagattaagtgggttacaaaaagaagtcttacacctgtatagggcttccatacgaacggctcatacaaaaccaaaggaaaaccaagttaattttgtgaattatattcatgaagaatttgggaagtatagaaatttgccaagaaaagacttcaccaccattgaacacttgttacgggtcggaaacaaaaaaattgccaccttttcacaccctgaactgacgaatatacattga

SEQ ID NO: 2532 - DNA, 240 bp, Artificial Sequence
  Description of Artificial Sequence: Synthetic polynucleotide
atgcctaagagattaagtgggttacaaaaagaagtcttacacttgtatagggcttccataagaacggctcatacaaaaccaaaggaaaaccaagttaattttgtgaattatattcatgaagaatttgggaagtatagaaatttgccaagaaaagacttcaccaccattgaacacttgttaagagtcggaaacaaaaaaattgccaccttttctcaccctgaattgacgaatatacattga

SEQ ID NO: 2533 - DNA, 1908 bp, Saccharomyces cerevisiae
atggcacctgttacaattgaaaagttcgtaaatcaagaagaacgacaccttgtttccaaccgatcagcaacaattccgtttggtgaatacatatttaaaagattgttgtccatcgatacgaaatcagttttcggtgttcctggtgacttcaacttatctctattagaatatctctattcacctagtgttgaatcagctggcctaagatgggtcggcacgtgtaatgaactgaacgccgcttatgcggccgacggatattcccgttactctaataagattggctgtttaataaccacgtatggcgttggtgaattaagcgccttgaacggtatagccggttcgttcgctgaaaatgtcaaagttttgcacattgttggtgtggccaagtccatagattcgcgttcaagtaactttagtgatcggaacctacatcatttggtcccacagctacatgattcaaattttaaagggccaaatcataaagtatatcatgatatggtaaaagatagagtcgcttgctcggtagcctacttggaggatattgaaactgcatgtgaccaagtcgataatgttatccgcgatatttacaagtattctaaacctggttatatttttgttcctgcagattttgcggatatgtctgttacatgtgataatttggttaatgttccacgtatatctcaacaagattgtatagtatacccttctgaaaaccaattgtctgacataatcaacaagattactagttggatatattccagtaaaacacctgcgatccttggagacgtactgactgataggtatggtgtgagtaactttttgaacaagcttatctgcaaaactgggatttggaatttttccactgttatgggaaaatctgtaattgatgagtcaaacccaacttatatgggtcaatataatggtaaagaaggtttaaaacaagtctatgaacattttgaactgtgcgacttggtcttgcattttggagtcgacatcaatgaaattaataatgggcattatacttttacttataaaccaaatgctaaaatcattcaatttcatccgaattatattcgccttgtggacactaggcagggcaatgagcaaatgttcaaaggaatcaattttgcccctattttaaaagaactatacaagcgcattgacgtttctaaactttctttgcaatatgattcaaatgtaactcaatatacgaacgaaacaatgcggttagaagatcctaccaatggacaatcaagcattattacacaagttcacttacaaaagacgatgcctaaatttttgaaccctggtgatgttgtcgtttgtgaaacaggctcttttcaattctctgttcgtgatttcgcgtttccttcgcaattaaaatatatatcgcaaggatttttcctttccattggcatggcccttcctgccgccctaggtgttggaattgccatgcaagaccactcaaacgctcacatcaatggtggcaacgtaaaagaggactataagccaagattaattttgtttgaaggtgacggtgcagcacagatgacaatccaagaactgagcaccattctgaagtgcaatattccactagaagttatcatttggaacaataacggctacactattgaaagagccatcatgggccctaccaggtcgtataacgacgttatgtcttggaaatggaccaaactatttgaagcattcggagacttcgacggaaagtatactaatagcactctcattcaatgtccctctaaattagcactgaaattggaggagcttaagaattcaaacaaaagaagcgggatagaacttttagaagtcaaattaggcgaattggatttccccgaacagctaaagtgcatggttgaagcagcggcacttaaaagaaataaaaaatag

SEQ ID NO: 2534 - DNA, 1908 bp, Artificial Sequence
  Description of Artificial Sequence: Synthetic polynucleotide
atggcacctgttacaattgaaaagttcgtaaatcaagaagaaagacaccttgtttccaacagaagtgcaacaattccgtttggtgaatacatatttaaaagattgttgtccatcgatacgaaatctgttttcggtgttcctggtgacttcaacttatctttattagaatatctctattctcctagtgttgaatctgctggcttaagatgggtcggcacgtgtaatgaattgaacgccgcttatgcggccgacggatattcccgttactctaataagattggctgtttaataaccacgtatggcgttggtgaattaagcgccttgaacggtatagccggttctttcgctgaaaatgtcaaagttttgcacattgttggtgtggccaagtccatagattctcgttctagtaactttagtgatagaaacttacatcatttggtcccacagttacatgattctaattttaaagggccaaatcataaagtatatcatgatatggtaaaagatagagtcgcttgcagtgtagcctacttggaggatattgaaactgcatgtgaccaagtcgataatgttatccgcgatatttacaagtattctaaacctggttatatttttgttcctgcagattttgcggatatgtctgttacatgtgataatttggttaatgttccacgtatatctcaacaagattgtatagtatacccttctgaaaaccaattgtctgacataatcaacaagattactagttggatatattccagtaaaacacctgcgatccttggagacgtattgactgataggtatggtgtgagtaactttttgaacaagcttatctgcaaaactgggatttggaatttttccactgttatgggaaaatctgtaattgatgagagcaacccaacttatatgggtcaatataatggtaaagaaggtttaaaacaagtctatgaacattttgaattgtgcgacttggtcttgcattttggagtcgacatcaatgaaattaataatgggcattatacttttacttataaaccaaatgctaaaatcattcaatttcatccgaattatattcgccttgtggacactaggcagggcaatgagcaaatgttcaaaggaatcaattttgcccctattttaaaagaattatacaagcgcattgacgtttctaaactttctttgcaatatgattctaatgtaactcaatatacgaacgaaacaatgagattagaagatcctaccaatggacaaagcagcattattacacaagttcacttacaaaagacgatgcctaaatttttgaaccctggtgatgttgtcgtttgtgaaacaggctcttttcaattctctgttcgtgatttcgcgtttccttctcaattaaaatatatatctcaaggatttttcctttccattggcatggcccttcctgccgcccttggtgttggaattgccatgcaagaccactccaacgctcacatcaatggtggcaacgtaaaagaggactataagccaagattaattttgtttgaaggtgacggtgcagcacagatgacaatccaagaattgagcaccattttgaagtgcaatattccattggaagttatcatttggaacaataacggctacactattgaaagagccatcatgggccctaccaggagttataacgacgttatgtcttggaaatggaccaaattatttgaagcattcggagacttcgacggaaagtatactaatagcactctcattcaatgtccctctaaattagcattgaaattggaggagcttaagaatagcaacaaaagaagcgggatagaacttttagaagtcaaattaggcgaattggatttccccgaacagttgaagtgcatggttgaagcagcggcacttaaaagaaataaaaaatga

SEQ ID NO: 2535 - DNA, 681 bp, Saccharomyces cerevisiae
atgtctgctaacttagataaatccttagacgaaatcattggctctaacaaagcaggaagtaatagagcccgtgtcggtggtactcgtggtaacggtccaagaagagttggtaagcaagttggtagccaacgtaggagccttccaaacagaagaggccctatcagaaaaaatactagggcacctccaaacgcagtcgctagagttgccaagctcttggacaccactagagaggtcaaggtcaacgtcgaaggtttgccaagggacattaagcaggatgctgtaagagaattttttgcatctcaagtaggtggtgttcaaagagttttgttgagttataacgaaaggggccaatctactggtatggctaacatcacattcaaaaacggtgaattggccagaagggctgttgaaagatttaacggctctccaatcgatggaggcagatcaagattgagacttaacctaatcgttgatccaaaccaacgcccagtcaaaagtttagccgacaggatcaaggctatgccacaaaaaggcggaaacgctccaagaccagtaaagaggggtccaaatagaaaagctgctatggcaaaatcccaaaacaaaccaaagagagaaaagcctgctaagaaaagtcttgaagatctggacaaggaaatggcggactatttcgaaaagaaataa

SEQ ID NO: 2536 - DNA, 681 bp, Artificial Sequence
  Description of Artificial Sequence: Synthetic polynucleotide
atgtctgctaacttagataaatccttagacgaaatcattggctctaacaaagcaggaagtaatagagcccgtgtcggtggtactcgtggtaacggtccaagaagagttggtaagcaagttggtagccaacgtaggagccttccaaacagaagaggccctatcagaaaaaatactagggcacctccaaacgcagtcgctagagttgccaagctcttggacaccactagagaggtcaaggtcaacgtcgaaggtttgccaagggacattaagcaggatgctgtaagagaattttttgcatctcaagtaggtggtgttcaaagagttttgttgagttataacgaaaggggccaatctactggtatggctaacatcacattcaaaaacggtgaattggccagaagggctgttgaaagatttaacggctctccaatcgatggaggcagatctagattgagacttaacttgatcgttgatccaaaccaacgcccagtcaaaagtttagccgacaggatcaaggctatgccacaaaaaggcggaaacgctccaagaccagtaaagaggggtccaaatagaaaagctgctatggcaaaatcccaaaacaaaccaaagagagaaaagcctgctaagaaaagtcttgaagatttggacaaggaaatggcggactatttcgaaaagaaatga

SEQ ID NO: 2537 - DNA, 345 bp, Saccharomyces cerevisiae
atgtcaaatccatttcaaaatataggtaagaatttactatacatttctgcagccgggattgcgtctatttatgtggtcaagaccatagtgaaagctagaagagatgctaaatttataccaaaggcgcggggaaacaatggtgaagtgaatgaaaaaaactattatgataaccttgctcaagtcaaaccagggttccccatacctaaagatggaggagacaacattgattgctctgaggaccatcaattagtaagaaagagtaaatatgaaggtagcgggcttagtgctgtaacaagaaaaagaggtgacaaattaggttttttagataggaggagaaacgagtaa

SEQ ID NO: 2538 - DNA, 345 bp, Artificial Sequence
  Description of Artificial Sequence: Synthetic polynucleotide
atgagtaatccatttcaaaatataggtaagaatttattgtacatttctgcagccgggattgcgtctatttatgtggtcaagaccatagtgaaagctagaagagatgctaaatttataccaaaggcgaggggaaacaatggtgaagtgaatgaaaaaaactattatgataaccttgctcaagtcaaaccagggttccccatacctaaagatggaggagacaacattgattgctctgaggaccatcaattagtaagaaagagtaaatatgaaggtagcgggcttagtgctgtaacaagaaaaagaggtgacaaattaggttttttagataggaggagaaacgagtga

SEQ ID NO: 2539 - DNA, 333 bp, Saccharomyces cerevisiae
atgaaatacttagctgcttacttattattggttcaaggtggtaacgctgccccatccgccgctgacatcaaggccgtcgtcgaatctgtcggtgctgaagtcgatgaagccagaatcaacgaattgttgtcctctttggaaggtaagggctctttggaagaaatcatcgctgaaggtcaaaagaagttcgctactgttccaactggtggtgcttcttctgctgctgccggtgctgccggtgctgctgccggtggtgatgctgctgaagaagaaaaggaagaagaagctaaggaagaatctgatgatgacatgggttttggtttattcgattaa

SEQ ID NO: 2540 - DNA, 333 bp, Artificial Sequence
  Description of Artificial Sequence: Synthetic polynucleotide
atgaaatacttagctgcttacttattattggttcaaggtggtaacgctgccccatccgccgctgacatcaaggccgtcgtcgaatctgtcggtgctgaagtcgatgaagccagaatcaacgaattgttgtcctctttggaaggtaagggctctttggaagaaatcatcgctgaaggtcaaaagaagttcgctactgttccaactggtggtgcttcttctgctgctgccggtgctgccggtgctgctgccggtggtgatgctgctgaagaagaaaaggaagaagaagctaaggaagaatctgatgatgacatgggttttggtttattcgattga

SEQ ID NO: 2541 - DNA, 717 bp, Saccharomyces cerevisiae
atgacagacacatataatagcatatccaattttatagaaaatgaattgaccgcactgctgtcgagtgatgactacctcatggatgacctagcaggcgaattaccaaatgaagtgtgcagattactaaaggctcaagtaattgaaaagagaaaggatgccatgagcaggggaaaacaagacttactgagcaaagagatatacgataacgagtctgaattgagagccagtcaatcgcagcagataatggaacttgttggagacataccaaagtactctcttggaagtgaactaagaaatagagttgagggtgaacctcagagtacatcgatagagagattaattgaagatgtgttgaagctgccgcagatggaagtagcagacgaagaggaagttgaagtggaaaatgatctcaaagttctaagcgagtatagtaatttaaggaaagatttaatactgaaatgtcaggctctccaaataggcgaaagtaaattatcagatattctgagccaaacaaattctataaattctttaacaacttccattaaagaagcttctgaagatgatgatatcagcgagtacttcgccacttacaatgggaaactagtagttgcgttggaagaaatgaagctattattggaagaggccgtgaaaacatttggcaattctccggaaaagagagaaaaaataaaaaaaatcctaagcgagttaaagaagtaa

SEQ ID NO: 2542 - DNA, 717 bp, Artificial Sequence
  Description of Artificial Sequence: Synthetic polynucleotide
atgacagacacatataatagcatatccaattttatagaaaatgaattgaccgcattattatccagtgatgactacctcatggatgacttggcaggcgaattaccaaatgaagtgtgcagattattgaaggctcaagtaattgaaaagagaaaggatgccatgagcaggggaaaacaagacttattaagcaaagagatatacgataacgagtctgaattgagagccagtcaatctcagcagataatggaacttgttggagacataccaaagtactctcttggaagtgaattgagaaatagagttgagggtgaacctcagagtacatctatagagagattaattgaagatgtgttgaagttaccgcagatggaagtagcagacgaagaggaagttgaagtggaaaatgatctcaaagttttaagcgagtatagtaatttaaggaaagatttaatattgaaatgtcaggctctccaaataggcgaaagtaaattaagtgatattttgagccaaacaaattctataaattctttaacaacttccattaaagaagcttctgaagatgatgatatcagcgagtacttcgccacttacaatgggaaattagtagttgcgttggaagaaatgaagcttttattggaagaggccgtgaaaacatttggcaattctccggaaaagagagaaaaaataaaaaaaatcttaagcgagttaaagaagtga

SEQ ID NO: 2543 - DNA, 828 bp, Saccharomyces cerevisiae
atgacatcgtctgcttcttctccacaggatttggaaaagggtgtgaacactctagaaaatattgagacgctcccccagcagggttcgattgcaggcgtttcgcagggcttccctaatattcaagagatatactccgacagagacttcattactctaggatcctccacctacaggcgcagagatttgctcaatgcactagacagaggggatggggaggaaggaaactgtgcaaagtatactccgcaccagttcgctaatccggttcctttgggtctcgcatcgttttctctgtcatgtctagttctgtcgctaattaatgcgaacgttcgcggcgtcactgatggtaaatgggcgctaagtttgtttatgttttttggtggtgccattgaattgtttgccgggttattgtgttttgtcattggggacacatacgccatgactgtgttcagttctttcggcgggttctggatctgctacggttatgggctaacagatactgataatttggtcagcggctataccgatcccacaatgttgaacaatgtcattgggttcttccttgcgggctggaccgttttcaccttcttgatgttgatgtgtacattgaagagcacgtggggtttgttcttactattgacgtttttggatcttaccttcctactactgtgtatcggcaccttcattgacaacaacaatctcaaaatggccggtggctattttggaattttaagtagttgctgcggttggtattcgctatactgttctgtggtgagtccttcaaattcttatttagccttcagggcgcacacaatgccaaatgctccttaa

SEQ ID NO: 2544 - DNA, 828 bp, Artificial Sequence
  Description of Artificial Sequence: Synthetic polynucleotide
atgacatcttctgcttcttctccacaggatttggaaaagggtgtgaacactttggaaaatattgagacgctcccccagcagggttccattgcaggcgtttctcagggcttccctaatattcaagagatatactccgacagagacttcattactttgggatcctccacctacaggcgcagagatttgctcaatgcattggacagaggggatggggaggaaggaaactgtgcaaagtatactccgcaccagttcgctaatccggttcctttgggtctcgcaagtttttctttaagttgtttggttttaagtttgattaatgcgaacgttcgcggcgtcactgatggtaaatgggcgttaagtttgtttatgttttttggtggtgccattgaattgtttgccgggttattgtgttttgtcattggggacacatacgccatgactgtgttcagttctttcggcgggttctggatctgctacggttatgggttgacagatactgataatttggtcagcggctataccgatcccacaatgttgaacaatgtcattgggttcttccttgcgggctggaccgttttcaccttcttgatgttgatgtgtacattgaagagcacgtggggtttgttcttattattgacgtttttggatcttaccttcttattattatgtatcggcaccttcattgacaacaacaatctcaaaatggccggtggctattttggaattttaagtagttgctgcggttggtattctttgtactgttctgtggtgagtccttccaattcttatttagccttcagggcgcacacaatgccaaatgctccttga

SEQ ID NO: 2545 - DNA, 2529 bp, Saccharomyces cerevisiae
atggttgctttcactgttgaccaaatgcgttctttaatggacaaagttaccaatgtgcgtaacatgtccgttattgctcacgtcgatcatggtaagtccactttgaccgattccttggtccaaagagccggtattatttccgctgctaaggctggtgaagctcgtttcaccgataccagaaaggatgaacaagaaagaggtatcactatcaagtctaccgctatttctctatactctgaaatgtctgacgaagatgtcaaggaaatcaagcaaaagaccgacggtaactccttcttgatcaacttgatcgactctccaggtcacgttgacttctcctctgaagttactgccgctttacgtgtcactgacggtgctttggttgtcgtcgacaccattgaaggtgtctgtgtccaaaccgaaactgttttgagacaagctttgggtgagagaatcaagcctgttgttgttatcaacaaggtcgacagagctttgttggaattgcaagtttctaaggaagatttataccaaacctttgccagaactgttgaatccgttaacgtcatcgtttccacctacgccgatgaagttttgggtgatgtccaagtttacccagccagaggtaccgttgccttcggttccggtttgcacggttgggctttcactatccgtcaattcgccaccagatatgctaagaaattcggtgtcgacaaggccaagatgatggacagattatggggtgactctttcttcaacccaaagaccaagaagtggaccaacaaggacactgatgctgaaggtaagccattggaaagagctttcaacatgttcatcttggacccaatcttcagattattcactgctatcatgaacttcaagaaagatgaaattccagttttgctagaaaagttggaaattgtcttgaagggtgacgaaaaggacttggaaggtaaggccttgttgaaggttgttatgagaaagttcttgccagctgccgatgccttattggaaatgattgtcttgcacttgccatctccagtcactgctcaagcctacagagctgaacaattatacgaaggtccagctgacgatgccaactgtattgctatcaagaactgtgatccaaaggctgatttgatgttgtacgtctccaagatggtgccaacctctgataagggtagattctacgccttcggtagagtttttgccggtactgttaagtccggtcaaaaggtcagaatccaaggtccaaactacgttccaggtaagaaggacgatttgttcatcaaggccattcaaagagttgttttgatgatgggtagatttgtcgaaccaatcgatgactgtccagccggtaacattatcggtttagtcggtatcgatcaattcttgttgaagactggtactttgaccaccagtgaaactgctcacaacatgaaggtcatgaaattctctgtctctccagttgtgcaagtcgctgtcgaagtcaagaacgctaacgacttaccaaaattggtcgaaggtttgaagagattgtccaagtctgatccatgtgtcttgacctatatgtctgaatccggtgaacatatcgttgctggtaccggtgaattgcatttggaaatttgtttgcaagatttggaacacgaccacgctggtgttccattgaagatctccccaccagttgtcgcttacagagaaactgttgaaagtgaatcttctcaaactgctttgtccaagtctccaaacaagcataacagaatctacttgaaggctgaaccaattgacgaagaagtctctttggctattgaaaacggtatcatcaacccaagagatgatttcaaggccagagctagaatcatggctgacgactacggttgggatgtcaccgatgccagaaagatctggtgtttcggtccagacggtaacggtccaaacttggttattgaccaaactaaggctgtccaatacttgcacgaaatcaaggattccgttgttgctgctttccaatgggctaccaaggaaggtccaattttcggtgaagaaatgagatctgtcagagttaacattttggatgttactttacatgccgatgctatccacagaggtggtggtcaaatcatcccaaccatgagaagagctacttacgctggtttcttgttggctgatccaaagatccaagaaccagttttcttggtcgaaattcaatgtccagaacaagccgtcggtggtatctactccgtcttaaacaagaagagaggtcaagtcgtttctgaagaacaaagaccaggtactccattgtttaccgtcaaggcctacttgccagttaacgaatctttcggtttcactggtgaattgagacaagctactggtggtcaagctttcccacaaatggttttcgaccattggtccactttaggttctgacccattggacccaacctctaaggctggtgaaattgttcttgctgctcgtaagagacacggtatgaaggaagaagttccaggctggcaagaatattacgacaaattgtaa

SEQ ID NO: 2546 - DNA, 2529 bp, Artificial Sequence
  Description of Artificial Sequence: Synthetic polynucleotide
atggttgctttcactgttgaccaaatgcgttctttaatggacaaagttaccaatgtgcgtaacatgtccgttattgctcacgtcgatcatggtaagtccactttgaccgattccttggtccaaagagccggtattatttccgctgctaaggctggtgaagctcgtttcaccgataccagaaaggatgaacaagaaagaggtatcactatcaagtctaccgctatttctttgtactctgaaatgtctgacgaagatgtcaaggaaatcaagcaaaagaccgacggtaactccttcttgatcaacttgatcgactctccaggtcacgttgacttctcctctgaagttactgccgctttacgtgtcactgacggtgctttggttgtcgtcgacaccattgaaggtgtctgtgtccaaaccgaaactgttttgagacaagctttgggtgagagaatcaagcctgttgttgttatcaacaaggtcgacagagctttgttggaattgcaagtttctaaggaagatttataccaaacctttgccagaactgttgaatccgttaacgtcatcgtttccacctacgccgatgaagttttgggtgatgtccaagtttacccagccagaggtaccgttgccttcggttccggtttgcacggttgggctttcactatccgtcaattcgccaccagatatgctaagaaattcggtgtcgacaaggccaagatgatggacagattatggggtgactctttcttcaacccaaagaccaagaagtggaccaacaaggacactgatgctgaaggtaagccattggaaagagctttcaacatgttcatcttggacccaatcttcagattattcactgctatcatgaacttcaagaaagatgaaattccagttttgttggaaaagttggaaattgtcttgaagggtgacgaaaaggacttggaaggtaaggccttgttgaaggttgttatgagaaagttcttgccagctgccgatgccttattggaaatgattgtcttgcacttgccatctccagtcactgctcaagcctacagagctgaacaattatacgaaggtccagctgacgatgccaactgtattgctatcaagaactgtgatccaaaggctgatttgatgttgtacgtctccaagatggtgccaacctctgataagggtagattctacgccttcggtagagtttttgccggtactgttaagtccggtcaaaaggtcagaatccaaggtccaaactacgttccaggtaagaaggacgatttgttcatcaaggccattcaaagagttgttttgatgatgggtagatttgtcgaaccaatcgatgactgtccagccggtaacattatcggtttagtcggtatcgatcaattcttgttgaagactggtactttgaccaccagtgaaactgctcacaacatgaaggtcatgaaattctctgtctctccagttgtgcaagtcgctgtcgaagtcaagaacgctaacgacttaccaaaattggtcgaaggtttgaagagattgtccaagtctgatccatgtgtcttgacctatatgtctgaatccggtgaacatatcgttgctggtaccggtgaattgcatttggaaatttgtttgcaagatttggaacacgaccacgctggtgttccattgaagatctccccaccagttgtcgcttacagagaaactgttgaaagtgaatcttctcaaactgctttgtccaagtctccaaacaagcataacagaatctacttgaaggctgaaccaattgacgaagaagtctctttggctattgaaaacggtatcatcaacccaagagatgatttcaaggccagagctagaatcatggctgacgactacggttgggatgtcaccgatgccagaaagatctggtgtttcggtccagacggtaacggtccaaacttggttattgaccaaactaaggctgtccaatacttgcacgaaatcaaggattccgttgttgctgctttccaatgggctaccaaggaaggtccaattttcggtgaagaaatgagatctgtcagagttaacattttggatgttactttacatgccgatgctatccacagaggtggtggtcaaatcatcccaaccatgagaagagctacttacgctggtttcttgttggctgatccaaagatccaagaaccagttttcttggtcgaaattcaatgtccagaacaagccgtcggtggtatctactccgtcttaaacaagaagagaggtcaagtcgtttctgaagaacaaagaccaggtactccattgtttaccgtcaaggcctacttgccagttaacgaatctttcggtttcactggtgaattgagacaagctactggtggtcaagctttcccacaaatggttttcgaccattggtccactttaggttctgacccattggacccaacctctaaggctggtgaaattgttcttgctgctcgtaagagacacggtatgaaggaagaagttccaggctggcaagaatattacgacaaattgtga

SEQ ID NO: 2547 - DNA, 1899 bp, Saccharomyces cerevisiae
atggaactctcatcaaacttaaaagacctatatattgaatggttacaagaattagttgacggattaacccctaaacaagaacaactcaaaatagcctatgaaaaagcaaaaaggaatttacaaaatgctgaaggttcattttattatcctacagatctaaagaaagttaagggaattggcaatacaataataaagagattagatacgaaattacggaactattgcaaaattcaccacatatctcccgttgaggctccttccttaactcagacaagtagcaccagaccaccaaagaggactactacagctttgcgtagcatagtaaactcatgcgaaaatgataagaatgaagctcccgaagagaagggaactaaaaagagaaaaactaggaagtatatacccaaaaaaagatctggaggctacgctatccttctttccttactcgagcttaatgccattcctcgaggcgttagtaaagagcaaatcatcgaggttgcaggaaaatacagtgaccattgtatgactccaaatttctccacaaaagaattctacggtgcttggtcgtctattgctgcacttaaaaaacattcgttggttcttgaggaaggtagaccaaaacggtattcgctaacagaggaaggtgtagaactaacaaagagcttaaagacggcagacggaatctcttttccaaaagaaaatgaagaacctaacgagtattccgtaaccaggaatgaaagtagtgaattcacagcaaatctgactgacctccgtggtgaatatggtaaggaagaagagccctgcgatataaataacacttcattcatgctggatataacttttcaagatttgagcacgccgcaaaggctgcagaacaatgtatttaaaaatgatagactgaatagccaaactaatatatcttctcataaattggaagaggtctctgatgatcaaacagtacctgattccgcattaaaggctaaaagcacaataaagaggagaaggtacaacggagtaagttacgaattgtggtgtagtggtgatttcgaagttttcccaattattgatcacagagaaataaagtcacaatctgatcgtgagtttttttcaagggcatttgaaagaaaaggtatgaagtcagagataaggcaactcgctttgggtgatattatatgggttgccaagaataaaaataccgggttgcagtgtgtgctcaacaccatagttgaaagaaaaaggctagacgatttagctttaagtataagggataacaggtttatggagcaaaaaaataggttagagaaatctggctgtgaacacaaatactatctcattgaggagactatgagtggcaacattggaaatatgaatgaggccctaaagaccgcgctttgggtcattttagtgtattacaaattctccatgataagaacttgcaattcggatgaaactgtggaaaagatacatgcgttgcatactgtaatttctcatcactattctcaaaaagatctcatagttatatttccaagtgaccttaaaagcaaggacgattataaaaaggtgcttctacagtttcgtcgagaattcgaacgaaaaggcggtattgaatgctgtcataatcttgaatgctttcaagaactaatgggaaaaggcgatctaaagacggttggtgagctaactatacatgttttaatgcttgttaaaggtatatctttagaaaaagcagtagccatccaagaaatatttcctaccctgaataaaatactaatggcatataaaacgtgctcctcggaagaagaggctaaattgttgatgtttaatgtactgggagatgcacctggtgcgaagaaaattactaaatctctttcagaaaagatatatgatgcttttggtaaactttag

SEQ ID NO: 2548 - DNA, 1899 bp, Artificial Sequence
  Description of Artificial Sequence: Synthetic polynucleotide
atggaactctcttccaacttaaaagacctttatattgaatggttacaagaattagttgacggattaacccctaaacaagaacaactcaaaatagcctatgaaaaagcaaaaaggaatttacaaaatgctgaaggttctttttattatcctacagatttgaagaaagttaagggaattggcaatacaataataaagagattagatacgaaattaagaaactattgcaaaattcaccacatatctcccgttgaggctccttccttaactcagacaagtagcaccagaccaccaaagaggactactacagctttgcgtagcatagtaaactcttgcgaaaatgataagaatgaagctcccgaagagaagggaactaaaaagagaaaaactaggaagtatatacccaaaaaaagatctggaggctacgctatccttctttccttactcgagcttaatgccattcctagaggcgttagtaaagagcaaatcatcgaggttgcaggaaaatacagtgaccattgtatgactccaaatttctccacaaaagaattctacggtgcttggtcttctattgctgcacttaaaaaacattctttggttcttgaggaaggtagaccaaaaagatattctttaacagaggaaggtgtagaattaacaaagagcttaaagacggcagacggaatctcttttccaaaagaaaatgaagaacctaacgagtattccgtaaccaggaatgaaagtagtgaattcacagcaaatttaactgacctccgtggtgaatatggtaaggaagaagagccctgcgatataaataacacttctttcatgcttgatataacttttcaagatttgagcacgccgcaaaggttacagaacaatgtatttaaaaatgatagattgaatagccaaactaatatatcttctcataaattggaagaggtctctgatgatcaaacagtacctgattccgcattaaaggctaaaagcacaataaagaggagaaggtacaacggagtaagttacgaattgtggtgtagtggtgatttcgaagttttcccaattattgatcacagagaaataaagtctcaatctgatcgtgagttttttagcagggcatttgaaagaaaaggtatgaagagtgagataaggcaactcgctttgggtgatattatatgggttgccaagaataaaaataccgggttgcagtgtgtgctcaacaccatagttgaaagaaaaaggttggacgatttagctttaagtataagggataacaggtttatggagcaaaaaaataggttagagaaatctggctgtgaacacaaatactatctcattgaggagactatgagtggcaacattggaaatatgaatgaggccttgaagaccgcgctttgggtcattttagtgtattacaaattctccatgataagaacttgcaattctgatgaaactgtggaaaagatacatgcgttgcatactgtaatttctcatcactattctcaaaaagatctcatagttatatttccaagtgaccttaaaagcaaggacgattataaaaaggtgcttttacagtttcgtagagaattcgaaagaaaaggcggtattgaatgctgtcataatcttgaatgctttcaagaattgatgggaaaaggcgatttgaagacggttggtgagttaactatacatgttttaatgcttgttaaaggtatatctttagaaaaagcagtagccatccaagaaatatttcctaccttgaataaaatattaatggcatataaaacgtgctccagtgaagaagaggctaaattgttgatgtttaatgtattgggagatgcacctggtgcgaagaaaattactaaatctctttctgaaaagatatatgatgcttttggtaaactttga

SEQ ID NO: 2549 - DNA, 1668 bp, Saccharomyces cerevisiae
atgtctacagatgaaagtgaagacgtttattctgatctgtattccattatctcccaggtaacatccaatactgccaatgacatcgagcaactcccatatgctttaacgttcaaaacgtcgttaatcttcgttggtgctaccattggtgggcttttattcggctatgatactggtgttatatcaggtgttctgctttctttaaagcccgaagatctatctttggtagttttaacggatgttcagaaggagctgataacttccagtacaagcgtcggatcattttttggctctattctggcatttcctttagcagataggtatggaagaagaattactctcgcaatctgctgttcaatttttatcctagctgcaattggaatggctatagcaagaacattgacgtttttgatttgtgggagattgctggttgggatcgctgttggagtgtctgcccagtgcgtccctctatttctgagtgaaatttcaccttccagaatcaggggttttatgttgacattgaacattattgccatcactggaggtcaattggtttcctatgtgattgcgtcccttatgaaagagattgataattcatggagatatttgttcgcactttctgctattccagctattctgttcctttcaatactggattttatccctgaatcgccacgatggtccatttccaagggagacattctatataccagggattctctaagaatgctatatcctactgcatctacatatcatgtgaatagtaaaattaagcagctgataattgaactcgataagttacgactatacgaagatgcaagtgaacctttactagtacagtcccaatcggttattcgatacatggatagttcaacctcaggaactcttagcccacctaacattaaaagactttcctcgaacacagaaagaactagcaacacaatgtcctcctcatcagcatatctatcggcgttgcgaggcccagctccaaacggtgccctggcatctaacaaaaagaaaagacacagaatggagccacgcacaataagagcgttaatagtaggttgcatgttaatgtttttccagcaaatcactggctttaatgcttttatgtactatgcggcaataatattttccaaatttaatataaaaaaccctctactgcctccaattttgattgcctcaacgaacttcatattcacttttttcgccatgtacaccatggactctttgggaagaagagccattcttttgagaacaattttgattatgactgttgggttacttctttgcagtgtaggtttcggtcatgaccaagtcaatttacttttaatttctgttgtaatttatgttgcagcatatgcttctgcgatgggcagcgttccatggacctgtgtggaatttctccccttgaacaggagatcatttggggcatcatgtatagcctgcacaaattggttgaccaatgcatttgtttcaatgacatatctgagcactattaacaccattggtgatgaaaatacaatgctcatttttgcttttttcacagtttgtgcctggtttttcgtatatttttggtatccagaagtcaaaggtttgtcactggaagaggttggaagggtttttgataatggaattgatgttcattatgtctttcgtacctaccattga

SEQ ID NO: 2550 - DNA, 1668 bp, Artificial Sequence
  Description of Artificial Sequence: Synthetic polynucleotide
atgtctacagatgaaagtgaagacgtttattctgatttatattccattatctcccaggtaacatccaatactgccaatgacatcgagcaactcccatatgctttaacgttcaaaacgtctttaatcttcgttggtgctaccattggtgggcttttattcggctatgatactggtgttatatctggtgttttactttctttaaagcccgaagatttatctttggtagttttaacggatgttcagaaggagttgataacttccagtacaagcgtcggaagtttttttggctctattttggcatttcctttagcagataggtatggaagaagaattactctcgcaatctgctgttctatttttatcttggctgcaattggaatggctatagcaagaacattgacgtttttgatttgtgggagattgttggttgggatcgctgttggagtgtctgcccagtgcgtccctttatttttgagtgaaatttctccttccagaatcaggggttttatgttgacattgaacattattgccatcactggaggtcaattggtttcctatgtgattgcgtcccttatgaaagagattgataattcttggagatatttgttcgcactttctgctattccagctattcttttcctttccatattggattttatccctgaatctccaagatggtccatttccaagggagacattctttataccagggattctttgagaatgctttatcctactgcatctacatatcatgtgaatagtaaaattaagcagttgataattgaactcgataagttaaggttgtacgaagatgcaagtgaacctttattggtacagtcccaatctgttattagatacatggatagttctacctctggaactcttagcccacctaacattaaaagactttccagtaacacagaaagaactagcaacacaatgtcctcctcttctgcatatttatctgcgttgagaggcccagctccaaacggtgccttggcatctaacaaaaagaaaagacacagaatggagccacgcacaataagagcgttaatagtaggttgcatgttaatgtttttccagcaaatcactggctttaatgcttttatgtactatgcggcaataatattttccaaatttaatataaaaaaccctttattgcctccaattttgattgcctctacgaacttcatattcacttttttcgccatgtacaccatggactctttgggaagaagagccattcttttgagaacaattttgattatgactgttgggttacttctttgcagtgtaggtttcggtcatgaccaagtcaatttacttttaatttctgttgtaatttatgttgcagcatatgcttctgcgatgggcagcgttccatggacctgtgtggaatttctccccttgaacaggagatcttttggggcatcttgtatagcctgcacaaattggttgaccaatgcatttgtttctatgacatatttgagcactattaacaccattggtgatgaaaatacaatgctcatttttgcttttttcacagtttgtgcctggtttttcgtatatttttggtatccagaagtcaaaggtttgtctttggaagaggttggaagggtttttgataatggaattgatgttcattatgtctttcgtacctaccattga

SEQ ID NO: 2551 - DNA, 1449 bp, Saccharomyces cerevisiae
atgagttttaaagggtttaccaaggctgttagtagggctcctcagtccttccgtcaaaagttcaagatgggtgagcagacagaggatcctgtttacgaggatgcagaacgtcgttttcaagaattggagcaggagacaaaaaaattaagtgaggaatcgaagagatactcgactgcggtgaatggaatgctgacacaccaaattggatttgccaaatccatggaggaaattttcaaacctatcagtggtaaaatgagtgaccctaacgctaccataccagaggacaacccacaaggtattgaagcaagtgaacagtatagggcaattgtcgcagaattacaggaaacattgaaaccggatctggctttggtggaagaaaaaattgttacgccatgccaggaactgttgaagattattacttatattcgtaaaatggccaccaagagaaatcacaaaaaattagatttagatagacatctaaacacttataacaagcatgaaaagaagaaggaaccaaccgccaaagacgaagaaagattgtataaagcacaagctcaagtggaagtggctcaacaagaatatgattactataacgacttgctaaagactcaattaccaatactgttcagtttggaagctgaatttgtgaaaccattatttgtctcattttatttcatgcaattgaacattttttacactttgtataatagacttcaagacatgaagattccatattttgatttgaacagtgacattgtagagtcgtacattgccaagaaaggcaatgtggaagaacaaacggacgccttgactattacacactttaaactcggttactctaaggcaaaattggagatgaccagaaggaagtatggtgtagcaaccgccgaaggctcacccgtcagtggcgcatcaagcggtgtcggatatggtgctgggtatgatccagcaactgccacttctccaacccctacaggatacggttatggtgccgcagcaccaagttacgccgctcaacctgctgcccagtatggtactgctgccgccgttggtactgctgctgctgttggtactgctgctggtgctgctgctggcgctgttccgggtacttatccacagtatgctgctgcgcaatctccaccgctcactgggctaggcttccaacaatcaccacagcagcaacagggaccaccaccggcctactctaatcctctaacatcacctgttgcgggcacaccagccgcggccgtagcggcagctcctggcgttgaaactgttaccgcattgtatgactaccaagctcaagctgctggtgatttgtctttccctgccggcgcagttatagaaattgtccagcgtactccggacgtgaacgaatggtggacaggaagatacaatggccagcaaggtgtgtttcctgggaactacgtgcaactcaacaagaactag

SEQ ID NO: 2552 - DNA, 1449 bp, Artificial Sequence
  Description of Artificial Sequence: Synthetic polynucleotide
atgagttttaaagggtttaccaaggctgttagtagggctcctcagtccttccgtcaaaagttcaagatgggtgagcagacagaggatcctgtttacgaggatgcagaacgtcgttttcaagaattggagcaggagacaaaaaaattaagtgaggaatccaagagatactccactgcggtgaatggaatgttaacacaccaaattggatttgccaaatccatggaggaaattttcaaacctatcagtggtaaaatgagtgaccctaacgctaccataccagaggacaacccacaaggtattgaagcaagtgaacagtatagggcaattgtcgcagaattacaggaaacattgaaaccggatttggctttggtggaagaaaaaattgttacgccatgccaggaattattgaagattattacttatattcgtaaaatggccaccaagagaaatcacaaaaaattagatttagatagacatttgaacacttataacaagcatgaaaagaagaaggaaccaaccgccaaagacgaagaaagattgtataaagcacaagctcaagtggaagtggctcaacaagaatatgattactataacgacttgttgaagactcaattaccaatattattcagtttggaagctgaatttgtgaaaccattatttgtcagtttttatttcatgcaattgaacattttttacactttgtataatagacttcaagacatgaagattccatattttgatttgaacagtgacattgtagagagttacattgccaagaaaggcaatgtggaagaacaaacggacgccttgactattacacactttaaactcggttactctaaggcaaaattggagatgaccagaaggaagtatggtgtagcaaccgccgaaggctcccccgtcagtggcgcaagtagcggtgtcggatatggtgctgggtatgatccagcaactgccacttctccaacccctacaggatacggttatggtgccgcagcaccaagttacgccgctcaacctgctgcccagtatggtactgctgccgccgttggtactgctgctgctgttggtactgctgctggtgctgctgctggcgctgttccgggtacttatccacagtatgctgctgcgcaatctccaccgctcactgggttgggcttccaacaatctccacagcagcaacagggaccaccaccggcctactctaatcctttaacatctcctgttgcgggcacaccagccgcggccgtagcggcagctcctggcgttgaaactgttaccgcattgtatgactaccaagctcaagctgctggtgatttgtctttccctgccggcgcagttatagaaattgtccagcgtactccggacgtgaacgaatggtggacaggaagatacaatggccagcaaggtgtgtttcctgggaactacgtgcaactcaacaagaactga

SEQ ID NO: 2553 - DNA, 1965 bp, Saccharomyces cerevisiae
atgccaaataatactcttaaacaaggctccaaaattgaaaatgtttctccctctaaaggtcatgtcccaagtttttggaagcagttcataaacaaccctaagagtatgtcatccgaaaatattacagtccctagatcaccaacttctctttcaaggaatgctcaaccaactactttaaaacggcctccattatcttcaagaccatattcatataataccccaaccaaagataggaaatccttttccaaatccgcgaaacagaacaataacaataacaacgctaattccggaacatcgcctcacgcagagttcaaaaattacagagatatgtttttatctaatagaaatggtttcacaggtagggttttcggtgttactttagcagaatcgttgagcgtcgccagtgcagaggtcattgttcaaagtgagttggtgagttttggtcggatacccatcgtggtagccaagtgcggcgcatacttaaaagcaaatggattggagacctcgggtatatttcgtatagcgggcaatggtaaaagagtaaaagcccttcaatacatattctcgtcgccacctgattatggtaccaaattcaacgattgggaaacatatacagtgcacgatgttgcatcgctcctgaggagataccttaataatttggccgaaccactaatacctttatccctatatgaacaattcagaaacccgctacgatctagaccaagaatcctaaggcatatgttgacccacgaagtttctcatccgaatgcgaataaaacaaataatgtaacagtaaaatcaagtagacagaactataatgatgatggtgctaatgatggtgacatcgaaaaggaggacgctaaagatgatgaagaaaaaagacgaagaaaaatacgtcataagagaaggctgacccgcgatataagggcagctatcaaggaatatgaagagctctttgttaccttatcaaatgacacgaaacagctaactatatacctactcgatttactgagtctttttgcaaggcaatcacagtttaacctaatgtctggtagaaacttggcggccatcttccaaccttcaatattatcgcatcctcaacatgatatggaccccaaagaatacgagttatcccgactagtagtggaatttttgattgaatactcgtacaagctattaccccatcttttgaagttggctaaaagggaacaacaggaacggttgtcaaccgaaaataagaaaaataatggagataaacagaaaactgatcctatagaaataccaaagatcacctcatcggattcgccaccaatagtttcttccaataaaaacccaccggcgattgacaataacaataaactagaccatacgacgttatcgccaatatctacttcgataccggagaactcatcagacctacagacttcaaaaatgttaaagcctccgaagcaaagaagaccacactcaaaatcgtttggttctactccggttcctccggatgttattgctagtaataaaagaagaacgagtttattcccgtggttacataaaccgggaattttgagtgacacaggagacaatggcgacttaactgctactgaagctgaaggtgatgattatgaagaagaaaatgttgatccatacggtcagtctccatctagcgtacactcaggttctttgcccaaacagcattatctgccaattcctcgaatgaacagatcgttgagtggaaacagtaccaattcgtcctttaacactagacctatttcaatgatcctgaccagtggtaatgataattccgctgatcaattagaattactaagtaacactcatagcaataatgagcgcagtaatgctttaccattaaccgaagatgatggggatgaaagaaattcaagatcacgcaagagggaatcatggtttcaaagactaacaagccgttcaggctctgctaacagggcttga

SEQ ID NO: 2554 - DNA, 1965 bp, Artificial Sequence
  Description of Artificial Sequence: Synthetic polynucleotide
atgccaaataatactcttaaacaaggctccaaaattgaaaatgtttctccctctaaaggtcatgtcccaagtttttggaagcagttcataaacaaccctaagagtatgtcttccgaaaatattacagtccctagatctccaacttctctttctaggaatgctcaaccaactactttaaaaagacctccattatcttctagaccatattcttataataccccaaccaaagataggaaatccttttccaaatccgcgaaacagaacaataacaataacaacgctaattccggaacatctcctcacgcagagttcaaaaattacagagatatgtttttatctaatagaaatggtttcacaggtagggttttcggtgttactttagcagaatctttgagcgtcgccagtgcagaggtcattgttcaaagtgagttggtgagttttggtagaatacccatcgtggtagccaagtgcggcgcatacttaaaagcaaatggattggagacctctggtatatttcgtatagcgggcaatggtaaaagagtaaaagcccttcaatacatattctcttctccacctgattatggtaccaaattcaacgattgggaaacatatacagtgcacgatgttgcaagtctcttgaggagataccttaataatttggccgaaccattgatacctttatccttatatgaacaattcagaaacccgcttagatctagaccaagaatcttgaggcatatgttgacccacgaagtttctcatccgaatgcgaataaaacaaataatgtaacagtaaaatctagtagacagaactataatgatgatggtgctaatgatggtgacatcgaaaaggaggacgctaaagatgatgaagaaaaaagaagaagaaaaatacgtcataagagaaggttgacccgcgatataagggcagctatcaaggaatatgaagagctctttgttaccttatccaatgacacgaaacagttgactatatacttgctcgatttattaagtctttttgcaaggcaatctcagtttaacttgatgtctggtagaaacttggcggccatcttccaaccttccatattatctcatcctcaacatgatatggaccccaaagaatacgagttatccagattggtagtggaatttttgattgaatactcctacaagcttttaccccatcttttgaagttggctaaaagggaacaacaggaaagattgtccaccgaaaataagaaaaataatggagataaacagaaaactgatcctatagaaataccaaagatcacctcttctgattctccaccaatagtttcttccaataaaaacccaccggcgattgacaataacaataaattagaccatacgacgttatctccaatatctacttccataccggagaactcttctgacttacagacttctaaaatgttaaagcctccgaagcaaagaagaccacactctaaaagttttggttctactccggttcctccggatgttattgctagtaataaaagaagaacgagtttattcccgtggttacataaaccgggaattttgagtgacacaggagacaatggcgacttaactgctactgaagctgaaggtgatgattatgaagaagaaaatgttgatccatacggtcagtctccatctagcgtacactctggttctttgcccaaacagcattatttaccaattcctagaatgaacagaagtttgagtggaaacagtaccaattcttcctttaacactagacctatttccatgatcttgaccagtggtaatgataattccgctgatcaattagaattattaagtaacactcatagcaataatgagcgcagtaatgctttaccattaaccgaagatgatggggatgaaagaaattctagatctcgcaagagggaaagttggtttcaaagattgacaagccgtagcggctctgctaacagggcttga

SEQ ID NO: 2555 - DNA, 1911 bp, Saccharomyces cerevisiae
atgccaagggaaacaagtttggtaacaatcatcggtgaagatagttacaagaaattacggtcctcaagatgtcttctggtcggtgctgggggcatagggtctgaattgttaaaggatataatcttgatggaatttggtgaaatacatattgtcgatttggacaccattgacctttcgaacttaaacaggcaatttctttttagacaaaaagatattaaacaaccgaagtctaccacagccgtaaaagcagtacagcatttcaataactctaagttagtgccttaccaaggaaatgttatggacatttctaccttcccactgcattggtttgagcaatttgacattatcttcaatgctcttgataacttggccgcaagacggtatgtcaataaaatatcacagtttctatcactgcccttaatagaatctggaacagctggatttgatggatacatgcagcctattatccccgggaaaactgagtgttttgaatgtacaaagaaggaaacaccaaagacttttcctgtgtgtactatcaggtccactccttctcagccaattcattgcattgtttgggcgaaaaactttctatttaaccagctatttgcgtcagagacctctggaaatgaagatgataacaaccaggattggggtacagatgatgctgaagaaattaagcgcattaaacaagaaactaatgaattgtatgaattgcaaaaaattatcatatcaagagatgcatcccgtattccagagattcttaataaattattcattcaggatataaataaactgctagccattgaaaatttatggaaaacgagaacaaagccagtaccattatcagactctcaaataaatactcctactaaaacagctcagtctgcctctaattctgttggcacaatacaggagcaaattagtaatttcattaatattacacaaaaattaatggatcgctatcccaaagagcaaaatcatattgaatttgataaagatgatgctgatactttggaattcgtcgcaactgctgcgaacataaggtcacacatattcaatattccaatgaagtccgtatttgacatcaagcaaattgctggtaacattatcccggctattgcaacaacgaatgctatcgttgccggtgcatcgtcattgatttcactgcgcgttttaaatcttttgaaatatgccccaactactaagtatactgatttgaatatggctttcacagcaaaggcaagcaatctatcccaaaatcgttatttatcaaatccgaaactagcccctccaaataaaaattgcccagtttgctctaaagtttgtagaggtgttattaagttatccagcgattgtttgaacaaaatgaaactaagtgattttgtagttttaatacgcgagaagtactcatatccacaggatatttcgctcctggacgcaagtaatcaaaggttactatttgattacgatttcgaggatttgaacgatcgtactttatcggagattaatcttggaaatggttctataatattattctccgacgaagaaggtgatacaatgatccgcaaagccatagaattatttcttgatgttgatgatgaactcccatgtaatacttgcagcttaccggacgttgaagtcccattaataaaggccaacaatagtccttcaaaaaatgaagaagaagaaaaaaatgaaaagggtgcagatgtagtcgcaactacgaacagtcatgggaaagatggtatcgtgatattagacgacgatgaaggtgagatcaccatcgatgctgaaccgatcaatggttcaaagaagaggccagttgatactgagatttctgaggcgcccagtaacaaaaggacaaagttagttaatgaaccgactaattctgatattgttgaattagactaa

SEQ ID NO: 2556 - DNA, 1911 bp, Artificial Sequence
  Description of Artificial Sequence: Synthetic polynucleotide
atgccaagggaaacaagtttggtaacaatcatcggtgaagatagttacaagaaattaagatccagcagatgtcttttggtcggtgctgggggcatagggtctgaattgttaaaggatataatcttgatggaatttggtgaaatacatattgtcgatttggacaccattgacctttccaacttaaacaggcaatttctttttagacaaaaagatattaaacaaccgaagtctaccacagccgtaaaagcagtacagcatttcaataactctaagttagtgccttaccaaggaaatgttatggacatttctaccttcccattgcattggtttgagcaatttgacattatcttcaatgctcttgataacttggccgcaagaagatatgtcaataaaatatctcagtttttatctttacccttaatagaatctggaacagctggatttgatggatacatgcagcctattatccccgggaaaactgagtgttttgaatgtacaaagaaggaaacaccaaagacttttcctgtgtgtactatcaggtccactccttctcagccaattcattgcattgtttgggcgaaaaactttttgtttaaccagttatttgcgtctgagacctctggaaatgaagatgataacaaccaggattggggtacagatgatgctgaagaaattaagcgcattaaacaagaaactaatgaattgtatgaattgcaaaaaattatcatatctagagatgcatcccgtattccagagattcttaataaattattcattcaggatataaataaattattagccattgaaaatttatggaaaacgagaacaaagccagtaccattaagtgactctcaaataaatactcctactaaaacagctcagtctgcctctaattctgttggcacaatacaggagcaaattagtaatttcattaatattacacaaaaattaatggatcgctatcccaaagagcaaaatcatattgaatttgataaagatgatgctgatactttggaattcgtcgcaactgctgcgaacataaggtctcacatattcaatattccaatgaagtccgtatttgacatcaagcaaattgctggtaacattatcccggctattgcaacaacgaatgctatcgttgccggtgcatcttctttgatttctttacgcgttttaaatcttttgaaatatgccccaactactaagtatactgatttgaatatggctttcacagcaaaggcaagcaatttatcccaaaatcgttatttatccaatccgaaattggcccctccaaataaaaattgcccagtttgctctaaagtttgtagaggtgttattaagttatccagcgattgtttgaacaaaatgaaattaagtgattttgtagttttaatacgcgagaagtactcctatccacaggatatttctctcttggacgcaagtaatcaaaggttactttttgattacgatttcgaggatttgaacgatcgtactttatctgagattaatcttggaaatggttctataatattattctccgacgaagaaggtgatacaatgatccgcaaagccatagaattatttcttgatgttgatgatgaactcccatgtaatacttgcagcttaccggacgttgaagtcccattaataaaggccaacaatagtccttccaaaaatgaagaagaagaaaaaaatgaaaagggtgcagatgtagtcgcaactacgaacagtcatgggaaagatggtatcgtgatattagacgacgatgaaggtgagatcaccatcgatgctgaaccgatcaatggttccaagaagaggccagttgatactgagatttctgaggcgcccagtaacaaaaggacaaagttagttaatgaaccgactaattctgatattgttgaattagactga

SEQ ID NO: 2557 - DNA, 699 bp, Saccharomyces cerevisiae
atgtccttcgagaacaaactgccaactccattagaaaacaacgatgctaagggccatatggtctgtaccctgaacaagactacggatgccagaagagcagcagagactttgtctattgcttttagtaactcgccagcgtttcattttatctgcaagaaaatcttaaatattcctctagctgagaaggtgcctacaaggacaataaccaccgatatcatatcgccattcctggattcaccttatggtgagatctccgaagttaatactttcgatgctgttgcagtgtggagtcttccacctcacgttccgaaggcaaggagtaatgatgcaaagttcaacaaggactttattgacgatttaaatgctcgcgtaaagcaagtcattccaaatggcatcaattactactatcttttctgtattggtaagaacttaaatgagaaaggaatcagaggttctgtaaggactatttttgaagagtacaaaaggagagcagacgaagaaaattgcgccattgtccttgaagctattgccgagcatgctaaatctgtgtacgaatattttggatttagaaattacatgacgttcaaatacggtgagtgtgaggtcgactctaacggcaattgcgatccgaatggtgaagggttcacagcctatttaatgatatatcataaggacggtaataaagtcttaaaagagtag

SEQ ID NO: 2558 - DNA, 699 bp, Artificial Sequence
  Description of Artificial Sequence: Synthetic polynucleotide
atgtccttcgagaacaaattaccaactccattagaaaacaacgatgctaagggccatatggtctgtaccttgaacaagactacggatgccagaagagcagcagagactttgtctattgcttttagtaactctccagcgtttcattttatctgcaagaaaatcttaaatattcctttggctgagaaggtgcctacaaggacaataaccaccgatatcatatctccattcttggattctccttatggtgagatctccgaagttaatactttcgatgctgttgcagtgtggagtcttccacctcacgttccgaaggcaaggagtaatgatgcaaagttcaacaaggactttattgacgatttaaatgctcgcgtaaagcaagtcattccaaatggcatcaattactactatcttttctgtattggtaagaacttaaatgagaaaggaatcagaggttctgtaaggactatttttgaagagtacaaaaggagagcagacgaagaaaattgcgccattgtccttgaagctattgccgagcatgctaaatctgtgtacgaatattttggatttagaaattacatgacgttcaaatacggtgagtgtgaggtcgactctaacggcaattgcgatccgaatggtgaagggttcacagcctatttaatgatatatcataaggacggtaataaagtcttaaaagagtga

SEQ ID NO: 2559 - DNA, 1014 bp, Saccharomyces cerevisiae
atgatggacaagcataagtatcgtgtggagattcaacagatgatgtttgtctctggtgaaattaacgacccacccgtagaaaccacatcactgatagaagatatagtgaggggtcaagtgatagaaattcttttacagtcaaacaaaacggcgcatcttaggggaagtaggagcattctccctgaagacgtcattttcttgatcagacacgacaaggccaaagtcaatcgtttgagaacatatctgtcatggaaggatttgcgtaaaaacgccaaggaccaagatgctagtgccggtgtagcgagtggcactggaaatcctggggcaggtggtgaagatgatttgaaaaaagcaggtggtggcgagaaagacgaaaaagatggtggaaacatgatgaaggtcaagaaatcccaaattaagctgccatgggaattgcagtttatgttcaatgaacatcctttagaaaataatgacgacaatgatgatatggatgaggatgaacgagaagctaatatagtcactttgaaaaggctgaaaatggctgacgatagaacacgaaacatgactaaagaggagtacgtgcattggtccgattgtcgacaggcaagttttacatttaggaagaataaaaggttcaaggactggtctggaatttcgcaattaactgaggggaaaccccatgatgatgtgattgatatactggggtttctaacttttgagattgtctgttctttgacggaaacagctctgaaaatcaaacaaagagaacaggtattacagactcaaaaggacaaatcccagcaatctagccaagataatactaactttgaatttgcatcatccacattacatagaaagaaaagattatttgatggacctgaaaatgttataaacccgctcaaaccaaggcatatagaggaagcctggagagtactacaaacaattgacatgaggcatagggctttgaccaactttaaaggtggtagactcagttctaaaccaattatcatgtaa

SEQ ID NO: 2560 - DNA, 1014 bp, Artificial Sequence
  Description of Artificial Sequence: Synthetic polynucleotide
atgatggacaagcataagtatcgtgtggagattcaacagatgatgtttgtctctggtgaaattaacgacccacccgtagaaaccacatctttgatagaagatatagtgaggggtcaagtgatagaaattcttttacagtccaacaaaacggcgcatcttaggggaagtaggagcattctccctgaagacgtcattttcttgatcagacacgacaaggccaaagtcaatcgtttgagaacatatttatcttggaaggatttgcgtaaaaacgccaaggaccaagatgctagtgccggtgtagcgagtggcactggaaatcctggggcaggtggtgaagatgatttgaaaaaagcaggtggtggcgagaaagacgaaaaagatggtggaaacatgatgaaggtcaagaaatcccaaattaagttaccatgggaattgcagtttatgttcaatgaacatcctttagaaaataatgacgacaatgatgatatggatgaggatgaaagagaagctaatatagtcactttgaaaaggttgaaaatggctgacgatagaacaagaaacatgactaaagaggagtacgtgcattggtccgattgtagacaggcaagttttacatttaggaagaataaaaggttcaaggactggtctggaatttctcaattaactgaggggaaaccccatgatgatgtgattgatatattagggtttttaacttttgagattgtctgttctttgacggaaacagctttgaaaatcaaacaaagagaacaggtattacagactcaaaaggacaaatcccagcaatctagccaagataatactaactttgaatttgcatcttccacattacatagaaagaaaagattatttgatggacctgaaaatgttataaacccgctcaaaccaaggcatatagaggaagcctggagagtattacaaacaattgacatgaggcatagggctttgaccaactttaaaggtggtagactcagttctaaaccaattatcatgtga

SEQ ID NO: 2561 - DNA, 1371 bp, Saccharomyces cerevisiae
atgttgagatactatggggcgacaagaaacttacccttagtattcagcattaacaaattaatgttgagggcgtcatctttcaccaggccatttcattatagttcatattctctacagaacggtgatactcctgataaaggcagcactaataaaaatgaaatacggacacctaataacgctgtttggaaagaaaatatagaacttcaatggcagcacttgaaaaagaaattaaatgaattgtattctaggtttaacttccaccgagatcaattatcctttcaagttaacaaggccaaaaaatcaattcaagaggcaaacaggaagttgtctgagcaagagaatgaaatcaacgattcccgtttaaactataataaagatgaattgaccagtgcgaaaattgaaggattgccctccgaaagggaacaacatagaaaaaaatggtctagaaagttagagttttattttgactcattacaggagacgttatttactgccacacgtgctttaaatgatgtgaccggttattctggaattcaaaagctcaaatctagcatcagtctaatggaaaaaaaattagaagctacaaagaaagaacacaaactgtttaaggcacagtacgctaacgccattgatgaacgtgctcaatcccaaagagaagttaacgaattattgcaaaggcaaagcgcgtggtcttcgagcgatttagagagatttacgcagctatacaaaaatgacgccttgaatgctagacaggagcaagaactaaaaaacaaggttaaagaaattgaaagcaaagaagaacaactaaatgacgacttgtatagagcaattttgaccaggtaccatgaggaacaaatatggtcagacaaaatccgaagaacatccacctggggtacattcatcttaatgggtatgaatatattcttgtttattgtcctacaattactattagaaccttggaaacggaaaaggttagtaggatcgtttgaagacaaagtcaaaagcgctctcaacgaatatgccaaggagcagaatatgaagatggataaattgttacctggaaaatcatcggaagtaacagaccaaggcaacacagaaaactcgatcgttgaagagcacatagaacagagaggtgaatgtaaaattaatacggcggaaatcgacaggcctgaagttgcaacggctgagaccactacaacagaaatgaaatccttcagagatatttgggaacgaataaaggcactttttgtcacactaaaaagcatacaatataggaaacttgacgctcccctagtctttgacaccttagagttctacttatactcaatttctttagtgagtatgacaatcttggtatccgggctgatatga

SEQ ID NO: 2562 - DNA, 1371 bp, Artificial Sequence
  Description of Artificial Sequence: Synthetic polynucleotide
atgttgagatactatggggcgacaagaaacttacccttagtattcagcattaacaaattaatgttgagggcgtcttctttcaccaggccatttcattatagttcttattctttgcagaacggtgatactcctgataaaggcagcactaataaaaatgaaataagaacacctaataacgctgtttggaaagaaaatatagaacttcaatggcagcacttgaaaaagaaattaaatgaattgtattctaggtttaacttccacagagatcaattatcctttcaagttaacaaggccaaaaaatccattcaagaggcaaacaggaagttgtctgagcaagagaatgaaatcaacgattcccgtttaaactataataaagatgaattgaccagtgcgaaaattgaaggattgccctccgaaagggaacaacatagaaaaaaatggtctagaaagttagagttttattttgactctttacaggagacgttatttactgccacacgtgctttaaatgatgtgaccggttattctggaattcaaaagctcaaatctagcatcagtttaatggaaaaaaaattagaagctacaaagaaagaacacaaattatttaaggcacagtacgctaacgccattgatgaacgtgctcaatcccaaagagaagttaacgaattattgcaaaggcaaagcgcgtggtcttctagcgatttagagagatttacgcagttatacaaaaatgacgccttgaatgctagacaggagcaagaattgaaaaacaaggttaaagaaattgaaagcaaagaagaacaattgaatgacgacttgtatagagcaattttgaccaggtaccatgaggaacaaatatggtctgacaaaatcagaagaacatccacctggggtacattcatcttaatgggtatgaatatattcttgtttattgtcttacaattattattagaaccttggaaaagaaaaaggttagtaggaagttttgaagacaaagtcaaaagcgctctcaacgaatatgccaaggagcagaatatgaagatggataaattgttacctggaaaaagctctgaagtaacagaccaaggcaacacagaaaactctatcgttgaagagcacatagaacagagaggtgaatgtaaaattaatacggcggaaatcgacaggcctgaagttgcaacggctgagaccactacaacagaaatgaaatccttcagagatatttgggaaagaataaaggcactttttgtcacattaaaaagcatacaatataggaaacttgacgctcccttggtctttgacaccttagagttctacttatactctatttctttagtgagtatgacaatcttggtatccgggttgatatga

SEQ ID NO: 2563 - DNA, 1287 bp, Saccharomyces cerevisiae
atggaggaactaggtattgtgacacctgtcgaaaaggcagtcgaagaaaaaccagccgtcaaatcatacgcatcattgttggctcaactcaatggtacagtcaacaataacagtgccctgtctaatgtgaattctgatatatatttcaaattgaagaaattagaaaaagagtatgaactgctgactttgcaagaagactatattaaggacgaacaacgccatttgaaacgtgaattgaagagagctcaagaagaagtaaagagaatccagtcggttccattagttatcgggcaattcttagaacctattgatcagaacacaggtattgtttctagtaccacaggtatgagttatgtcgttagaatattatcaaccctagaccgtgaactattaaagccatctatgtctgtagctttacatcgtcattcaaatgctttagttgacatcctaccacctgattccgactctagcatatccgtaatgggcgaaaacgaaaaacctgacgtcacttatgcagatgttggtgggttagatatgcaaaagcaagaaatcagggaagccgtagagctgccattagttcaggctgatctatacgagcaaatcggtattgaccctcctaggggtgttctattatatggtccaccaggtaccggtaagacgatgcttgttaaagccgtcgccaatagtacaaaagctgcattcataagagttaatggctccgaatttgttcacaaatatcttggtgaaggtccaagaatggttcgtgacgtctttagactcgccagggaaaatgctccatccattatattcatagatgaggtagattccattgccacaaagcgttttgatgctcaaacgggttccgatcgtgaagtacagcgtatcctgattgagttgttgacacaaatggatggtttcgatcaatccaccaacgttaaagtcatcatggctacaaacagggcagacacattggacccagctttgctgagaccaggcagattagatagaaagattgagtttccctcacttcgtgataggcgtgaacgtcgtttgattttcggtaccattgccagtaagatgtcccttgccccagaagcggacttagactcgcttattattcgtaacgactctctatcaggtgctgttattgcagcgatcatgcaggaagctggtttaagagcagtgaggaaaaacagatatgtcatcttacaaagcgatctggaagaagcttacgccactcaagtcaagacagataataccgtcgataaattcgacttctacaaatga

SEQ ID NO: 2564 - DNA, 1287 bp, Artificial Sequence
  Description of Artificial Sequence: Synthetic polynucleotide
atggaggaattgggtattgtgacacctgtcgaaaaggcagtcgaagaaaaaccagccgtcaaatcttacgcaagtttgttggctcaactcaatggtacagtcaacaataacagtgccttatctaatgtgaattctgatatatatttcaaattgaagaaattagaaaaagagtatgaattattaactttgcaagaagactatattaaggacgaacaacgccatttgaaacgtgaattgaagagagctcaagaagaagtaaagagaatccagtctgttccattagttatcgggcaattcttagaacctattgatcagaacacaggtattgtttctagtaccacaggtatgagttatgtcgttagaatattatctaccttagaccgtgaattattaaagccatctatgtctgtagctttacatcgtcattctaatgctttagttgacatcttgccacctgattccgactctagcatatccgtaatgggcgaaaacgaaaaacctgacgtcacttatgcagatgttggtgggttagatatgcaaaagcaagaaatcagggaagccgtagagttaccattagttcaggctgatttatacgagcaaatcggtattgaccctcctaggggtgttttattatatggtccaccaggtaccggtaagacgatgcttgttaaagccgtcgccaatagtacaaaagctgcattcataagagttaatggctccgaatttgttcacaaatatcttggtgaaggtccaagaatggttcgtgacgtctttagactcgccagggaaaatgctccatccattatattcatagatgaggtagattccattgccacaaagcgttttgatgctcaaacgggttccgatcgtgaagtacagcgtatcttgattgagttgttgacacaaatggatggtttcgatcaatccaccaacgttaaagtcatcatggctacaaacagggcagacacattggacccagctttgttaagaccaggcagattagatagaaagattgagtttccctcccttcgtgataggcgtgaacgtcgtttgattttcggtaccattgccagtaagatgtcccttgccccagaagcggacttagactctcttattattcgtaacgactctttatctggtgctgttattgcagcgatcatgcaggaagctggtttaagagcagtgaggaaaaacagatatgtcatcttacaaagcgatttggaagaagcttacgccactcaagtcaagacagataataccgtcgataaattcgacttctacaaatga

SEQ ID NO: 2565 - DNA, 2835 bp, Saccharomyces cerevisiae
atggtacaagaacaggcaattttgagctgcattgagcagactatggttgctgatgcaaaaattatcaaagaggcagaacagcagttatttgagttccagaagcaacctgggtttacttcttttctgcttaatatagtgtctgatgataattttgcgctaaatgttcgtctttcttctgctatttatttgaagaataagattcacagatcatgggatactaagagagaagatggtataaaagctgacgaaaagctttcgatcaaggaaaggttaatcgagactttagttaaaaactgtgaaaataaccacattaggcctatcctgactgaaaccataaatgggatacttgttggtcaggaagattgggatttagcacctattatcaagaatttattatcgagcggtgacgcatcgtacatttatcccgggttactactactgttccaactttgtaaagctcataggtgggacatggttgggtcgagagattatattgattctgttatcgaagaacttttccctattgtggaagggatagcttctaatatcggtagtcaaacggattacagatctaatgaaatattgtacctcattttgaagtcattcaagtatgcatgtttgaacaacttgcctcaatacttcagccaacctgaaagaattatgtcatgggtgcaactacatttgtatttatgttccaaaccattaccagtcgaagtaatggaactggatcccgcagataggtccctagacaaaagggttaaagtgaacaaatgggggttcggtaacttaaacagattcctgcaaagatacaacaaaattacaaaggccatcaccaaggaatttatcgactatatcttcaatactattgttcctataattcttcgagaattttttaaggatattgaagcttggggtaataattcactatggttatccgattcctctttgtatttcttaatttcattcctagagaaatgtgttacaatagatcaactttatcctttaattgagccacatttacaaattatttttgagaacgtcatcttcccatgtttgtgtgctaatgaacaatccatcgaattattagaagatgaccaagaggaatataccaggcgttattttgacattaacagagaaggctctacgccagatgctgcttcagcagatttcatattcttgattgggtccaaacgtcctgagaaactgaacaatattttaccgttcattaatgatatttttactagattcgatgccaattccagtgatattaacatggcatttaaagaagagggtgctttgagaacattgtctaacttgttttcgtttatagatgagccatccgttctggagaatatttttggacacttcatcgtgccattgttatcgcaggataagtacatgtttttggttgcaagaagtttggaaacgatagcgctgtattcggaagaatttaaagatatgaacatattgtcacaattatttgagttaacatataccaacttcttaaacagtaacgttttaccagtccaaattgaggccgcagatgccattaaatgtttaattgtatccaatcctcaaatccacccagcggtctctgctcatgttccaggtatgatggaaaagctattgaaattgtctaaaatctttgaaatcgatatcttatctgaagtcatggaagcattggtggagagattttcagatgaactatccccatttgctaaagatttagcttcaaacctagtcgaacaatttttacgtattgctcaagcattggtagaaaatccatcggaaacctacagcgcaagtgaccaagagcaggaaatccaggccagtggattgttacaaacaatgactactatggtcatgtcaatgaataaagttccattaatcgagtccttagctcccgtggtcaagtttgttgtacttcatgcacaaatttcttttattacggaagctgtcgacttactggatgctttaactatttcttcgcatctgctttataaccaaattgcaccaccaatatgggagttgttacatgatatattggattctttccaaacttatgccatggactattttgaggcctacagtattttttttgaaaccatcgtgatgaccggcttcccacaagatcaaacttatgttcaacctctgctagaaattctctctgctaaactggaaagtgaagttgactacgacatcgagcatgttatgcaaattctaatgtacttcgcactgtccatgagagacattccattattcagcaaagccatcaaagtatccactaatgatgagctaggattggactctaaatgcatcgttaaactgggactggccaatttgtttgctaaaccaatcgaaactttacaaataatggaaaatgaaggttttactataaatttctttaccaattggtttaatgaaaagttctacagtgtcttcgccatcaaattacaagtcctggtcattttaacccttttgaagatgcctgaagttcctaatagtgtcagcccactactaaataacctgaccaataaactggtggaattgacattatcattgccaaaggcaattagaaaccgtgatgctgttaccgagggcaaatccttagaaggagacctgaccccagaagaagaagaagaatactttatcgaatgtgatgatgatatgaaggagacagtgttagaccaaattaatgttttccaggaagtacatacctttttcaagaatttgcaaaacgaagatgccggtaagtacgaaaaaatcataaattatctggatgaatctaagagagattccttgcaggtaattctggaatttgtttctcaacactga

SEQ ID NO: 2566 - DNA, 2835 bp, Artificial Sequence
  Description of Artificial Sequence: Synthetic polynucleotide
atggtacaagaacaggcaattttgagctgcattgagcagactatggttgctgatgcaaaaattatcaaagaggcagaacagcagttatttgagttccagaagcaacctgggtttacttcttttttacttaatatagtgtctgatgataattttgcgttgaatgttcgtctttcttctgctatttatttgaagaataagattcacagaagttgggatactaagagagaagatggtataaaagctgacgaaaagctttctatcaaggaaaggttaatcgagactttagttaaaaactgtgaaaataaccacattaggcctatcttgactgaaaccataaatgggatacttgttggtcaggaagattgggatttagcacctattatcaagaatttattatccagcggtgacgcaagctacatttatcccgggttattattattattccaactttgtaaagctcataggtgggacatggttgggtccagagattatattgattctgttatcgaagaacttttccctattgtggaagggatagcttctaatatcggtagtcaaacggattacagatctaatgaaatattgtacctcattttgaagagtttcaagtatgcatgtttgaacaacttgcctcaatacttcagccaacctgaaagaattatgtcttgggtgcaattgcatttgtatttatgttccaaaccattaccagtcgaagtaatggaattagatcccgcagataggtccttggacaaaagggttaaagtgaacaaatgggggttcggtaacttaaacagattcttacaaagatacaacaaaattacaaaggccatcaccaaggaatttatcgactatatcttcaatactattgttcctataattcttagagaattttttaaggatattgaagcttggggtaataattctctttggttatccgattcctctttgtatttcttaatttctttcttggagaaatgtgttacaatagatcaactttatcctttaattgagccacatttacaaattatttttgagaacgtcatcttcccatgtttgtgtgctaatgaacaatccatcgaattattagaagatgaccaagaggaatataccaggcgttattttgacattaacagagaaggctctacgccagatgctgcttctgcagatttcatattcttgattgggtccaaacgtcctgagaaattgaacaatattttaccgttcattaatgatatttttactagattcgatgccaattccagtgatattaacatggcatttaaagaagagggtgctttgagaacattgtctaacttgttttcttttatagatgagccatccgttttggagaatatttttggacacttcatcgtgccattgttatctcaggataagtacatgtttttggttgcaagaagtttggaaacgatagcgttatattctgaagaatttaaagatatgaacatattgtctcaattatttgagttaacatataccaacttcttaaacagtaacgttttaccagtccaaattgaggccgcagatgccattaaatgtttaattgtatccaatcctcaaatccacccagcggtctctgctcatgttccaggtatgatggaaaagttgttgaaattgtctaaaatctttgaaatcgatatcttatctgaagtcatggaagcattggtggagagattttctgatgaattatccccatttgctaaagatttagcttctaacttggtcgaacaatttttacgtattgctcaagcattggtagaaaatccatctgaaacctacagcgcaagtgaccaagagcaggaaatccaggccagtggattgttacaaacaatgactactatggtcatgtccatgaataaagttccattaatcgagtccttagctcccgtggtcaagtttgttgtacttcatgcacaaatttcttttattacggaagctgtcgacttattagatgctttaactatttcttctcatttgctttataaccaaattgcaccaccaatatgggagttgttacatgatatattggattctttccaaacttatgccatggactattttgaggcctacagtattttttttgaaaccatcgtgatgaccggcttcccacaagatcaaacttatgttcaacctttattggaaattctctctgctaaattagaaagtgaagttgactacgacatcgagcatgttatgcaaattttgatgtacttcgcattgtccatgagagacattccattattcagcaaagccatcaaagtatccactaatgatgagttaggattggactctaaatgcatcgttaaattaggattggccaatttgtttgctaaaccaatcgaaactttacaaataatggaaaatgaaggttttactataaatttctttaccaattggtttaatgaaaagttctacagtgtcttcgccatcaaattacaagtcttggtcattttaacccttttgaagatgcctgaagttcctaatagtgtcagcccattgttgaataacttgaccaataaattagtggaattgacattatctttgccaaaggcaattagaaaccgtgatgctgttaccgagggcaaatccttagaaggagacttgaccccagaagaagaagaagaatactttatcgaatgtgatgatgatatgaaggagacagtgttagaccaaattaatgttttccaggaagtacatacctttttcaagaatttgcaaaacgaagatgccggtaagtacgaaaaaatcataaattatttggatgaatctaagagagattccttgcaggtaattttggaatttgtttctcaacactga

SEQ ID NO: 2567 - DNA, 441 bp, Saccharomyces cerevisiae
atggctggagactccgataatgtgtcgcttcccaaggcgaccgtacaaaagatgatatctgaaatactggaccaggatttgatgtttaccaaggatgcaagagaaatcatcatcaactccggcatagaattcataatgatcctgtcctcgatggcttccgaaatggcggacaacgaggctaagaaaaccatagcgcccgagcacgtgatcaaagcgctagaagagttggagtataatgagtttataccattcttagaggaaatattattgaattttaagggttcccagaaggtgaaagaaactagggattccaagttcaagaagtcaggtctctcggaagaagagctgctacgacaacaagaggagttgtttagacagtcaaggtccagattacaccacaatagtgtatctgatccggttaagtcggaggattcttcttga

SEQ ID NO: 2568 - DNA, 441 bp, Artificial Sequence
  Description of Artificial Sequence: Synthetic polynucleotide
atggctggagactccgataatgtgtctcttcccaaggcgaccgtacaaaagatgatatctgaaatattggaccaggatttgatgtttaccaaggatgcaagagaaatcatcatcaactccggcatagaattcataatgatcttgtcctctatggcttccgaaatggcggacaacgaggctaagaaaaccatagcgcccgagcacgtgatcaaagcgttagaagagttggagtataatgagtttataccattcttagaggaaatattattgaattttaagggttcccagaaggtgaaagaaactagggattccaagttcaagaagtctggtctctctgaagaagagttacttagacaacaagaggagttgtttagacagtctaggtccagattacaccacaatagtgtatctgatccggttaagagtgaggattcttcttga

SEQ ID NO: 2569 - DNA, 1932 bp, Saccharomyces cerevisiae
atggattctcctgttctacagtccgcttatgacccatcaggtcagtatttgtgttatgtcactgtagctttggacaagcaacgcgttggtgtacagcccactcaaagggccacttcctccggagttgatacagtgtggaatgagaattttctgtatttagaggactcgaaattgaaggtgacgtgcttaaaatgggtaaacctggcttcttccgacacagtggctattatattgggtatgaataacggtgaaatttggctatattccgtattggccaacgaagtcacctataaattcactacggggaattcttacgaaatcaaagacatagacttgatgggtaatcaactgtggtgtatcgactccagcgacgcattctatcagttcgatctgttacaattcaaactgttacaacattttagaataaacaactgcgttcaattgaataaactaaccattgttccagcaggcgattctgttgcacaacttttggttgcatcccattccatttctttaatagacatcgaagagaaaaaagtcgtaatgacatttcccggtcatgtatctccagtgtccacattgcaagttataactaatgaatttttcatatcaggcgcagagggtgatagattcttgaacgtatatgatattcattccggtatgaccaaatgcgtccttgtggctgaatcagatatcaaggagttatctcattcaggccaagccgattctatcgcagtcactaccgaggatggtagcttggaaatttttgttgatccattggtatcgagttcaacaaagaaaagaggcaacaagtccaaaaaatccagcaaaaagattcaaatcgtcagtaaagacggcaggaaagttccaatttataacgcatttattaataaagaccttttgaacgtatcgtggttacaaaatgctactatgccttacttcaagaacttgcagtggagagaaatccctaatgaatataccgtcgaaatttccctaaattggaataataaaaataagtccgccgatcgcgatctacacggtaaagatcttgcctcagccaccaactacgtggaaggtaatgcaagagtcacctctggagataacttcaagcatgttgatgacgctataaagagctgggaaagagaattgacttctttggaacaagaacaggccaagcccccacaggccaatgaactattaacagaaacatttggtgataagctagaatcaagcaccgtcgcaaggattagtgggaaaaaaacaaatttaaaaggttccaatctcaagactgctacgacaaccgggacggtaacagtaattctgtcgcaagcactacaatcaaatgatcattcactgttggaaacagtgctcaataatcgtgacgagagggtcattagggatactatcttccgtctgaaaccagcactggctgtcattctcttagaaaggttggcagagaggattgcaagacaaacccaccgtcaaggcccattgaatgtttgggtaaaatggtgtttaatcatacacggtggctatttggtttctattccaaatttgatgtctactctatcgtcgttacattccaccttgaaaaggcgttccgacttattaccaaggctactagcactggatgcaaggttagactgtactataaataaattcaaaactttgaactatgaagcaggcgacatccactcatccgaaccagttgtcgaagaggacgaagacgacgttgaatataacgaagaactcgatgatgccggccttatagaggacggtgaagaatcttatggcagtgaagaagaagaagaaggtgatagtgacaacgaagaggaacagaagcatacctcatctaagcaagatggccgtttagaaacggagcagagcgacggcgaggaggaagccggatatagtgacgttgagatggaatag

SEQ ID NO: 2570 - DNA, 1932 bp, Artificial Sequence
  Description of Artificial Sequence: Synthetic polynucleotide
atggattctcctgttttacagtccgcttatgacccatctggtcagtatttgtgttatgtcactgtagctttggacaagcaacgcgttggtgtacagcccactcaaagggccacttcctccggagttgatacagtgtggaatgagaattttttatatttagaggactctaaattgaaggtgacgtgcttaaaatgggtaaacttggcttcttccgacacagtggctattatattgggtatgaataacggtgaaatttggttatattccgtattggccaacgaagtcacctataaattcactacggggaattcttacgaaatcaaagacatagacttgatgggtaatcaattatggtgtatcgactccagcgacgcattctatcagttcgatttattacaattcaaattattacaacattttagaataaacaactgcgttcaattgaataaattgaccattgttccagcaggcgattctgttgcacaacttttggttgcatcccattccatttctttaatagacatcgaagagaaaaaagtcgtaatgacatttcccggtcatgtatctccagtgtccacattgcaagttataactaatgaatttttcatatctggcgcagagggtgatagattcttgaacgtatatgatattcattccggtatgaccaaatgcgtccttgtggctgaaagtgatatcaaggagttatctcattctggccaagccgattctatcgcagtcactaccgaggatggtagcttggaaatttttgttgatccattggtatctagttctacaaagaaaagaggcaacaagtccaaaaaatccagcaaaaagattcaaatcgtcagtaaagacggcaggaaagttccaatttataacgcatttattaataaagaccttttgaacgtaagctggttacaaaatgctactatgccttacttcaagaacttgcagtggagagaaatccctaatgaatataccgtcgaaatttccttgaattggaataataaaaataagtccgccgatcgcgatttacacggtaaagatcttgcctctgccaccaactacgtggaaggtaatgcaagagtcacctctggagataacttcaagcatgttgatgacgctataaagagctgggaaagagaattgacttctttggaacaagaacaggccaagcccccacaggccaatgaattattaacagaaacatttggtgataagttggaaagtagcaccgtcgcaaggattagtgggaaaaaaacaaatttaaaaggttccaatctcaagactgctacgacaaccgggacggtaacagtaattttatctcaagcattacaaagcaatgatcattctttgttggaaacagtgctcaataatcgtgacgagagggtcattagggatactatcttccgtttgaaaccagcattggctgtcattctcttagaaaggttggcagagaggattgcaagacaaacccaccgtcaaggcccattgaatgtttgggtaaaatggtgtttaatcatacacggtggctatttggtttctattccaaatttgatgtctactttatcttctttacattccaccttgaaaaggcgttccgacttattaccaaggcttttagcattggatgcaaggttagactgtactataaataaattcaaaactttgaactatgaagcaggcgacatccactcttccgaaccagttgtcgaagaggacgaagacgacgttgaatataacgaagaactcgatgatgccggccttatagaggacggtgaagaatcttatggcagtgaagaagaagaagaaggtgatagtgacaacgaagaggaacagaagcatacctcttctaagcaagatggccgtttagaaacggagcagagcgacggcgaggaggaagccggatatagtgacgttgagatggaatga

SEQ ID NO: 2571 - DNA, 666 bp, Saccharomyces cerevisiae
atgtcggcaaacgataagcaatacatctcgtacaacaacgtacatcaactatgtcaagtatccgctgagagaattaagaatttcaagccggacttaatcattgccattggtggtggtggtttcattcctgctaggatcctacgtacgttcctaaaggagcccggcgtgccaaccatcagaatttttgctattattttgtctttgtacgaagatttgaacagtgtaggctcagaagttgaggaagttggtgttaaggttagcagaacacaatggattgattacgagcaatgtaaattagatctagtcggcaagaacgttcttatcgttgacgaagtcgatgacacccgtaccacacttcattacgctttgagtgaattggaaaaggatgcagctgaacaggcaaaggctaaaggtatcgatactgaaaagtctccagagatgaaaacaaacttcgggatttttgttctacacgataagcaaaaaccaaagaaagcagatttgcctgccgaaatgttgaatgacaagaaccgttattttgcagctaaaactgttccagacaagtggtatgcatatccatgggaatctactgacattgttttccatactagaatggctattgaacagggcaatgacatctttattcctgagcaggaacacaagcaatga

SEQ ID NO: 2572 - DNA, 666 bp, Artificial Sequence
  Description of Artificial Sequence: Synthetic polynucleotide
atgtctgcaaacgataagcaatacatctcctacaacaacgtacatcaattatgtcaagtatccgctgagagaattaagaatttcaagccggacttaatcattgccattggtggtggtggtttcattcctgctaggatcttacgtacgttcttgaaggagcccggcgtgccaaccatcagaatttttgctattattttgtctttgtacgaagatttgaacagtgtaggctctgaagttgaggaagttggtgttaaggttagcagaacacaatggattgattacgagcaatgtaaattagatttggtcggcaagaacgttcttatcgttgacgaagtcgatgacacccgtaccacacttcattacgctttgagtgaattggaaaaggatgcagctgaacaggcaaaggctaaaggtatcgatactgaaaagtctccagagatgaaaacaaacttcgggatttttgttttgcacgataagcaaaaaccaaagaaagcagatttgcctgccgaaatgttgaatgacaagaaccgttattttgcagctaaaactgttccagacaagtggtatgcatatccatgggaatctactgacattgttttccatactagaatggctattgaacagggcaatgacatctttattcctgagcaggaacacaagcaatga

SEQ ID NO: 2573 - DNA, 1023 bp, Saccharomyces cerevisiae
atgactgttagtaaaatacccatatggctagattgtgatcctggtcatgatgatgccatagccattttattaggctgtttccatccagctttcaatcttctaggaatcagcacgtgttttggtaacgcaccgccagagaatactgactacaacgcccgttctcttttgactgcgatgggcaaagcacaagcgattccagtttataaaggcgcacagagaccttggaaaagggaacctcattatgctcctgacattcatggtatatcaggtttagacggcacttctttgctacctaagccaacatttgaggcaagaactgataaaacgtatattgaggccattgaagaggcgattctagctaacaatggagagatatcctttgtgtctactggtgcacttaccacattagcaacagtttttaggtgtaaaccatacctaaaaaaatctgtcaaatatattagcattatggggggtggactccatggtctaggaaactgtaacccaaatctttctgctgaattcaacgtttggattgatcctgacgcagcgaattacatattccgtgatcccgatgtaaaggacaaatgtatagtagttcctctaaatttaactcacaaggccatagctacttacaaggttaacgaaatgatatacaacgaaaagaataacagcaagttacgagaattgtttttggagctttttcaattttttgctcatacctacaaggatatgcaaggatttgaatcgggcccacctatacatgatccggtagctttgatgccgcttttggaattttatgggtgggatccatcgtctgcggttggatttcgctacaagagaatggacatatcctgcattgatgatgttttcaacgaaaactcagggaaaattatcattgaaaaagaatatccaaatgacagtgatgttggtacaataattggtctcgatttgaatatccagtacttttgggatcagatttttgaagcattaaatagagcagacaaaatgtcaacgattggataa

SEQ ID NO: 2574 - DNA, 1023 bp, Artificial Sequence
  Description of Artificial Sequence: Synthetic polynucleotide
atgactgttagtaaaatacccatatggcttgattgtgatcctggtcatgatgatgccatagccattttattaggctgtttccatccagctttcaatcttttgggaatcagcacgtgttttggtaacgcaccgccagagaatactgactacaacgcccgttctcttttgactgcgatgggcaaagcacaagcgattccagtttataaaggcgcacagagaccttggaaaagggaacctcattatgctcctgacattcatggtatatctggtttagacggcacttctttgttacctaagccaacatttgaggcaagaactgataaaacgtatattgaggccattgaagaggcgattttggctaacaatggagagatatcctttgtgtctactggtgcacttaccacattagcaacagtttttaggtgtaaaccatacttgaaaaaatctgtcaaatatattagcattatggggggtggactccatggtttgggaaactgtaacccaaatctttctgctgaattcaacgtttggattgatcctgacgcagcgaattacatattccgtgatcccgatgtaaaggacaaatgtatagtagttcctttaaatttaactcacaaggccatagctacttacaaggttaacgaaatgatatacaacgaaaagaataacagcaagttaagagaattgtttttggagctttttcaattttttgctcatacctacaaggatatgcaaggatttgaaagtggcccacctatacatgatccggtagctttgatgccgcttttggaattttatgggtgggatccatcttctgcggttggatttcgctacaagagaatggacatatcctgcattgatgatgttttcaacgaaaactctgggaaaattatcattgaaaaagaatatccaaatgacagtgatgttggtacaataattggtctcgatttgaatatccagtacttttgggatcagatttttgaagcattaaatagagcagacaaaatgtctacgattggatga

SEQ ID NO: 2575 - DNA, 1470 bp, Saccharomyces cerevisiae
atggagttgttaaagcttctgtgtttgattttatttcttactctttcctatgtcgcctttgcaatcattgtcccacctctaaactttcccaaaaatatacccaccatcccattttatgtagtatttttaccagtaatatttcccattgatcaaacggagctatacgatctttatattagggaatcaatggaaaaatacggtgctgtaaaatttttctttggttcacggtggaatattctcgtttctcgttctgagtatctagcacaaatattcaaagatgaagatacttttgcgaagagcggtaatcaaaagaaaatcccatacagtgctcttgccgcttacacaggggacaatgtcattagcgcgtatggtgcagtttggagaaactacagaaatgctgtgacaaacgggctccaacattttgacgatgcacctatattcaaaaatgcaaaaattttatgcactttgataaaaaacagactcctagaaggacaaacttcgatccctatgggacctttatcccagagaatggcattggataacatttcacaggttgcccttggatttgattttggtgctctaacacatgaaaaaaatgctttccacgagcatttgattcgtattaaaaagcaaatatttcatccattctttttaacttttccattccttgatgttcttcctattccttcaagaaaaaaagccttcaaggatgttgttagttttagagaacttctcgttaaaagagttcaagatgaattagtcaataattacaaatttgaacaaactacttttgctgccagtgatctaattcgtgctcacaataacgaaataatcgactacaaacagttgaccgataatatcgtcattatccttgtcgctggccatgaaaacccgcagttgctatttaatagttcactctaccttctagccaaatattcaaatgaatggcaagagaaactcaggaaggaagtaaacggcatcactgatccaaaaggcttagcagatttacccttattaaatgcttttctcttcgaagtagtaagaatgtatcctcctttgagcacaattattaatagatgtactaccaaaacgtgcaagttgggggcggaaattgttatacccaagggcgtatatgtcgggtacaacaactttggaacctcacacgatcccaaaacttggggcacaacagcagatgattttaaaccagaaagatggggttcagatatcgaaaccataaggaaaaactggagaatggcgaaaaacagatgtgctgtgactgggttccatggaggccgaagagcatgcctaggggaaaaactagccctaacagaaatgagaatttctttggctgaaatgttgaaacagtttcgatggagtcttgaccctgaatgggaagaaaaattaactcccgctgggcctctttgccctcttaatttaaagttaaaatttaacgagaatataatggaataa

SEQ ID NO: 2576 - DNA, 1470 bp, Artificial Sequence
  Description of Artificial Sequence: Synthetic polynucleotide
atggagttgttaaagcttttatgtttgattttatttcttactctttcctatgtcgcctttgcaatcattgtcccacctttgaactttcccaaaaatatacccaccatcccattttatgtagtatttttaccagtaatatttcccattgatcaaacggagttatacgatctttatattagggaaagtatggaaaaatacggtgctgtaaaatttttctttggttccagatggaatattctcgtttctcgttctgagtatttggcacaaatattcaaagatgaagatacttttgcgaagagcggtaatcaaaagaaaatcccatacagtgctcttgccgcttacacaggggacaatgtcattagcgcgtatggtgcagtttggagaaactacagaaatgctgtgacaaacgggctccaacattttgacgatgcacctatattcaaaaatgcaaaaattttatgcactttgataaaaaacagactcttggaaggacaaacttctatccctatgggacctttatcccagagaatggcattggataacatttctcaggttgcccttggatttgattttggtgctttaacacatgaaaaaaatgctttccacgagcatttgattcgtattaaaaagcaaatatttcatccattctttttaacttttccattccttgatgttcttcctattccttccagaaaaaaagccttcaaggatgttgttagttttagagaacttctcgttaaaagagttcaagatgaattagtcaataattacaaatttgaacaaactacttttgctgccagtgatttgattcgtgctcacaataacgaaataatcgactacaaacagttgaccgataatatcgtcattatccttgtcgctggccatgaaaacccgcagttgttatttaatagtagcctctaccttttagccaaatattctaatgaatggcaagagaaactcaggaaggaagtaaacggcatcactgatccaaaaggcttagcagatttacccttattaaatgcttttctcttcgaagtagtaagaatgtatcctcctttgagcacaattattaatagatgtactaccaaaacgtgcaagttgggggcggaaattgttatacccaagggcgtatatgtcgggtacaacaactttggaacctctcacgatcccaaaacttggggcacaacagcagatgattttaaaccagaaagatggggttctgatatcgaaaccataaggaaaaactggagaatggcgaaaaacagatgtgctgtgactgggttccatggaggcagaagagcatgcttaggggaaaaattggccttaacagaaatgagaatttctttggctgaaatgttgaaacagtttagatggagtcttgaccctgaatgggaagaaaaattaactcccgctgggcctctttgccctcttaatttaaagttaaaatttaacgagaatataatggaatga

SEQ ID NO: 2577 - DNA, 1611 bp, Saccharomyces cerevisiae
atgacatttactagcaacttgccctcaagctccgagcagtcaatatcaccacctgcctcttcattttcttcatcgactgatacgttgaaagatattgatattccccataatggggccgatttgtctacatatagtaaatttctggccctgtattgcagaagcgacaaatgtgacgatttttactctttagaggaaaaacagaattgtaaatttggagaccaatggctcgactttatcaacactattcacaatctggacttttctgaatccgaagtaagtggacgggtttctgaaagaattttgccagcttctttagcaaataaatttaccaataatttaggagtggcaataaagatttctgaatatacacgcgatgacgaacgccagattcgtgggtgtgttacaacagttgagaatgaaaattctttcaataactggttcgtatatcatattttagaccaatctcaattatctctaagtgaacatccaattgtaaccaaagaagttaagtatcacgaattatttgcagatttttttgagaaaaatttgaaaaacacaatagttaatgatcaatggaattttggtggccgtgattattttattgaacgttcaagatattttaccgatcgatatttgagaattgaatgcatcttgccagcgtttccatgtaagtcatctaatgagcaaaaagtgtacggttccgttcctgacaaaggcgaagaactcgctttgaaaagattaataaaagccacacaagaccttgtcaagatatatccaccgggtatgaaaatttggatagttagtgatggccatgttttctccgattgtattggggtcgatgatgacgtcgtgagtacttacacgaccaaattgcacgaactgtataaaagagtggctatacctggtgttgacgccattggcttttgtggattgaacgatttattttttagcggtgcagctagtaaagttttcgatccaaagtgggttagtgatgttgaagttgcacactacacaggaactcaaatctgtcctaagtccgatttgtcgagacagattttgatgaaaggctgtgatacagatgcaggtcgtttgagaaagcagattgcaatagaaggacatccaagattgcatctgtataggggcttttcacgttttatgatggaagatttatctctactggaacatttccaaagttattccagaaaaaaattcaagaaaatcatttcaatgatcgcttttaacatgattaagagaaatgacgcgtattcgaacttagtggaattgatattccctcatcatttgagaatttctattcatgcgcacactaacagcgggcccaaatttggtataaaagtaatctccaacgaacagtgttctattgttagttcgttagaagaccttgatgaacccaaatttgaagattttttacatattcccacaccttggcataattgtgtcgtgaaggttgaggatgaaaaggagaaatactttttgacaaaatcaaaagtagtcaaggaggctctcgaaaagggtatgtatgatggtgtatggaaagatactcgtttcgatattggagaaggaggacatttcgttatcaagaaaatctcttaa

SEQ ID NO: 2578 - DNA, 1611 bp, Artificial Sequence
  Description of Artificial Sequence: Synthetic polynucleotide
atgacatttactagcaacttgccctctagctccgagcagagtatatctccacctgcctcttctttttcttcttctactgatacgttgaaagatattgatattccccataatggggccgatttgtctacatatagtaaatttttggccttatattgcagaagcgacaaatgtgacgatttttactctttagaggaaaaacagaattgtaaatttggagaccaatggctcgactttatcaacactattcacaatttggacttttctgaatccgaagtaagtggaagagtttctgaaagaattttgccagcttctttagcaaataaatttaccaataatttaggagtggcaataaagatttctgaatatacacgcgatgacgaacgccagattcgtgggtgtgttacaacagttgagaatgaaaattctttcaataactggttcgtatatcatattttagaccaatctcaattatctttgagtgaacatccaattgtaaccaaagaagttaagtatcacgaattatttgcagatttttttgagaaaaatttgaaaaacacaatagttaatgatcaatggaattttggtggccgtgattattttattgaacgttccagatattttaccgatagatatttgagaattgaatgcatcttgccagcgtttccatgtaagtcttctaatgagcaaaaagtgtacggttccgttcctgacaaaggcgaagaactcgctttgaaaagattaataaaagccacacaagaccttgtcaagatatatccaccgggtatgaaaatttggatagttagtgatggccatgttttctccgattgtattggggtcgatgatgacgtcgtgagtacttacacgaccaaattgcacgaattgtataaaagagtggctatacctggtgttgacgccattggcttttgtggattgaacgatttattttttagcggtgcagctagtaaagttttcgatccaaagtgggttagtgatgttgaagttgcacactacacaggaactcaaatctgtcctaagtccgatttgtccagacagattttgatgaaaggctgtgatacagatgcaggtcgtttgagaaagcagattgcaatagaaggacatccaagattgcatttatataggggcttttctcgttttatgatggaagatttatctttattggaacatttccaaagttattccagaaaaaaattcaagaaaatcatttccatgatcgcttttaacatgattaagagaaatgacgcgtattccaacttagtggaattgatattccctcatcatttgagaatttctattcatgcgcacactaacagcgggcccaaatttggtataaaagtaatctccaacgaacagtgttctattgttagttctttagaagaccttgatgaacccaaatttgaagattttttacatattcccacaccttggcataattgtgtcgtgaaggttgaggatgaaaaggagaaatactttttgacaaaatctaaagtagtcaaggaggctctcgaaaagggtatgtatgatggtgtatggaaagatactcgtttcgatattggagaaggaggacatttcgttatcaagaaaatctcttga

SEQ ID NO: 2579 - DNA, 516 bp, Saccharomyces cerevisiae
atgttttttattaaagacctttcgcttaatattacccttcatccgtcctttttcggtcctcgaatgaagcaatatctaaagacaaaactattggaagaggttgaaggttcgtgtacgggtaaattcggatatattctttgtgtcctagactatgataatatagatattcaacgtgggagaatattgcccacagatgggtccgccgagttcaacgtgaaatatagagctgtagttttcaaaccatttaaaggggaagtagtggacggcacagtcgtttcatgttctcagcacgggttcgaagtgcaagtaggtccaatgaaagtatttgtgacaaagcatctgatgcctcaagatttaacctttaatgcgggttcaaacccaccatcataccaaagttccgaggatgtcatcaccataaaaagtagaattagagttaaaattgaaggttgtatcagtcaagtgagttctattcacgcaatcggtagtatcaaagaagattatttgggtgctatttaa

SEQ ID NO: 2580 - DNA, 516 bp, Artificial Sequence
  Description of Artificial Sequence: Synthetic polynucleotide
atgttttttattaaagacctttctcttaatattacccttcatccgtcctttttcggtcctagaatgaagcaatatttgaagacaaaacttttggaagaggttgaaggttcttgtacgggtaaattcggatatattctttgtgtcttggactatgataatatagatattcaacgtgggagaatattgcccacagatgggtccgccgagttcaacgtgaaatatagagctgtagttttcaaaccatttaaaggggaagtagtggacggcacagtcgtttcttgttctcagcacgggttcgaagtgcaagtaggtccaatgaaagtatttgtgacaaagcatttaatgcctcaagatttaacctttaatgcgggttccaacccaccatcttaccaaagttccgaggatgtcatcaccataaaaagtagaattagagttaaaattgaaggttgtatcagtcaagtgagttctattcacgcaatcggtagtatcaaagaagattatttgggtgctatttga

SEQ ID NO: 2581 - DNA, 792 bp, Saccharomyces cerevisiae
atgccacgattgacggttggaacgaagaatatgttgtatcctttgcaaaaaacacttgcagtaggaagttgcaagccagagcaggttccaataagatcactagcctcagtggtggagagttcctccaaaatactcgacaaaagcggcagcgatcgcgaagtagatataaacgtaagcgagaagatttataagtggacaaaggcgggcatagagcagggaaaggagcatttcaaagttggaggtaacaaagtctactttcccaaggccaggatcatcctcttgaggcccaacgcgaagcacacaccgtatcaagcaaaattcatcgtcccaaaatcgttcaacaaactggatctcagagactatctttatcatatctacggcttaagagcaatgaacattacgacgcagctgcttcatgggaagtttaaccgtatgaacctacagacgacgcggtttagagaaccgcagatcaagaaaatgactatcgagatggaagaacccttcatttggcccgaagaaccccgtccggacgaaaactccttctgggacagcaccacgcctgacaacatggaaaagtaccgtgaagaaagacttaactgcttgggctcagacgccaacaaacccggcacagcattcgacggagtcgtggggccttacgaacgggtggcccagccttttatacctcgcttcttaaaacgagagatagacaataagcgagagcgtcacgccgccgaactgcagcgcgcagataaactaattgccctgaacaggtacatagaagatctacattag

SEQ ID NO: 2582 - DNA, 792 bp, Artificial Sequence
  Description of Artificial Sequence: Synthetic polynucleotide
atgccaagattgacggttggaacgaagaatatgttgtatcctttgcaaaaaacacttgcagtaggaagttgcaagccagagcaggttccaataagatccttggcctctgtggtggagagttcctccaaaatactcgacaaaagcggcagcgatcgcgaagtagatataaacgtaagcgagaagatttataagtggacaaaggcgggcatagagcagggaaaggagcatttcaaagttggaggtaacaaagtctactttcccaaggccaggatcatcctcttgaggcccaacgcgaagcacacaccgtatcaagcaaaattcatcgtcccaaaatctttcaacaaattggatctcagagactatctttatcatatctacggcttaagagcaatgaacattacgacgcagttacttcatgggaagtttaaccgtatgaacttacagacgacgagatttagagaaccgcagatcaagaaaatgactatcgagatggaagaacccttcatttggcccgaagaaccccgtccggacgaaaactccttctgggacagcaccacgcctgacaacatggaaaagtaccgtgaagaaagacttaactgcttgggctctgacgccaacaaacccggcacagcattcgacggagtcgtggggccttacgaaagagtggcccagccttttatacctcgcttcttaaaaagagagatagacaataagagagagcgtcacgccgccgaattacagcgcgcagataaattgattgccttgaacaggtacatagaagatttgcattga

SEQ ID NO: 2583 - DNA, 4590 bp, Saccharomyces cerevisiae
atgtcatcagatatcagagacgtagaggaacgaaattcgcggagctcgagctcaagctcgagctcgaactctgccgcccaatccattggacagcatccataccgcggtttcgacagcgaagccgcggaaagggtgcatgagttggctagaacactcacatcgcagagtttactatacactgctaactcaaacaatagctcttccagcaaccataatgcgcacaatgcggactcgagatccgtattttctacggacatggaaggtgtgaacccggtgttcactaacccggacaccccgggatacaatcccaaattggaccctaacagtgatcaattctccagtacggcgtgggtacagaacatggcaaatatttgtacttcggacccggatttctataaaccatactcactcggttgtgtatggaagaatctaagcgcctccggagactccgccgatgtgtcataccagtcaactttcgctaacatcgtaccaaagctgcttacgaaagggctcagattactgaagcccagtaaagaagaggacacttttcagatcctgaaacccatggatggttgtcttaatcccggtgaactgttggttgttcttgggagaccagggtcaggttgtactacgctgctaaaatccatatcttctaattcgcacgggttcaagatcgcaaaagactccattgtctcttacaacggtttgtcaagctcggatatcaggaaacattaccgtggtgaagtcgtttacaatgcggaatcagatattcatttaccgcatcttaccgtgtaccagacgcttttcaccgtggcaaggatgaaaacgccgcaaaatcgtatcaagggtgttgatagagaagcgtacgccaatcacgtgacagaagttgcaatggccacatatggtctttcgcatacaagggacaccaaggtcggaaacgatctagtcagaggtgtttctggtggtgaaagaaagcgtgtatccattgcggaagtcgcaatctgcggcgccagatttcaatgttgggataatgccaccagaggtttggactctgctactgctttagaattcatccgtgctttaaaaacccaggctgacattggaaagaccgcggctactgtggccatctatcaatgttctcaggatgcttatgatctttttgataaggtctgtgtcctggatgatggttaccagctttattttgggcccgctaaggatgcaaagaaatatttccaagacatgggctactattgtcctcccagacagaccactgcagattttttaacttcaattacaagtcctactgaaagaattattagcaaagaatttatcgaaaaaggtactagagtgcctcaaacgccaaaggatatggccgaatattggctacaatcagaaagctacaaaaatttaatcaaggatatagactctacattagagaaaaacacagatgaagcacgcaatattatcagggatgctcaccacgctaaacaggcaaaaagggcaccaccttcctctccatacgttgtcaactacggaatgcaagtcaaatacttgttgattagaaatttctggagaatgaagcaaagtgctagtgttactttgtggcaagtcatcggtaactctgtcatggctttcatcttgggttctatgttttataaagtgatgaagaaaaacgatacttccactttctatttccgtggtgctgcaatgttttttgctattttatttaatgcattttcgtgtcttttggaaatctttagtttgtatgaaacaagacctataactgaaaaacacagaacttattccttgtatcatccaagcgctgacgcatttgcgtctgttttgtcagaaatgccgccaaaattgatcactgctgtctgcttcaacatcatcttttatttcctagttgatttcaggagaaacggtggtgtctttttcttttattttttaattaatgtcattgccacattcactttatcccatttatttagatgcgtgggctccttgaccaaaacattacaggaggccatggtccccgcttcaatgttattattggcaatttctatgtatacagggtttgccatccctaaaacgaagattttaggttggtccatttggatttggtatatcaacccgctagcctacctgtttgaatctttaatgatcaatgaattccatgaccgtagattcccttgtgcccaatacatccctgctggccctgcttatcagaacatcacaggtactcaacgcgtctgttccgcagttggtgcttatccaggtaacgactatgtgttgggtgatgacttcttgaaggaaagttacgattatgagcacaaacataagtggcgtgggttcggtattggtatggcatatgttgttttctttttctttgtttatctaattctttgtgagtataatgaaggtgctaaacaaaagggtgaaatggttgtgttcctaagatctaagatcaagcaattgaaaaaggaaggtaaattacaagaaaagcataggcctggagatattgaaaataatgcaggcagttctccagattccgctacaacagaaaaaaaaatactagatgatagttctgagggatcggatagctcttcagataatgccggattaggactttccaaatctgaagcaattttccactggcgtgatttatgctatgatgttcctataaaaggaggtcaaagacgtatcttaaataacgtagatggttgggtaaaaccaggcactttgactgccttaatgggggcgtcaggtgcaggtaaaacaactttactggattgtttggctgaaagagtcaccatgggtgttattactggtaatatttttgtcgatggtcgtctccgtgacgaatcattccctagatctattggttattgtcaacaacaggatttacatttgaaaacggctacagtaagagaatctttgagattttcagcttatttacgtcagccttcgtcagtttctattgaagaaaaaaataggtacgtggaagaagttatcaaaattttggaaatgcaacaatattcagatgctgttgttggtgttgcaggtgaaggtctaaatgtcgaacaaagaaaaagacttactattggtgttgaactagcggcaaggcctaaacttttggtttttttggatgaaccaacttcaggcctggattcacaaactgcttgggacacttgccaacttatgaggaaactagctacccacggtcaagcaattttgtgtactatccatcaaccttctgctatattaatgcagcagtttgatagattattatttttacagaaagggggccaaactgtatatttcggcgatttaggtgaagggtgcaaaactatgatcgattattttgaaagtaaaggagctcacaaatgtccacctgatgcaaaccctgccgaatggatgttagaggttgtaggtgccgctcctggttctcacgctacgcaagattataatgaagtctggagaaactcagatgaatacaaagctgttcaggaagaattggattggatggaaaagaatttaccaggcaggtcaaaagaaccaactgcagaagaacataaaccttttgctgcatctttatactaccaatttaaaatggttaccattcgtttgttccaacaatactggagatcaccagattatttatggtcgaaatttattttgactattttcaaccaagtttttattgggttcacttttttcaaggctgacagaagtttacagggactacaaaaccaaatgttatcaatattcatgtatacggttattttcaatcctatactacaacagtatctaccatctttcgtgcagcaaagggatttgtatgaggcaagagaacgtccttcaagaacattttcgtggcttgcgtttttcctctctcaaatcattgttgaaatcccatggaatattttagcgggtacgattgcttattgtatttactattacgcggttggattttatgcgaacgcctcagctgctggtcaactccatgagagaggtgctttgttttggttattttctattgccttctacgtctacattggttcgatgggtttgttaatgatttctttcaatgaagttgctgaaacagcggcacatatgggaacgctattgttcacgatggcattatctttctgtggtgttatggctacccctaaggttatgccaagattttggatctttatgtatagagtgtcacccctaacttatatgatcgatgcattattagcccttggtgtggctaatgtggacgttaagtgttcaaattatgaaatggtaaaatttactccaccatctggaaccacctgcggtgactatatggcatcatatatcaagttggccggaacaggctacttgagtgacccgtctgcaacagatatatgtagtttctgtgcggtatccaccaccaatgcctttttggccactttcagttctcattattacagaagatggagaaattacggtatttttatctgctatattgcttttgattatatcgctgcaacattcttgtattggttatccagggtacccaagaagaacggtaagatttccgaaaaacccaagaagtga

SEQ ID NO: 2584 - DNA, 4590 bp, Artificial Sequence
  Description of Artificial Sequence: Synthetic polynucleotide
atgtcttctgatatcagagacgtagaggaaagaaattccagaagcagcagcagcagcagcagcagtaactctgccgcccaatccattggacagcatccataccgcggtttcgacagcgaagccgcggaaagggtgcatgagttggctagaacactcacatctcagagtttattgtacactgctaactccaacaatagctcttccagcaaccataatgcgcacaatgcggacagtagatccgtattttctacggacatggaaggtgtgaacccggtgttcactaacccggacaccccgggatacaatcccaaattggaccctaacagtgatcaattctccagtacggcgtgggtacagaacatggcaaatatttgtacttctgacccggatttctataaaccatactccctcggttgtgtatggaagaatttgagcgcctccggagactccgccgatgtgtcttaccagtctactttcgctaacatcgtaccaaagcttcttacgaaagggctcagattattgaagcccagtaaagaagaggacacttttcagatcttgaaacccatggatggttgtcttaatcccggtgaattattggttgttcttgggagaccagggtctggttgtactacgttattgaaatccatatcttctaattctcacgggttcaagatcgcaaaagactccattgtctcttacaacggtttgagtagcagtgatatcaggaaacattaccgtggtgaagtcgtttacaatgcggaaagtgatattcatttaccgcatcttaccgtgtaccagacgcttttcaccgtggcaaggatgaaaacgccgcaaaatcgtatcaagggtgttgatagagaagcgtacgccaatcacgtgacagaagttgcaatggccacatatggtctttctcatacaagggacaccaaggtcggaaacgatttggtcagaggtgtttctggtggtgaaagaaagcgtgtatccattgcggaagtcgcaatctgcggcgccagatttcaatgttgggataatgccaccagaggtttggactctgctactgctttagaattcatccgtgctttaaaaacccaggctgacattggaaagaccgcggctactgtggccatctatcaatgttctcaggatgcttatgatctttttgataaggtctgtgtcttggatgatggttaccagctttattttgggcccgctaaggatgcaaagaaatatttccaagacatgggctactattgtcctcccagacagaccactgcagattttttaacttctattacaagtcctactgaaagaattattagcaaagaatttatcgaaaaaggtactagagtgcctcaaacgccaaaggatatggccgaatattggttacaaagtgaaagctacaaaaatttaatcaaggatatagactctacattagagaaaaacacagatgaagcacgcaatattatcagggatgctcaccacgctaaacaggcaaaaagggcaccaccttcctctccatacgttgtcaactacggaatgcaagtcaaatacttgttgattagaaatttctggagaatgaagcaaagtgctagtgttactttgtggcaagtcatcggtaactctgtcatggctttcatcttgggttctatgttttataaagtgatgaagaaaaacgatacttccactttctatttccgtggtgctgcaatgttttttgctattttatttaatgcattttcttgtcttttggaaatctttagtttgtatgaaacaagacctataactgaaaaacacagaacttattccttgtatcatccaagcgctgacgcatttgcgtctgttttgagtgaaatgccgccaaaattgatcactgctgtctgcttcaacatcatcttttatttcttggttgatttcaggagaaacggtggtgtctttttcttttattttttaattaatgtcattgccacattcactttatcccatttatttagatgcgtgggctccttgaccaaaacattacaggaggccatggtccccgcttccatgttattattggcaatttctatgtatacagggtttgccatccctaaaacgaagattttaggttggtccatttggatttggtatatcaacccgttagcctacttgtttgaatctttaatgatcaatgaattccatgaccgtagattcccttgtgcccaatacatccctgctggccctgcttatcagaacatcacaggtactcaacgcgtctgttccgcagttggtgcttatccaggtaacgactatgtgttgggtgatgacttcttgaaggaaagttacgattatgagcacaaacataagtggcgtgggttcggtattggtatggcatatgttgttttctttttctttgtttatttgattctttgtgagtataatgaaggtgctaaacaaaagggtgaaatggttgtgttcttaagatctaagatcaagcaattgaaaaaggaaggtaaattacaagaaaagcataggcctggagatattgaaaataatgcaggcagttctccagattccgctacaacagaaaaaaaaatattggatgatagttctgagggaagtgatagctcttctgataatgccggattaggactttccaaatctgaagcaattttccactggcgtgatttatgctatgatgttcctataaaaggaggtcaaagacgtatcttaaataacgtagatggttgggtaaaaccaggcactttgactgccttaatgggggcgtctggtgcaggtaaaacaactttattagattgtttggctgaaagagtcaccatgggtgttattactggtaatatttttgtcgatggtcgtctccgtgacgaatctttccctagatctattggttattgtcaacaacaggatttacatttgaaaacggctacagtaagagaatctttgagattttctgcttatttacgtcagccttcttctgtttctattgaagaaaaaaataggtacgtggaagaagttatcaaaattttggaaatgcaacaatattctgatgctgttgttggtgttgcaggtgaaggtttgaatgtcgaacaaagaaaaagacttactattggtgttgaattggcggcaaggcctaaacttttggtttttttggatgaaccaacttctggcttggattctcaaactgcttgggacacttgccaacttatgaggaaattggctacccacggtcaagcaattttgtgtactatccatcaaccttctgctatattaatgcagcagtttgatagattattatttttacagaaagggggccaaactgtatatttcggcgatttaggtgaagggtgcaaaactatgatcgattattttgaaagtaaaggagctcacaaatgtccacctgatgcaaaccctgccgaatggatgttagaggttgtaggtgccgctcctggttctcacgctacgcaagattataatgaagtctggagaaacagtgatgaatacaaagctgttcaggaagaattggattggatggaaaagaatttaccaggcaggtccaaagaaccaactgcagaagaacataaaccttttgctgcatctttatactaccaatttaaaatggttaccattcgtttgttccaacaatactggagatctccagattatttatggtccaaatttattttgactattttcaaccaagtttttattgggttcacttttttcaaggctgacagaagtttacagggattacaaaaccaaatgttatctatattcatgtatacggttattttcaatcctatattgcaacagtatttaccatctttcgtgcagcaaagggatttgtatgaggcaagagaacgtccttccagaacattttcttggcttgcgtttttcctctctcaaatcattgttgaaatcccatggaatattttagcgggtacgattgcttattgtatttactattacgcggttggattttatgcgaacgcctctgctgctggtcaactccatgagagaggtgctttgttttggttattttctattgccttctacgtctacattggttctatgggtttgttaatgatttctttcaatgaagttgctgaaacagcggcacatatgggaacgttattgttcacgatggcattatctttctgtggtgttatggctacccctaaggttatgccaagattttggatctttatgtatagagtgtctcccttaacttatatgatcgatgcattattagcccttggtgtggctaatgtggacgttaagtgttctaattatgaaatggtaaaatttactccaccatctggaaccacctgcggtgactatatggcaagttatatcaagttggccggaacaggctacttgagtgacccgtctgcaacagatatatgtagtttctgtgcggtatccaccaccaatgcctttttggccactttcagttctcattattacagaagatggagaaattacggtatttttatctgctatattgcttttgattatatcgctgcaacattcttgtattggttatccagggtacccaagaagaacggtaagatttccgaaaaacccaagaagtga

SEQ ID NO: 2585 - DNA, 3870 bp, Saccharomyces cerevisiae
atgaatattcttaagcatttcccaagctatgttggcccatctaagattaggaccttagtgataccaattggccattggacgcgaaaagagtttaataatgcggtacagaaactttctgaattcaacgaaattcatctgtctgatgtaacccccattgacagccctatcttcacaccgcaaggctttccacatgggaagttatttttcgacttcttgaccatagatcatgacgatgcattggagttgtttctgtatgattttgagccatttcggaaaacatttgtcattattgggctggtaaacgattacagtgaccccttgaccaatttgaatttcatgaaggagaagtatccaactttgatttcaccgaatttggtgtacgcttcatctacacccactaaagagcttgagcaaaccatagatacgatggaaaatgtattcgcatcttctccagatatgcagaaaaacatagaaacgattatgtgcgacatagcaaggaactttttaaccgcattgaacagctattactcttcctataaacatgttactttgaggtcgccgggtgcgattggtgggaatgcggtattgaaaacaactctaataagacagaacagttacacatcttcgtcatccagcacacccatgtcagcggtacaatcttccgtctcaagttcatcgaaggcaggctcagttactactgcttctaagaggttatcttcctttgagatgactaccaatagtttaaagagatccgcttctctaaagctagctaccacgctttccacatctgagaataggtctcaacaaaaatcattgggcagacaaatgaaaattttgggcaatttccaattgctggcaggaaggtacgttgatgcgttgaacagctttgttgatgcgatcacaactttgtacaaagtgcgtgactacttatggttgggttctgctcttgacggtatttcgatctgctttttacttctatcttatctcggtttgtcataccagattccacaaattgtgagtctcatttgtcctgtggagaagctcaattttgaatctagctcaacggggatttcgcctgtagattccaatagtaaagccacagcaagcacgacggcgtcaagcacaccaaggaacagcatatctatagctgctatgcagtcacctagaaattccattatgtctttatctgccccagcattaaatattgatgtagaaaacatcaacctcccgttattaattaaatgcatatctgacaaagtcttgtattattatgatttaagtttgatgcacaatagtgaatatgctccgcaagtggtttattgcgagtttttactgaagactttaactttcatgacatcgtgttataagagttcagagttttcaaaggacgttctggacaatattgtgaaaaaccaacacagggccttgtcagatatccctaatagtccgatgttcccaaggtttgaagtttatttctatagcaataaattgttcgaattacaattgaaggaaatgcaagttgaggctcaaattaaaatatactctactatggcggaagtttatcgccttttgggatacaaaagaaagcaattattcgtgttaagattgctgatggttgctcttttggcgactccgaataagatagcatggcatcctgactacaggaccttgatagataccatcatagaactcctcaacatcaatgaaagcgaggccaaaatcaatgtagatgatccgtctcaatctacttggttgatcctacagaaaaagatcctacaactatgcattaaagtttcaagaaaaatcaatgacttcgaatatgtcgctaaatttagctcgatactaattacgaaatatacgcatctgttaaatcagtcggaacaagatgccttgtttaaagaatatattcaaccatcaattaccaacgagtctatcacaagttattgggatcccttcattctgagggaagttgttataaatagaatattggatagtgaccccacttcaaacgaaatcccattagagtcagatgttagcagccttgaaagcctagaaaatagacaaaagacacaggatattaatccgcaggaagttttcaaccctttcaaacgggttcaaccaacttcttttgtttctaataacagcaccaaagttcctattttagtatttttagttggcgataaggctgaattcacctgcagggttcaaaatcctttcaaatttgattttacgatcaatgatattcaactagatgaggaaatatctgaattttgtgagattgatagaaaagctgtaagttattcagggccatataatgttaaagccgagtcaataagatccatcacattgcctttgattattaaaaagccaacatacaaaaaaatctacgagatttcatgcctaaaaatctctatcctaaaactaccgcttcagaaattcgatattataaacgattctagaagatcgaatcctgttgaagaagaggcagaatacagtaaatgtatatacggaaaattaaaaattaaaatcctgcctgaacaaccacaattagaactattgagtacttccaagatgacaagaaactcatggatgatgctggatggtaccaaaactgattttcatataacggtgagaaataaatcactgagctgtgcaataaatcatattaagatcataccaatgaataatattgagcaaatgttgaaacctgattattggaaaaaaatgccaccagatgacttgtacatcatggaaaaacagctagattggctctctaagtcttgtgtacgtattattaaattaccaacggtaatcaagccaaatgaaaccatcacatttgatttggaattagataatactgctgttccatttaatttcaccggatttgacttattgatcgaatacggtatgagcgctactgatgaatcctgcatttatttaaaaaagttatcaataccatatgaagtaacattgagaagaacaattgaagtaccaagtatggacatcataccgctaaatgaactcttcagctcgcaagttgaaaatgttgattggattgagtatgtaatgagcaaaatacgtgcagaatctaacctccactctagagattttatattgttattattagacttcagaaattcttggattgacggaataaaattgaatgttcaatttgaagatttcactagtaatgagtatcatgtagaggcaagccatacctcgagaattattgttcctattaaaaaaattgattacaaaaagtataattttgagaatacacctataccaagaatctatccaggccgacaatttattcaaagtggtttaaacgaagaacagactatagaaatgagacaaaaattttggtgtcgcgaacatatcatttcaaagcttaaatgtaactggaaattaaccacagaccaatctgtaacaggttcggtggatttcaataagttcatagaaaagtttgatcacaagatggtctacacgatataccccgggagattattttacggagtgcagctattgcttgatgagccaaaagtcaaagtaggggaaataataaacttgaagataataacagagccgactagtacatgtagaagaaaacaaaattctactgtaaattttttggacatcgtgattttcgacagcaagacatcaaaaatattaccaagatcgaacagacgaattttgtataatggttcgttaactaaaccaatcagtacaaccaaagtttctgaaattaacttagaaattattccaattgaaaaaggccggtacgagtttagcgtttgcatctccaaatcaaacaaccaagatggaataatccagttcgactctgaaaacgttatcttgtctgttatttag

SEQ ID NO: 2586 - DNA, 3870 bp, Artificial Sequence
  Description of Artificial Sequence: Synthetic polynucleotide
atgaatattcttaagcatttcccaagctatgttggcccatctaagattaggaccttagtgataccaattggccattggacgagaaaagagtttaataatgcggtacagaaactttctgaattcaacgaaattcatttatctgatgtaacccccattgacagccctatcttcacaccgcaaggctttccacatgggaagttatttttcgacttcttgaccatagatcatgacgatgcattggagttgtttttatatgattttgagccatttagaaaaacatttgtcattattgggttggtaaacgattacagtgaccccttgaccaatttgaatttcatgaaggagaagtatccaactttgatttctccgaatttggtgtacgcttcttctacacccactaaagagcttgagcaaaccatagatacgatggaaaatgtattcgcatcttctccagatatgcagaaaaacatagaaacgattatgtgcgacatagcaaggaactttttaaccgcattgaacagctattactcttcctataaacatgttactttgaggtctccgggtgcgattggtgggaatgcggtattgaaaacaactttgataagacagaacagttacacatcttcttcttccagcacacccatgagtgcggtacaatcttccgtctctagttcttccaaggcaggctctgttactactgcttctaagaggttatcttcctttgagatgactaccaatagtttaaagagatccgcttctttgaagttggctaccacgctttccacatctgagaataggtctcaacaaaaatctttgggcagacaaatgaaaattttgggcaatttccaattgttggcaggaaggtacgttgatgcgttgaacagctttgttgatgcgatcacaactttgtacaaagtgcgtgactacttatggttgggttctgctcttgacggtatttccatctgctttttacttttatcttatctcggtttgagttaccagattccacaaattgtgagtctcatttgtcctgtggagaagctcaattttgaatctagctctacggggatttctcctgtagattccaatagtaaagccacagcaagcacgacggcgtccagcacaccaaggaacagcatatctatagctgctatgcagtctcctagaaattccattatgtctttatctgccccagcattaaatattgatgtagaaaacatcaacctcccgttattaattaaatgcatatctgacaaagtcttgtattattatgatttaagtttgatgcacaatagtgaatatgctccgcaagtggtttattgcgagtttttattgaagactttaactttcatgacatcttgttataagagtagtgagttttccaaggacgttttggacaatattgtgaaaaaccaacacagggccttgagtgatatccctaatagtccgatgttcccaaggtttgaagtttatttctatagcaataaattgttcgaattacaattgaaggaaatgcaagttgaggctcaaattaaaatatactctactatggcggaagtttatcgccttttgggatacaaaagaaagcaattattcgtgttaagattgttgatggttgctcttttggcgactccgaataagatagcatggcatcctgactacaggaccttgatagataccatcatagaactcctcaacatcaatgaaagcgaggccaaaatcaatgtagatgatccgtctcaatctacttggttgatcttacagaaaaagatcttgcaattatgcattaaagtttctagaaaaatcaatgacttcgaatatgtcgctaaatttagcagtatattgattacgaaatatacgcatcttttaaatcagtctgaacaagatgccttgtttaaagaatatattcaaccatctattaccaacgagtctatcacaagttattgggatcccttcattttaagggaagttgttataaatagaatattggatagtgaccccacttctaacgaaatcccattagagtctgatgttagcagccttgaaagcttggaaaatagacaaaagacacaggatattaatccgcaggaagttttcaaccctttcaaaagagttcaaccaacttcttttgtttctaataacagcaccaaagttcctattttagtatttttagttggcgataaggctgaattcacctgcagggttcaaaatcctttcaaatttgattttacgatcaatgatattcaattggatgaggaaatatctgaattttgtgagattgatagaaaagctgtaagttattctgggccatataatgttaaagccgagagtataagatccatcacattgcctttgattattaaaaagccaacatacaaaaaaatctacgagatttcttgcttgaaaatctctatcttgaaattaccgcttcagaaattcgatattataaacgattctagaagatctaatcctgttgaagaagaggcagaatacagtaaatgtatatacggaaaattaaaaattaaaatcttacctgaacaaccacaattagaattattgagtacttccaagatgacaagaaacagttggatgatgcttgatggtaccaaaactgattttcatataacggtgagaaataaatctttaagctgtgcaataaatcatattaagatcataccaatgaataatattgagcaaatgttgaaacctgattattggaaaaaaatgccaccagatgacttgtacatcatggaaaaacagttagattggctctctaagtcttgtgtacgtattattaaattaccaacggtaatcaagccaaatgaaaccatcacatttgatttggaattagataatactgctgttccatttaatttcaccggatttgacttattgatcgaatacggtatgagcgctactgatgaatcctgcatttatttaaaaaagttatctataccatatgaagtaacattgagaagaacaattgaagtaccaagtatggacatcataccgttaaatgaactcttcagctctcaagttgaaaatgttgattggattgagtatgtaatgagcaaaatacgtgcagaatctaacctccactctagagattttatattgttattattagacttcagaaattcttggattgacggaataaaattgaatgttcaatttgaagatttcactagtaatgagtatcatgtagaggcaagccatacctccagaattattgttcctattaaaaaaattgattacaaaaagtataattttgagaatacacctataccaagaatctatccaggcagacaatttattcaaagtggtttaaacgaagaacagactatagaaatgagacaaaaattttggtgtcgcgaacatatcatttccaagcttaaatgtaactggaaattaaccacagaccaatctgtaacaggttctgtggatttcaataagttcatagaaaagtttgatcacaagatggtctacacgatataccccgggagattattttacggagtgcagttattgcttgatgagccaaaagtcaaagtaggggaaataataaacttgaagataataacagagccgactagtacatgtagaagaaaacaaaattctactgtaaattttttggacatcgtgattttcgacagcaagacaagtaaaatattaccaagatctaacagaagaattttgtataatggttctttaactaaaccaatcagtacaaccaaagtttctgaaattaacttagaaattattccaattgaaaaaggcagatacgagtttagcgtttgcatctccaaaagtaacaaccaagatggaataatccagttcgactctgaaaacgttatcttgtctgttatttga

SEQ ID NO: 2587 - DNA, 645 bp, Saccharomyces cerevisiae
atggccagaattgtcgtattaatttcgggctcaggttccaacttgcaagccttgatcgatgcccaaaagcagggccaattaggcgaggatgctcatattgtctctgtcatatcttccagcaagaaggcatacgggttaactagggcagcggacaataatatccccacaaaggtttgttcgctatacccatatacaaagggtattgcgaaggaggacaaagccgcaagggccaaggcaagatcccagtttgagaacgacctcgcaaaactagtgctcgaggaaaagcctgacgttatcatctgcgcgggctggttattgatccttggatctactttcttgagccaactgcaatctgtgccgatattaaatctgcatccagcgctaccaggttgtttcgatggtaccacacacgcaattgaaatggcatggcgcaaatgtcaggacgagaacaagcctctgacggccggatgcatggtgcactatgtcatcgaggaggtcgacaagggtgagccattggtggtaaaaaagctagaaatcatacctggcgaagaaacactagagcagtacgagcaaagggtacacgatgctgagcacatcgcgattgtagaagctacatataaggttttacagcagcttcacaaataa

SEQ ID NO: 2588 - DNA, 645 bp, Artificial Sequence
  Description of Artificial Sequence: Synthetic polynucleotide
atggccagaattgtcgtattaatttctggcagtggttccaacttgcaagccttgatcgatgcccaaaagcagggccaattaggcgaggatgctcatattgtctctgtcatatcttccagcaagaaggcatacgggttaactagggcagcggacaataatatccccacaaaggtttgttctttgtacccatatacaaagggtattgcgaaggaggacaaagccgcaagggccaaggcaagatcccagtttgagaacgacctcgcaaaattagtgctcgaggaaaagcctgacgttatcatctgcgcgggctggttattgatccttggatctactttcttgagccaattacaatctgtgccgatattaaatttacatccagcgttaccaggttgtttcgatggtaccacacacgcaattgaaatggcatggcgcaaatgtcaggacgagaacaagcctttgacggccggatgcatggtgcactatgtcatcgaggaggtcgacaagggtgagccattggtggtaaaaaagttggaaatcatacctggcgaagaaacattagagcagtacgagcaaagggtacacgatgctgagcacatcgcgattgtagaagctacatataaggttttacagcagcttcacaaatga

SEQ ID NO: 2589 - DNA, 2715 bp, Saccharomyces cerevisiae
atgataaatttagaggattactgggaagatgaaacgcctgggcctgatagggaaccgactaatgaactaagaaacgaggtggaggaaaccatcactctgatggaactgctgaaagtgtccgaattgaaggatatttgcaggtctgtatctttcccggtttccggtcgcaaggccgttctacaggaccttatcaggaatttcttgcagaacgctttagtagtaggcaagtctgatccttatagagttcaagccgttaaatttctgatagaacggatcagaaagaatgaacctttgcctgtttataaagatctttggaacgctttaagaaagggtaccccattgagtgctatcacagtacgttctatggaggggcctcccacggtgcagcagcaatcaccttccgttattaggcagtctcccactcaacggcggaaaacgtctaccacatcttccacatctcgtgcaccaccacctacaaatccagatgcctcttcttcttcatcatcttttgctgtaccgacaattcattttaaagagtctccattttacaaaatacaaaggctaatccctgaattagtgatgaacgtggaagtcacaggcggaagaggtatgtgctctgcgaaatttaaattgtccaaagcagactataatctattaagtaacccgaatagcaaacacaggctatacttattttctgggatgattaatccattaggatcccgaggtaatgaacccatccaatttccattcccaaatgaattaaggtgcaataatgttcaaatcaaagataatataagaggtttcaagagtaagccgggcacagctaagccggcggatttaacgcctcatctcaaaccttatactcaacaaaacaatgtggagctgatatatgccttcaccacgaaggaatacaagctatttgggtacattgtagaaatgatcactccggagcaactcctggaaaaagtattacagcatccaaaaattattaaacaagccacgttactttacttgaaaaaaacacttcgggaggatgaagaaatgggcttgactaccacatctactatcatgagtctgcaatgtccaatttcgtacacaagaatgaaatacccttcaaaatcaataaattgtaagcatctgcaatgttttgatgcattatggttcctacactcccaactacaaattcctacgtggcaatgcccagtatgtcaaattgatatagctttggaaaatttagcaatttccgaatttgttgatgacattttacagaactgtcaaaaaaacgttgaacaggtagaacttacttctgatggtaagtggacagccatattggaagacgatgatgacagcgacagtgacagcaatgatggtagtagaagcccagaaaaaggtacttcagtatcggatcatcattgttcttcttcacatccaagtgaaccgattatcataaatctcgatagtgatgatgacgaaccaaatggaaataatcctcatgttactaataatcatgatgatagcaacaggcatagtaatgataacaataataatagtatcaaaaataatgatagtcataataaaaataataataataataataataacaataataataataatgataataataatagtatcgaaaataatgatagtaatagtaataataaacatgatcatggtagtcgcagtaatactcccagtcataatcatactaaaaatttaatgaacgataatgatgacgatgatgatgatcgacttatggcggaaataactagcaatcaccttaaaagtactaatacagatattctaactgaaaaaggttcaagtgcaccctcgagaaccctggatccaaaaagttataacatagttgcttcagaaactactactccggtgacaaacagggttattcctgagtacctcggaaacagttccagttatattggtaaacaattgccgaacattctgggaaaaacgcctttaaatgtgactgctgttgataattcatcccacttaatctctccagatgttagcgtatcatccccaacgccaagaaacaccgcttcaaatgcaagttcgagcgctctcagtacccctcccttaataagaatgagttcattagatcccaggggatccactgttcccgataaaacaataaggcctcccataaattccaacagttatactgcatcgatatcagattcatttgtccagcctcaagaatcttcagtttttccaccacgtgaacagaatatggatatgtcctttccttccaccgtgaactcaagatttaatgatccacgtttgaataccacaagattccctgattcaacattgcgtggggcaactattttgtcgaataatgggcttgatcaaaggaataactctctaccaacaacagaagcaatcacgaggaatgacgtcgggcgacaaaattctacgcctgtacttcccacgttgccccagaacgtcccaattcgtacaaactctaacaagtctgggcttcctttgataaacaatgaaaacagtgtccccaatcctcccaacactgcaaccataccgttgcagaagtccagactcattgtaaatccattcattccaaggaggccttactctaatgtactgccccaaaaaagacaactttctaatacatcctcaacttcacccataatgggtacatggaaaacgcaagattatggaaagaaatacaacagtggttaa

SEQ ID NO: 2590 - DNA, 2715 bp, Artificial Sequence
  Description of Artificial Sequence: Synthetic polynucleotide
atgataaatttagaggattactgggaagatgaaacgcctgggcctgatagggaaccgactaatgaattgagaaacgaggtggaggaaaccatcactttaatggaattattgaaagtgtccgaattgaaggatatttgcaggtctgtatctttcccggtttccggtcgcaaggccgttttacaggaccttatcaggaatttcttgcagaacgctttagtagtaggcaagtctgatccttatagagttcaagccgttaaatttttaatagaaagaatcagaaagaatgaacctttgcctgtttataaagatctttggaacgctttaagaaagggtaccccattgagtgctatcacagtacgttctatggaggggcctcccacggtgcagcagcaaagtccttccgttattaggcagtctcccactcaaagaagaaaaacgtctaccacatcttccacatctcgtgcaccaccacctacaaatccagatgcctcttcttcttcttcttcttttgctgtaccgacaattcattttaaagagtctccattttacaaaatacaaaggttgatccctgaattagtgatgaacgtggaagtcacaggcggaagaggtatgtgctctgcgaaatttaaattgtccaaagcagactataatttattaagtaacccgaatagcaaacacaggttgtacttattttctgggatgattaatccattaggatccagaggtaatgaacccatccaatttccattcccaaatgaattaaggtgcaataatgttcaaatcaaagataatataagaggtttcaagagtaagccgggcacagctaagccggcggatttaacgcctcatctcaaaccttatactcaacaaaacaatgtggagttgatatatgccttcaccacgaaggaatacaagttatttgggtacattgtagaaatgatcactccggagcaactcttggaaaaagtattacagcatccaaaaattattaaacaagccacgttactttacttgaaaaaaacacttcgtgaggatgaagaaatgggcttgactaccacatctactatcatgagtttacaatgtccaatttcttacacaagaatgaaatacccttccaaatctataaattgtaagcatttacaatgttttgatgcattatggttcttgcactcccaattacaaattcctacgtggcaatgcccagtatgtcaaattgatatagctttggaaaatttagcaatttccgaatttgttgatgacattttacagaactgtcaaaaaaacgttgaacaggtagaacttacttctgatggtaagtggacagccatattggaagacgatgatgacagcgacagtgacagcaatgatggtagtagaagcccagaaaaaggtacttctgtatctgatcatcattgttcttcttctcatccaagtgaaccgattatcataaatctcgatagtgatgatgacgaaccaaatggaaataatcctcatgttactaataatcatgatgatagcaacaggcatagtaatgataacaataataatagtatcaaaaataatgatagtcataataaaaataataataataataataataacaataataataataatgataataataatagtatcgaaaataatgatagtaatagtaataataaacatgatcatggtagtcgcagtaatactcccagtcataatcatactaaaaatttaatgaacgataatgatgacgatgatgatgatagacttatggcggaaataactagcaatcaccttaaaagtactaatacagatattttgactgaaaaaggtagtagtgcacccagtagaaccttggatccaaaaagttataacatagttgcttctgaaactactactccggtgacaaacagggttattcctgagtacctcggaaacagttccagttatattggtaaacaattgccgaacattttaggaaaaacgcctttaaatgtgactgctgttgataattcttcccacttaatctctccagatgttagcgtatcttccccaacgccaagaaacaccgcttctaatgcaagtagtagcgctctcagtacccctcccttaataagaatgagttctttagatcccaggggatccactgttcccgataaaacaataaggcctcccataaattccaacagttatactgcatctatatctgattcttttgtccagcctcaagaatcttctgtttttccaccacgtgaacagaatatggatatgtcctttccttccaccgtgaactctagatttaatgatccacgtttgaataccacaagattccctgattctacattgcgtggggcaactattttgagcaataatgggcttgatcaaaggaataactctttaccaacaacagaagcaatcacgaggaatgacgtcgggcgtcaaaattctacgcctgtacttcccacgttgccccagaacgtcccaattcgtacaaactctaacaagtctgggcttcctttgataaacaatgaaaacagtgtccccaatcctcccaacactgcaaccataccgttgcagaagtccagactcattgtaaatccattcattccaaggaggccttactctaatgtattgccccaaaaaagacaactttctaatacatccagcacttctcccataatgggtacatggaaaacgcaagattatggaaagaaatacaacagtggttga

SEQ ID NO: 2591 - DNA, 720 bp, Saccharomyces cerevisiae
atgcaccaagattttcaagaagacgagcatgagtatccagacatcagacgcaatccgctgcatgaggtgaccatgacttcctacatactggggattcttttaggtatatttgttggtctttttccacaaattagattcaagaattttaacctctttattattgccctgtccttattccattttttggagtattatattacagctaaatacaatcctcttaaggtacattcagagtcctttcttctgaacaacggcaaaagttacatggcggcacattcctttgctattctggaatgcctcgtagaaagctttctttttcctgatctgaaaatttttagctactctctagctaccaagctttgtacagtacttggatgtcttctagttattctgggacaatataccagaactattgctatgcatactgcgggacattccttttctcatattgtgaagaccaagaaggagtccgatcatgttttagtgaaaactggcgtttactcctggtcaagacatccaagttatcttgggttcttttggtgggcaattggcactcagctactgcttctaaatcccctatcattggttattttcatttttgtactttggaaatttttcagtgatagaattcgtgtggaagaaaaatatttgatagagttctttagcgcggaatacatagaatacaagaataaggttggtgtcggaataccttttatataa

SEQ ID NO: 2592 - DNA, 720 bp, Artificial Sequence
  Description of Artificial Sequence: Synthetic polynucleotide
atgcaccaagattttcaagaagacgagcatgagtatccagacatcagacgcaatccgcttcatgaggtgaccatgacttcctacatattagggattcttttaggtatatttgttggtctttttccacaaattagattcaagaattttaacctctttattattgccctttccttattccattttttggagtattatattacagctaaatacaatcctcttaaggtacattctgagtcctttcttttgaacaacggcaaaagttacatggcggcacattcctttgctattttggaatgcctcgtagaaagctttctttttcctgatttgaaaatttttagctactctttggctaccaagctttgtacagtacttggatgtcttttggttattttaggacaatataccagaactattgctatgcatactgcgggacattccttttctcatattgtgaagaccaagaaggagtccgatcatgttttagtgaaaactggcgtttactcctggtccagacatccaagttatcttgggttcttttggtgggcaattggcactcagttattacttttgaatcccttatctttggttattttcatttttgtactttggaaatttttcagtgatagaattcgtgtggaagaaaaatatttgatagagttctttagcgcggaatacatagaatacaagaataaggttggtgtcggaataccttttatatga

SEQ ID NO: 2593 - DNA, 1026 bp, Saccharomyces cerevisiae
atggcaggcccaaggaatgtgcgtacattacatggaaatggaggccgtaataatgatgtgatgggcccaaaagaattctggttaaatatccccccaataacaagaactttatttactctagcgatcgttatgacgatcgtcggccggttgaatctaatcaatccgtggtactttatttatgtttggaatttgacgttcaagaaggttcagatatggagacttcttacttcttgtgtaatgctttcgtctcgtgccatgcctgcgctaatggaactatatagtatttatgacaggtcctcacagttggagcgagggcattttggtcccggtttgtccaatagacgaggaccgatggtaacagtagactatgcctactacctgtgcttttgtatactagccatcactacggccactacaatcatttatgggtcctactaccctgttgtgctcacctctgggttcatatcatgcattacatatacttggtcgatcgacaatgccaacgtgcagatcatgttttatggtttgattcctgtttgggggaagtacttccccttaattcaattgtttatctctttcgtttttaatgagggtgatttcgtaatctcattgatcggttttactacagggtacctttatacatgcttagatacccatacactggggccaatatgggggatgatatccagaaaagctgatccaacctacggaatctcgcccaatgggaaattctcaacgccatggtggtttactagtctatatgctcgcataacgggtgcccacaatgaaactgcaacattcaacaacaactttgccaatgtgccatcttcgcaaagagaaacgagaacttttagtggaagaggtcaacgattgggtacggcccctgcaacattgtctcaaaccagtggcacagattcaggcagagcttctggaagtcaattaagaagtggcccatcgaatttgaaccaatttcaaggccgcggccaacgagtaggacaaacaaacagcccctccgactcacaataa

SEQ ID NO: 2594 - DNA, 1026 bp, Artificial Sequence
  Description of Artificial Sequence: Synthetic polynucleotide
atggcaggcccaaggaatgtgcgtacattacatggaaatggaggccgtaataatgatgtgatgggcccaaaagaattctggttaaatatccccccaataacaagaactttatttactttggcgatcgttatgacgatcgtcggcagattgaatttgatcaatccgtggtactttatttatgtttggaatttgacgttcaagaaggttcagatatggagacttcttacttcttgtgtaatgctttcttctcgtgccatgcctgcgttaatggaattgtatagtatttatgacaggtcctctcagttggagagagggcattttggtcccggtttgtccaatagaagaggaccgatggtaacagtagactatgcctactacttgtgcttttgtatattggccatcactacggccactacaatcatttatgggtcctactaccctgttgtgctcacctctgggttcatatcttgcattacatatacttggtctatcgacaatgccaacgtgcagatcatgttttatggtttgattcctgtttgggggaagtacttccccttaattcaattgtttatctctttcgtttttaatgagggtgatttcgtaatctctttgatcggttttactacagggtacctttatacatgcttagatacccatacattagggccaatatgggggatgatatccagaaaagctgatccaacctacggaatctcccccaatgggaaattcagtacgccatggtggtttactagtctttatgctcgcataacgggtgcccacaatgaaactgcaacattcaacaacaactttgccaatgtgccatcttctcaaagagaaacgagaacttttagtggaagaggtcaaagattgggtacggcccctgcaacattgtctcaaaccagtggcacagattctggcagagcttctggaagtcaattaagaagtggcccatccaatttgaaccaatttcaaggccgcggccaaagagtaggacaaacaaacagcccctccgactctcaatga

SEQ ID NO: 2595 - DNA, 708 bp, Saccharomyces cerevisiae
atggctgttcacaccaataggcaaatccttacaagaggcaaaaactatgctacaaagcaatcaaagaaattcggtaccgatgaggtgacgttcgacaaggattctcgtttggattatctgactggctttcacaagagaaagcttcaaagacaaaagaaagcacaagagtttattaaggagcaggaaaggcttagaaaaattgaagaaagacagaagattcggcaggaacgtaaggaggtgatggaagaacagttaaagacgtttaaagagagtttaaacttggaagctgagatagaggatgcgaaaaatgataagacggaggatttgcaggtagaatctgatgaatcctggcacgggtttgattctgataaagatgacggcgataacgacaataatgaaagtagcgtaaagcctattttgaagaaaggagcaatcacggaaatatacgatgactcaactactgttgaattggagacattggaacccaatgataactttgaatatttagcccagctaaataatgtcaaattagaaaaggcagaaaaagtactcaaacaaagcataaatagagccaccaaatacgcgaagtttctgggcgtggatgagaaacaaaagaagaagccaagagtaaaaaagttcagatatttgaccaaaaatgaacgaagaataaaccaaagaaaggcaaacgacaacaagcgtaggagataa

SEQ ID NO: 2596 - DNA, 708 bp, Artificial Sequence
  Description of Artificial Sequence: Synthetic polynucleotide
atggctgttcacaccaataggcaaatccttacaagaggcaaaaactatgctacaaagcaatccaagaaattcggtaccgatgaggtgacgttcgacaaggattctcgtttggattatttgactggctttcacaagagaaagcttcaaagacaaaagaaagcacaagagtttattaaggagcaggaaaggcttagaaaaattgaagaaagacagaagattagacaggaacgtaaggaggtgatggaagaacagttaaagacgtttaaagagagtttaaacttggaagctgagatagaggatgcgaaaaatgataagacggaggatttgcaggtagaatctgatgaatcctggcacgggtttgattctgataaagatgacggcgataacgacaataatgaaagtagcgtaaagcctattttgaagaaaggagcaatcacggaaatatacgatgactctactactgttgaattggagacattggaacccaatgataactttgaatatttagcccagttgaataatgtcaaattagaaaaggcagaaaaagtactcaaacaaagcataaatagagccaccaaatacgcgaagtttttgggcgtggatgagaaacaaaagaagaagccaagagtaaaaaagttcagatatttgaccaaaaatgaaagaagaataaaccaaagaaaggcaaacgacaacaagcgtaggagatga

SEQ ID NO: 2597 - DNA, 1089 bp, Saccharomyces cerevisiae
atggagaaaagcgaaagtaattctgaaggactttatctccaaaatatattaaatgttccccctccgcagcgatttattgtgctcataatacttgccctttggatctggacatggatattaaaattcttcttgcatagtaatttagacgtatcccaagtcatactcacgagagtaccgcacgatatacgtccaggttatactctacagcaattgcatagaacagctagaaattttgctttgaagataacaaggattattataccgttccactttgccactgtgttcctttttgagttcatgaatattatagaaggtccactcaaaaatatcattctcatcgtatattttctaccattgatccaatgtgtcactatattttggtttctgttgaaagagtgccagataataaaatattgtactaggagatgtttgttgatagaatcctccccccgttccttaaggaatacctacattttaatctctgacacgttgacatcgtttgcaaaaccattgatagacttcacattgtttacctctctaatttttagagaacccttcacacattttgatctatccgtagcccttcttcctgtactggtaagactactgcagtgtttgagagaataccgtttactgcacgaagcaactttactattcaatgcattgaaatacagttgtaatcttcccattcttttttgcacctggagatcaagagtgtatgagggatccatcaacgaagaaagactacaccacgttcaaagatggtttatgctaattaattcttcctatacgttattttgggatgtaaggatggattggtcattggactcgttaacctctttaagatccagatccaaaagtgccgtcacattaaagaaaaaaatgtatcattcggcgattctcgttgactttttgctgaggttctggtggctatgggtatatttatcgcagaatctgaaattagttgccgcagatagcgactacatttttttccaaggcgaaatgcagtatttcgaagtaattagaagaggcatatgggtcgttttcaaattggacgcagagtattatattaagtttgcaagcaaataa

SEQ ID NO: 2598 - DNA, 1089 bp, Artificial Sequence
  Description of Artificial Sequence: Synthetic polynucleotide
atggagaaaagcgaaagtaattctgaaggactttatctccaaaatatattaaatgttccccctccgcagagatttattgtgctcataatacttgccctttggatctggacatggatattaaaattcttcttgcatagtaatttagacgtatcccaagtcatactcacgagagtaccgcacgatatacgtccaggttatactttacagcaattgcatagaacagctagaaattttgctttgaagataacaaggattattataccgttccactttgccactgtgttcctttttgagttcatgaatattatagaaggtccactcaaaaatatcattctcatcgtatattttttaccattgatccaatgtgtcactatattttggtttttattgaaagagtgccagataataaaatattgtactaggagatgtttgttgatagaatcctccccccgttccttaaggaatacctacattttaatctctgacacgttgacatcttttgcaaaaccattgatagacttcacattgtttacctctttgatttttagagaacccttcacacattttgatttatccgtagcccttcttcctgtattggtaagattattgcagtgtttgagagaataccgtttattacacgaagcaactttattattcaatgcattgaaatacagttgtaatcttcccattcttttttgcacctggagatctagagtgtatgagggatccatcaacgaagaaagattgcaccacgttcaaagatggtttatgttgattaattcttcctatacgttattttgggatgtaaggatggattggtctttggactctttaacctctttaagatccagatccaaaagtgccgtcacattaaagaaaaaaatgtatcattctgcgattctcgttgactttttgttgaggttctggtggttatgggtatatttatctcagaatttgaaattagttgccgcagatagcgactacatttttttccaaggcgaaatgcagtatttcgaagtaattagaagaggcatatgggtcgttttcaaattggacgcagagtattatattaagtttgcaagcaaatga

SEQ ID NO: 2599 - DNA, 1125 bp, Saccharomyces cerevisiae
atgaggatacagtcgctttttgttttatttaatgttgccatcatcgcatggtcatatccatatgagcctttaagggttttacaagtaggagagaatgaggtaatggaggttcccgaatcagaaaagctaaacttacgaagaagaggtgtcaaattctttgatgtgaccaaacacacttctttcttacctttctttaacaaggaggaagagccaacagtaccaacgtataactatcctcctgagatatcgaacaaagaagtagtggatgattcgattaagaatatagacaagggctctatgcacaagaacttggcaaagtttacaagtttttacacccgttactacaagtccgatcacggctttgaatctgccgagtggttagctgcaactatcgctaatattacaaaagatattccgcaagatacgttgactattgaacattttgatcacaaagaatggaagcaatattcaattatagtccgtgtcacgggatctactacgccagaagatattataataattggttctcatcaagattctatcaatctgctactgccatccataatggcagctccaggtgcggacgacaatgggtcaggcacggtgactaatatggaggctctcagattatatacggaaaattttttgaagagaggatttagacctaacaacactgtggaatttcacttttattccgccgaagaggggggattgttgggttctcttgatgtttttacagcttatgccaaacagaaaaagcatgtgagagcgatgcttcagcaagacatgacgggatatgtttctgatccagaagatgaacatgtggggattgtcaccgactacactactcccgcattaactgattttataaaactaattatcaactcttatctatccattccttacagggatacacaatgtggctatgcttgtagcgatcatgggagtgccaccagaaacggatttccaggctccttcgtgattgaaagtgagttcaaaaagactaacaagtatattcacagcaccatggatactttggacagattaagtctcgctcatatggcggaacacacaaaaattgtattaggggtaatcattgaactcgggtcatggtccgcttggtaa

SEQ ID NO: 2600 - DNA, 1125 bp, Artificial Sequence
  Description of Artificial Sequence: Synthetic polynucleotide
atgaggatacagtctctttttgttttatttaatgttgccatcatcgcatggagttatccatatgagcctttaagggttttacaagtaggagagaatgaggtaatggaggttcccgaaagtgaaaagttgaacttaagaagaagaggtgtcaaattctttgatgtgaccaaacacacttctttcttacctttctttaacaaggaggaagagccaacagtaccaacgtataactatcctcctgagataagcaacaaagaagtagtggatgattctattaagaatatagacaagggctctatgcacaagaacttggcaaagtttacaagtttttacacccgttactacaagtccgatcacggctttgaatctgccgagtggttagctgcaactatcgctaatattacaaaagatattccgcaagatacgttgactattgaacattttgatcacaaagaatggaagcaatattctattatagtccgtgtcacgggatctactacgccagaagatattataataattggttctcatcaagattctatcaatttattattaccatccataatggcagctccaggtgcggacgacaatgggtctggcacggtgactaatatggaggctctcagattatatacggaaaattttttgaagagaggatttagacctaacaacactgtggaatttcacttttattccgccgaagaggggggattgttgggttctcttgatgtttttacagcttatgccaaacagaaaaagcatgtgagagcgatgcttcagcaagacatgacgggatatgtttctgatccagaagatgaacatgtggggattgtcaccgactacactactcccgcattaactgattttataaaattgattatcaactcttatttatccattccttacagggatacacaatgtggctatgcttgtagcgatcatgggagtgccaccagaaacggatttccaggctccttcgtgattgaaagtgagttcaaaaagactaacaagtatattcacagcaccatggatactttggacagattaagtctcgctcatatggcggaacacacaaaaattgtattaggggtaatcattgaactcgggtcctggtccgcttggtga

SEQ ID NO: 2601 - DNA, 2580 bp, Saccharomyces cerevisiae
atgtcagcatacatcgcaatgaaaggagtaataacaaacgtcgatgagaacataagaaatgatgaagatgtggcttttgagtacgaaatacaaaagacaccgcagaacatacttacatggaaaagatatatcgagtattggaaagaggagggaagaactgacaaacagattaggtggctatatgaaagattttgttcacaatttgtaacagatacaagtatatgggaagattatatacgctgggaatcaacaaaggaagtagtcgaaacttcacgtattttctggctttttcaaaggtgcctgaaaagctgtgtacgagattgtgacaggatatgtttgtcttatttagaattggcaattgaacaatatgacttggcaatgataaggcatgccttagcttcatctttaatgaaaatggagagagaaatgcatcggaaagtttgggatcctgtcataaaatttgtggaagaaaaagttttaccattaacgcaactggattcaactcaagaagatgaagaagaaagtactgatgaagctgaattgataaatgtacttttagtgaagggtttcacgaagggaggttttattagcgaggaaattagtgaaaacggaagtagaggtgatatttggtcgtcacatattttagaaagatacttaaaagtggctcctcagcaaaaacgaaatgaatcgctggcaactcttgcattaactagagacaatattaccatcaaatcagtatatgaaaagtatttgccacaagatgaaaatagtgggaagtatctacctagttcagaactgccttttgaattaaatttcaattatttggccagcctagaaaaactaggtttagataatcaatatgaggagttcatgaggcaaatgaatggcatatatcccgacaaatggctttttttgatcctatcacttgccaaatattatatctctcgcgggaggcttgacagttgtggtgatttattgaagaaaagtttacagcaaacacttaggtacagtgattttgatcgcatctataatttctatttgctatttgagcaagagtgctcccaatttattctgggaaagctaaaggaaaatgacagcaaattctttaatcaaaaagattggactgaaaagttacaagctcatatggcgacatttgaatctttaatcaacttatatgatatctatttgaacgatgtcgcactaaggcaagattccaacttggtggaaacgtggatgaaaagagtgtccttgcagaagtcagcagcggaaaagtgtaatgtgtattcagaagctatactgaaaattgatccccgaaaagttggtacgcctggctctttcggtaggctttggtgttcgtatggggatttgtattggagatcaaacgcaattagtacagctagagaattgtggacacaatctctgaaggtaccgtatccttatatagaagatctggaagaaatttacctaaactgggctgatagagaattagataaagaaggggtggaaagagctttttctatccttgaagatgcattacatgtgccaacaaatccagaaattctcctcgaaaaatataagaatggacacagaaaaatacctgctcaaactgttctattcaactcattacgtatttggtccaaatacattgattatctagaggcttactgcccaaaggatgcaaattcctccgataaaatattcaataagacaaaaatggcatacaatactgttattgatttgagattgatcactccagcaatggcagaaaattttgcattgttcttacaaaatcattacgaagtcatggaaagttttcaggtgtatgagaaaacaatccctctgtttccccccgaaatccaatacgaattatggattgagtatctagaagtagcgacatcacatcaattgtcatcactgagtcctgaacatattagatttttgtttgagaaagcacttaagaatctatgttcaaatggtatagactgtaaaacaatttttatcgcttatagcgtatttgaagaaaggataagtggtctgattagcaagagtattgagatattacgtagaggtgctgtaataggtactgttagtgtgagcacgcacctcgaaagtagactgcaactgtggagaatgtgtatttccaaggccgagtctactttgggaccatcagtaaccagagagttgtaccaagaatgcattcaaattttaccaaactctaaagctgttgagtttgtgattaaattttcagatttcgagagctctataggagaaactattcgagcacgtgaaatccttgcctatggtgcaaagcttcttcctccatccagaaatactgaattatgggatagctttgaaatttttgagttaaaacatggggataaggaaacttacaaagacatgttgaagatgaagaaggtgttggaatccaacatgctcattgattcagctagcgttagccatgaggaaggtaacattaacttcgtggcggcagcaacctcgcatgctcccaactcgcatactcttacccaatcaacctcttcatattcgattaatccagatgaaatagaactagatatttga

SEQ ID NO: 2602 - DNA, 2580 bp, Artificial Sequence
  Description of Artificial Sequence: Synthetic polynucleotide
atgtctgcatacatcgcaatgaaaggagtaataacaaacgtcgatgagaacataagaaatgatgaagatgtggcttttgagtacgaaatacaaaagacaccgcagaacatacttacatggaaaagatatatcgagtattggaaagaggagggaagaactgacaaacagattaggtggttatatgaaagattttgttctcaatttgtaacagatacaagtatatgggaagattatatacgctgggaatctacaaaggaagtagtcgaaacttctcgtattttctggctttttcaaaggtgcttgaaaagctgtgtaagagattgtgacaggatatgtttgtcttatttagaattggcaattgaacaatatgacttggcaatgataaggcatgccttagcttcttctttaatgaaaatggagagagaaatgcatagaaaagtttgggatcctgtcataaaatttgtggaagaaaaagttttaccattaacgcaattggattctactcaagaagatgaagaagaaagtactgatgaagctgaattgataaatgtacttttagtgaagggtttcacgaagggaggttttattagcgaggaaattagtgaaaacggaagtagaggtgatatttggtcttctcatattttagaaagatacttaaaagtggctcctcagcaaaaaagaaatgaatctttggcaactcttgcattaactagagacaatattaccatcaaatctgtatatgaaaagtatttgccacaagatgaaaatagtgggaagtatttacctagttctgaattaccttttgaattaaatttcaattatttggccagcttggaaaaattgggtttagataatcaatatgaggagttcatgaggcaaatgaatggcatatatcccgacaaatggctttttttgatcttatctcttgccaaatattatatctctcgcgggaggcttgacagttgtggtgatttattgaagaaaagtttacagcaaacacttaggtacagtgattttgatcgcatctataatttctatttgttatttgagcaagagtgctcccaatttattttaggaaagttgaaggaaaatgacagcaaattctttaatcaaaaagattggactgaaaagttacaagctcatatggcgacatttgaatctttaatcaacttatatgatatctatttgaacgatgtcgcattaaggcaagattccaacttggtggaaacgtggatgaaaagagtgtccttgcagaagtctgcagcggaaaagtgtaatgtgtattctgaagctatattgaaaattgatcccagaaaagttggtacgcctggctctttcggtaggctttggtgttcttatggggatttgtattggagatctaacgcaattagtacagctagagaattgtggacacaatctttgaaggtaccgtatccttatatagaagatttggaagaaatttacttgaactgggctgatagagaattagataaagaaggggtggaaagagctttttctatccttgaagatgcattacatgtgccaacaaatccagaaattctcctcgaaaaatataagaatggacacagaaaaatacctgctcaaactgttttgttcaactctttacgtatttggtccaaatacattgattatttggaggcttactgcccaaaggatgcaaattcctccgataaaatattcaataagacaaaaatggcatacaatactgttattgatttgagattgatcactccagcaatggcagaaaattttgcattgttcttacaaaatcattacgaagtcatggaaagttttcaggtgtatgagaaaacaatccctttatttccccccgaaatccaatacgaattatggattgagtatttggaagtagcgacatctcatcaattgagttctttgagtcctgaacatattagatttttgtttgagaaagcacttaagaatttatgttctaatggtatagactgtaaaacaatttttatcgcttatagcgtatttgaagaaaggataagtggtttgattagcaagagtattgagatattacgtagaggtgctgtaataggtactgttagtgtgagcacgcacctcgaaagtagattacaattatggagaatgtgtatttccaaggccgagtctactttgggaccatctgtaaccagagagttgtaccaagaatgcattcaaattttaccaaactctaaagctgttgagtttgtgattaaattttctgatttcgagagctctataggagaaactattagagcacgtgaaatccttgcctatggtgcaaagcttcttcctccatccagaaatactgaattatgggatagctttgaaatttttgagttaaaacatggggataaggaaacttacaaagacatgttgaagatgaagaaggtgttggaatccaacatgctcattgattctgctagcgttagccatgaggaaggtaacattaacttcgtggcggcagcaaccagtcatgctcccaactctcatactcttacccaatccacctcttcttattctattaatccagatgaaatagaattagatatttga

SEQ ID NO: 2603 - DNA, 498 bp, Saccharomyces cerevisiae
atgcctccaaagtttgatccaaatgaagttaagtacttgtacttgagagctgtcggtggtgaagtcggtgcttccgccgccttggctccaaagatcggtccattgggtttatccccaaagaaggttggtgaagatatcgccaaggccaccaaggaattcaaaggtatcaaagttactgtccaattgaaaatccaaaacagacaagctgctgcttctgttgttccatctgcttcctctttggtcattactgctttgaaggaaccaccaagagacagaaagaaggataagaacgtcaagcatagcggtaacatccaattggatgaaattattgaaattgccagacaaatgagagacaaatccttcggtagaactttggcttccgttactaaggaaattttgggtactgctcaatctgtcggttgtcgtgttgatttcaagaaccctcatgacatcattgaaggtattaacgctggtgaaattgaaattccagaaaactaa

SEQ ID NO: 2604 - DNA, 498 bp, Artificial Sequence
  Description of Artificial Sequence: Synthetic polynucleotide
atgcctccaaagtttgatccaaatgaagttaagtacttgtacttgagagctgtcggtggtgaagtcggtgcttccgccgccttggctccaaagatcggtccattgggtttatccccaaagaaggttggtgaagatatcgccaaggccaccaaggaattcaaaggtatcaaagttactgtccaattgaaaatccaaaacagacaagctgctgcttctgttgttccatctgcttcctctttggtcattactgctttgaaggaaccaccaagagacagaaagaaggataagaacgtcaagcatagcggtaacatccaattggatgaaattattgaaattgccagacaaatgagagacaaatccttcggtagaactttggcttccgttactaaggaaattttgggtactgctcaatctgtcggttgtcgtgttgatttcaagaaccctcatgacatcattgaaggtattaacgctggtgaaattgaaattccagaaaactga

SEQ ID NO: 2605 - DNA, 1899 bp, Saccharomyces cerevisiae
atgtcaaaatttacttggaaggagttgattcagcttggttcccccagtaaagcatacgagtcctccttagcatgtatcgcccacatagatatgaatgccttttttgcacaggttgagcagatgcgatgtggcttaagcaaagaagatccggtagtctgcgttcagtggaattccattattgcagtctcttatgcagcaagaaagtatggtatatcaaggatggatacgattcaggaagcactaaaaaaatgtagtaacctcataccgatccatacagccgtttttaaaaagggagaagatttttggcaatatcatgatggatgtggatcttgggtgcaggatcctgcaaagcagataagtgtggaagatcataaagtatcactggaaccatataggagggaaagtcgcaaggcgctgaagattttcaaaagcgcatgtgatctagtcgaaagggcgagtattgatgaagtatttcttgatttgggccggatttgtttcaatatgctaatgtttgataatgagtacgagcttacaggcgacttgaaactgaaagatgcattaagcaatattcgtgaggcttttatagggggcaactatgatataaattcccatctacctcttatacccgaaaagataaagtctctgaagtttgaaggcgatgttttcaatccagagggcagagatctgatcacagattgggacgatgtaatacttgcactaggatctcaggtatgcaagggtatcagagatagcataaaagatattctcggttatactacttcgtgtggtttgtctagcaccaaaaatgtttgcaagttggcttctaattacaaaaaacctgatgcccaaacaattgtgaaaaatgattgtttattagattttttagattgcggaaagtttgaaattacatcattctggaccttaggcggcgttcttggcaaagaactaattgacgtattggatcttccccacgaaaacagtattaaacacatcagagagacgtggcctgataatgctggccagcttaaggaatttttagatgctaaagttaagcaatctgattatgatcgctcaaccagcaatatcgaccctttgaaaacagcagatttagcagaaaagttgtttaaattaagtagaggccggtacggtctgcccttaagttctcgccctgttgtaaaaagtatgatgtcaaacaaaaatcttagaggaaaatcgtgcaattccatcgtggactgtatttcttggcttgaggtcttctgcgctgagcttacgtccaggattcaggatctggaacaggagtataacaagatcgtaataccaagaacagtatctatatctttaaaaacaaaatcctacgaagtatatcgaaaatcaggtccagttgcgtacaagggcatcaatttccagagtcacgaactcctaaaagtaggcataaaatttgtcacggaccttgatattaaaggaaagaacaaaagttattaccctttaacaaaactaagtatgacaattactaatttcgatattatagatttacaaaaaactgttgtagatatgtttggcaatcaggtccatactttcaaaagctcagcaggcaaggaagatgaggaaaaaactaccagctcgaaagctgacgagaaaactccgaagttggaatgttgtaaataccaggtgacttttacagaccagaaggctcttcaagagcacgcagactatcatttagcattgaaactgtcggaaggcttaaatggtgctgaagaatcatccaaaaacctttctttcggggaaaaaagattgttgttttcacggaaaagaccaaactcacaacatactgccacacctcagaagaaacaagttacatcttccaaaaacatcttatcattttttacaagaaaaaaatga

SEQ ID NO: 2606 - DNA, 1899 bp, Artificial Sequence
  Description of Artificial Sequence: Synthetic polynucleotide
atgtccaaatttacttggaaggagttgattcagcttggttcccccagtaaagcatacgagtcctccttagcatgtatcgcccacatagatatgaatgccttttttgcacaggttgagcagatgagatgtggcttaagcaaagaagatccggtagtctgcgttcagtggaattccattattgcagtctcttatgcagcaagaaagtatggtatatctaggatggatacgattcaggaagcattgaaaaaatgtagtaacctcataccgatccatacagccgtttttaaaaagggagaagatttttggcaatatcatgatggatgtggatcttgggtgcaggatcctgcaaagcagataagtgtggaagatcataaagtatctttggaaccatataggagggaaagtcgcaaggcgttaaagattttcaaaagcgcatgtgatttggtcgaaagggcgagtattgatgaagtatttcttgatttgggcagaatttgtttcaatatgttaatgtttgataatgagtacgagcttacaggcgacttgaaattgaaagatgcattaagcaatattcgtgaggcttttatagggggcaactatgatataaattcccatttacctcttatacccgaaaagataaagtctttgaagtttgaaggcgatgttttcaatccagagggcagagatttgatcacagattgggacgatgtaatacttgcattgggatctcaggtatgcaagggtatcagagatagcataaaagatattctcggttatactacttcttgtggtttgtctagcaccaaaaatgtttgcaagttggcttctaattacaaaaaacctgatgcccaaacaattgtgaaaaatgattgtttattagattttttagattgcggaaagtttgaaattacatctttctggaccttaggcggcgttcttggcaaagaattgattgacgtattggatcttccccacgaaaacagtattaaacacatcagagagacgtggcctgataatgctggccagcttaaggaatttttagatgctaaagttaagcaatctgattatgatcgctctaccagcaatatcgaccctttgaaaacagcagatttagcagaaaagttgtttaaattaagtagaggcagatacggtttgcccttaagttctcgccctgttgtaaaaagtatgatgtccaacaaaaatcttagaggaaaaagttgcaattccatcgtggactgtatttcttggcttgaggtcttctgcgctgagcttacgtccaggattcaggatttggaacaggagtataacaagatcgtaataccaagaacagtatctatatctttaaaaacaaaatcctacgaagtatatagaaaatctggtccagttgcgtacaagggcatcaatttccagagtcacgaactcttgaaagtaggcataaaatttgtcacggaccttgatattaaaggaaagaacaaaagttattaccctttaacaaaattaagtatgacaattactaatttcgatattatagatttacaaaaaactgttgtagatatgtttggcaatcaggtccatactttcaaaagcagcgcaggcaaggaagatgaggaaaaaactaccagcagtaaagctgacgagaaaactccgaagttggaatgttgtaaataccaggtgacttttacagaccagaaggctcttcaagagcacgcagactatcatttagcattgaaattatctgaaggcttaaatggtgctgaagaatcttccaaaaacctttctttcggggaaaaaagattgttgttttctagaaaaagaccaaactctcaacatactgccacacctcagaagaaacaagttacatcttccaaaaacatcttatctttttttacaagaaaaaaatga

SEQ ID NO: 2607 - DNA, 5409 bp, Saccharomyces cerevisiae
atggtctcattgaaaataaaaaaaattttactcctggtgtcattgttaaatgcaatcgaggcctatagtaacgatacaatatattcaacttcatacaataatggaatagaaagcacaccctcatattcaacatccgcgatatccagtaccggatctagcaacaaagagaatgcaataacatcaagctctgaaaccaccacaatggctggccaatatggtgaaagtggaagcacaacaataatggatgaacaagaaactggtacgtccagccagtatattagtgtgacgacgacaacgcaaacttctgacacgatgtcatcagtaaaaaagtctacggaaatagcgacaccaagtagtagcattgtacccacccctttgcagtcctatagcgatgaatcacaaatatcacaaacgcttagtcacaatccgaagtccgtggcggagtcagatagcgatacaacctcctcggaatcctcaagtagcgtaataatatccacatccgatagttcagcggtaccgagggaaataagtccaataataaccacagattctcaaatttccaaagaagaaggcacattggctcaaacttccagtatcagtgaaacaacgagaattgcacaaatggtaaccagagtttcacaaatctccagcataacggcagcttcaacaatagatggctttagtagtgaatcaacacaaacagatttttccaacactgtatcgtttgaaaattcagtcgaagaagaatatgccatgagcaaatcccagctctctgaaagttacagttcaagttcaaccgtctattctggaggggagtcgactgcagacaagacatctagctcccccattaccagcttttcatcttcttatagccaaacaacgtcaactgaaacctctgagagcagccgagtggctgttggagtatcccggccctctagcataacgcaaactacatcaattgatagttttagtatgagtgaagtagagctttccacatattatgacttaagtgctggcaactatcctgaccaagaactgattgtcgatcgcccggccacttcttccactgccgaaacatcttcagaggcaagtcaaggtgtaagccgtgaatctaacactttcgcagtatcttcgatttccacgacaaactttatagttagcagtgcttcggatactgttgtttcaacttcaagcaccaatacagtgccatacagctctgtccattcaacctttgttcatgcgacttcctcgtcgacttatatttcttcttccctttattcttccccatccttatctgcatccgtttcctctcactttggcgttgctccttttccatctgcttacatatctttctcatcagtacccgttgcagtatcctcgacgtacacgtcttcaccatcggcttctgttgtagtaccttctgcctatgcgtcttcaccatcagtacccgttgcagtatcctcgacgtacacgtcttcaccatcagcacctgctgcaatatcctcaacgtacacgtcttcaccatcggcacctgttgcagtatcctcgacgtacacgtcttcaccatcggcacctgctgcaatatcctcaacgtacacgtcttcaccatcggcacctgttgcagtatcctcgacgtacacgtcttcaccatcagcacctgctgcaatatcctcaacgtacacgtcttcaccatcggcacctgttgcagtatcctcgacgtacacgtcttcaccatcagcacctgttgcaatatcctcaacgtacacgtcttcaccatcggtacctgttgcagtatcctcgacgtacacgtcttcaccatcagcacctgctgcaatatcctcaacgtacacgtcttcaccatcggcacccgttgcagtatcctcgacgtacacgtcttcaccatcagcacctgctgcaatatcctcaacgtacacgtcttcaccatcagtacccgttgcagtatcctcgacgtacacgtcttcaccatcagcacctgctgcaatatcctcaacgtacacgtcttcaccatcagtacccgttgcagtatcctcgacgtacacgtcttcaccatcagcacctgctgcaatatcctcaacgtacacgtcttcaccatcggcacccgttgcagtatcctcgacgtacacgtcttcaccatcagcacctgctgcaatatcctcaacgtacacgtcttcaccatcggcacccgttgcagtatcctcgacgtacacgtcttcaccatcagcacctgctgcaatatcctcaacgtacacgtcttcaccatcggcacctgttgcagtatcctcgacgtacacgtcttcaccatcggctcttgttgtcctgtcatctacttccacatcctctccatatgatattgtttactctccatcaacttttgctgccatatcatccggttacacgccttcaccttctgcttctgtcgccatgtcatctacttcctcatcctctccatatgatattgtttactctctatcatcttctgcttccagatcgtccattgctacatatgaattttcaccttccccatctacttctttacccacctcttctacttacacatacttttcatctgcttatgcgtttgaattttcttctgagcggtactcaacaacatccacaatagcaccaactcaaatacatagcacattgtccaggattacggatttcttactgcagacttcgatggcaatccaaagtatagtctctcagcaaatttctacaagctcaactttaaatgacgaaatacattcaagcgcgctttccgttttcaacccttcagcttcgaatttggttgaaacttctctgataatttcatcgacccaagcaagcataacaagccccaaaaactcagctaaaattagttcactacagagccagctgtctagcagtacaaaaaatccatacgatacggcgaacaagaatactgagaccagtggcagatccacagttgtttcgaatttcctatacacatcttccgcggcgaaaccagacaatgaaaagttttccgctactcctacagagataactacaatttcaagtagctcgcacgcatattctttatctattccaagttctcataattctgtgactggactatcacataactttgtcgattcgtcaaaaagtgcaacctcatttggctactcatcctcatcaatatcttcaataaaactttcaaaagaaacaatacctgcaagtaaatctgtttcaaacacacaagaaagaatcacaagctttacatcaacattacgagcaaatagtcagtctgaaaaatccgaagggaggaattctgtaggttctttacaaagttcacatatttcatctaacccatcgctctccacaaatacaaaggttgattcgaaaagtttatccaggaaagtatcgaaaaccatgggcgaaaatggcgaggaaaccggcttaaccacaacaaagacgcaatacaaaagttcttctgaaaccagtgggtcatattctcggtcttttacaaaaatctcaattggacctgctacgactgcagttcaaactcaggcaagcactaattcagtattcacagcccctgccttgtctacctatcctactactccgtacccctctccaaatagttacgcatggttacctaccgctattatagtggaatcatccgaaacgggccccactaccgcatcattcaatccgtcaatcactggttcacttcccaatgcaattgaaccggccgtcgctgtatcggaacccattaaccacactttaattaccatcggattcacggccgctttgaattatgtatttttggttcaaaatccattatcttcggctcaaatcttcaactttttacctctcgttttgaagtatcccttttcaaacacctcatcagaactggacaatagtattggggaattatccacttttattctttcataccggtctgggagcagcacaactaccctttccccaaaatccatatcatcattatcagttgtcaagaaaaaaaaaaaccagcagaaaaaaaatgccacgaagtcaaccgaggacttacatcctccacaagtcgacacatcctcaatagcggtgaaaaagattgttcccatggtagactcttctaaggcatacattgtatcagttgcagaggtatattttccaacagaagccgtaacatatcttcagcaattaatccttgatgaaaattcgactctttatagcaatcctcaaaccccactgcgaagtttagctggtctaatagatagtgggatcccattagggggattgacgttatatggctctggagatggtggttatgtccctagtttaacctcatcaagcgtcttggattcttcaaaaggaaattcccaaaacatagatggaacttacaagtatggagctttggatgactttatcaattcattcacagattctgcatctgcaggaaagtatgctgtaaaaataatcatctttttgattgttttaactattggcgtactcttgtggttattcgttgcattttttgctttccgtcatagaaatatattattgaaaagacacccaaggaactgcatagggaaaagcctcaataatgagagggaacttgaaagtaccgagctttcccgctcttcttctggaaaccaagtttataatgaaaagccgccagaatctgaaaatgaaagtgtttactctgcggtagatgatcattatattgtgactggcgaaaacacagtctataatactattcacagattacattataccattaatgatgacggtgatctattgtacagggacgcaatccccctcgattttgatcaaaccaatggggatgatggttcgggaatagacagtatagtaagagactgcgtgtatgacaaaaaccaagatgctacggaagccttcttgaatgatgaggagtccatatcaggcattctagatgttgatgaaaatggtgatattcgattatacgacagttattctgacaatgaagagtcaaacagttttcacttgccagacgaagttattgaaaactataacaagaaccatttgtgcgaaactaaacttcatggactaggcactgaatcatgtactacagatgatcccgatactggaaatcaaattacgaatgagttttctacagggagtcagacatgtttgccaagtaccgcttataccacaccccttcatacaaattcgattaaacttcacacattacgctacacagaatcttcactaccaaagccaaatcagactcttttctctaatcttgaagatttagaaatagaggatattgacgacaatggtagtgtttcagatgtacatatcgaggagctggatgctttagacgaagaactttataagagaatgtcgaaagttataaaacaacagaaccatcaaacgacaaaaatatag

SEQ ID NO: 2608 - DNA, 5409 bp, Artificial Sequence
  Description of Artificial Sequence: Synthetic polynucleotide
atggtctctttgaaaataaaaaaaattttactcttggtgtctttgttaaatgcaatcgaggcctatagtaacgatacaatatattctacttcttacaataatggaatagaaagcacaccctcttattctacatccgcgatatccagtaccggatctagcaacaaagagaatgcaataacatctagctctgaaaccaccacaatggctggccaatatggtgaaagtggaagcacaacaataatggatgaacaagaaactggtacgtccagccagtatattagtgtgacgacgacaacgcaaacttctgacacgatgtcttctgtaaaaaagtctacggaaatagcgacaccaagtagtagcattgtacccacccctttgcagtcctatagcgatgaatctcaaatatctcaaacgcttagtcacaatccgaagtccgtggcggagtctgatagcgatacaacctccagtgaatcctccagtagcgtaataatatccacatccgatagttctgcggtaccgagggaaataagtccaataataaccacagattctcaaatttccaaagaagaaggcacattggctcaaacttccagtatcagtgaaacaacgagaattgcacaaatggtaaccagagtttctcaaatctccagcataacggcagcttctacaatagatggctttagtagtgaatctacacaaacagatttttccaacactgtatcctttgaaaattctgtcgaagaagaatatgccatgagcaaatcccagctctctgaaagttacagtagtagttctaccgtctattctggaggggagtctactgcagacaagacatctagctcccccattaccagcttttcttcttcttatagccaaacaacgtctactgaaacctctgagagcagcagagtggctgttggagtatcccgtccctctagcataacgcaaactacatccattgatagttttagtatgagtgaagtagagctttccacatattatgacttaagtgctggcaactatcctgaccaagaattgattgtcgatcgcccggccacttcttccactgccgaaacatcttctgaggcaagtcaaggtgtaagccgtgaatctaacactttcgcagtatcttccatttccacgacaaactttatagttagcagtgcttctgatactgttgtttccacttccagcaccaatacagtgccatacagctctgtccattctacctttgttcatgcgacttcctcttctacttatatttcttcttccctttattcttccccatccttatctgcatccgtttcctctcactttggcgttgctccttttccatctgcttacatatctttctcttctgtacccgttgcagtatcctctacgtacacgtcttctccatctgcttctgttgtagtaccttctgcctatgcgtcttctccatctgtacccgttgcagtatcctctacgtacacgtcttctccatctgcacctgctgcaatatcctctacgtacacgtcttctccatctgcacctgttgcagtatcctctacgtacacgtcttctccatctgcacctgctgcaatatcctctacgtacacgtcttctccatctgcacctgttgcagtatcctctacgtacacgtcttctccatctgcacctgctgcaatatcctctacgtacacgtcttctccatctgcacctgttgcagtatcctctacgtacacgtcttctccatctgcacctgttgcaatatcctctacgtacacgtcttctccatctgtacctgttgcagtatcctctacgtacacgtcttctccatctgcacctgctgcaatatcctctacgtacacgtcttctccatctgcacccgttgcagtatcctctacgtacacgtcttctccatctgcacctgctgcaatatcctctacgtacacgtcttctccatctgtacccgttgcagtatcctctacgtacacgtcttctccatctgcacctgctgcaatatcctctacgtacacgtcttctccatctgtacccgttgcagtatcctctacgtacacgtcttctccatctgcacctgctgcaatatcctctacgtacacgtcttctccatctgcacccgttgcagtatcctctacgtacacgtcttctccatctgcacctgctgcaatatcctctacgtacacgtcttctccatctgcacccgttgcagtatcctctacgtacacgtcttctccatctgcacctgctgcaatatcctctacgtacacgtcttctccatctgcacctgttgcagtatcctctacgtacacgtcttctccatctgctcttgttgtcctttcttctacttccacatcctctccatatgatattgtttactctccatctacttttgctgccatatcttccggttacacgccttctccttctgcttctgtcgccatgtcttctacttcctcctcctctccatatgatattgtttactctttatcttcttctgcttccagaagttccattgctacatatgaattttctccttccccatctacttctttacccacctcttctacttacacatacttttcttctgcttatgcgtttgaattttcttctgagagatactccacaacatccacaatagcaccaactcaaatacatagcacattgtccaggattacggatttcttattgcagacttctatggcaatccaaagtatagtctctcagcaaatttctacaagctctactttaaatgacgaaatacattctagcgcgctttccgttttcaacccttctgcttctaatttggttgaaacttctttgataatttcttccacccaagcaagcataacaagccccaaaaactctgctaaaattagttctttgcagagccagctttctagcagtacaaaaaatccatacgatacggcgaacaagaatactgagaccagtggcagatccacagttgtttctaatttcttgtacacatcttccgcggcgaaaccagacaatgaaaagttttccgctactcctacagagataactacaatttccagtagctctcacgcatattctttatctattccaagttctcataattctgtgactggattatctcataactttgtcgattcttctaaaagtgcaacctcttttggctactcttcctcttctatatcttctataaaactttctaaagaaacaatacctgcaagtaaatctgtttctaacacacaagaaagaatcacaagctttacatctacattaagagcaaatagtcagtctgaaaaatccgaagggaggaattctgtaggttctttacaaagttctcatatttcttctaacccatctctctccacaaatacaaaggttgattctaaaagtttatccaggaaagtatccaaaaccatgggcgaaaatggcgaggaaaccggcttaaccacaacaaagacgcaatacaaaagttcttctgaaaccagtgggtcttattctcgttcttttacaaaaatctctattggacctgctacgactgcagttcaaactcaggcaagcactaattctgtattcacagcccctgccttgtctacctatcctactactccgtacccctctccaaatagttacgcatggttacctaccgctattatagtggaatcttccgaaacgggccccactaccgcatctttcaatccgtctatcactggttctcttcccaatgcaattgaaccggccgtcgctgtatctgaacccattaaccacactttaattaccatcggattcacggccgctttgaattatgtatttttggttcaaaatccattatcttctgctcaaatcttcaactttttacctctcgttttgaagtatcccttttccaacacctcttctgaattagacaatagtattggggaattatccacttttattctttcttacagatctgggagcagcacaactaccctttccccaaaatccatatcttctttaagtgttgtcaagaaaaaaaaaaaccagcagaaaaaaaatgccacgaagtctaccgaggacttacatcctccacaagtcgacacatcctccatagcggtgaaaaagattgttcccatggtagactcttctaaggcatacattgtatctgttgcagaggtatattttccaacagaagccgtaacatatcttcagcaattaatccttgatgaaaattctactctttatagcaatcctcaaaccccattaagaagtttagctggtttgatagatagtgggatcccattagggggattgacgttatatggctctggagatggtggttatgtccctagtttaacctcttctagcgtcttggattcttctaaaggaaattcccaaaacatagatggaacttacaagtatggagctttggatgactttatcaattctttcacagattctgcatctgcaggaaagtatgctgtaaaaataatcatctttttgattgttttaactattggcgtactcttgtggttattcgttgcattttttgctttccgtcatagaaatatattattgaaaagacacccaaggaactgcatagggaaaagcctcaataatgagagggaacttgaaagtaccgagctttcccgctcttcttctggaaaccaagtttataatgaaaagccgccagaatctgaaaatgaaagtgtttactctgcggtagatgatcattatattgtgactggcgaaaacacagtctataatactattcacagattacattataccattaatgatgacggtgatttattgtacagggacgcaatccccctcgattttgatcaaaccaatggggatgatggttctggaatagacagtatagtaagagactgcgtgtatgacaaaaaccaagatgctacggaagccttcttgaatgatgaggagtccatatctggcattttagatgttgatgaaaatggtgatattagattatacgacagttattctgacaatgaagagagcaacagttttcacttgccagacgaagttattgaaaactataacaagaaccatttgtgcgaaactaaacttcatggattgggcactgaaagttgtactacagatgatcccgatactggaaatcaaattacgaatgagttttctacagggagtcagacatgtttgccaagtaccgcttataccacaccccttcatacaaattctattaaacttcacacattacgctacacagaatcttctttaccaaagccaaatcagactcttttctctaatcttgaagatttagaaatagaggatattgacgacaatggtagtgtttctgatgtacatatcgaggagttagatgctttagacgaagaactttataagagaatgtccaaagttataaaacaacagaaccatcaaacgacaaaaatatga

SEQ ID NO: 2609 - DNA, 2853 bp, Saccharomyces cerevisiae
atgtctgctaagaaaaggccttcgggaaacgcagcatttgaacttccaaaacggagaagaacctaccaagcttgcatcagctgcagatcaaggaaggtgaaatgtgatcttggtccggttgataacccacacgacccaccgtgtgcacgttgcaaaagggagctaaaaaaatgtatttttagctctaataagggaacttcgaacgacttgcctcctaattcgattaatgcaataagtctgccatctctaggtaagagtaagcaagagatacaaaatgactcaacgagcccaattttatcggatgtacctttgtcaagaaaagggattagcagtgaaaaatcatttaaatcagaagggatgaagtggaagcttgaactttcctccatgcagaacgccctagagtttctggcccaagctgctggaactgtagcaaaagaaggcgcaaaagaaatcataaaagagaagtccacaacaccgaaaccactgaaaagttctttggatgcgacaaataaatctgctacggacgaggggttgaaacgactttcaaaaagtgacagtactaacacactttacgaaaatacagcagatatgcttaaccacacgctgaatacgaataggaaaacatcacaattaatggaagaaatcgggaaagtgagacctccacctacccggaaaattgacgacttcgattacatcggtccagatagcttgcttactaaagaggaggcgattgaactcatagaggcattttttctcacgatgcacccattctttcccaatatcccacttcaattgcatgatccgaaagaattagcagaatatccaattttgttttgtgcaattttgactgtttctgctcgctatcatcctttcgatactttaggattagacaatggagaagatgggatgagacacattgaagttcacgataaattatgggtgtattgccagaagcttatatctcaaacaatttgggcagaggctagtactaggtcaattggcaccgtgcttgctttcataattttcacggaatggaacccaaggagtatccactataaatggtctgactatgcaaatgatcctgagttaaataatgtcaacgctagaggaagtaagaatattagtacgaggaaggacgaagaaggattgaccggtgtcggcgcaatccgtagaagcgaccgaatgtcatggatgctgacagggtctgcagtaaggctggcgcaagatatgggattcattgaaaacagctcaaaagtattcattgtcactcatatatctgagactaccagtgctatgaatatgaatcaaagatccttattagcagaatcattcagcgttttaaacttgaatttaggaaaaattgaaaacgatggaaatgaaagcaatgaggattaccttgggaatgaaaaattttatctgaatgagattttgcctgatgaagaaagtaaactaaggtggaagagagtttttgaaaactcagaaaatgaccacgacaacgagaaaaattttttgactgattgggagagggagtttttaaacgatgagtatgttctatattattctaataaaaaagatgatactaatctagcacagaatcacataccaccatttccactaagattctcattcgcccaaagagcaaaaatagagatcattcgaatcctatccatagcatatgagacgatttactgtgagaagaataagaggaaattggcaacgacagatcagagacacaacctctctgtcctaagtgttttttctcccttgatagagggctggctcagtaactacagagagcttcttgtacccctttctgatgtccctttctcactagcagataggaagaacaaaaaacaaatatttgataacatcgatagaataaatggtgaaagtattatcacagatttcaattattgtcaactttatatcttttccctcgcactgcaagtggatgggaaaacaagcagattgaatatgaatgaaattgtgacaagcgcgaggtatgtggaattagcatacagatctgcaaaagaaatattgagttctgcaaagcgagtttcaaggcaaggaatgctaaaatacatgcccgtaagatgggtaatacgaataattagatccattgcgttcatagtaaaatgctacctaacacttactggtagtgaactggcaacaaatccagatgccagaaacattttaaaattaagtgcaatatcggttgacgaaacattcgatatcatccgtgacactgcggttactttgaaagaagctacaccagatgaattacatctatgtcaaagatacgcagccatattaatgtacttatgtacagagatgaaacttcgaaaaaaatcttacttagaacgaccacccttattaagagatggcaccactcctctagagagcaatcgcgaatcctcactggagggacaagacttaactaagaagccaatattctctaaacgtattggatataataaaaccgagactacttttgaaccctcggaaaggcctttgacggaggaaattaatagcaattctcagaattcaaatgatacatcttctaaaggtatcgttgatccttttgttgaacaaaacaacgatatcacaacagcgttactgaacaatgaactcttccaaggtccatctctatctgacgaggttacagattggttcggtgctagtgaagatatcgggcttgaatttgtagaaccatggacagaacttattgagcaacgatatatgcaatgtggagatggtgataataataatttcgaaaatttatacaacttgttcgtgaatagtaataacatcaataatgatattaataactcaaggccaataacgcgtaaataa

SEQ ID NO: 2610 - DNA, 2853 bp, Artificial Sequence
  Description of Artificial Sequence: Synthetic polynucleotide
atgtctgctaagaaaaggccttctggaaacgcagcatttgaacttccaaaaagaagaagaacctaccaagcttgcatcagctgcagaagtaggaaggtgaaatgtgatcttggtccggttgataacccacacgacccaccgtgtgcacgttgcaaaagggagttgaaaaaatgtatttttagctctaataagggaacttctaacgacttgcctcctaattctattaatgcaataagtttaccatctttgggtaagagtaagcaagagatacaaaatgacagtacgagcccaattttaagtgatgtacctttgtccagaaaagggattagcagtgaaaaaagttttaaaagtgaagggatgaagtggaagcttgaactttcctccatgcagaacgccttagagtttttggcccaagctgctggaactgtagcaaaagaaggcgcaaaagaaatcataaaagagaagtccacaacaccgaaaccattgaaaagttctttggatgcgacaaataaatctgctacggacgaggggttgaaaagactttctaaaagtgacagtactaacacactttacgaaaatacagcagatatgcttaaccacacgttgaatacgaataggaaaacatctcaattaatggaagaaatcgggaaagtgagacctccacctaccagaaaaattgacgacttcgattacatcggtccagatagcttgcttactaaagaggaggcgattgaactcatagaggcattttttctcacgatgcacccattctttcccaatatcccacttcaattgcatgatccgaaagaattagcagaatatccaattttgttttgtgcaattttgactgtttctgctcgctatcatcctttcgatactttaggattagacaatggagaagatgggatgagacacattgaagttcacgataaattatgggtgtattgccagaagcttatatctcaaacaatttgggcagaggctagtactaggtctattggcaccgtgcttgctttcataattttcacggaatggaacccaaggagtatccactataaatggtctgactatgcaaatgatcctgagttaaataatgtcaacgctagaggaagtaagaatattagtacgaggaaggacgaagaaggattgaccggtgtcggcgcaatccgtagaagcgacagaatgtcttggatgttaacagggtctgcagtaaggttagcgcaagatatgggattcattgaaaacagcagtaaagtattcattgtcactcatatatctgagactaccagtgctatgaatatgaatcaaagatccttattagcagaatctttcagcgttttaaacttgaatttaggaaaaattgaaaacgatggaaatgaaagcaatgaggattaccttgggaatgaaaaattttatttgaatgagattttgcctgatgaagaaagtaaattgaggtggaagagagtttttgaaaactctgaaaatgaccacgacaacgagaaaaattttttgactgattgggagagggagtttttaaacgatgagtatgttttatattattctaataaaaaagatgatactaatttggcacagaatcacataccaccatttccattgagattcagtttcgcccaaagagcaaaaatagagatcattagaatcttgtccatagcatatgagacgatttactgtgagaagaataagaggaaattggcaacgacagatcagagacacaacctctctgtcttaagtgttttttctcccttgatagagggctggctcagtaactacagagagcttcttgtacccctttctgatgtccctttctctttggcagataggaagaacaaaaaacaaatatttgataacatcgatagaataaatggtgaaagtattatcacagatttcaattattgtcaactttatatcttttccctcgcattacaagtggatgggaaaacaagcagattgaatatgaatgaaattgtgacaagcgcgaggtatgtggaattagcatacagatctgcaaaagaaatattgagttctgcaaagagagtttccaggcaaggaatgttgaaatacatgcccgtaagatgggtaataagaataattagatccattgcgttcatagtaaaatgctacttgacacttactggtagtgaattggcaacaaatccagatgccagaaacattttaaaattaagtgcaatatctgttgacgaaacattcgatatcatccgtgacactgcggttactttgaaagaagctacaccagatgaattacatttatgtcaaagatacgcagccatattaatgtacttatgtacagagatgaaacttagaaaaaaatcttacttagaaagaccacccttattaagagatggcaccactcctttagagagcaatcgcgaatcctctttggagggacaagacttaactaagaagccaatattctctaaacgtattggatataataaaaccgagactacttttgaacccagtgaaaggcctttgacggaggaaattaatagcaattctcagaatagtaatgatacatcttctaaaggtatcgttgatccttttgttgaacaaaacaacgatatcacaacagcgttattaaacaatgaactcttccaaggtccatctttatctgacgaggttacagattggttcggtgctagtgaagatatcgggcttgaatttgtagaaccatggacagaacttattgagcaaagatatatgcaatgtggagatggtgataataataatttcgaaaatttatacaacttgttcgtgaatagtaataacatcaataatgatattaataacagcaggccaataacgcgtaaatga

SEQ ID NO: 2611 - DNA, 2448 bp, Saccharomyces cerevisiae
atgggaaacagtccttctactcaggatccatcgcattcaaccaaaaaggagcatggacatcattttcatgatgcattcaataaagatcgtcagggaagcataacctctcaactgtttaacaataggaagagtactcataagagacgcgccagtcatactagcgaacataatggtgccattccccctagaatgcaattacttgcatctcacgatccatcgacagattgtgatgggcgcatgagcagtgatactactatcgataagggcccgtcccatctattcaaaaaggattattctttgtcctctgccgcagacgtaaatgacactacgttggccaatttgactttaagtgatgatcacgatgtgggtgcacccgaagagcaggtgaaatctccgtcgtttttgagcccaggtccatcaatggccactgtcaaacgaactaaaagtgatctggatgatctgtctactttgaattacaccatggttgacgaaacaacagaaaatgaaagaaacgacaaaccacaccatgaaaggcatcgctcaagcatcatagctttgaaaaaaaatcttttagaaagttcagctactgcttccccttctccaacgaggtcttcatcggtgcattcagcatcacttcccgccttgaccaagacggattccattgatattcctgtaagacaaccctattcaaagaaaccatctatccatgcataccaatatcaatatctcaataacgacgaaacattttctgagaactctcaaatggataaagagggaaacagtgatagtgtagatgcagaagcaggcgtacttcaaagtgaagatatggttttgaaccagtctcttttacaaaatgctttaaaaaaggatatgcaacgtctttcaagggtgaattcctctaattcaatgtatactgcagaaaggataagccacgctaataacaatggaaatattgaaaataacacccgtaacaagggaaacgcgggaggctccaacgacgattttaccgcacctatatctgctactgcaaaaatgatgatgaaactgtacggtgataagaccttgatggaaagagatttaaataagcaccataataagacaaagaaagcccagaataaaaaaataaggtcggtttcaaattcgagaagatcctcatttgcttctttgcattctttacaatcaagaaagagtatcttaacaaacggtttgaatttgcagcctttgcatccactacatccaattattaacgacaatgaaagtcaatactctgcaccgcagcatagagaaatatcgcatcactctaattccatgtcgagtatgtcttcaatatcatcaacaaactccaccgaaaatactttagttgttctaaaatggaaagacgatggtaccgtggctgcaaccacggaagtctttatagtaagcacggatattgcttctgctcttaaagagcaaagagagcttaccttggatgagaatgcaagtttagactcagaaaaacagttaaatcctaggatccgcatggtttatgatgatgtgcataaggaatggtttgttccagatctttttttgcctgcaggaatttatagactgcaattctccatcaatggtatattgactcactcaaattttcttcctacagctacggattcagaaggcaattttgtcaactggtttgaagtattgcccggttatcatacgatcgagccatttagaaacgaagcagacatcgactcgcaagtagagccaacactggatgaagaattgcccaagagaccggaacttaaaagatttccttcttcctctcgaaaatcttcctactattctgctaagggtgttgaaaggccaagtacaccgttttcagattatagaggcttaagtaggtccagttcaataaatatgcgtgactcatttgtacgtctgaaggctagcagtttggatttgatggccgaggtcaagcctgagaggttggtgtattcgaacgaaataccaaatttatttaatataggtgacggctctacgatttctgtaaaaggagattctgatgacgtgcatccccaagaacctcccagctttacacatagagttgttgactgtaatcaagatgatttatttgctactttacagcaaggcggtaatattgatgcagaaacagcagaggcggtttttctaagtagatacccagttcctgacttgcccatatacctgaattcatcctatctgaacagaatactaaaccaaagcaatcagaattcagaatcacatgagagggatgaaggtgcgataaatcatattataccccacgtgaatttgaaccatttactgacaagcagtattagagatgaaataatcagcgtagcttgcactactagatatgaggggaaatttatcactcaagtagtttatgcaccttgttattataaaacacaaaagtctcagatcagtaattag

SEQ ID NO: 2612 - DNA, 2448 bp, Artificial Sequence
  Description of Artificial Sequence: Synthetic polynucleotide
atgggaaacagtccttctactcaggatccatctcattctaccaaaaaggagcatggacatcattttcatgatgcattcaataaagatcgtcagggaagcataacctctcaattatttaacaataggaagagtactcataagagacgcgccagtcatactagcgaacataatggtgccattccccctagaatgcaattacttgcatctcacgatccatctacagattgtgatgggcgcatgagcagtgatactactatcgataagggcccgtcccatcttttcaaaaaggattattctttgtcctctgccgcagacgtaaatgacactacgttggccaatttgactttaagtgatgatcacgatgtgggtgcacccgaagagcaggtgaaatctccgtcctttttgagcccaggtccaagcatggccactgtcaaaagaactaaaagtgatttggatgatttatctactttgaattacaccatggttgacgaaacaacagaaaatgaaagaaacgacaaaccacaccatgaaaggcatcgcagcagcatcatagctttgaaaaaaaatcttttagaaagttctgctactgcttccccttctccaacgaggtcttcttctgtgcattctgcatctcttcccgccttgaccaagacggattccattgatattcctgtaagacaaccctattccaagaaaccatctatccatgcataccaatatcaatatctcaataacgacgaaacattttctgagaactctcaaatggataaagagggaaacagtgatagtgtagatgcagaagcaggcgtacttcaaagtgaagatatggttttgaaccagtctcttttacaaaatgctttaaaaaaggatatgcaacgtctttctagggtgaattcctctaattctatgtatactgcagaaaggataagccacgctaataacaatggaaatattgaaaataacacccgtaacaagggaaacgcgggaggctccaacgacgattttaccgcacctatatctgctactgcaaaaatgatgatgaaactttacggtgataagaccttgatggaaagagatttaaataagcaccataataagacaaagaaagcccagaataaaaaaataaggtctgtttctaattctagaagatcctcttttgcttctttgcattctttacaatctagaaagagtatcttaacaaacggtttgaatttgcagcctttgcatccattgcatccaattattaacgacaatgaaagtcaatactctgcaccgcagcatagagaaatatctcatcactctaattccatgagcagtatgtcttctatatcttctacaaactccaccgaaaatactttagttgttttgaaatggaaagacgatggtaccgtggctgcaaccacggaagtctttatagtaagcacggatattgcttctgctcttaaagagcaaagagagcttaccttggatgagaatgcaagtttagactctgaaaaacagttaaatcctaggatccgcatggtttatgatgatgtgcataaggaatggtttgttccagatctttttttgcctgcaggaatttatagattacaattctccatcaatggtatattgactcactctaattttcttcctacagctacggattctgaaggcaattttgtcaactggtttgaagtattgcccggttatcatacgatcgagccatttagaaacgaagcagacatcgactctcaagtagagccaacattagatgaagaattgcccaagagaccggaacttaaaagatttccttcttcctctagaaaatcttcctactattctgctaagggtgttgaaaggccaagtacaccgttttctgattatagaggcttaagtaggtccagtagtataaatatgcgtgactcttttgtacgtttgaaggctagcagtttggatttgatggccgaggtcaagcctgagaggttggtgtattccaacgaaataccaaatttatttaatataggtgacggctctacgatttctgtaaaaggagattctgatgacgtgcatccccaagaacctcccagctttacacatagagttgttgactgtaatcaagatgatttatttgctactttacagcaaggcggtaatattgatgcagaaacagcagaggcggtttttttgagtagatacccagttcctgacttgcccatatacttgaattcttcctatttgaacagaatattaaaccaaagcaatcagaattctgaaagtcatgagagggatgaaggtgcgataaatcatattataccccacgtgaatttgaaccatttattaacaagcagtattagagatgaaataatcagcgtagcttgcactactagatatgaggggaaatttatcactcaagtagtttatgcaccttgttattataaaacacaaaagtctcagatcagtaattga

SEQ ID NO: 2613 - DNA, 1230 bp, Saccharomyces cerevisiae
atgggcaatatccttcggaaaggtcagcaaatatatttagcaggtgacatgaagaagcaaatgttgctaaataaagatggaacacctaagaggaaggtgggcagaccaggcagaaaaaggattgactctgaagctaagagtaggaggactgcccagaatagggcagctcaacgagcgttccgagataggaaagaagccaaaatgaagagtttgcaagagagggtagagttactagaacagaaagatgcgcagaataagactaccacggactttttactatgttctttaaaaagtttactgtcggaaattacaaaatatagagctaagaattctgatgatgaaagaatattagccttcctcgatgatctgcaagaacaacagaaaagggaaaacgaaaaaggaacaagtacagcagttagcaaggctgcaaaggaattgccatcgcctaattcagatgaaaacatgactgtgaacacaagtatagaagtacagccgcacactcaagagaatgagaaagttatgtggaacataggctcatggaacgctcccagtttaaccaattcgtgggattctccccccggaaatcgaacaggtgccgttaccatcggtgacgaaagtattaatggtagtgaaatgccagatttcagtctcgatcttgtctccaatgatagacagactggtctagaagctttagattacgacattcataactactttcctcagcactctgaacgcctgaccgctgaaaaaatagatacgtcagcatgtcaatgtgaaattgaccaaaagtatcttccatacgagacagaagatgatactttattccccagcgtgcttccccttgctgtagggagccagtgtaataatatttgcaaccgcaagtgtatcgggaccaaaccatgttcaaataaggagatcaaatgcgacttaataacaagccacctgttgaatcagaaatctctagcttcggtgcttccggtggctgcttctcatactaaaacaattcgaacccaatctgaagcaattgaacacattagcagcgccatatcgaatggaaaagcgtcttgctaccacattctcgaagagatctcctccctaccaaaatattcatcgttggacatagatgatttatgcagcgaattaataatcaaggcaaaatgtacagatgactgcaaaatagtagtcaaagctcgcgacttacagagtgctctggttagacagctcctgtag

SEQ ID NO: 2614 - DNA, 1230 bp, Artificial Sequence
  Description of Artificial Sequence: Synthetic polynucleotide
atgggcaatatccttagaaaaggtcagcaaatatatttagcaggtgacatgaagaagcaaatgttgttgaataaagatggaacacctaagaggaaggtgggcagaccaggcagaaaaaggattgactctgaagctaagagtaggaggactgcccagaatagggcagctcaaagagcgttcagagataggaaagaagccaaaatgaagagtttgcaagagagggtagagttattggaacagaaagatgcgcagaataagactaccacggactttttattatgttctttaaaaagtttattatctgaaattacaaaatatagagctaagaattctgatgatgaaagaatattagccttcctcgatgatttgcaagaacaacagaaaagggaaaacgaaaaaggaacaagtacagcagttagcaaggctgcaaaggaattgccatctcctaattctgatgaaaacatgactgtgaacacaagtatagaagtacagccgcacactcaagagaatgagaaagttatgtggaacataggctcctggaacgctcccagtttaaccaattcttgggattctccccccggaaatagaacaggtgccgttaccatcggtgacgaaagtattaatggtagtgaaatgccagatttcagtctcgatcttgtctccaatgatagacagactggtttggaagctttagattacgacattcataactactttcctcagcactctgaacgcctcaccgctgaaaaaatagatacgtctgcatgtcaatgtgaaattgaccaaaagtatcttccatacgagacagaagatgatactttattccccagcgtgcttccccttgctgtagggagccagtgtaataatatttgcaaccgcaagtgtatcgggaccaaaccatgttctaataaggagatcaaatgcgacttaataacaagccacttattgaatcagaaatctttggcttctgtgcttccggtggctgcttctcatactaaaacaattagaacccaatctgaagcaattgaacacattagcagcgccatatccaatggaaaagcgtcttgctaccacattctcgaagagatctcctccttgccaaaatattcttctttggacatagatgatttatgcagcgaattaataatcaaggcaaaatgtacagatgactgcaaaatagtagtcaaagctcgcgacttacagagtgctttggttagacagctcttgtga

SEQ ID NO: 2615 - DNA, 279 bp, Saccharomyces cerevisiae
atgagcgatgaaaataagagtacgcctattgttaaggcgtctgacataaccgacaagctgaaagaggatattttaaccatcagtaaagatgctctggacaagtaccagttggaaagagacattgctgggacggtaaagaagcaattggatgtcaaatacggcaatacctggcatgtgattgtcggaaagaactttgggagctacgtgacacacgaaaagggccattttgtttatttctatatcggtccactggcgtttttagttttcaaaacagcataa

SEQ ID NO: 2616 - DNA, 279 bp, Artificial Sequence
  Description of Artificial Sequence: Synthetic polynucleotide
atgagcgatgaaaataagagtacgcctattgttaaggcgtctgacataaccgacaagttgaaagaggatattttaaccatcagtaaagatgctttggacaagtaccagttggaaagagacattgctgggacggtaaagaagcaattggatgtcaaatacggcaatacctggcatgtgattgtcggaaagaactttgggagctacgtgacacacgaaaagggccattttgtttatttctatatcggtccattggcgtttttagttttcaaaacagcatga

SEQ ID NO: 2617 - DNA, 1878 bp, Saccharomyces cerevisiae
atggactacaacatatttgaggcggtacatgaacaacaaagcagcacatctgacatggatctctcagaagaagataataatccattcgtcggcactcatcacctatatgcttctggaattgggactactatcggcgaagctcgcccagagaacgaaaattcgcccccttcttcatcgtctttgccatctagcccggcacattcctcttctgctggctcttccagagcatctacgtcatcttcaacctcttctcatgccgtagtggaagcagatgcggaaactgaaccttttgtttccttgtcgatgtctactactgctactattagcaaatttactccccacgatatgaatgggacacagcagatccaaatcattgatgccggcgatttcaaagatccatgggggaaacacgctatcggttacgtaattctatatgaaaacaacaagattatcagaaggtactctgaatttcattctttgaggcaatctctaactagactccttcctacgataattattccacccattccatccaagcattctcttctcaaatacatatggagtcccataaacgcagcaaatgattccaaaattatctccaccaggaagaaaatgctcaattcattcttgtctaactgtctgaacattcaagaaataagcaacgatattgtttttcaaaaatttctaaaccctgaatttaattggaaagatgttttaagttcgtcgccgataatcatactacctttgaataaccttttagctccacctttaagcccaacaaaaccaagcccccttcattctattttacctattccatccaactcgtctctgagaaactataattcgatttggcaacaacacatcacagtaaaaagtcataatgaaatttccaacctcccaacagaaattttacaaaacgaatctcaatttacacatattgaaaatttattccaaaattataagcgaataatcacccatttattaaaaaacataagatcaaataaatctcatttccactccttgtccacgtattttgctgaattaggcgcatattataatgcttttagtttggaaaatgacataaccatgcccaacagccttcgcgaatctgaaaacaattcaaacaacccaatgatggaaattattagtcatattgaaaagacaggccattcattcgatgttatatacatttcttccgagatcttaatagaaaagtacacctctattcttgaggaccccattaatgagttattgcagttcttaaatgagtcattcaaagttctaaatttcaagaaattaaagtttttgcaatttaaaatattagagaggctaattatcgaaaaagaaacgaaactttcgagtctcactgagattgaaaaccaactgcagaagattaatgaaagtttaacgcggtcgactatattgacagatgaaaattacaaagatacaaaggctgctgacctgacatttgttaaaaaggacgtaagatcgctatcgaagtcaagttcaaattcaagctccagtggacaccaaaacgaaattcatataggcgcaagtaaactaaactataaaacgtctacgccaacaatgaatctcaataaattagaaatcaaacaattgactgaacaagaaagatctaaacagatcaaacagttgaaccaagatttatccaaattgaaagattgtctatcaatctgtatatcagacatgctagaaattaacaattcgtcatacaacagcttaatgcatacatataaccatattaatttgaccattggaaagatcttgaaacttttcgcagctagcttcaaagcatggatcaaagaatgtctgaagaattggaaactggcaaagttacaaatcgacgaggccctataa

SEQ ID NO: 2618 - DNA, 1878 bp, Artificial Sequence
  Description of Artificial Sequence: Synthetic polynucleotide
atggactacaacatatttgaggcggtacatgaacaacaaagcagcacatctgacatggatctctctgaagaagataataatccattcgtcggcactcatcacttgtatgcttctggaattgggactactatcggcgaagctcgcccagagaacgaaaattctcccccttcttcttcttctttgccatctagcccggcacattcctcttctgctggctcttccagagcatctacgtcttcttccacctcttctcatgccgtagtggaagcagatgcggaaactgaaccttttgtttccttgtccatgtctactactgctactattagcaaatttactccccacgatatgaatgggacacagcagatccaaatcattgatgccggcgatttcaaagatccatgggggaaacacgctatcggttacgtaattctttatgaaaacaacaagattatcagaaggtactctgaatttcattctttgaggcaatctttgactagactccttcctacgataattattccacccattccatccaagcattctcttctcaaatacatatggagtcccataaacgcagcaaatgattccaaaattatctccaccaggaagaaaatgctcaattctttcttgtctaactgtttgaacattcaagaaataagcaacgatattgtttttcaaaaatttttgaaccctgaatttaattggaaagatgttttaagttcttctccgataatcatattacctttgaataaccttttagctccacctttaagcccaacaaaaccaagcccccttcattctattttacctattccatccaactcttctttgagaaactataattctatttggcaacaacacatcacagtaaaaagtcataatgaaatttccaacctcccaacagaaattttacaaaacgaatctcaatttacacatattgaaaatttattccaaaattataagagaataatcacccatttattaaaaaacataagatctaataaatctcatttccactccttgtccacgtattttgctgaattaggcgcatattataatgcttttagtttggaaaatgacataaccatgcccaacagccttcgcgaatctgaaaacaatagcaacaacccaatgatggaaattattagtcatattgaaaagacaggccattctttcgatgttatatacatttcttccgagatcttaatagaaaagtacacctctattcttgaggaccccattaatgagttattgcagttcttaaatgagagtttcaaagttttgaatttcaagaaattaaagtttttgcaatttaaaatattagagaggttgattatcgaaaaagaaacgaaactttccagtctcactgagattgaaaaccaattgcagaagattaatgaaagtttaacgagatctactatattgacagatgaaaattacaaagatacaaaggctgctgacttgacatttgttaaaaaggacgtaagatccttatccaagagtagtagtaatagtagctccagtggacaccaaaacgaaattcatataggcgcaagtaaattgaactataaaacgtctacgccaacaatgaatctcaataaattagaaatcaaacaattgactgaacaagaaagatctaaacagatcaaacagttgaaccaagatttatccaaattgaaagattgtttatctatctgtatatctgacatgttggaaattaacaattcttcctacaacagcttaatgcatacatataaccatattaatttgaccattggaaagatcttgaaacttttcgcagctagcttcaaagcatggatcaaagaatgtttgaagaattggaaattggcaaagttacaaatcgacgaggccttgtga

SEQ ID NO: 2619 - DNA, 1182 bp, Saccharomyces cerevisiae
atgtttaataatcatgaaattgacaccatattaagcactctccgcatggaggcagatccctctttgcatcctttattcgaacaatttgagaaattttatgaagagaaattgtggttccaattgtccgaatccttgactaaattttttgatgatgctaaatctacaccattgaggctcagattatatgataacttcgtttctaaattttatgataaaatcaaccaattgtcagtagtaaagtatctacttgcctctttgaaggattctaaggatttcgatgagtctttaaaatatttggatgatttgaaggctcaatttcaagaattggactctaaaaaacaaagaaataatggatcaaaagaccatggtgatggtattttgttgatagatagcgaaattgctagaacttacctgttaaagaacgacctcgttaaggcaagagatttattagatgatttggaaaagacattggataaaaaggattccattccattaaggataacaaacagcttctattctacaaattcccagtattttaaatttaaaaatgatttcaattctttctactacacaagtctattatacctttctaccttagaaccatctacaagcattactttagccgaacgtcaacaattggcctatgatttgagtatctcagcattgttaggtgacaaaatctataattttggcgaactattacaccatccaataatggaaactatagtcaacgattccaattacgattggcttttccaattattaaatgctctaaccgttggtgattttgataaattcgactcattgataaaagttcaaatatcaaagattcctatattggctcaacatgaatcatttttacgacaaaaaatttgcctaatgacattaattgaaacagtttttgtcaaaaatattaggatgctttcatttgaagatatttcaaaggctacacacctaccaaaggataatgtcgaacacctggtcatgagagccataagtttgggtctattaaagggttctattgaccaagtaaatgaactcgttaccatctcctgggtccaaccaagaatcataagtggtgaccaaattacaaagatgaaggacagactggttgaatggaacgatcaagtagaaaaactgggcaaaaaaatggaagctcgtggccaatccatctgggtttag

SEQ ID NO: 2620 - DNA, 1182 bp, Artificial Sequence
  Description of Artificial Sequence: Synthetic polynucleotide
atgtttaataatcatgaaattgacaccatattaagcactctccgcatggaggcagatccctctttgcatcctttattcgaacaatttgagaaattttatgaagagaaattgtggttccaattgtccgaatccttgactaaattttttgatgatgctaaatctacaccattgaggctcagattatatgataacttcgtttctaaattttatgataaaatcaaccaattgagtgtagtaaagtatttacttgcctctttgaaggattctaaggatttcgatgagtctttaaaatatttggatgatttgaaggctcaatttcaagaattggactctaaaaaacaaagaaataatggatctaaagaccatggtgatggtattttgttgatagatagcgaaattgctagaacttacttattaaagaacgacctcgttaaggcaagagatttattagatgatttggaaaagacattggataaaaaggattccattccattaaggataacaaacagcttctattctacaaattcccagtattttaaatttaaaaatgatttcaattctttctactacacaagtttgttatacctttctaccttagaaccatctacaagcattactttagccgaacgtcaacaattggcctatgatttgagtatctctgcattgttaggtgacaaaatctataattttggcgaattattacaccatccaataatggaaactatagtcaacgattccaattacgattggcttttccaattattaaatgctttgaccgttggtgattttgataaattcgactctttgataaaagttcaaatatccaagattcctatattggctcaacatgaaagttttttaagacaaaaaatttgcttgatgacattaattgaaacagtttttgtcaaaaatattaggatgctttcttttgaagatatttccaaggctacacacttgccaaaggataatgtcgaacacttggtcatgagagccataagtttgggtttattaaagggttctattgaccaagtaaatgaactcgttaccatctcctgggtccaaccaagaatcataagtggtgaccaaattacaaagatgaaggacagattggttgaatggaacgatcaagtagaaaaattgggcaaaaaaatggaagctcgtggccaatccatctgggtttga

SEQ ID NO: 2621 - DNA, 786 bp, Saccharomyces cerevisiae
atgtcaaataccgtaagagccatttcaccagatataacactattcaacaagacattgacattccaagaaatctcacaaaacactagagaggctgtcatatacattcatggaggtgcatggaacgatcctgagaatacgcccaatgattttaatcaattagccaataccatcaaatcaatggatactgagtcaacggtttgtcaatactctatagaatacaggttatcaccagagatcacaaatccaagaaacttatatgatgctgtgtcaaatataacaaggcttgttaaagaaaagggattaacgaacattaatatggtgggacattccgttggagctacctttatttggcagatattagctgcactcaaagatcctcaagaaaaaatgagtgaagcgcaattgcaaatgttgggacttttgcagatcgtgaagagagtatttctattggatggtatatactcgttaaaggaactgttggtagaatacccagagtatgattgttttacaagacttgccttccctgatggtattcaaatgtacgaggaagagccctcgagagtaatgccttacgtgaagaaagccctttctcgcttcagtattgatatgcacctagtgcattcttatagcgacgagttattaacgttaagacaaactaattgtttaatttcttgtcttcaggattatcagttaagtttcaagttgtatttggacgatttgggtttgcataatgatgtttataagaatggtaaagttgcgaagtatatttttgacaatatttgttga

SEQ ID NO: 2622 - DNA, 786 bp, Artificial Sequence
  Description of Artificial Sequence: Synthetic polynucleotide
atgagtaataccgtaagagccatttctccagatataacattgttcaacaagacattgacattccaagaaatctctcaaaacactagagaggctgtcatatacattcatggaggtgcatggaacgatcctgagaatacgcccaatgattttaatcaattagccaataccatcaaatctatggatactgagtctacggtttgtcaatactctatagaatacaggttatctccagagatcacaaatccaagaaacttatatgatgctgtgagtaatataacaaggcttgttaaagaaaagggattaacgaacattaatatggtgggacattccgttggagctacctttatttggcagatattagctgcactcaaagatcctcaagaaaaaatgagtgaagcgcaattgcaaatgttgggacttttgcagatcgtgaagagagtatttttattggatggtatatactctttaaaggaattattggtagaatacccagagtatgattgttttacaagacttgccttccctgatggtattcaaatgtacgaggaagagcccagtagagtaatgccttacgtgaagaaagccctttctcgcttcagtattgatatgcacttggtgcattcttatagcgacgagttattaacgttaagacaaactaattgtttaatttcttgtcttcaggattatcagttaagtttcaagttgtatttggacgatttgggtttgcataatgatgtttataagaatggtaaagttgcgaagtatatttttgacaatatttgttga

SEQ ID NO: 2623 - DNA, 825 bp, Saccharomyces cerevisiae
atgagtgaagttgcaccagaggagatcatagagaatgcagatggatctagatctatcattacatacaagattgaagacggtgtcaagtataagattactcagaaagtaaaagaggttaaagtattggaaaaagtccataaatctgttgcagaaagaaaaaactggcataaatatggctctgaaaaagggtctccagcaggtccaagtgctgttacagcaagattgggtgaagaagtagaattaagattgagtaggaactggaaacaagctgaagaagaaagaatacaaaaagaaaaggcaagtctcacaaagaccggtctacaatgtagattatgtggtaacgaccatatgaccatgaactgtccattcaagacaattttaagtgaactttcagcattagaagacccagccactaatgaaggcggtgtcgaggccgccagtgaagagaaggcaggccaagttggcggagctggttccatcccagggcagtatgttccaccttctcgtcgtgctggtgcaagagatccttcatccgatgcttacagagactctagagaacgtgatgatatgtgtactttgaagattatgcaagttaatgaaaatgccgatgaaaatagtttgagagaagagttattgttcccattcgcacccattccaagagtttctgtcgttagaaacaaagaaacaggtaaatcaagaggtctcgcctttgttaccttttcgagcgaagaagttgccgaacaagctttacgtttcttggatggtaggggttatatgaatttaattttacgtgttgaatggtccaaacctaaggttaaggaatag

SEQ ID NO: 2624 - DNA, 825 bp, Artificial Sequence
  Description of Artificial Sequence: Synthetic polynucleotide
atgagtgaagttgcaccagaggagatcatagagaatgcagatggatctagatctatcattacatacaagattgaagacggtgtcaagtataagattactcagaaagtaaaagaggttaaagtattggaaaaagtccataaatctgttgcagaaagaaaaaactggcataaatatggctctgaaaaagggtctccagcaggtccaagtgctgttacagcaagattgggtgaagaagtagaattaagattgagtaggaactggaaacaagctgaagaagaaagaatacaaaaagaaaaggcaagtctcacaaagaccggtttacaatgtagattatgtggtaacgaccatatgaccatgaactgtccattcaagacaattttaagtgaactttctgcattagaagacccagccactaatgaaggcggtgtcgaggccgccagtgaagagaaggcaggccaagttggcggagctggttccatcccagggcagtatgttccaccttctcgtcgtgctggtgcaagagatccttcttccgatgcttacagagactctagagaacgtgatgatatgtgtactttgaagattatgcaagttaatgaaaatgccgatgaaaatagtttgagagaagagttattgttcccattcgcacccattccaagagtttctgtcgttagaaacaaagaaacaggtaaatctagaggtctcgcctttgttaccttttctagcgaagaagttgccgaacaagctttacgtttcttggatggtaggggttatatgaatttaattttacgtgttgaatggtccaaacctaaggttaaggaatga

SEQ ID NO: 2625 - DNA, 2970 bp, Saccharomyces cerevisiae
atgttgcggtttcagcgatttgcgtcctcgtatgcccaagcacaggccgttagaaaatatccagttggaggtatattccatggttatgaagtgagaagaattctaccggttccggagctgagactcactgcggtagatttggtgcactcccagacaggagccgagcatttgcatattgatagagacgacaagaataatgtgttcagcattgcttttaaaaccaaccctccagattccactggggtccctcatattctagagcatacaacgttgtgtgggtctgttaaatatccagttagggacccttttttcaaaatgctaaataaatctctagctaatttcatgaacgctatgacaggtccagattatacattttttcccttttccactacgaaccctcaagatttcgctaatttaagaggtgtttatttagactccaccttgaatccgctacttaaacaagaagattttgatcaggagggttggaggttggagcataaaaacatcacagacccggagagtaacattgttttcaaaggtgttgtctataacgaaatgaaaggtcaaatatcaaatgccaattactatttctggagtaaatttcaacagtctatttatccttccctgaataactccggcggagatcctatgaaaattacagacttgagatacggcgatctcttggatttccatcacaaaaattaccatccctccaatgcaaaaactttcacgtacggtaacttgccattggtggatacgttaaagcaattaaatgagcagttcagtggttacgggaagagagctcgaaaggataagttgttaatgcctattgatttaaaaaaagacatagatgtcaagttactgggtcaaatagatactatgcttccaccggagaagcagacaaaagcctcaatgacgtggatttgtggagcgccacaggacacatatgatacctttttgttaaaagtactggggaatttattaatggatggccattcttctgtaatgtatcaaaaattaatagaatcaggaattggtttggagttctccgtaaattcaggtgttgaaccaactacagcagtaaatttgctaactgttggtatacagggcgtgagtgatattgaaatatttaaagacactgtaaataatatttttcaaaacctgttggaaacagaacatccttttgaccgcaagcgtatcgatgccataattgaacaattggaattatctaagaaggatcaaaaggctgactttggacttcaattactctattctatactacctggttggacaaacaaaatcgatccttttgagagcttgttgtttgaggacgttttgcaaagatttagaggtgacttagaaacgaaaggtgatactttattccaagatttaatccgtaaatatatcgttcataaaccttgtttcacgttttccattcagggatctgaagagttctctaaatctttggatgatgaagaacaaacaagactgagagaaaaaattactgccttggatgaacaagacaagaaaaacatctttaaacgtggtatactgttacaggagaaacaaaatgaaaaagaagatttatcctgtttacctaccttacaaataaaagacatcccaagagctggtgataaatattcaatcgaacagaagaataatacaatgtctaggattactgataccaatggtatcacatatgtcagaggtaaacgtttactaaatgacataataccctttgaactcttcccatacttacctttatttgctgaatcgttaactaacctagggacaacaacagaatccttcagtgaaatagaagatcagataaaattacatacgggtggtatatcaacacatgtagaggttacatctgaccctaacaccacagagcctcgcctgattttcgggtttgacggatggtctttaaattcgaagaccgaccacatttttgaattctggtctaagatcttactagaaactgatttccataaaaacagcgataaattgaaagttcttatccgcttattagcatcttcaaacacatcttctgtagcagatgccggtcatgcatttgcaaggggctattctgccgcacattatagatcaagtggagctataaatgagaccctcaatggtattgagcaactacaatttataaatagattgcacagcttgttagacaatgaagaaactttccaaagagaagttgtcgacaagctaactgaattgcaaaagtacattgttgataccaataacatgaatttttttatcacctcagactctgatgttcaagcgaaaacagtagaaagccaaatttcaaaattcatggagagattacctcatggcagctgcttgcccaatggaccaaagacttcagattatcctcttattggatccaaatgtaaacatactttgataaaatttcctttccaggtccattacacatcccaagctttattgggtgtgccgtatacacataaggatggctctgcacttcaagttatgtcaaatatgctaacattcaaacatttgcacagagaagtcagagaaaagggtggtgcttatggtggtggtgcttcttatagcgccttagcgggtattttcagtttctattcctatagggatcctcagcctttgaagagtttagaaaccttcaagaatagcgggcgttatatactgaacgatgccaagtggggcgtcacagaccttgatgaagctaaattgacaatatttcaacaagtagacgcacctaaaagtcccaaaggagaaggcgtgacgtatttcatgagcggtgttacagacgatatgaaacaagcaagaagggaacaactcttagacgtatctctcctggacgttcatagagtcgccgaaaaatatctactaaacaaagaaggggtgagtacggtcattggacctggaatcgaggggaagactgtttcaccaaattgggaggtgaaggaactgtag

SEQ ID NO: 2626 - DNA, 2970 bp, Artificial Sequence
  Description of Artificial Sequence: Synthetic polynucleotide
atgttgagatttcagagatttgcgtccagctatgcccaagcacaggccgttagaaaatatccagttggaggtatattccatggttatgaagtgagaagaattttaccggttccggagttaagactcactgcggtagatttggtgcactcccagacaggagccgagcatttgcatattgatagagacgacaagaataatgtgttcagcattgcttttaaaaccaaccctccagattccactggggtccctcatattttagagcatacaacgttgtgtgggtctgttaaatatccagttagggacccttttttcaaaatgttgaataaatctttggctaatttcatgaacgctatgacaggtccagattatacattttttcccttttccactacgaaccctcaagatttcgctaatttaagaggtgtttatttagactccaccttgaatccgttacttaaacaagaagattttgatcaggagggttggaggttggagcataaaaacatcacagacccggagagtaacattgttttcaaaggtgttgtctataacgaaatgaaaggtcaaatatccaatgccaattactatttctggagtaaatttcaacagtctatttatccttccttgaataactccggcggagatcctatgaaaattacagacttgagatacggcgatctcttggatttccatcacaaaaattaccatccctccaatgcaaaaactttcacgtacggtaacttgccattggtggatacgttaaagcaattaaatgagcagttcagtggttacgggaagagagctagaaaggataagttgttaatgcctattgatttaaaaaaagacatagatgtcaagttattgggtcaaatagatactatgcttccaccggagaagcagacaaaagcctctatgacgtggatttgtggagcgccacaggacacatatgatacctttttgttaaaagtattagggaatttattaatggatggccattcttctgtaatgtatcaaaaattaatagaatctggaattggtttggagttctccgtaaattctggtgttgaaccaactacagcagtaaatttgttgactgttggtatacagggcgtgagtgatattgaaatatttaaagacactgtaaataatatttttcaaaaccttttggaaacagaacatccttttgaccgcaagcgtatcgatgccataattgaacaattggaattatctaagaaggatcaaaaggctgactttggacttcaattactctattctatattacctggttggacaaacaaaatcgatccttttgagagcttgttgtttgaggacgttttgcaaagatttagaggtgacttagaaacgaaaggtgatactttattccaagatttaatccgtaaatatatcgttcataaaccttgtttcacgttttccattcagggatctgaagagttctctaaatctttggatgatgaagaacaaacaagattgagagaaaaaattactgccttggatgaacaagacaagaaaaacatctttaaacgtggtatattattacaggagaaacaaaatgaaaaagaagatttatcctgtttacctaccttacaaataaaagacatcccaagagctggtgataaatattctatcgaacagaagaataatacaatgtctaggattactgataccaatggtatcacatatgtcagaggtaaacgtttattgaatgacataataccctttgaactcttcccatacttacctttatttgctgaatctttaactaacttggggacaacaacagaatccttcagtgaaatagaagatcagataaaattacatacgggtggtatatctacacatgtagaggttacatctgaccctaacaccacagagcctcgcttaattttcgggtttgacggatggtctttaaattctaagaccgaccacatttttgaattctggtctaagatcttattggaaactgatttccataaaaacagcgataaattgaaagttcttatccgcttattagcatcttccaacacatcttctgtagcagatgccggtcatgcatttgcaaggggctattctgccgcacattatagaagtagtggagctataaatgagaccctcaatggtattgagcaattacaatttataaatagattgcacagcttgttagacaatgaagaaactttccaaagagaagttgtcgacaagttgactgaattgcaaaagtacattgttgataccaataacatgaatttttttatcaccagtgactctgatgttcaagcgaaaacagtagaaagccaaatttccaaattcatggagagattacctcatggcagctgcttgcccaatggaccaaagacttctgattatcctcttattggatccaaatgtaaacatactttgataaaatttcctttccaggtccattacacatcccaagctttattgggtgtgccgtatacacataaggatggctctgcacttcaagttatgagtaatatgttaacattcaaacatttgcacagagaagtcagagaaaagggtggtgcttatggtggtggtgcttcttatagcgccttagcgggtattttcagtttctattcctatagggatcctcagcctttgaagagtttagaaaccttcaagaatagcgggcgttatatattaaacgatgccaagtggggcgtcacagaccttgatgaagctaaattgacaatatttcaacaagtagacgcacctaaaagtcccaaaggagaaggcgtgacgtatttcatgagcggtgttacagacgatatgaaacaagcaagaagggaacaactcttagacgtatctctcttggacgttcatagagtcgccgaaaaatatttattaaacaaagaaggggtgagtacggtcattggacctggaatcgaggggaagactgtttctccaaattgggaggtgaaggaattgtga

SEQ ID NO: 2627 - DNA, 1245 bp, Saccharomyces cerevisiae
atgtctgaagctcaagaaactcacgtagagcaactaccagaatctgttgtcgatgccccagtcgaagaacagcaccaagaaccaccacaggctccagatgctccacaagaaccacaagttccacaggaatctgctccacaggaatctgctccacaagaaccaccagctccacaagaacaaaatgacgttcctccaccatctaatgctccaatttatgaaggcgaagaatcccacagtgtccaagactaccaagaggcccaccagcaccaccaaccacctgaaccccaaccatattatcctcctcctcctccaggtgaacacatgcacggtcgcccaccaatgcaccaccgtcaagaaggagaactctcgaacaccagattgtttgttagacctttcccattggacgttcaagaatccgagttgaatgaaatctttggtccatttggaccaatgaaggaagtcaagatcttgaacggcttcgcgtttgttgaatttgaagaagcagaatccgctgccaaagccattgaagaagttcacggtaagagttttgctaaccaacctttggaagttgtttactctaaattgcctgccaagagataccgtatcaccatgaaaaacttaccagaaggttgttcatggcaagatcttaaagatttagccagggaaaatagtttagaaactactttttctagcgtcaataccagagattttgatggtaccggtgctctagaattccctagtgaagaaatcttggtcgaagctttggagagattaaacaatattgaattcagaggttctgtcattactgttgaaagagatgacaatcctccaccaatcagaagatcaaatagaggtggcttcagaggtcgcggcggcttcagaggcggcttcagaggtggcttcagaggcggtttctccagaggcggcttcggtggccccagaggtggatttggtggtccaagaggtggttacggtggctattccagaggtggctacggtggctactccagaggcggatatggtggctccagaggtggttacgatagtcctagaggtggttacgatagtccaagaggtggttattccagaggtggctatggtggtccaagaaatgattacggtcctccaagaggtagctacggtggttcaagaggtggttatgatggtccaagaggcgattatggtcctccaagagatgcatacagaaccagagatgctccacgtgaaagatcaccaaccaggtaa

SEQ ID NO: 2628 - DNA, 1245 bp, Artificial Sequence
  Description of Artificial Sequence: Synthetic polynucleotide
atgtctgaagctcaagaaactcacgtagagcaattaccagaatctgttgtcgatgccccagtcgaagaacagcaccaagaaccaccacaggctccagatgctccacaagaaccacaagttccacaggaatctgctccacaggaatctgctccacaagaaccaccagctccacaagaacaaaatgacgttcctccaccatctaatgctccaatttatgaaggcgaagaatcccacagtgtccaagactaccaagaggcccaccagcaccaccaaccacctgaaccccaaccatattatcctcctcctcctccaggtgaacacatgcacggtcgcccaccaatgcaccaccgtcaagaaggagaactctccaacaccagattgtttgttagacctttcccattggacgttcaagaatccgagttgaatgaaatctttggtccatttggaccaatgaaggaagtcaagatcttgaacggcttcgcgtttgttgaatttgaagaagcagaatccgctgccaaagccattgaagaagttcacggtaagagttttgctaaccaacctttggaagttgtttactctaaattgcctgccaagagataccgtatcaccatgaaaaacttaccagaaggttgttcttggcaagatcttaaagatttagccagggaaaatagtttagaaactactttttctagcgtcaataccagagattttgatggtaccggtgctttggaattccctagtgaagaaatcttggtcgaagctttggagagattaaacaatattgaattcagaggttctgtcattactgttgaaagagatgacaatcctccaccaatcagaagatctaatagaggtggcttcagaggtcgcggcggcttcagaggcggcttcagaggtggcttcagaggcggtttctccagaggcggcttcggtggccccagaggtggatttggtggtccaagaggtggttacggtggctattccagaggtggctacggtggctactccagaggcggatatggtggctccagaggtggttacgatagtcctagaggtggttacgatagtccaagaggtggttattccagaggtggctatggtggtccaagaaatgattacggtcctccaagaggtagctacggtggttccagaggtggttatgatggtccaagaggcgattatggtcctccaagagatgcatacagaaccagagatgctccacgtgaaagatctccaaccaggtga

SEQ ID NO: 2629 - DNA, 1605 bp, Saccharomyces cerevisiae
atgtccaatgcaaatctaagaaaatgggttggtttttgctttgttgccatttatctctttttaggtgttccactgtggtacaagctaactacagtttatagagcatcactaccaataaattacattgagtcacttcaaaataacaaattccaagatattcatctcgtaataccggtgtatgttaagtcagatacttacagatttcctgacgttcatgacgctatccaagtacaagttaaccatttattgaattctcaggagcaacgggtcccttggtctttacaagttcttccatataatgagactattgagcagatggaaagtgaaggcaaccagtttcatgtcgttactttgaagttagacgaatttattggttactcatcagcttacgacaccaaagaaacactagtatattacgacgatgctgccgttttaagtaatgatctaccgttttttgttgctcaaacattggtagagcacactttccaattggaatggacgcatttgaataaaacgtgtgaaggcgtttctacaaacaacgatgtcgcaatatcttatgatccaaacattcatttaagtgtaactttattgtcaggtgatgggaatcctgttgcatgggaaattgagcctacattaactgactacttttcaccttttaggaagttcttatcaccactggtaaattttacagtagattcatccattgtttatcataatgatttgaatttgcattcattaaatggatcatgtacaagcgttacgtggtttgatctctctcatactattgatctttctgaactttcttcaatggcctattacccagaagattctgcactgaatttagccatagtctttcctagtgcttcttcaagtcccgatggtctggcgttcattaatggcactcggatttcagacgaaataaccacattagattggaatagttatctagttcctcaatggggggttataataataaataaaatgccgttgaagccaaattcagtcattagcgaagattatttagaacctatgatgtaccgttttgcgacagatatttttcaactattgggattaacggagggctcgcaagatttgttatcaccttatattaccatagattcattcaaaaggttgacaattttacagaatctagataaagctacggaaacattatggtcgttagtgaaattaactcaacaatttcagggcatgtctatcccacgcgaagtatcggataatgttatcgaagctttagacttaaggctacagattattgatttattaaatgatcctggaaagggtggagatatcgtctggaacaatgccctgcatctaagtaatgaattggttaaactatgcgaaaaggcatttttcaatggagaaatggttcaacaaaatttcttcccacaagagcacatgatagctgtgtatttacctttattaggcccaatatcggcagtcatgttctttggtttctacaacgtgatgaaggaaaagaatcaaaagagtaaaaagaatggaaccgagagagaagttgctaaagaaaaattagagttgaaagaggctcaaaaattacatgctattgatggtgaagatgaattatga

SEQ ID NO: 2630 - DNA, 1605 bp, Artificial Sequence
  Description of Artificial Sequence: Synthetic polynucleotide
atgtccaatgcaaatttaagaaaatgggttggtttttgctttgttgccatttatctctttttaggtgttccattatggtacaagttgactacagtttatagagcatctttaccaataaattacattgagtctcttcaaaataacaaattccaagatattcatctcgtaataccggtgtatgttaagagtgatacttacagatttcctgacgttcatgacgctatccaagtacaagttaaccatttattgaattctcaggagcaaagagtcccttggtctttacaagttcttccatataatgagactattgagcagatggaaagtgaaggcaaccagtttcatgtcgttactttgaagttagacgaatttattggttactcttctgcttacgacaccaaagaaacattggtatattacgacgatgctgccgttttaagtaatgatttaccgttttttgttgctcaaacattggtagagcacactttccaattggaatggacgcatttgaataaaacgtgtgaaggcgtttctacaaacaacgatgtcgcaatatcttatgatccaaacattcatttaagtgtaactttattgtctggtgatgggaatcctgttgcatgggaaattgagcctacattaactgactacttttctccttttaggaagttcttatctccattagtaaattttacagtagattcttccattgtttatcataatgatttgaatttgcattctttaaatggatcttgtacaagcgttacgtggtttgatctctctcatactattgatctttctgaactttcttctatggcctattacccagaagattctgcattgaatttagccatagtctttcctagtgcttcttccagtcccgatggtttggcgttcattaatggcactagaatttctgacgaaataaccacattagattggaatagttatttggttcctcaatggggggttataataataaataaaatgccgttgaagccaaattctgtcattagcgaagattatttagaacctatgatgtaccgttttgcgacagatatttttcaattattgggattaacggagggctctcaagatttgttatctccttatattaccatagattctttcaaaaggttgacaattttacagaatttggataaagctacggaaacattatggtctttagtgaaattaactcaacaatttcagggcatgtctatcccacgcgaagtatctgataatgttatcgaagctttagacttaaggttacagattattgatttattaaatgatcctggaaagggtggagatatcgtctggaacaatgccttgcatttgagtaatgaattggttaaattatgcgaaaaggcatttttcaatggagaaatggttcaacaaaatttcttcccacaagagcacatgatagctgtgtatttacctttattaggcccaatatctgcagtcatgttctttggtttctacaacgtgatgaaggaaaagaatcaaaagagtaaaaagaatggaaccgagagagaagttgctaaagaaaaattagagttgaaagaggctcaaaaattacatgctattgatggtgaagatgaattatga

SEQ ID NO: 2631 - DNA, 987 bp, Saccharomyces cerevisiae
atggagagaatcatacagcagactgactatgatgcgttgtcgtgcaaattagctgctatatcagtcggatatcttccttcaagcggcctgcaaagattgtcggtggacctatccaaaaagtatacagaatggcatcgcagctacttgattactctcaagaaatttagtaggcgagcttttggaaaagtagacaaagcaatgcggtcttccttcccggtaatgaactatgggacatacttgcgtactgtggggatagacgcggccatattggaatttttggttgcaaatgagaaggttcaagtggtaaatttaggttgcggttccgatttacgaatgctgcccctgttacaaatgttccctcatttagcttatgtggacattgactacaacgaatcagtagaattgaagaatagtattttgcgtgaaagtgagattttgcgtatctccctcggtttgtcaaaggaagatacagcaaaatcaccctttttgattgatcaaggaagatataaacttgctgcttgtgatttgaacgatatcactgaaacaacccgtttgttagacgtatgcactaagcgcgaaatacccactatcgtaatatctgagtgtcttttgtgctacatgcataataatgagtctcaattactaataaatacaatcatgtcgaagttttcacatggactatggatatcctacgatccaattggtggttctcaaccgaatgaccgatttggcgccattatgcagtccaacttgaaagaatcaaggaatttggaaatgcccacgttgatgacgtataattctaaagagaaatacgcttcgagatggtctgcggctcccaacgttattgtcaatgacatgtgggaaattttcaatgcacagattcccgaatctgaaagaaaaaggctcagatcattacagttcttggacgaattagaggaattaaaggttatgcaaactcattatatccttatgaaggctcagtggtga

SEQ ID NO: 2632 - DNA, 987 bp, Artificial Sequence
  Description of Artificial Sequence: Synthetic polynucleotide
atggagagaatcatacagcagactgactatgatgcgttgtcttgcaaattagctgctatatctgtcggatatcttccttccagcggcttacaaagattgtctgtggacttatccaaaaagtatacagaatggcatcgcagctacttgattactctcaagaaatttagtaggagagcttttggaaaagtagacaaagcaatgagatcttccttcccggtaatgaactatgggacatacttgcgtactgtggggatagacgcggccatattggaatttttggttgcaaatgagaaggttcaagtggtaaatttaggttgcggttccgatttaagaatgttgcccttattacaaatgttccctcatttagcttatgtggacattgactacaacgaaagtgtagaattgaagaatagtattttgcgtgaaagtgagattttgcgtatctccctcggtttgtccaaggaagatacagcaaaaagtccctttttgattgatcaaggaagatataaacttgctgcttgtgatttgaacgatatcactgaaacaacccgtttgttagacgtatgcactaagcgcgaaatacccactatcgtaatatctgagtgtcttttgtgctacatgcataataatgagtctcaattattgataaatacaatcatgtccaagttttctcatggattatggatatcctacgatccaattggtggttctcaaccgaatgacagatttggcgccattatgcagtccaacttgaaagaaagtaggaatttggaaatgcccacgttgatgacgtataattctaaagagaaatacgcttccagatggtctgcggctcccaacgttattgtcaatgacatgtgggaaattttcaatgcacagattcccgaatctgaaagaaaaaggctcagatctttacagttcttggacgaattagaggaattaaaggttatgcaaactcattatatccttatgaaggctcagtggtga

SEQ ID NO: 2633 - DNA, 2133 bp, Saccharomyces cerevisiae
atgggtaattccggttcgaaacaacataccaagcacaatagcaagaaggatgaccacgacggtgacaggaaaaagacactagatctcccaccactgacaaaatcggatactacacattcgctgaaatcgtcaaggtcgctgaggtcgctgcggtcgaaacgctcagaggcgtcgttggcatctaatgttcaagctcaaacgcaacccctctcccgcagatcgtccactctgggaaacggcaatcgcaaccataggcgatcaaacaacgccccaatcactcctcctaataaccactacctaacctcacatcccagttcgtcaagaagactctcttcctcttcgagaaggtcgagcatggggaataataacaattcagaattgcccccgtcaatgatccagatggagcccaaatcacccatcttgaaaaatagtacaagcatgcattccactagctctttcaactcttacgaaaatgcgttgactgatgatgacgacgataggggggatgatggcggcgagagcccctcaatggccaaagttactcgcatcaacactagttcttccgcagatagaggctccaagcgtactcctttaagacgtcataattcattacaaccggaaaaaggtgtaacaggattttcctcgacttcatcgaaattacgcagaagatcagacaatactctgccagcaagttatcctttaaatgcagaagcaggagggaatggcagcgactatttctcaaacagatcaaactcgcatgcatcatccaggaagtcgtcatttggctccactgggaatacagcttatagcacaccactgcattcacctgcgttaagaaaaatgagctcgagggacaacgacgatagcggagacaacgtcaacggtagaggcacctcacctatccctaatctaaacatagacaagccttcgccgtcagcgtcgtcagcgtcaaaaagagaatatttaagtgcatatccaacactagctcacagagattcatcatcttcacttagtccgcggggcaaaggacaacggtcttcatcgtcttccagttccagtcaaagaatatatgtttccccaccatctcccacaggtgatttcgtacacgggagttgtgcagacggtgataatggatctaggactaatactatggtcgaaatgaaaaggaaaaaaccagttcgtccagtggacatagatgaaattatccagagattactagatgccggctatgccgcaaagaggaccaagaatgtttgcttaaagaattccgagattattcaaatttgccataaggctcgtgaattattccttgcccaacctgctctcttagaattatctccctcggtaaaaatagtgggtgatgttcacggccaatatgcagatcttttgagactttttaccaaatgcggtttcccccccatggcaaattacttatttttaggcgattacgtagatcgcggtaagcagtccctggagaccattttactattactatgctataagattaaatatcctgaaaatttcttcctcttaagaggcaatcatgaatgtgccaatgttacaagagtctacgggttttatgatgaatgtaaacgacgttgtaatatcaagatttggaaaacctttgttgacacgttcaacacgctaccgttagcagccatcgtcacaggaaaaatattttgtgttcatggtggactatcacctgttctaaattccatggacgaaattaggcacgttagtaggcccaccgatgtacccgacttcggcttaattaatgaccttttatggtcggatcctacagattcatcgaatgaatgggaggataatgagcgtggagttagtttttgttacaataaagtggctattaataaatttttaaacaaattcggattcgatttagtgtgtagagcacatatggtggtggaagatggttatgaattctttaatgacagaagcttagttacagtgttttcggctcccaactattgtggtgaattcgataactggggtgctgtcatgaccgttagtgaaggcctactctgttcttttgagttgttggacccactggacagtaccgctttgaaacaagtgatgaaaaaaggcaggcaagaacgtaaattagccaatcgctga

SEQ ID NO: 2634 - DNA, 2133 bp, Artificial Sequence
  Description of Artificial Sequence: Synthetic polynucleotide
atgggtaattccggttccaaacaacataccaagcacaatagcaagaaggatgaccacgacggtgacaggaaaaagacattagatctcccaccattaacaaaatctgatactacacattctttgaaatcttccaggtccttaaggtccttgagaagtaaacgcagtgaggcgtctttggcatctaatgttcaagctcaaacgcaacccctctcccgcagaagttccactttgggaaacggcaatcgcaaccataggagatctaacaacgccccaatcactcctcctaataaccactacttgaccagtcatcccagttcttctagaagactctcttcctcttctagaaggagcagcatggggaataataacaattctgaattgcccccgtctatgatccagatggagcccaaaagtcccatcttgaaaaatagtacaagcatgcattccactagctctttcaactcttacgaaaatgcgttgactgatgatgacgacgataggggggatgatggcggcgagagcccctctatggccaaagttactcgcatcaacactagttcttccgcagatagaggctccaagcgtactcctttaagacgtcataattctttacaaccggaaaaaggtgtaacaggattttccagcacttcttctaaattacgcagaagaagtgacaatactttaccagcaagttatcctttaaatgcagaagcaggagggaatggcagcgactatttcagtaacagatctaactctcatgcatcttccaggaagagttcttttggctccactgggaatacagcttatagcacaccattgcattctcctgcgttaagaaaaatgagcagtagggacaacgacgatagcggagacaacgtcaacggtagaggcacctctcctatccctaatttgaacatagacaagccttctccgtctgcgagttctgcgtccaaaagagaatatttaagtgcatatccaacattggctcacagagattcttcttcttctcttagtccgcgcggcaaaggacaaagatcttcttcttcttccagttccagtcaaagaatatatgtttccccaccatctcccacaggtgatttcgtacacgggagttgtgcagacggtgataatggatctaggactaatactatggtcgaaatgaaaaggaaaaaaccagttcgtccagtggacatagatgaaattatccagagattattagatgccggctatgccgcaaagaggaccaagaatgtttgcttaaagaattccgagattattcaaatttgccataaggctcgtgaattattccttgcccaacctgctctcttagaattatctccctctgtaaaaatagtgggtgatgttcacggccaatatgcagatcttttgagactttttaccaaatgcggtttcccccccatggcaaattacttatttttaggcgattacgtagatcgcggtaagcagtccttggagaccattttattattattatgctataagattaaatatcctgaaaatttcttcctcttaagaggcaatcatgaatgtgccaatgttacaagagtctacgggttttatgatgaatgtaaaagacgttgtaatatcaagatttggaaaacctttgttgacacgttcaacacgttgccgttagcagccatcgtcacaggaaaaatattttgtgttcatggtggattatctcctgttttgaattccatggacgaaattaggcacgttagtaggcccaccgatgtacccgacttcggcttaattaatgaccttttatggtctgatcctacagattcttccaatgaatgggaggataatgagcgtggagttagtttttgttacaataaagtggctattaataaatttttaaacaaattcggattcgatttagtgtgtagagcacatatggtggtggaagatggttatgaattctttaatgacagaagcttagttacagtgttttctgctcccaactattgtggtgaattcgataactggggtgctgtcatgaccgttagtgaaggcttgctctgttcttttgagttgttggacccattggacagtaccgctttgaaacaagtgatgaaaaaaggcaggcaagaacgtaaattagccaatcgctga

SEQ ID NO: 2635 - DNA, 423 bp, Saccharomyces cerevisiae
atgtatacaaaagagtactactggttttcacaatatatgataataacaagcactttggtgctcaccataatatggtccatcttaccatcatcgctgggtgaggctgcaccaaagcagtttatcaacacgctattggacatcttcccacaaagaagatggattattaccttggagagcataatgctgatgggcatgctatgcacatacatcggccttctgatgtacaatgaagatacattaacaccgccgctagattctctatctacagtaacggatgccggtggtcaacttgtaatagaggacgacccggacgtattcgttaagaaatgggcctttaaagaaacaagtggtatttacgatctgtctctgatggatgcctgccaacttctctacctatatgataacgaccataccagcacatag

SEQ ID NO: 2636 - DNA, 423 bp, Artificial Sequence
  Description of Artificial Sequence: Synthetic polynucleotide
atgtatacaaaagagtactactggttttctcaatatatgataataacaagcactttggtgctcaccataatatggtccatcttaccatcttctttgggtgaggctgcaccaaagcagtttatcaacacgttattggacatcttcccacaaagaagatggattattaccttggagagcataatgttaatgggcatgttgtgcacatacatcggccttttgatgtacaatgaagatacattaacaccgccgttagattctttatctacagtaacggatgccggtggtcaacttgtaatagaggacgacccggacgtattcgttaagaaatgggcctttaaagaaacaagtggtatttacgatttatctttgatggatgcctgccaacttctctacttatatgataacgaccataccagcacatga

SEQ ID NO: 2637 - DNA, 1113 bp, Saccharomyces cerevisiae
atgaatcgtgttggtatagacgtagatcatatgataggggtcctgcttctggccgtagtggtggtgttttgggttggcgcttcgtgtttgactaatgaattgctcgagacaaacgcgtacaataaacctttcttccttacttatctaaacatatcatcgtttgctctttatttgacgccagatctatggaggataatccaatcaagaaggaagagcttgcaggaacggacagaacgaacattacctattcacacacaagaatctttttcagagttcctacctttactatcttcaactccttctacttcttcaaatttgtcttcgatagcggacacgaaagtgaaggatacaatgaggttgagtctgctattttgcgtcttgtggttcgtggcaaatttggcggctaacgctgctttgtcgtataccacagtggcttcgtcaacaattctttcatcgacatcctcattttttaccttatttcttgccactagtctaggaatagaaactttttcgacaaaaaaactgctggggttatttgtgtctttgtttggaattatcttaattgtgatgcaatcctcgaagcaacaggattctgtgagtgcttcctcctttttggtaggtaacactttagcactgctggggtcattgggttacagtgtctatacaacccttttgaaatacgaaatatcatccaaaggtctcagactagacattcagatgtttcttggttatgttggtatcttcacgtttctgttgttttggccaattttaataatcctggatataacacatatggaaacttttgaactaccaagtaacttccacatttcttttcttgtcatgttaaattgtatcattatctttgttagtgactatttttggtgtaaagccctcattttgacatcacccttggtggttaccgttgccttaacttttactatcccgttagccatgttcgctgattttgtatggcgagaggcattttttacgccttggtatatcattggtgttattttcatttttgtttcattctttctagttaaccatcggggagaatctgctgttgaaaaggactgtgctgcggttgaaaaaggacctatcttggatgcctaa

SEQ ID NO: 2638 - DNA, 1113 bp, Artificial Sequence
  Description of Artificial Sequence: Synthetic polynucleotide
atgaatcgtgttggtatagacgtagatcatatgataggggtccttcttttagccgtagtggtggtgttttgggttggcgcttcttgtttgactaatgaattgctcgagacaaacgcgtacaataaacctttcttccttacttatttgaacatatcttcttttgctctttatttgacgccagatttatggaggataatccaatctagaaggaagagcttgcaggaaagaacagaaagaacattacctattcacacacaagaatctttttctgagttcttacctttattatcttctactccttctacttcttccaatttgtcttctatagcggacacgaaagtgaaggatacaatgaggttgagtttacttttttgcgtcttgtggttcgtggcaaatttggcggctaacgctgctttgagttataccacagtggcttcttctacaattctttcttctacatcctctttttttaccttatttcttgccactagtttgggaatagaaactttttctacaaaaaaattattagggttatttgtgtctttgtttggaattatcttaattgtgatgcaatcctccaagcaacaggattctgtgagtgcttcctcctttttggtaggtaacactttagcattattagggtctttgggttacagtgtctatacaacccttttgaaatacgaaatatcttccaaaggtctcagattagacattcagatgtttcttggttatgttggtatcttcacgtttttattgttttggccaattttaataatcttagatataacacatatggaaacttttgaattaccaagtaacttccacatttcttttcttgtcatgttaaattgtatcattatctttgttagtgactatttttggtgtaaagccctcattttgacatctcccttggtggttaccgttgccttaacttttactatcccgttagccatgttcgctgattttgtatggagagaggcattttttacgccttggtatatcattggtgttattttcatttttgtttctttctttttggttaaccatagaggagaatctgctgttgaaaaggactgtgctgcggttgaaaaaggacctatcttggatgcctga

SEQ ID NO: 2639 - DNA, 1044 bp, Saccharomyces cerevisiae
atgacaactttattacagctcttgtcaaattattataaggctaaattagattcagaacgaatatacaatgaatatgttcagtcgcagtatgagtttgcatctttagacaagttgaacaacaataaaggtgacccaaagaaagtagttgatgagacattatttttgcagaggcaaattgcccagctgaataaacagttacaactttcatttcaagagaatgaaaaactattaagcgtacagaagaatcaaaaagctctttatcaaagtaagttatccagcaaggatgcattcattgatgatttgaaactcaaactgaaagtcgagcagatatctgtagacaaacataataaggaacggacaccttcaacaggccgtgatgaacaacagcgtaattcaaaagcggcacatacatcaaagcccacaattcatcttctttcgccaattgtaaatcgtgataagcctaataatcaaacgaacgacaggggtggcaacgatcctgactcgcctacatcacaaagaagatcaagaggactgagatctttattgagttcaggtaaaaatacaatatttgattcaatatccaaaaatctcgacgatgagataaatgaaaatgcgcatatcagaaatgataccacatcttccaagatagctggcaaatcgccatcaagattatctgcgctgcaaaaatctccagaactgcgtaaagaaaggaacaatatgatattaaaggaacacatactgcgttcaaaagatgaccaaaatatcacgtcatctagaaaactggataatatcgagctatctagtattggtgactctactgcaatgacatcaaggagttctaccgttaatgcaaatgacatcttgggaaatgaagagaacgacgggattacaaagctgaaaagagttaacaagttaaccagctctccagttaaaagggattgcagtacaaacaagaaaagaaaactcacaaagcagcgaattgccacgttacccaactcagatgaagaattgagtaataatttaaatgttgacgagtttgtatga

SEQ ID NO: 2640 - DNA, 1044 bp, Artificial Sequence
  Description of Artificial Sequence: Synthetic polynucleotide
atgacaactttattacagctcttgagcaattattataaggctaaattagattctgaaagaatatacaatgaatatgttcagtctcagtatgagtttgcatctttagacaagttgaacaacaataaaggtgacccaaagaaagtagttgatgagacattatttttgcagaggcaaattgcccagttgaataaacagttacaactttcttttcaagagaatgaaaaattattaagcgtacagaagaatcaaaaagctctttatcaaagtaagttatccagcaaggatgcattcattgatgatttgaaactcaaattgaaagtcgagcagatatctgtagacaaacataataaggaaagaacaccttctacaggccgtgatgaacaacagcgtaattctaaagcggcacatacatccaagcccacaattcatcttctttctccaattgtaaatcgtgataagcctaataatcaaacgaacgacaggggtggcaacgatcctgactctcctacatctcaaagaagatctagaggattaagatctttattgagttctggtaaaaatacaatatttgattctatatccaaaaatctcgacgatgagataaatgaaaatgcgcatatcagaaatgataccacatcttccaagatagctggcaaatctccatctagattatctgcgttgcaaaaatctccagaattgcgtaaagaaaggaacaatatgatattaaaggaacacatattacgttctaaagatgaccaaaatatcacgtcttctagaaaattggataatatcgagctttctagtattggtgactctactgcaatgacatccaggagttctaccgttaatgcaaatgacatcttgggaaatgaagagaacgacgggattacaaagttgaaaagagttaacaagttaaccagctctccagttaaaagggattgcagtacaaacaagaaaagaaaactcacaaagcagcgtattgccacgttacccaacagtgatgaagaattgagtaataatttaaatgttgacgagtttgtatga

SEQ ID NO: 2641 - DNA, 1749 bp, Saccharomyces cerevisiae
atgggcggtcaagaaagtatatcaaataataactcagactcattcattatgtcgtcccccaacttagactctcaggaatcttcaatatcacctattgatgagaagaaaggcaccgatatgcaaaccaagtcgctttcaagctattctaaaggtacgcttctctctaagcaagtacaaaatttattagaagaagctaataaatacgatccaatatatgggtcatctttacctcgaggatttttaagagatagaaacaccaagggtaaggataatgggttggttccgctggtggagaaggttatacctcccattcacaagaaaaccaataatagaaacacaaggaagaagtcatctaccaccacgaagaaggatgtaaagaagccaaaagctgcaaaagtaaaaggaaaaaatggcaggactaaccataaacataccccaatttcaaagcaagaaatagatactgcacgagaaaaaaagccattgaaaaaaggtcgggcaaacaagaagaatgatcgcgatagtccttcatcaacatttgttgattggaatggcccgtgtctacggttacaatatccattatttgacatagagtacttaagatcacatgaaatatattctggaactcctatacaatccattagtttaagaacaaattctccacagccaacgagcttgacatcagataacgacacttcctcagtaacgacagcaaagttgcagagtattttattttcaaattatatggaagagtacaaagtcgacttcaaaaggtcaacagccatttataatccaatgagtgaaattggtaaattaattgaatacagctgcctggtctttttaccttcaccttatgctgaacaattgaaggaaactatactaccggacctaaatgcatcatttgataactctgacacgaaaggtttcgtgaatgctataaatttatacaacaaaatgattcgtgaaattcctaggcaaagaataattgaccatttagaaacaattgataaaattcctcgttcattcattcatgacttcttgcatatcgtctataccaggagtatccatccgcaggcgaataaattgaaacattacaaagcattcagcaattatgtttatggagaacttttgcccaatttcctatctgatgtatatcaacaatgccagttgaagaagggtgacactttcatggatctcggttcgggagtaggtaattgcgtagtacaagctgcgttggaatgtggatgtgcattaagcttcggatgtgaaatcatggatgatgctagcgatttaactatactgcagtacgaggaactaaagaagaggtgtaagttatatgggatgcgtttgaacaacgtggagttttcattgaagaaaagctttgtggacaataacagggtcgctgaactaattcctcagtgcgatgttatcctcgtaaataattttttatttgatgaagatttgaataaaaaagtcgaaaagatactacaaacggcaaaagttggatgtaagatcataagtttgaaaagtttaagaagcctcacttatcagatcaacttctacaatgttgagaacatcttcaatagattaaaggtgcaaaggtatgatcttaaggaggatagtgtttcatggacgcatagtggcggagagtattatatatcaacagtgatggaggatgtggacgaaagtttattcagccctgctgcaagaggtaggaggaacagaggtacgccggtgaagtataccagatga

SEQ ID NO: 2642 - DNA, 1749 bp, Artificial Sequence
  Description of Artificial Sequence: Synthetic polynucleotide
atgggcggtcaagaaagtatatccaataataacagcgactctttcattatgtcttcccccaacttagactctcaggaatcttctatatctcctattgatgagaagaaaggcaccgatatgcaaaccaagtctctttctagctattctaaaggtacgcttctctctaagcaagtacaaaatttattagaagaagctaataaatacgatccaatatatgggagttctttacctagaggatttttaagagatagaaacaccaagggtaaggataatgggttggttccgttggtggagaaggttatacctcccattcacaagaaaaccaataatagaaacacaaggaagaagtcttctaccaccacgaagaaggatgtaaagaagccaaaagctgcaaaagtaaaaggaaaaaatggcaggactaaccataaacataccccaatttccaagcaagaaatagatactgcaagagaaaaaaagccattgaaaaaaggtagagcaaacaagaagaatgatcgcgatagtccttcttctacatttgttgattggaatggcccgtgtttgagattacaatatccattatttgacatagagtacttaagaagccatgaaatatattctggaactcctatacaatccattagtttaagaacaaattctccacagccaacgagcttgacatctgataacgacacttcctctgtaacgacagcaaagttgcagagtattttattttctaattatatggaagagtacaaagtcgacttcaaaaggtctacagccatttataatccaatgagtgaaattggtaaattaattgaatacagctgcttagtctttttaccttctccttatgctgaacaattgaaggaaactatattaccggacttgaatgcaagttttgataactctgacacgaaaggtttcgtgaatgctataaatttatacaacaaaatgattcgtgaaattcctaggcaaagaataattgaccatttagaaacaattgataaaattcctcgttctttcattcatgacttcttgcatatcgtctataccaggagtatccatccgcaggcgaataaattgaaacattacaaagcattcagcaattatgtttatggagaacttttgcccaatttcttatctgatgtatatcaacaatgccagttgaagaagggtgacactttcatggatctcggttctggagtaggtaattgcgtagtacaagctgcgttggaatgtggatgtgcattaagcttcggatgtgaaatcatggatgatgctagcgatttaactatattacagtacgaggaattgaagaagaggtgtaagttatatgggatgcgtttgaacaacgtggagttttctttgaagaaaagctttgtggacaataacagggtcgctgaattgattcctcagtgcgatgttatcctcgtaaataattttttatttgatgaagatttgaataaaaaagtcgaaaagatattgcaaacggcaaaagttggatgtaagatcataagtttgaaaagtttaagaagcctcacttatcagatcaacttctacaatgttgagaacatcttcaatagattaaaggtgcaaaggtatgatcttaaggaggatagtgtttcctggacgcatagtggcggagagtattatatatctacagtgatggaggatgtggacgaaagtttattcagccctgctgcaagaggtaggaggaacagaggtacgccggtgaagtataccagatga

SEQ ID NO: 2643 - DNA, 546 bp, Saccharomyces cerevisiae
atgtctatttctgaatcttacgcaaaggaaataaaaactgcatttaggcagttcactgactttcccatagagggtgagcaatttgaggattttttacctattattggcaaccccacgctattccaaaagttggtacacacgttcaagacgcatttagaagaaaagttcggcaaagaaaagatcgactttattgcaggtatagaagctagaggccttctatttgggccatccctagcactggcattgggagttggatttgttccaataaggagagttggaaaattgccgggtgagtgtgcttctataacattcacaaaattagaccatgaagaaatttttgaaatgcaggttgaagccattccctttgattccaacgtggttgtcgtggatgatgttctcgccaccggtggaacggcatatgctgcgggcgaccttatcagacaagtgggtgctcatattctggaatatgactttgtgctagtgttagatagtctacatggtgaggagaaattatctgctcctattttttccatattgcactcctga

SEQ ID NO: 2644 - DNA, 546 bp, Artificial Sequence
  Description of Artificial Sequence: Synthetic polynucleotide
atgtctatttctgaatcttacgcaaaggaaataaaaactgcatttaggcagttcactgactttcccatagagggtgagcaatttgaggattttttacctattattggcaaccccacgcttttccaaaagttggtacacacgttcaagacgcatttagaagaaaagttcggcaaagaaaagatcgactttattgcaggtatagaagctagaggccttttatttgggccatccttggcattggcattgggagttggatttgttccaataaggagagttggaaaattgccgggtgagtgtgcttctataacattcacaaaattagaccatgaagaaatttttgaaatgcaggttgaagccattccctttgattccaacgtggttgtcgtggatgatgttctcgccaccggtggaacggcatatgctgcgggcgaccttatcagacaagtgggtgctcatattttggaatatgactttgtgttagtgttagatagtttgcatggtgaggagaaattatctgctcctattttttccatattgcactcctga

SEQ ID NO: 2645 - DNA, 4263 bp, Saccharomyces cerevisiae
atgagttctgacgcttccacgtacagacttgaggatgttttatccagcttctatagagtggagaaaatcaaaaagatcaactatcatcagtacatttctaaagcccaaaacgatcaatggtctatccaaatggaattcatgctacggaagcaggatccaaagactctagttgcgctgctttcaagggatttatggtgtttcagtataaatgatgatccggtaccgacacctcctgcgatagaacataaaccagtgagcccagataaaatcggaactttcactgccgattattcaaagccaaacttaccgccacactatgctctttttttaaaagctttaagaaggaaaatttacattaatttggcattaggttcacacaataagctaatacaatttgggaatgcctgcatatcattaagcggagtgccaaattatctcgtacagctagaaccacacctttttgtaaacggagatctcacagtgtcgttatgtgccaagaacatgggattagtaccaatgaaggaggaaaatttggaagaatctttcctttcaaagcatgcgctttatttagcaccatctggaataaggatgcatttggcccctgcttccaagcaaggatacttgataacgccaccaaaacatacagaacttctcttgacgacgttaagtgtatctcatggtataaacttacaaaataaaaaaaatttgaaatgggttgctgttgttcctgacttaggacatctcaacggccacacacctactatagcttcgtatttaactcccttacttgaagcaaagaagctagtatggccgctgcatttaatcttcgcccaaccagtagctgatatagaaaattctacttccggagatccatcagaatttcactgtttgcaagatgctctggatgccattgatgatttcatacaattaaagcaaacagctgcctataggactccaggaagttccggcgtattgagcagtaatattgctggtacaaatcccttaagctcagatggagcatatacagaacagtttcaacattataagaacaactcaattagttctcaacccgcttcttatcattctgtccaagaaactaataagatatctccgaaagatttctcccctaatttcacaggcattgataaattaatgctgtcgcccagcgatcaatttgctccagctttcttaaatacccctaataataacatcaatgagaatgaattatttaatgataggaaacaaactacagtatcaaatgacttagagaacagcccactgaaaacggaactggaggcaaatggtagatcactcgaaaaggtaaataattccgtgagcaagacaggaagcgtagacacacttcataataaagagggaacactggaacaacgagaacagaacgaaaatctgccaagtgataaaagtgactctatggtagacaaggaattgtttggtgaggatgaggatgaggatttatttggcgatagcaataaatcgaattctacaaacgaatcgaacaaaagtatatcggacgaaattaccgaggatatgttcgaaatgtctgatgaagaagaaaataataacaataaaagcattaataaaaataacaaggaaatgcatactgatcttggtaaagatattccattttttccctcatctgaaaaaccgaatatccgtacgatgagcggaactacaaaaagattaaatggaaagaggaaatatttggatattccgatagatgaaatgaccttgccaacgagtccattatatatggacccaggtgcgccactccctgtggaaacaccccgcgatagacgcaaaagtgtgttcgctccactgaattttaaccccataatagaaaacaatgttgataacaaatacaaatctggagggaaattttccttcagtccgttgcaaaaggaggaagcattaaactttgatatttctatggcggatctttctagctctgaagaggaagaggatgaagaagagaacggtagcagcgatgaggatctaaagtcattgaacgtacgcgacgacatgaaaccttctgataacatcagtactaatactaatattcatgagcctcaatacataaattactcttcgatcccaagtctacaagactctattataaagcaagaaaatttcaattcagtaaacgatgctaatatcactagcaataaggaaggcttcaactctatttggaaaattcctcaaaatgatataccacagaccgagtcaccactgaagaccgttgattcatctattcaacccatagaatccaatataaagatgaccttggaagataataatgttaccagtaatccgtccgaatttacgccgaatatggtaaattctgaaatttctaacctaccaaaagacaagagtggtatccccgaattcacaccggcggaccccaatttatcttttgaatcatcaagtagtctaccgtttctattgagacacatgccgctagcatctataccggacattttcatcacgcctactcccgttgttacaatttcagaaaaagaacaagacatcttagatttaattgcagaacaagtcgtcactgattataatatcttaggaaacctcggtattccaaagatcgcctataggggagttaaagattgccaagaaggtttaataacaaccacaatgttacagttattttccactttcgatagattaaatggcaatgatacgatctccaaattctataacatgaagcagccgtacgtttttgtaaagaaacatcacgaactaatcaaagtcaaacacgactctcagccatttattaagttcctcaattttcgccctccaaatggaataaaaaacttcaaatccttattattaagttcatctttcaaagaagattgtctgtcatttgcgccaactctatctcaaacatatattaatcaagagttagggttttgtgagttgcttaaactaactaatgaagacccgcccggactgatgtacttgaaggcatttgataaaaacaagttactgttgttagctgcgcagattgtttcatactgttctaataataagaactccatcaaaaacgtgccaccaatattaataattttacccttggataatgcaactctgactgaattagtagacaaggcgaatatttttcaggtgatcaagaacgaagtttgtgccaagatgcctaacattgaactatatttgaaagttattcctatggatttcattagaaacgtactggtgacagtggatcagtacgtcaacgtagcaatttctatatataacatgctgccgccaaaatctgtaaagttcacccacattgcgcatacgctgccggagaaagtgaatttcagaaccatgcagcaacagcaaatgcaacagcaacagcaacagcaacagcagcagcagaataacagtacaggatcatcttctataatatattatgactcgtacatccacctggcatactcgcgtagtgtagataaagagtgggtttttgcagctctttcagatagctatggacaaggcagcatgacgaaaacgtggtacgtcgggaattccagaggaaaatttgacgacgcatgtaatcaaatatggaatatcgccctaaatttagcgtctaaaaaattcggaaaaatatgtctaattttaactagattgaatggcatactgccggatgatgaattgatgaattggaggagactttctggtaggaatatacatcttgctgtggtgtgtgtggatgacaactctaaaatctccttcatagatgaggacaaattgtaccctagtttcaagccgatctacaaagacactaggtttggaggacgcatggatatgaccagattatacgactatgaaataagggatatagaccaggacatccatggaatagtatttcagcacccgttcccactggcacactcacagcatcgctgtgctattaggagtggtgctttgatcaaattcaaaaaatgcgacggtgatacggtttgggacaaattcgcagtcaaccttttaaactgtccacattctgatagtacacaattgctggaaaccatcttagaagagtttcgcaacctggctgctctaaacgtgtggtacggtctctctgatggcgaagatggccatattccatggcatatcctagccgtgaaaaaaatgatgaacactcttgtgcacaccagagtaaaaattgctaatacttccgccgctactgtgcataccgctacttcttcatcaattattctctcggataaataa

SEQ ID NO: 2646 - DNA, 4263 bp, Artificial Sequence
  Description of Artificial Sequence: Synthetic polynucleotide
atgagttctgacgcttccacgtacagacttgaggatgttttatccagcttctatagagtggagaaaatcaaaaagatcaactatcatcagtacatttctaaagcccaaaacgatcaatggtctatccaaatggaattcatgttgagaaagcaggatccaaagactttggttgcgttactttctagggatttatggtgtttcagtataaatgatgatccggtaccgacacctcctgcgatagaacataaaccagtgagcccagataaaatcggaactttcactgccgattattccaagccaaacttaccgccacactatgctctttttttaaaagctttaagaaggaaaatttacattaatttggcattaggttctcacaataagttaatacaatttgggaatgcctgcatatctttaagcggagtgccaaattatctcgtacagttagaaccacacctttttgtaaacggagatctcacagtgtctttatgtgccaagaacatgggattagtaccaatgaaggaggaaaatttggaagaatctttcctttccaagcatgcgctttatttagcaccatctggaataaggatgcatttggcccctgcttccaagcaaggatacttgataacgccaccaaaacatacagaacttctcttgacgacgttaagtgtatctcatggtataaacttacaaaataaaaaaaatttgaaatgggttgctgttgttcctgacttaggacatctcaacggccacacacctactatagcttcttatttaactcccttacttgaagcaaagaagttggtatggccgcttcatttaatcttcgcccaaccagtagctgatatagaaaattctacttccggagatccatctgaatttcactgtttgcaagatgctttagatgccattgatgatttcatacaattaaagcaaacagctgcctataggactccaggaagttccggcgtattgagcagtaatattgctggtacaaatcccttaagcagtgatggagcatatacagaacagtttcaacattataagaacaactctattagttctcaacccgcttcttatcattctgtccaagaaactaataagatatctccgaaagatttctcccctaatttcacaggcattgataaattaatgctttctcccagcgatcaatttgctccagctttcttaaatacccctaataataacatcaatgagaatgaattatttaatgataggaaacaaactacagtatctaatgacttagagaacagcccattgaaaacggaattagaggcaaatggtagaagtctcgaaaaggtaaataattccgtgagcaagacaggaagcgtagacacacttcataataaagagggaacattagaacaaagagaacagaacgaaaatttaccaagtgataaaagtgactctatggtagacaaggaattgtttggtgaggatgaggatgaggatttatttggcgatagcaataaatctaattctacaaacgaatctaacaaaagtatatctgacgaaattaccgaggatatgttcgaaatgtctgatgaagaagaaaataataacaataaaagcattaataaaaataacaaggaaatgcatactgatcttggtaaagatattccattttttccctcttctgaaaaaccgaatatccgtacgatgagcggaactacaaaaagattaaatggaaagaggaaatatttggatattccgatagatgaaatgaccttgccaacgagtccattatatatggacccaggtgcgccactccctgtggaaacaccccgcgatagacgcaaaagtgtgttcgctccattgaattttaaccccataatagaaaacaatgttgataacaaatacaaatctggagggaaattttccttcagtccgttgcaaaaggaggaagcattaaactttgatatttctatggcggatctttctagctctgaagaggaagaggatgaagaagagaacggtagcagcgatgaggatttgaagtctttgaacgtacgcgacgacatgaaaccttctgataacatcagtactaatactaatattcatgagcctcaatacataaattactcttctatcccaagtttacaagactctattataaagcaagaaaatttcaattctgtaaacgatgctaatatcactagcaataaggaaggcttcaactctatttggaaaattcctcaaaatgatataccacagaccgagtctccattgaagaccgttgattcttctattcaacccatagaatccaatataaagatgaccttggaagataataatgttaccagtaatccgtccgaatttacgccgaatatggtaaattctgaaatttctaacttaccaaaagacaagagtggtatccccgaattcacaccggcggaccccaatttatcttttgaatcttccagtagtttaccgtttttattgagacacatgccgttggcatctataccggacattttcatcacgcctactcccgttgttacaatttctgaaaaagaacaagacatcttagatttaattgcagaacaagtcgtcactgattataatatcttaggaaacctcggtattccaaagatcgcctataggggagttaaagattgccaagaaggtttaataacaaccacaatgttacagttattttccactttcgatagattaaatggcaatgatacgatctccaaattctataacatgaagcagccgtacgtttttgtaaagaaacatcacgaattgatcaaagtcaaacacgactctcagccatttattaagttcctcaattttcgccctccaaatggaataaaaaacttcaaatccttattattaagttcttctttcaaagaagattgtttatcttttgcgccaactttatctcaaacatatattaatcaagagttagggttttgtgagttgcttaaattaactaatgaagacccgcccggattaatgtacttgaaggcatttgataaaaacaagttattattgttagctgcgcagattgtttcttactgttctaataataagaactccatcaaaaacgtgccaccaatattaataattttacccttggataatgcaactttaactgaattagtagacaaggcgaatatttttcaggtgatcaagaacgaagtttgtgccaagatgcctaacattgaattgtatttgaaagttattcctatggatttcattagaaacgtattggtgacagtggatcagtacgtcaacgtagcaatttctatatataacatgttaccgccaaaatctgtaaagttcacccacattgcgcatacgttgccggagaaagtgaatttcagaaccatgcagcaacagcaaatgcaacagcaacagcaacagcaacagcagcagcagaataacagtacaggatcttcttctataatatattatgactcttacatccacttggcatactctcgtagtgtagataaagagtgggtttttgcagctctttctgatagctatggacaaggcagcatgacgaaaacgtggtacgtcgggaattccagaggaaaatttgacgacgcatgtaatcaaatatggaatatcgccttgaatttagcgtctaaaaaattcggaaaaatatgtttaattttaactagattgaatggcatattaccggatgatgaattgatgaattggaggagactttctggtaggaatatacatcttgctgtggtgtgtgtggatgacaactctaaaatctccttcatagatgaggacaaattgtaccctagtttcaagccgatctacaaagacactaggtttggaggacgcatggatatgaccagattatacgactatgaaataagggatatagaccaggacatccatggaatagtatttcagcacccgttcccattggcacactctcagcatcgctgtgctattaggagtggtgctttgatcaaattcaaaaaatgcgacggtgatacggtttgggacaaattcgcagtcaaccttttaaactgtccacattctgatagtacacaattgttggaaaccatcttagaagagtttcgcaacttggctgctttgaacgtgtggtacggtctctctgatggcgaagatggccatattccatggcatatcttggccgtgaaaaaaatgatgaacactcttgtgcacaccagagtaaaaattgctaatacttccgccgctactgtgcataccgctacttcttcttccattattctctctgataaatga

SEQ ID NO: 2647 - DNA, 2064 bp, Saccharomyces cerevisiae
atgccttacaaaatcaaccgaatgaaaaattcgctcgagataaatgaaaccggaggtaccttattggttgatgagcggaagagattaagaataggtgagttatatcgctacaagttttccgtgaacaaagatgtaattaaggaacaagggctagatgtatcgcatctattcttgaggatcaagaacgaggaaagcgcgcttctgcgaccgctttatttgacggggccatattctttttacatcgatgttaggccgcataactataatgagaatcgcaagtttccagggaaggaaattattccatttgttgaaaatctaaagccggacgaaagatttaaagtaaaaatattattgaatgagaattctagagttggcgacacttctctttattcatggacaatagatataatttcgcagttggcggtaaccacaattccgaagctggaattttcgtttaggatagggactacaaggaaggtggtcaagaaatcgaatgggctctttaagagtattgaaggtgtctctttagagatgtgggatactgaaaccctttgggatttaccaccaaaatttccagaaaagcctgtacatctcgttattatgacacatggtatattttctaatatcgggtgtgatatgctatatatgaaagataaaattgaagaaatgacgtttcctatggatgagtctattaatccgaatataattgttcgaggttttatgggcaacgtcgggaaatcaggtcacggtatacattgcttgggcgttagagttggaaagtatgtgcttgagactgttgataagttgaataaaaagtacaaagtagacaggatatcattcattggccattccctaggagggccaactcaatccatggcggtgcgttacataagtattaaaagaccagatttttttgatgcagttaaaggtgttaaacccgttaattttattacgttagctagtcctttcatcggtgttattggcgacttccccttttatttgtctgttccactggatatgggcgcgcttggtttgacaggaagggacttgaatttaaaatatacaccgttaacgtccaaagatgggttgtatgcagacgatgaagtgtacccagaacattccaagtacatattagaaattcttccacaggcgccggctaaaaaagtatttgagtcttttaagaggagaacgatatatgccaatgtcatggatgatggtattgttccattacgaactgctgcacttttgtatctggattggcgaagcatacacaaagtccagaaaattaggaaaaaaaataagaactctccaacttcaagcgagtttgtgtcctccgatagcccagagagtagtggagcatcatcaccttcaaacgaaaatggtaacaacgtcggggagattcctgcagaaagtccaaacaaaaaagcgacgttgcagtggactttacctcaggccgttatccacggaagtaaaataaataaatataagagaggacaaactaatgaagccaactcagattcggataatgaacaaggagtatttcttgatggtcaaaagttcgaacctccaaaagaagccaatactgtattgtctgcattatcggtattgacagctgccataccagatcaggagtatatcaaaaacccggctgtaaggaaagatgaagtcattcatgataaactttatcacccggaagaattacctccgccgcattatgagaataggcctatcgttaagaagcttatatatcctaatgagagtgtcaacaggattcaagagcgcattgctagagaatggcaagaaacgatgacttggagaaaagtattagtgcagatccagcctgattcccataacaatatcgtagtaagaagaagatttgttaatttatacggctatgttgctgtggaacacatggttgagcaccatttcggatccaaggtttgtagcgagctggctgaagatgcaaatgagccaaaagatgagccaaaccagtcatcgcaagcggaccggtcgaatgagtataacgagggggaaatatcaaagggcgcggagaatgccacatga

SEQ ID NO: 2648 - DNA, 2064 bp, Artificial Sequence
  Description of Artificial Sequence: Synthetic polynucleotide
atgccttacaaaatcaacagaatgaaaaatagtctcgagataaatgaaaccggaggtaccttattggttgatgagagaaagagattaagaataggtgagttatatcgctacaagttttccgtgaacaaagatgtaattaaggaacaagggttagatgtatctcatcttttcttgaggatcaagaacgaggaaagcgcgcttttaagaccgctttatttgacggggccatattctttttacatcgatgttaggccgcataactataatgagaatcgcaagtttccagggaaggaaattattccatttgttgaaaatttgaagccggacgaaagatttaaagtaaaaatattattgaatgagaattctagagttggcgacacttctctttattcttggacaatagatataatttctcagttggcggtaaccacaattccgaagttggaattttcttttaggatagggactacaaggaaggtggtcaagaaatctaatgggctctttaagagtattgaaggtgtctctttagagatgtgggatactgaaaccctttgggatttaccaccaaaatttccagaaaagcctgtacatctcgttattatgacacatggtatattttctaatatcgggtgtgatatgctttatatgaaagataaaattgaagaaatgacgtttcctatggatgagtctattaatccgaatataattgttagaggttttatgggcaacgtcgggaaatctggtcacggtatacattgcttgggcgttagagttggaaagtatgtgcttgagactgttgataagttgaataaaaagtacaaagtagacaggatatctttcattggccattccttgggagggccaactcaatccatggcggtgcgttacataagtattaaaagaccagatttttttgatgcagttaaaggtgttaaacccgttaattttattacgttagctagtcctttcatcggtgttattggcgacttccccttttatttgtctgttccattagatatgggcgcgcttggtttgacaggaagggacttgaatttaaaatatacaccgttaacgtccaaagatgggttgtatgcagacgatgaagtgtacccagaacattccaagtacatattagaaattcttccacaggcgccggctaaaaaagtatttgagtcttttaagaggagaacgatatatgccaatgtcatggatgatggtattgttccattaagaactgctgcacttttgtatttggattggagaagcatacacaaagtccagaaaattaggaaaaaaaataagaactctccaacttccagcgagtttgtgtcctccgatagcccagagagtagtggagcatcttctccttccaacgaaaatggtaacaacgtcggggagattcctgcagaaagtccaaacaaaaaagcgacgttgcagtggactttacctcaggccgttatccacggaagtaaaataaataaatataagagaggacaaactaatgaagccaacagtgattctgataatgaacaaggagtatttcttgatggtcaaaagttcgaacctccaaaagaagccaatactgtattgtctgcattaagtgtattgacagctgccataccagatcaggagtatatcaaaaacccggctgtaaggaaagatgaagtcattcatgataaactttatcacccggaagaattacctccgccgcattatgagaataggcctatcgttaagaagcttatatatcctaatgagagtgtcaacaggattcaagagcgcattgctagagaatggcaagaaacgatgacttggagaaaagtattagtgcagatccagcctgattcccataacaatatcgtagtaagaagaagatttgttaatttatacggctatgttgctgtggaacacatggttgagcaccatttcggatccaaggtttgtagcgagttggctgaagatgcaaatgagccaaaagatgagccaaaccagtcttctcaagcggacagatctaatgagtataacgagggggaaatatccaagggcgcggagaatgccacatga

SEQ ID NO: 2649 - DNA, 909 bp, Saccharomyces cerevisiae
atgactgttataaagacagaaccaacaacagaagtgacattatattctccaccatcaaaagaatctttaagtaaagatgacgcccacagaaaaaaacaaaataataaaccaccttcgagtataaatagccgctcaggaccaaataagcataaacttgccgccaaagcaccggaaaagaaaatcaataacacagataaacaagacctctctgcctttttattaaatccttcccttattgttaaaccttctgagagcaaaaaaaaagaaaatattgtggcctataatgatacaccaggtataaaaacagaacatacagcgtttcagccgctgacaccaatttcgaaaaaaagggccctgaaagagaaagcagcatcagaaaaatgtgatagctttgatctttccagagacgagaagccttatattcagaaaaagtcaaagacgctttcttccgtcacagagattaattcctcagaatataaactctcactaaatggcgaaaatacatcatccccagctaaggaaaaatcgcaagaacccatagaaaatcctggaagttaccaaaaaacaagaaattacctttttgaaaagcccgatcctttagacacgtgccttcaggactactcgagtatgctaccgtcaaatgtagcagaagaagatcaagaatattttatcagcgtagctgattcgacattggaggagtggactaacaagggccaggaaattattgaccaacagttccagctctaccaagaaataatcaagaaacgaatagaactaagctacaaatttaagggtattatttctgtaatcaatgatagggcagatgccctagaagaacagggtcaacaactagaaggaaaaattaagaaagttaaaactttggctaatgaaattctcaatattatataa

SEQ ID NO: 2650 - DNA, 909 bp, Artificial Sequence
  Description of Artificial Sequence: Synthetic polynucleotide
atgactgttataaagacagaaccaacaacagaagtgacattatattctccaccatctaaagaatctttaagtaaagatgacgcccacagaaaaaaacaaaataataaaccaccttctagtataaatagccgctctggaccaaataagcataaacttgccgccaaagcaccggaaaagaaaatcaataacacagataaacaagacctctctgcctttttattaaatccttcccttattgttaaaccttctgagagcaaaaaaaaagaaaatattgtggcctataatgatacaccaggtataaaaacagaacatacagcgtttcagccgttaacaccaatttccaaaaaaagggccttgaaagagaaagcagcatctgaaaaatgtgatagctttgatctttccagagacgagaagccttatattcagaaaaagtccaagacgctttcttccgtcacagagattaattccagtgaatataaactctccttgaatggcgaaaatacatcttccccagctaaggaaaaatctcaagaacccatagaaaatcctggaagttaccaaaaaacaagaaattacctttttgaaaagcccgatcctttagacacgtgccttcaggactactctagtatgttaccgtccaatgtagcagaagaagatcaagaatattttatcagcgtagctgattctacattggaggagtggactaacaagggccaggaaattattgaccaacagttccagctctaccaagaaataatcaagaaaagaatagaattgagctacaaatttaagggtattatttctgtaatcaatgatagggcagatgccttggaagaacagggtcaacaattggaaggaaaaattaagaaagttaaaactttggctaatgaaattctcaatattatatga

SEQ ID NO: 2651 - DNA, 411 bp, Saccharomyces cerevisiae
atgggtagagttagaaccaagaccgtcaaacgtgcctccaaggctttgattgaacgttactatccaaagttgaccttggatttccaaactaacaagagactttgtgatgaaattgcaactatccaatccaagagattgagaaacaagattgctggttacactactcatttgatgaaaagaatccaaaagggtccagttagaggtatttctttcaaattgcaagaagaagaaagagaaagaaaggatcaatacgtcccagaagtctctgctttggacttgtctcgttctaacggtgttttgaacgttgacaaccaaacctctgacttggttaaatctttgggtttgaagttgccattatctgtcatcaacgtttccgctcaaagagacagacgttacagaaagagaaactaa

SEQ ID NO: 2652 - DNA, 411 bp, Artificial Sequence
  Description of Artificial Sequence: Synthetic polynucleotide
atgggtagagttagaaccaagaccgtcaaacgtgcctccaaggctttgattgaacgttactatccaaagttgaccttggatttccaaactaacaagagactttgtgatgaaattgcaactatccaatccaagagattgagaaacaagattgctggttacactactcatttgatgaaaagaatccaaaagggtccagttagaggtatttctttcaaattgcaagaagaagaaagagaaagaaaggatcaatacgtcccagaagtctctgctttggacttgtctcgttctaacggtgttttgaacgttgacaaccaaacctctgacttggttaaatctttgggtttgaagttgccattatctgtcatcaacgtttccgctcaaagagacagacgttacagaaagagaaactga

SEQ ID NO: 2653 - DNA, 1305 bp, Saccharomyces cerevisiae
atgtcaaacaagtttcactgtgacgtttgttcagctgattgcacgaacagagtgagggtttcatgtgctatttgtcccgaatacgacttatgcgtgccctgcttttcacaaggctcgtatacaggaaagcatcgcccttaccatgattataggataatagagaccaattcataccccattctctgtcctgattggggtgccgatgaagaattgcagttgattaaaggcgcacagactttagggctcggtaattggcaggatattgctgaccatataggcagcagaggcaaagaagaagttaaggaacattacctaaaatattatctggaaagcaaatactatccaatacctgatattacccaaaatatacatgtcccacaagatgaatttttggaacagcgaaggcatagaatcgagtccttccgggagaggccgctagagcctccaagaaagcccatggcatcggttcctagctgccatgaagtacaggggtttatgccgggcagattagaatttgaaacagaattcgaaaatgaagctgaaggtcccgtaaaggatatggtttttgaacctgatgaccagcccttagacattgaattgaagtttgccatcttggacatttacaattctagattgacaaccagagcagaaaagaaaaggctattatttgaaaaccatttaatggattacagaaagttgcaagctattgacaaaaagaggagcaaagaagccaaagaattgtataaccgcataaaaccttttgctcgtgttatgactgcacaggattttgaggaatttagcaaggatatattagaagaattgcattgcagggcaagaatacagcaattacaagaatggagaagcaatgggttaaccacgttagaagcaggtcttaagtatgaacgagataagcaagctagaattagcagtttcgagaaatttggcgcttctacggcggcgtcactcagtgagggcaatagccgttataggtcgaattctgcacataggtcgaacgcagaatacagccaaaactacagcgaaaatggcggtagaaagaaaaatatgaccattagcgatatacagcatgcacctgactatgcactgttgtccaacgacgagcagcaactttgtattcaactgaaaattttacctaaaccgtatctcgttctaaaagaggtaatgttcagagaactgttgaagactgggggtaatctaagcaaaagcgcatgtagggaactacttaatatagaccccataaaagcgaatagaatatacgattttttccagagccagaattggatgtaa

SEQ ID NO: 2654 - DNA, 1305 bp, Artificial Sequence
  Description of Artificial Sequence: Synthetic polynucleotide
atgtccaacaagtttcactgtgacgtttgttctgctgattgcacgaacagagtgagggtttcttgtgctatttgtcccgaatacgacttatgcgtgccctgcttttctcaaggctcctatacaggaaagcatcgcccttaccatgattataggataatagagaccaattcttaccccattctctgtcctgattggggtgccgatgaagaattgcagttgattaaaggcgcacagactttagggctcggtaattggcaggatattgctgaccatataggcagcagaggcaaagaagaagttaaggaacattacttgaaatattatttggaaagcaaatactatccaatacctgatattacccaaaatatacatgtcccacaagatgaatttttggaacagagaaggcatagaatcgagtccttcagagagaggccgttagagcctccaagaaagcccatggcatctgttcctagctgccatgaagtacaggggtttatgccgggcagattagaatttgaaacagaattcgaaaatgaagctgaaggtcccgtaaaggatatggtttttgaacctgatgaccagcccttagacattgaattgaagtttgccatcttggacatttacaattctagattgacaaccagagcagaaaagaaaaggttattatttgaaaaccatttaatggattacagaaagttgcaagctattgacaaaaagaggagcaaagaagccaaagaattgtataaccgcataaaaccttttgctcgtgttatgactgcacaggattttgaggaatttagcaaggatatattagaagaattgcattgcagggcaagaatacagcaattacaagaatggagaagcaatgggttaaccacgttagaagcaggtcttaagtatgaaagagataagcaagctagaattagcagtttcgagaaatttggcgcttctacggcggcgtctctcagtgagggcaatagccgttataggtctaattctgcacataggtctaacgcagaatacagccaaaactacagcgaaaatggcggtagaaagaaaaatatgaccattagcgatatacagcatgcacctgactatgcattattgtccaacgacgagcagcaactttgtattcaattgaaaattttacctaaaccgtatctcgttttgaaagaggtaatgttcagagaattattgaagactgggggtaatttgagcaaaagcgcatgtagggaattgcttaatatagaccccataaaagcgaatagaatatacgattttttccagagccagaattggatgtga

SEQ ID NO: 2655 - DNA, 1323 bp, Saccharomyces cerevisiae
atgtcgaagacaagatactatttggaacaatgtattcctgaaatggatgacttggtggagaaaggactattcactaaaaatgaagtttcattaattatgaagaaaagaactgattttgagcatagattaaattccagagggtctagcataaatgactatataaaatacattaactatgaaagtaacgtcaataaattacgtgccaagcggtgtaagagaatcttacaggttaaaaagacgaacagtctatctgattggtctattcaacaaagaataggttttatttatcaaagaggaacgaacaaatttccacaagatttaaagttttgggcaatgtatttgaactacatgaaagcgagaggtaaccaaacatcatacaaaaaaattcacaacatttataatcagcttctaaagttgcacccaacgaatgtggacatttggattagttgtgcgaaatacgaatatgaagttcatgctaacttcaagagttgtagaaatatttttcagaatgggttgaggtttaaccctgatgtgcctaagctatggtatgaatatgtaaaattcgagctgaatttcatcactaagttgattaacagaagaaaagtgatgggtttaatcaatgaaagagagcaggagctcgacatgcaaaatgaacaaaagaataaccaagcccccgacgaagaaaaatctcatttacaagttccatccactggtgattcaatgaaagataaattaaacgagttaccagaggcagacatcagcgtactaggtaatgcagagaccaacccagcattacgcggtgacattgcattaactattttcgatgtgtgtatgaagactttgggcaagcattatattaataagcataagggttactatgccatctcagattccaaaatgaatattgaactaaataaggagaccttgaattacctattcagtgagtcactaaggtatattaaactatttgatgaatttttagacttggaaagagactatcttatcaatcacgtgttgcagttttggaaaaatgacatgtatgacctttcgctccgtaaggatctaccagaattgtatttgaaaacagtaatgattgacatcactctaaatatcagatatatgccagttgagaaactcgatattgatcaattacaattgtctgttaagaagtattttgcatatatatcgaaattggatagcgcatcggtgaagtcattgaaaaatgagtatcgttcatatttacaagacaattatttgaaaaagatgaatgcagaagatgatcctaggtataaaattctagatttaattatcagcaaactttaa

SEQ ID NO: 2656 - DNA, 1323 bp, Artificial Sequence
  Description of Artificial Sequence: Synthetic polynucleotide
atgtccaagacaagatactatttggaacaatgtattcctgaaatggatgacttggtggagaaaggattattcactaaaaatgaagtttctttaattatgaagaaaagaactgattttgagcatagattaaattccagagggtctagcataaatgactatataaaatacattaactatgaaagtaacgtcaataaattacgtgccaagagatgtaagagaatcttacaggttaaaaagacgaacagtttatctgattggtctattcaacaaagaataggttttatttatcaaagaggaacgaacaaatttccacaagatttaaagttttgggcaatgtatttgaactacatgaaagcgagaggtaaccaaacatcttacaaaaaaattcacaacatttataatcagcttttgaagttgcacccaacgaatgtggacatttggattagttgtgcgaaatacgaatatgaagttcatgctaacttcaagagttgtagaaatatttttcagaatgggttgaggtttaaccctgatgtgcctaagttatggtatgaatatgtaaaattcgagttgaatttcatcactaagttgattaacagaagaaaagtgatgggtttaatcaatgaaagagagcaggagctcgacatgcaaaatgaacaaaagaataaccaagcccccgacgaagaaaaatctcatttacaagttccatccactggtgattctatgaaagataaattaaacgagttaccagaggcagacatcagcgtattgggtaatgcagagaccaacccagcattacgcggtgacattgcattaactattttcgatgtgtgtatgaagactttgggcaagcattatattaataagcataagggttactatgccatcagtgattccaaaatgaatattgaattgaataaggagaccttgaattaccttttcagtgagtctttgaggtatattaaattatttgatgaatttttagacttggaaagagactatcttatcaatcacgtgttgcagttttggaaaaatgacatgtatgacctttctctccgtaaggatttaccagaattgtatttgaaaacagtaatgattgacatcactttgaatatcagatatatgccagttgagaaactcgatattgatcaattacaattgtctgttaagaagtattttgcatatatatccaaattggatagcgcatctgtgaagtctttgaaaaatgagtatcgttcttatttacaagacaattatttgaaaaagatgaatgcagaagatgatcctaggtataaaattttagatttaattatcagcaaactttga

SEQ ID NO: 2657 - DNA, 441 bp, Saccharomyces cerevisiae
atgtctttagttgtccaagaacaaggttccttccaacacattttacgtttgttgaacactaacgttgacggtaacattaagatcgtttacgctttgaccactatcaagggtgttggtcgtcgttactccaacttggtctgtaagaaggctgatgttgatttacacaagagagctggtgaattgacccaagaagaattggaaagaattgttcaaattatgcaaaacccaactcactacaaaatcccagcttggttcttgaaccgtcaaaatgacatcactgatggtaaggactaccacactttggctaacaacgtcgaatccaaattgagagatgacttggaaagattaaagaaaatcagagctcatcgtggtatcagacacttctggggtttgcgtgttagaggtcaacacaccaagaccactggtagaagaagagcttaa

SEQ ID NO: 2658 - DNA, 441 bp, Artificial Sequence
  Description of Artificial Sequence: Synthetic polynucleotide
atgtctttagttgtccaagaacaaggttccttccaacacattttacgtttgttgaacactaacgttgacggtaacattaagatcgtttacgctttgaccactatcaagggtgttggtcgtcgttactccaacttggtctgtaagaaggctgatgttgatttacacaagagagctggtgaattgacccaagaagaattggaaagaattgttcaaattatgcaaaacccaactcactacaaaatcccagcttggttcttgaaccgtcaaaatgacatcactgatggtaaggactaccacactttggctaacaacgtcgaatccaaattgagagatgacttggaaagattaaagaaaatcagagctcatcgtggtatcagacacttctggggtttgcgtgttagaggtcaacacaccaagaccactggtagaagaagagcttga

SEQ ID NO: 2659 - DNA, 1062 bp, Saccharomyces cerevisiae
atggaaagcagaaataccgtgcttccttctttaccaaacattattacaggtacttctaattcgcctttccaactgcatactttgccaaatacaaacttccctagtgatgaccaaggtgacatcaggttgccaccattagctgcatctgcgcacattgtgagaccagtggtaaatatttataaaagtccttgcgatgaggaaaggccaaaaaggaaaagtccacaggctgtggatttcttatcacaacgtgtaaccacttccatgacgcctttatccaagcccaagaagctgagctctcattcaccattcacgccaacggtcagagtctgttctaaagagcagccacctcagagtatgcactcttataaaaaagttaatattcttactcctctatctgctgcaaaggctgttctcacaccaaccacaagaaaagaaaagaaaaggtcatttgcctttattacacactcacaggaaacttttccaaagaaggagcctaagatagacaatgctcggttagctcgtcggaaaagaagaagaacttcatcatatgagcttgggatattgcaaacagcatttgacgaatgtcccacgcccaataaggctaaaaggatagagttatccgagcaatgtaatatgtccgaaaaatcggttcaaatatggtttcagaacaaaaggcaggctgctaaaaagcacaagaacagtggcaacaccagccattgcaaagttcactctaatgattcgatgtctatgatatcttactcagacgctgcgttggaaattacctctacgccaacgagtacgaaggaggctattactgcagagttgctgaaaacttcacctgccaatacgtcctcgatcttcgaagaccaccacataacgccttgcaagcccggcggacagctcaagttccacaggaaatctgtgcttgttaagagaacattatcaaataccggtcatagcgagattatcaaaagtcctaaaggcaaggaaaaccgcctaaagttcaatgcatacgaaagaaaaccccttggggaggtcgatctcaattctttcaaaaactaa

SEQ ID NO: 2660 - DNA, 1062 bp, Artificial Sequence
  Description of Artificial Sequence: Synthetic polynucleotide
atggaaagcagaaataccgtgcttccttctttaccaaacattattacaggtacttctaattctcctttccaattgcatactttgccaaatacaaacttccctagtgatgaccaaggtgacatcaggttgccaccattagctgcatctgcgcacattgtgagaccagtggtaaatatttataaaagtccttgcgatgaggaaaggccaaaaaggaaaagtccacaggctgtggatttcttatctcaacgtgtaaccacttccatgacgcctttatccaagcccaagaagttgagctctcattctccattcacgccaacggtcagagtctgttctaaagagcagccacctcagagtatgcactcttataaaaaagttaatattcttactcctttatctgctgcaaaggctgttctcacaccaaccacaagaaaagaaaagaaaaggtcttttgcctttattacacactctcaggaaacttttccaaagaaggagcctaagatagacaatgctagattagctcgtcgtaaaagaagaagaacttcttcttatgagcttgggatattgcaaacagcatttgacgaatgtcccacgcccaataaggctaaaaggatagagttatccgagcaatgtaatatgtccgaaaaatctgttcaaatatggtttcagaacaaaaggcaggctgctaaaaagcacaagaacagtggcaacaccagccattgcaaagttcactctaatgattctatgtctatgatatcttacagtgacgctgcgttggaaattacctctacgccaacgagtacgaaggaggctattactgcagagttgttgaaaacttctcctgccaatacgtcctctatcttcgaagaccaccacataacgccttgcaagcccggcggacagctcaagttccacaggaaatctgtgcttgttaagagaacattatccaataccggtcatagcgagattatcaaaagtcctaaaggcaaggaaaaccgcttgaagttcaatgcatacgaaagaaaaccccttggggaggtcgatctcaattctttcaaaaactga

SEQ ID NO: 2661 - DNA, 2025 bp, Saccharomyces cerevisiae
atggttgtagtgggtaagagtgaagtgcgcaatgtaagcatgagtaggccgaagaagaaatcattgattgccatcctgtcgacctgtgttttgtttttcctcgtgtttataattggtgctaaatttcaatatgtttccgttttctccaaattcttagatgacaggggggacaacgagtcacttcaattgctcaatgacatagaatttacaaggctaggactgacacctagggagccagtaattatcaaagacgtaaagacagggaaggagagaaaattacatggacggttccttcatattaccgatattcatcctgacccttattatgtggaaggaagctctattgatgcagtttgtcacacaggaaaaccaagcaaaaaaaaggatgtggcacccaagtttgggaaggcaatgtctggatgtgattctcccgttattttaatggaagaaactctgagatggattaaagaaaatcttagagataagattgattttgtcatttggacgggtgataatatcagacatgacaatgaccggaaacatccaagaacagaagcacaaatttttgatatgaacaatatcgttgctgataaaatgacagaattatttagtgctggcaatgaagaagatccaagagattttgatgtgtctgtcattccaagtcttggaaacaatgatgtctttccacataacatgtttgcactaggaccaactctacaaactagagaatattataggatttggaaaaattttgttccgcagcagcagcaaagaacttttgataggagtgcttcatttttgactgaagttattccagggaagcttgctgtcctgtcaattaacacgctgtacttattcaaggccaatccgttagttgacaattgtaattcaaaaaaagaaccaggttaccaacttttactttggttcggttatgtattagaagaactaaggagtaggggaatgaaagtatggttaagtggacatgtacctccaatcgcaaaaaatttcgatcagtcgtgctacgataagttcacgctatggactcacgaatacagggatataatcattggaggattatacggtcacatgaatattgaccacttcatcccaacggatggtaaaaaagctagaaaatcgttattgaaagccatggagcaatccactcgtgttcaacaaggagaagacagtaatgaagaggacgaagaaactgaattgaatagaattctggatcacgctatggcggcaaaagaagtttttttaatgggagcgaaaccatctaacaaagaagcatatatgaacaccgtccgcgacacatactatcggaaagtgtggaataagctggaaagagtggatgaaaaaaatgttgaaaatgagaagaaaaagaaagaaaagaaggacaaaaaaaagaaaaagccaatcactagaaaagagctcattgaacgctattccattgtgaacataggtggttcagtcattccaactttcaatccttcctttaggatctgggaatataacatcaccgacatagtgaatgactccaattttgcagtttcggagtataagccctgggatgaatttttcgagtcactaaataagattatggaagactctttgctagaagatgaaatggacagcagtaatatcgaggttgggatcaaccgcgagaagatgggcgaaaagaaaaacaagaagaaaaagaaaaatgacaagactatgccaattgagatgccagacaaatacgaactcggccctgcatatgtaccgcagttattcactccgacgcgtttcgtccaattctacgccgacttggaaaaaatcaatcaagaattacataattcatttgttgaatctaaggatattttcaggtatgagatagaatatacctcagacgagaaaccatactcaatggattcgttaacagtaggaagttatttggatcttgcaggcagattatacgaaaacaaacctgcatgggaaaaatacgtcgaatggtcatttgcgtcttctggatataaagatgattaa

SEQ ID NO: 2662 - DNA, 2025 bp, Artificial Sequence
  Description of Artificial Sequence: Synthetic polynucleotide
atggttgtagtgggtaagagtgaagtgcgcaatgtaagcatgagtaggccgaagaagaaatctttgattgccatcttatctacctgtgttttgtttttcctcgtgtttataattggtgctaaatttcaatatgtttccgttttctccaaattcttagatgacaggggggacaacgagtctcttcaattgctcaatgacatagaatttacaaggttaggattaacacctagggagccagtaattatcaaagacgtaaagacagggaaggagagaaaattacatggaagattccttcatattaccgatattcatcctgacccttattatgtggaaggaagctctattgatgcagtttgtcacacaggaaaaccaagcaaaaaaaaggatgtggcacccaagtttgggaaggcaatgtctggatgtgattctcccgttattttaatggaagaaactttgagatggattaaagaaaatcttagagataagattgattttgtcatttggacgggtgataatatcagacatgacaatgacagaaaacatccaagaacagaagcacaaatttttgatatgaacaatatcgttgctgataaaatgacagaattatttagtgctggcaatgaagaagatccaagagattttgatgtgtctgtcattccaagtcttggaaacaatgatgtctttccacataacatgtttgcattgggaccaactttacaaactagagaatattataggatttggaaaaattttgttccgcagcagcagcaaagaacttttgataggagtgcttcttttttgactgaagttattccagggaagcttgctgtcctttctattaacacgttgtacttattcaaggccaatccgttagttgacaattgtaattctaaaaaagaaccaggttaccaacttttactttggttcggttatgtattagaagaattgaggagtaggggaatgaaagtatggttaagtggacatgtacctccaatcgcaaaaaatttcgatcagagttgctacgataagttcacgttgtggactcacgaatacagggatataatcattggaggattatacggtcacatgaatattgaccacttcatcccaacggatggtaaaaaagctagaaaatctttattgaaagccatggagcaatccactcgtgttcaacaaggagaagacagtaatgaagaggacgaagaaactgaattgaatagaattttagatcacgctatggcggcaaaagaagtttttttaatgggagcgaaaccatctaacaaagaagcatatatgaacaccgtccgcgacacatactatagaaaagtgtggaataagttggaaagagtggatgaaaaaaatgttgaaaatgagaagaaaaagaaagaaaagaaggacaaaaaaaagaaaaagccaatcactagaaaagagctcattgaacgctattccattgtgaacataggtggttctgtcattccaactttcaatccttcctttaggatctgggaatataacatcaccgacatagtgaatgactccaattttgcagtttctgagtataagccctgggatgaatttttcgagtctttgaataagattatggaagactctttgttggaagatgaaatggacagcagtaatatcgaggttgggatcaaccgcgagaagatgggcgaaaagaaaaacaagaagaaaaagaaaaatgacaagactatgccaattgagatgccagacaaatacgaactcggccctgcatatgtaccgcagttattcactccgacgcgtttcgtccaattctacgccgacttggaaaaaatcaatcaagaattacataattcttttgttgaatctaaggatattttcaggtatgagatagaatataccagtgacgagaaaccatactccatggattctttaacagtaggaagttatttggatcttgcaggcagattatacgaaaacaaacctgcatgggaaaaatacgtcgaatggtcttttgcgtcttctggatataaagatgattga

SEQ ID NO: 2663 - DNA, 591 bp, Saccharomyces cerevisiae
atggtagcagaagttcaaaaacaagccccaccatttaagaaaaccgccgtagtcgacggtatcttcgaggaaatttcactggaaaagtataaaggtaagtacgttgttctagcttttgtcccattggctttttcatttgtctgtccaactgagattgttgcgttttccgatgccgccaagaaattcgaagatcagggcgcccaagttttatttgcctccaccgactctgaatattccttactggcatggaccaaccttcccagaaaagacggtggattaggtccagttaaagttcctttgcttgctgataagaatcattccttatccagagactatggcgttttgattgaaaaagaaggtatagctttaagaggtttgttcataatcgacccgaagggaatcattagacatatcactatcaatgatttatctgttggcagaaacgtcaatgaagctttgagattagtcgaaggtttccagtggactgacaaaaatggtacagttttgccatgcaactggaccccaggagccgccaccatcaaacctgacgttaaagattccaaggagtatttcaaaaatgccaataattaa

SEQ ID NO: 2664 - DNA, 591 bp, Artificial Sequence
  Description of Artificial Sequence: Synthetic polynucleotide
atggtagcagaagttcaaaaacaagccccaccatttaagaaaaccgccgtagtcgacggtatcttcgaggaaatttctttggaaaagtataaaggtaagtacgttgttttggcttttgtcccattggctttttcttttgtctgtccaactgagattgttgcgttttccgatgccgccaagaaattcgaagatcagggcgcccaagttttatttgcctccaccgactctgaatattccttattggcatggaccaaccttcccagaaaagacggtggattaggtccagttaaagttcctttgcttgctgataagaatcattccttatccagagactatggcgttttgattgaaaaagaaggtatagctttaagaggtttgttcataatcgacccgaagggaatcattagacatatcactatcaatgatttatctgttggcagaaacgtcaatgaagctttgagattagtcgaaggtttccagtggactgacaaaaatggtacagttttgccatgcaactggaccccaggagccgccaccatcaaacctgacgttaaagattccaaggagtatttcaaaaatgccaataattga

SEQ ID NO: 2665 - DNA, 564 bp, Saccharomyces cerevisiae
atgtcccgtcctatcgtaatttctggcccaagtggtacaggtaaatctacactgttgaagaaattgttcgctgaatacccagattctttcgggtttagtgtttcatccactactagaaccccaagagctggcgaagtaaacggtaaggactataactttgtctccgtagatgaattcaaatctatgattaagaacaatgaattcattgaatgggcgcaattctccggtaactactatggtagtactgtcgcttccgtcaaacaagtcagtaaatctggtaagacttgtattttagatattgatatgcagggtgtcaaatctgtcaaggctatcccagagttaaatgccaggtttttgtttattgctccaccatcggtcgaggatttgaaaaaaagattagaaggtagaggtacggagaccgaagaatccatcaacaagaggttaagcgccgctcaagctgaattggcatatgctgagacaggtgcccatgacaaagttattgtcaatgatgatttggacaaggcctacaaggaattgaaggattttatctttgcagaaaaatga

SEQ ID NO: 2666 - DNA, 564 bp, Artificial Sequence
  Description of Artificial Sequence: Synthetic polynucleotide
atgtcccgtcctatcgtaatttctggcccaagtggtacaggtaaatctacattattgaagaaattgttcgctgaatacccagattctttcgggtttagtgtttcttccactactagaaccccaagagctggcgaagtaaacggtaaggactataactttgtctccgtagatgaattcaaatctatgattaagaacaatgaattcattgaatgggcgcaattctccggtaactactatggtagtactgtcgcttccgtcaaacaagtcagtaaatctggtaagacttgtattttagatattgatatgcagggtgtcaaatctgtcaaggctatcccagagttaaatgccaggtttttgtttattgctccaccaagtgtcgaggatttgaaaaaaagattagaaggtagaggtacggagaccgaagaatccatcaacaagaggttaagcgccgctcaagctgaattggcatatgctgagacaggtgcccatgacaaagttattgtcaatgatgatttggacaaggcctacaaggaattgaaggattttatctttgcagaaaaatga

SEQ ID NO: 2667 - DNA, 1902 bp, Saccharomyces cerevisiae
atgctatccaaggtattgctgaatatagctttcaaggtgctgttaaccaccgccaagagagcagttgatcctgacgatgatgatgaacttctaccttccccggatctcccgggtagcgatgaccctattgcaggtgatcctgatgtagacttaaaccctgttacagaagaaatgttctcttcatgggcattgttcattatgttgctcctattgatctctgcattgtggtctagttactatttaactcagaaacgaattagggcagtgcatgaaactgtgctttctattttttatggtatggttattggcttgataataaggatgtcccccgggcattatattcaagatacggttacttttaattcatcctacttttttaatgttctattgccgccaattattttaaatagtgggtacgagttgaatcaagtgaactttttcaataatatgttatctatcttaattttcgccataccgggcaccttcatatctgctgtggttattggaatcatattgtatatctggacctttttaggactagagagtattgacatttcattcgcagatgcaatgtctgttggtgctacattatctgctaccgaccctgttacaattctttcaattttcaatgcgtataaagtggatcctaagctatataccatcatttttggagaatcactgttaaatgatgccatctctattgttatgtttgaaacctgtcaaaaatttcatggtcaacctgcaacattttcgtcggtttttgaaggggcaggcctctttttgatgactttctccgtttcgttgttgataggcgttcttataggaattcttgttgctcttctgttgaaacacactcacataaggcgctatcctcaaattgagagttgtttgatcttgttgattgcttatgaatcctattttttctccaacggttgccatatgtccggtatcgtctccttgttattttgcggaattactttaaaacattacgcctattataacatgtcaagaagatcacagatcaccattaagtatattttccaactattggcaagattatcagagaatttcatctttatctatctaggtttagaactttttactgaagtagaactagtctataagccactgctaattattgtggcagctatttctatatgtgttgctcgttggtgtgctgtgttcccattgtcgcaatttgttaactggatatatagagtaaagacaatcagatctatgagcggcataaccggagaaaatatttctgttcccgatgaaataccctacaattaccaaatgatgacattttgggcaggtttacgtggtgctgttggtgtcgccttggcgttgggaattcaaggtgagtataagttcactttattggcaacggtccttgttgttgttgttttaacagttatcatttttgggggcactactgcaggaatgttagaagttttaaatattaagactggttgcataagtgaagaagatacatctgatgacgagtttgatatagaggctccaagggcgataaatttattgaacggtagttctattcagacagatttgggcccatattctgacaacaattctccagatatttcaattgaccaattcgcggtcagcagtaacaagaatctccccaataacatatccacaactggtggtaatacttttggaggccttaatgaaactgagaatactagccctaacccggcaaggtcttctatggataagcgtaatttgagagataaactgggaacaatctttaattccgactcacaatggtttcaaaattttgatgaacaggtattgaagccagtattcttggacaacgtttctccatccttacaagattcggctacgcaatcacctgcagatttctcttcccaaaaccactag

SEQ ID NO: 2668 - DNA, 1902 bp, Artificial Sequence
  Description of Artificial Sequence: Synthetic polynucleotide
atgctttccaaggtattgttgaatatagctttcaaggtgttattaaccaccgccaagagagcagttgatcctgacgatgatgatgaacttttaccttccccggatctcccgggtagcgatgaccctattgcaggtgatcctgatgtagacttaaaccctgttacagaagaaatgttctcttcttgggcattgttcattatgttgctcttattgatctctgcattgtggtctagttactatttaactcagaaaagaattagggcagtgcatgaaactgtgctttctattttttatggtatggttattggcttgataataaggatgtcccccgggcattatattcaagatacggttacttttaattcttcctacttttttaatgttttattgccgccaattattttaaatagtgggtacgagttgaatcaagtgaactttttcaataatatgttatctatcttaattttcgccataccgggcaccttcatatctgctgtggttattggaatcatattgtatatctggacctttttaggattggagagtattgacatttctttcgcagatgcaatgtctgttggtgctacattatctgctaccgaccctgttacaattctttctattttcaatgcgtataaagtggatcctaagctttataccatcatttttggagaatctttattaaatgatgccatctctattgttatgtttgaaacctgtcaaaaatttcatggtcaacctgcaacattttcttctgtttttgaaggggcaggcctctttttgatgactttctccgtttctttgttgataggcgttcttataggaattcttgttgctcttttattgaaacacactcacataaggcgctatcctcaaattgagagttgtttgatcttgttgattgcttatgaatcctattttttctccaacggttgccatatgtccggtatcgtctccttgttattttgcggaattactttaaaacattacgcctattataacatgagtagaagaagccagatcaccattaagtatattttccaattattggcaagattatctgagaatttcatctttatctatttgggtttagaactttttactgaagtagaattggtctataagccattgttaattattgtggcagctatttctatatgtgttgctcgttggtgtgctgtgttcccattgtctcaatttgttaactggatatatagagtaaagacaatcagatctatgagcggcataaccggagaaaatatttctgttcccgatgaaataccctacaattaccaaatgatgacattttgggcaggtttacgtggtgctgttggtgtcgccttggcgttgggaattcaaggtgagtataagttcactttattggcaacggtccttgttgttgttgttttaacagttatcatttttgggggcactactgcaggaatgttagaagttttaaatattaagactggttgcataagtgaagaagatacatctgatgacgagtttgatatagaggctccaagggcgataaatttattgaacggtagttctattcagacagatttgggcccatattctgacaacaattctccagatatttccattgaccaattcgcggtcagcagtaacaagaatctccccaataacatatccacaactggtggtaatacttttggaggccttaatgaaactgagaatactagccctaacccggcaaggtcttctatggataagcgtaatttgagagataaattaggaacaatctttaattccgactctcaatggtttcaaaattttgatgaacaggtattgaagccagtattcttggacaacgtttctccatccttacaagattctgctacgcaaagtcctgcagatttctcttcccaaaaccactga

SEQ ID NO: 2669 - DNA, 9807 bp, Saccharomyces cerevisiae
atggtgctttttactcggtgtgaaaaggcaagaaaggagaaactcgccgctggttataagcccttagttgattatttgattgattgtgatactcccacatttttagaaagaattgaggcaatccaagagtgggaccgatccagagatgatctttatgtttggattcccattctagacagaatggacgggctgttgttaaaagtggcagagaaatataaatacaagcaagaccccaagaaggagtgtgaagtcaaattggtggaaatggaagcgcatgatgttgattattgtttgaaaatgctaaagtttactcgtcgactacttctaaatacagaaaacaggtttgtttattcatctggagatgttttaatgtatctactgaattgtccgaattttacaataaaactagcggtcatgcgaattttagccattttaggggaaaggtttgtgattgcgagagaaaaaatagttgcacataacatatttggagatcacaacctcaggaaaaaaactctcaaactagctttatctctgtcatcttccgtcatggatgaagacggagagcacttttctcttgtcgatctatattttgataagaaaaaagtgcctcaaaaatggagaaagttgagatttacacattatacttcaaacgactttaaaaagtcaagccagcaaaaaaataacattaatgaaacccaaacttccattaagaaggtaactatgacgacccaagaactgtgtgaacactcactacagcaaatatttgataagggtatggcccttttacccgcagaaagttggtttgatttctcaataaaagcttcggtggcgaaggccttcagtgatgattcaggtgaaaatatagatttgagaaatataattattgaaacaaaactgaatgctattgcatttgttaacaccattttctcgcctcctcaagtaagctcgaagttatttgaattagatccgtatgcttttaatagtctaactgatttgatatcgttgtctgaaaccaaaataccaaaagagctaagaacggatgctttattcacattggaatgtatatccttgaagcatgtctggtgctcagacattatcagaaatctcggtggtaacatatcgcatggtctgttgtttcagattctccgttacattgccaagacattgagagaagcgacagacgaaatcgatgaagaatataatgtgaggttcttttacttgatatcaaatttagctgacgttaagcctttgcatgaatctcttttcgccgcgggtttaatacctactttattggaaattgtatctataagaaattgcccatataagcgtaccctcgcatctgctacccatctcctagaaacatttatagataacagtgaaactaccactgaatttatcgaaaatgatgggtttactatgctgatcacttcagtcgccaatgagattgatttcacgcttgcacatccagagacgtggcaaccgccaaaatattcagtggtttattattcaatttcttttagggagttggcatatattagaagtttattgaaactcgttctcaaattattaagcacagactcaggggatagaattagaaatttaatagattcgccgatacttgtttcattaaagaaaatcctagaaaataaacttgtattcggtttaacattaataacttacactctggatgtagttcagaaagtaataaatagtgagcctactatttatcctgttctggttgaagcaggacttattccatatgttatcgataattttccaaagttaattgggccttccgccgaattattaagtttacttccagatgtcgtttctgccatatgcttgaatccagaagggctgaagcaagttaaagaaaagggtctcataaacaatttgtttgatttcttactcgatgctgaccacgcgcgtatattaacaggtggagatcgttctacggaatatggtactgacattgatgaattagcaagacattatccagacttaaaggcaaatatcgtggaggctttgtgtaacgtcatcagaaaaatgccaagtacctttagaaatgaaagagagtttctttttacttcaccaaaagatcaaaagtacttttttcacagaaaaaatgaggaaatattgacagataaagaggaacatgaacctgcatactgggagctattagataagggaactatgctggacacatttaccagtgttttgtttggtatgtctttaggaaatggttctttttcacaggtgccacaacatctggaagcgagagattttctggcaataatatttatggaaaatcctccttatgaatactttacctccgtggcaatctcaaatgttactgaggtcctccagtatctggatgaaaaatacgaagactacgcattcatggatgttatgaaagtattgaacgatcaattggagaacctgaatgattttttgaatagtccaaatgatagaagtttctttttagaaagagatggggaaaactcggtgcgttcatgccattcaaaactttgtcgacttgccgctattttgaacattgttacgaatgtatacattgacctcactaccttatcttgtaagagaatcatgcagatctattcttattttgacaaaagaggattttctttaattaaaaacttaaagttgctattccagaaatgtgcgttggaggaaatgtacatacgccaacatatgccagattctgttattacagaaacaatgccgttgcctatagtggatgtttccggagatggaccaccacttcaaatttatatcgatgacccaaaaaagggtgatcaaaaggggaaaattaccagcgtaaaaacgagaaatactcttcaaatgcgaacaatactgtatacattacaatcaaatactgcaattctatttcgctgctttttaaggttaagccactctaggaatatggatctagagcataaagatttgacgacagaagttcatatatttgagaacgttgttgaaaatgttattgaaatgttgaaggccaccgaactcgaaggtcatctaccgtatattctcgttttattaaacttcaacacctttgtgtttactattccaaaggcttcccctaattccactgaaatattacaaacaataccggcttatattttctatcaaaaggggggctatttactttatttgcacattataagggatctctttacgagaatgacaaaaataaaagatttatcctcacttgataacataaactacatagatgagtccaacggtatcctaaccttaagctgtttaattaatgctctcaccttttacaacaaatcaatgcaaactgaaaccatggagaatgtccaaagtattggtaagtattacgtttcaatagatgacgattataatattatgaaagctttaacagttcctattaaggtaatggctctcgcaatgattttagatttggataaatcggatagcctcttcaagacacagtcccgtaatgtgccttactcagttttcaagcaacttcttagtatgctcaaaaatatattcactaatgtgaacatctataccaaggaattatatgaattgcattgggacctaatattcccaccaattaaaaaaattagcttgtttgagcaagtcggcattcccggtgatgttgcggcaaactatttaacagatactggtgatgatcttcctgcagataacagtattggcctgttttcgcctgaacaatgggaaaaatataaaaaattaatcggtgaagataaatccatctactatccacaaccaatgcaagctcagtattacaaaggatgttcctcaaaagaattagatgagctgagagatacctttttcaatgacggtttaccatctaggatcttcactgtactccctttctatcctaaacttgtaaacgcgtttgcaaaaactttgctacaaatttttacgaaatacgatgaacccactgaagtgtttgctggtagaatcttagatcgaattttagagacagatctagatgaccctgctactttatcttccttaatccatttatttggtatattcctgaacgagaaatatatttatcaaaaggcttcgcatttaatgcaaaggttcattgaatatcttgagaagtctctgaagccagaacatgttaatacgccttggttttcgaaagctctttacgtttacgaaattatactggcgaaatctgagcttccacacctcgaagagctttccaaggatgttcttctgagatatccattgctttccatggcgaaagtctttcgcataccagaccctatgaagcagaaattatttgacatactgatcagagtttctgatatttccaatttttattctgcactggcaacatcacgcatacttattttctactctagggatgagttgtatgctaacaacatagctagatcgggaatattatctagattgttgaaagtaattggaagtttccaaaaactagacaaaataaactttttagagtcatctttccttttattaaccaggagatgttttgaaacgactgaaaatgttgatgctttaatacgtgcagaaattaatagaagctttacagcaagaccgttaggtggtggggatgatgctgtacgtgagttaaccactattctagaagaaaaggcgcatgtggtcatgcgtagtccctctcaatttattgacgttctttgcgaaacagctcggttccatgaatttgatgatcaaggtgcgttggttgattactcattgaaaagatttcttggtgaaaaagataagaatacgcaagcctcaagtacagaaaaatcagatatctacgagagaacggggatcatgcatttattactgtcacaacttatggctgcttctgagaaagactggttgtctgaaccggccaactcctcggatttgcctgagaacaaaaaagcccaattggacccatcaagaaatcctgtatgtgcttacatgatttttcttttgaagcttttggtcgagttagttagcagttacaatcaatgtaaatttgagttcttaactttcagtagaagaaacacatatgcagaacgccccagaccaagaacaactgctattaactttttcctttatagattattagacaaacctgtcggaactgaccacgataagcatgaagctaaaagaagagaggttattggaatgctagcacgttccgtaattattggtttcttggctactgttcaagatgataggacgaccaagactgacgtcaagcttgctgatcctcacatgaactttattagaaaatttgccattgaagcgattataaaagccattcgcaacgccacttcctcttctaaacttttggaaagtaatcatttaaagttagatatgtggtttagaatcattacatcgatggtttatgtccaggctccatatcttcgccaactacttgattcaaataaagttgaggcagatcagtaccaattgtgcaaactggttatagacctcggtcttccgtcagttatcacggaagccatggccagtatagacttaaactatcctttttccaaaaagattttcaacgtcgctgttgaagctctaaacacaattagttcgacaaggaacaatttttctgagcacttcaaaattgaagatcatgatgaagttgaagacgaggttgacgagtctgataaggaagagatcccggatatgttcaaaaactcagcgctgggaatgtatgacgtagaggacattgaagaagacgacgatgacgacacatcattaattggagacgatgatgctatggcatttgttgatagtgataacggatttgaagtagtatttagtgacgaagatgatgatatgggagaagaagatgcagatgatgctcgttcagattcggaagaaaatgaattatcttctgaaatgcaatcaagtacagcggacggcacggatgtggactatgaggttgatgatgcagatggactaattatcaatattgaccagccctcaggagatgatgaagaaatggcagactatgatgctaacattagccattcttctcacagtgaaaatgaagatgacgcttcaatggacgtcatagaagtttacgacgacgagctaagttctggatatgatgttgatttaagcgattatgacgtagatgaatctgattgggactccgggttatccagcctatctatttctgatgaagatagtgaaagtagcgaagatgagcctattaactccaccagaatgggagattcaagaaggagatggctgatagctgaaggcgtggagctaactgacgactcgcaaggtgagagtgaagaagatgatagaggtgttttccgtggtattgaacatatattttcaaatgagaatgagcctttgtttagagttcatgacgaaatgcgtcatagaaaccatcatcgctcaatcaatcgtacccattttcactctgctatgagcgccccctctttaagcttattaaatcgtggaagaagaaaccaaagcaacctaataaatccactagggcctacaggattggaacaagtggagaacgatatttcagatcaggtgactgttgctggttcaggctctcgcccaagatcacatcatcttcacttttcggaagttctagtctcaggcagcttttttgatgaacctgtcttagatggcataattttaaagtctacggtatccagatggaaggatatattcgacatgttttacgactctaagacttacgctaactgtattattcctactgttatcaacagattatacaaggtcagtttagctttgcaaaaggacttggaaaacaaacgtgaacaagagaaattgaaaaataagaacctactattcaacgaggctaaagtagaaagccataacagttctgatgctatatcggtagaacaagacgatatacaagaaagcaatgttactcatgatgaccacgagcctgtatatgttactattcaaggttccgaggttgatataggtggtacagatattgatccagaattcatgaatgcattgcctgatgatataagagccgatgtctttgcacaacatgttagagaaagaagagcagaagctaggctaaattctgatcataacgtacactccagagaaatcgattccgattttctggaagcaattcctgaagacatcagagaaggaatattggatactgaggcagaggaacagagaatgtttggtagaattggctcttcggccgatgtgattagagcagacgacgacgttagcaacaatgacgaagaagttgaaaacggtttggatcatggaaatagtaatgatcgcaataacgccgaccctgaaaagaaaaaaccggctagaatatactttgcaccattaattgatcgtgccgggattgcctcattgatgaaatctgtgtttatttcgaaaccttatattcagcgtgaaatttatcatgagcttttctaccgtttatgttctagcaaacaaaatagaaatgatttgatgaatacatttttatttatactaagtgaaggtatcatagatcagcactctttggaaaaggtttataacattatttccagcagggcaatggggcacgcaaaaaccacgaccgttagacagttaccatcagattgtaccccgctaacagtggctaatcaaactatcgaaattttgcaaagtctaattgacgcggattctaggctaaaatacttcctgattgcagaacatgacaacctgatagtgaacaaagctaataacaaatctaggaaagaagccttacctgacaaaaaattaagatggcctttatggcatttattctcacttttagatagaaagctcattacagacgaaagcgtattgatggatttgttaacaagaatattacaagtttgtactaaaacattggctgtcctttctacaagttcaaatggtaaagaaaatttaagcaaaaagtttcatttacctagttttgatgaggatgatctcatgaaaattttatccatcattatgcttgatagttgtactacaagagtatttcaacaaacacttaatataatttacaacctctctaaattacaaggctgtatgtccattttcacgaaacatttggtatctttagctatcagcataatgagtaaattaaagagtgctctcgatgggctatcacgtgaagtaggcactatcaccaccggaatggagatcaattcagagctgttacagaaatttacccttccaagttctgatcaagctaaattattgaaaattttaactacggttgattttctttacactcacaaaagaaaagaggaagagcgcaacgttaaagaccttcaatctttatatgataagatgaacggcggaccagtgtggtcctcattgagtgagtgcttatctcaatttgaaaagagtcaagccatcaacacttcagccacaatcttacttccgttgatcgaatcacttatggttgtatgcaggcgtagtgacttaagtcaaaatagaaacactgcagtcaaatatgaagatgctaaattattggatttttccaaaacacgtgtcgaaaacttatttttcccatttacagacgcacacaagaagttgttgaatcaaatgattcgttcaaatccaaaactgatgagtggtcctttcgcattattggtcaagaatccaaaagttttggattttgacaacaaaagatatttcttcaatgccaaattgaagtctgataatcaagagcgtcctaaattacctattaccgttcgccgtgagcaggttttcttggactcttatcgagccttatttttcaagacaaacgatgaaatcaagaattctaaattagagataacattcaaaggagaaagtggtgtcgatgccggtggggtaaccagagaatggtaccaagtactatcgagacagatgttcaaccctgattatgctctttttcttcctgtaccatcggataaaactactttccatcctaatcggacatcaggtatcaaccctgagcacctttctttctttaaatttatcgggatgattatagggaaagcaattagagaccaatgctttttggattgccattttagtcgtgaagtatacaagaatattttgggtaggcctgtatcattgaaggatatggagtctcttgatccagattattataaatcattggtgtggattcttgaaaacgatatcacagatattatagaggaaactttttctgttgaaactgatgattatggtgaacataaagttatcaatttgattgaggggggcaaggatataatagttacagaggccaataaacaggattatgtgaaaaaggttgtcgaatataaacttcagacatctgttaaggaacaaatggataactttttagtgggtttctatgcccttatatccaaagatctcattacaatatttgatgagcaggaattggagttattaatcagcggtttgcctgatattgatgtcgacgactggaaaaacaatactacttatgttaattacaccgcaacctgtaaggaagtgagttatttttggagggcagttagatccttcgacgctgaagaacgtgccaagttgttgcagtttgttaccggtactagtaaagttcctctaaatgggtttaaggaactaagcggtgtcaacggtgtttgtaaattttccatccatcgtgattttggttcatcagaaagactaccatcatcacatacctgtttcaatcaactgaatttacctccttatgaatcatatgagacattgcgtggttcactattattggcaatcaatgaagggcatgaagggtttggtcttgcctga

SEQ ID NO: 2670 - DNA, 9807 bp, Artificial Sequence
  Description of Artificial Sequence: Synthetic polynucleotide
atggtgctttttactagatgtgaaaaggcaagaaaggagaaactcgccgctggttataagcccttagttgattatttgattgattgtgatactcccacatttttagaaagaattgaggcaatccaagagtgggacagatccagagatgatctttatgtttggattcccattttggacagaatggacgggttattgttaaaagtggcagagaaatataaatacaagcaagaccccaagaaggagtgtgaagtcaaattggtggaaatggaagcgcatgatgttgattattgtttgaaaatgttgaagtttactcgtcgtttacttttgaatacagaaaacaggtttgtttattcttctggagatgttttaatgtatttattgaattgtccgaattttacaataaaattagcggtcatgagaattttagccattttaggggaaaggtttgtgattgcgagagaaaaaatagttgcacataacatatttggagatcacaacctcaggaaaaaaactctcaaattggctttatctttatcttcttccgtcatggatgaagacggagagcacttttctcttgtcgatttatattttgataagaaaaaagtgcctcaaaaatggagaaagttgagatttacacattatacttctaacgactttaaaaagagcagccagcaaaaaaataacattaatgaaacccaaacttccattaagaaggtaactatgacgacccaagaattatgtgaacactctttgcagcaaatatttgataagggtatggcccttttacccgcagaaagttggtttgatttctctataaaagcttctgtggcgaaggccttcagtgatgattctggtgaaaatatagatttgagaaatataattattgaaacaaaattgaatgctattgcatttgttaacaccattttcagtcctcctcaagtaagctctaagttatttgaattagatccgtatgcttttaatagtttgactgatttgatatctttgtctgaaaccaaaataccaaaagagttaagaacggatgctttattcacattggaatgtatatccttgaagcatgtctggtgctctgacattatcagaaatctcggtggtaacatatctcatggtttattgtttcagattctccgttacattgccaagacattgagagaagcgacagacgaaatcgatgaagaatataatgtgaggttcttttacttgatatccaatttagctgacgttaagcctttgcatgaatctcttttcgccgcgggtttaatacctactttattggaaattgtatctataagaaattgcccatataagcgtaccctcgcatctgctacccatctcttggaaacatttatagataacagtgaaactaccactgaatttatcgaaaatgatgggtttactatgttgatcactagtgtcgccaatgagattgatttcacgcttgcacatccagagacgtggcaaccgccaaaatattctgtggtttattattctatttcttttagggagttggcatatattagaagtttattgaaactcgttctcaaattattaagcacagacagtggggatagaattagaaatttaatagattctccgatacttgtttctttaaagaaaatcttggaaaataaacttgtattcggtttaacattaataacttacactttagatgtagttcagaaagtaataaatagtgagcctactatttatcctgttttggttgaagcaggacttattccatatgttatcgataattttccaaagttaattgggccttccgccgaattattaagtttacttccagatgtcgtttctgccatatgcttgaatccagaagggttgaagcaagttaaagaaaagggtctcataaacaatttgtttgatttcttactcgatgctgaccacgcgcgtatattaacaggtggagatcgttctacggaatatggtactgacattgatgaattagcaagacattatccagacttaaaggcaaatatcgtggaggctttgtgtaacgtcatcagaaaaatgccaagtacctttagaaatgaaagagagtttctttttacttctccaaaagatcaaaagtacttttttcacagaaaaaatgaggaaatattgacagataaagaggaacatgaacctgcatactgggagttattagataagggaactatgttggacacatttaccagtgttttgtttggtatgtctttaggaaatggttctttttcccaggtgccacaacatttggaagcgagagattttttggcaataatatttatggaaaatcctccttatgaatactttacctccgtggcaatctctaatgttactgaggtcctccagtatttggatgaaaaatacgaagactacgcattcatggatgttatgaaagtattgaacgatcaattggagaacttgaatgattttttgaatagtccaaatgatagaagtttctttttagaaagagatggggaaaactctgtgcgttcttgccattctaaactttgtaggcttgccgctattttgaacattgttacgaatgtatacattgacctcactaccttatcttgtaagagaatcatgcagatctattcttattttgacaaaagaggattttctttaattaaaaacttaaagttgttattccagaaatgtgcgttggaggaaatgtacatacgccaacatatgccagattctgttattacagaaacaatgccgttgcctatagtggatgtttccggagatggaccaccacttcaaatttatatcgatgacccaaaaaagggtgatcaaaaggggaaaattaccagcgtaaaaacgagaaatactcttcaaatgagaacaatactttatacattacaaagcaatactgcaattttatttcgctgctttttaaggttaagccactctaggaatatggatttagagcataaagatttgacgacagaagttcatatatttgagaacgttgttgaaaatgttattgaaatgttgaaggccaccgaactcgaaggtcatttaccgtatattctcgttttattaaacttcaacacctttgtgtttactattccaaaggcttcccctaattccactgaaatattacaaacaataccggcttatattttctatcaaaaggggggctatttactttatttgcacattataagggatctctttacgagaatgacaaaaataaaagatttatcctctcttgataacataaactacatagatgagtccaacggtatcttgaccttaagctgtttaattaatgctctcaccttttacaacaaatctatgcaaactgaaaccatggagaatgtccaaagtattggtaagtattacgtttctatagatgacgattataatattatgaaagctttaacagttcctattaaggtaatggctctcgcaatgattttagatttggataaatctgatagcctcttcaagacacagtcccgtaatgtgccttactctgttttcaagcaacttcttagtatgctcaaaaatatattcactaatgtgaacatctataccaaggaattatatgaattgcattgggacttgatattcccaccaattaaaaaaattagcttgtttgagcaagtcggcattcccggtgatgttgcggcaaactatttaacagatactggtgatgatcttcctgcagataacagtattggcttattttctcctgaacaatgggaaaaatataaaaaattaatcggtgaagataaatccatctactatccacaaccaatgcaagctcagtattacaaaggatgttcctctaaagaattagatgagttaagagatacctttttcaatgacggtttaccatctaggatcttcactgtactccctttctatcctaaacttgtaaacgcgtttgcaaaaactttgttgcaaatttttacgaaatacgatgaacccactgaagtgtttgctggtagaatcttagatagaattttagagacagatttggatgaccctgctactttatcttccttaatccatttatttggtatattcttgaacgagaaatatatttatcaaaaggcttctcatttaatgcaaaggttcattgaatatcttgagaagtctttgaagccagaacatgttaatacgccttggttttccaaagctctttacgtttacgaaattatattggcgaaatctgagcttccacacctcgaagagctttccaaggatgttcttttgagatatccattgctttccatggcgaaagtctttcgcataccagaccctatgaagcagaaattatttgacatattgatcagagtttctgatatttccaatttttattctgcattggcaacaagccgcatacttattttctactctagggatgagttgtatgctaacaacatagctagatctggaatattatctagattgttgaaagtaattggaagtttccaaaaattagacaaaataaactttttagagtcttctttccttttattaaccaggagatgttttgaaacgactgaaaatgttgatgctttaatacgtgcagaaattaatagaagctttacagcaagaccgttaggtggtggggatgatgctgtacgtgagttaaccactattttggaagaaaaggcgcatgtggtcatgcgtagtccctctcaatttattgacgttctttgcgaaacagctagattccatgaatttgatgatcaaggtgcgttggttgattactctttgaaaagatttcttggtgaaaaagataagaatacgcaagcctccagtacagaaaaatctgatatctacgagagaacggggatcatgcatttattattatctcaacttatggctgcttctgagaaagactggttgtctgaaccggccaactccagtgatttgcctgagaacaaaaaagcccaattggacccatctagaaatcctgtatgtgcttacatgatttttcttttgaagcttttggtcgagttagttagcagttacaatcaatgtaaatttgagttcttaactttcagtagaagaaacacatatgcagaacgccccagaccaagaacaactgctattaactttttcctttatagattattagacaaacctgtcggaactgaccacgataagcatgaagctaaaagaagagaggttattggaatgttagcacgttccgtaattattggtttcttggctactgttcaagatgataggacgaccaagactgacgtcaagcttgctgatcctcacatgaactttattagaaaatttgccattgaagcgattataaaagccattcgcaacgccacttcctcttctaaacttttggaaagtaatcatttaaagttagatatgtggtttagaatcattacatctatggtttatgtccaggctccatatcttcgccaattacttgattctaataaagttgaggcagatcagtaccaattgtgcaaattggttatagacctcggtcttccgtctgttatcacggaagccatggccagtatagacttaaactatcctttttccaaaaagattttcaacgtcgctgttgaagctttgaacacaattagttctacaaggaacaatttttctgagcacttcaaaattgaagatcatgatgaagttgaagacgaggttgacgagtctgataaggaagagatcccggatatgttcaaaaactctgcgttgggaatgtatgacgtagaggacattgaagaagacgacgatgacgacacaagtttaattggagacgatgatgctatggcatttgttgatagtgataacggatttgaagtagtatttagtgacgaagatgatgatatgggagaagaagatgcagatgatgctcgttctgattctgaagaaaatgaattatcttctgaaatgcaaagtagtacagcggacggcacggatgtggactatgaggttgatgatgcagatggattgattatcaatattgaccagcccagtggagatgatgaagaaatggcagactatgatgctaacattagccattcttctcacagtgaaaatgaagatgacgcttccatggacgtcatagaagtttacgacgacgagttgagttctggatatgatgttgatttaagcgattatgacgtagatgaatctgattgggactccgggttatccagcttgtctatttctgatgaagatagtgaaagtagcgaagatgagcctattaactccaccagaatgggagattccagaaggagatggttgatagctgaaggcgtggagttaactgacgactctcaaggtgagagtgaagaagatgatagaggtgttttccgtggtattgaacatatattttctaatgagaatgagcctttgtttagagttcatgacgaaatgcgtcatagaaaccatcatcgcagtatcaatcgtacccattttcactctgctatgagcgccccctctttaagcttattaaatcgtggaagaagaaaccaaagcaacttgataaatccattagggcctacaggattggaacaagtggagaacgatatttctgatcaggtgactgttgctggttctggctctcgcccaagaagccatcatcttcacttttctgaagttttggtctccggcagcttttttgatgaacctgtcttagatggcataattttaaagtctacggtatccagatggaaggatatattcgacatgttttacgactctaagacttacgctaactgtattattcctactgttatcaacagattatacaaggtcagtttagctttgcaaaaggacttggaaaacaaacgtgaacaagagaaattgaaaaataagaacttattattcaacgaggctaaagtagaaagccataacagttctgatgctatatctgtagaacaagacgatatacaagaaagcaatgttactcatgatgaccacgagcctgtatatgttactattcaaggttccgaggttgatataggtggtacagatattgatccagaattcatgaatgcattgcctgatgatataagagccgatgtctttgcacaacatgttagagaaagaagagcagaagctaggttgaattctgatcataacgtacactccagagaaatcgattccgattttttggaagcaattcctgaagacatcagagaaggaatattggatactgaggcagaggaacagagaatgtttggtagaattggctcttctgccgatgtgattagagcagacgacgacgttagcaacaatgacgaagaagttgaaaacggtttggatcatggaaatagtaatgatcgcaataacgccgaccctgaaaagaaaaaaccggctagaatatactttgcaccattaattgatcgtgccgggattgcctctttgatgaaatctgtgtttatttccaaaccttatattcagcgtgaaatttatcatgagcttttctaccgtttatgttctagcaaacaaaatagaaatgatttgatgaatacatttttatttatattgagtgaaggtatcatagatcagcactctttggaaaaggtttataacattatttccagcagggcaatggggcacgcaaaaaccacgaccgttagacagttaccaagtgattgtaccccgttaacagtggctaatcaaactatcgaaattttgcaaagtttgattgacgcggattctaggttgaaatacttcttgattgcagaacatgacaacttgatagtgaacaaagctaataacaaatctaggaaagaagccttacctgacaaaaaattaagatggcctttatggcatttattctctcttttagatagaaagctcattacagacgaaagcgtattgatggatttgttaacaagaatattacaagtttgtactaaaacattggctgtcctttctacaagtagtaatggtaaagaaaatttaagcaaaaagtttcatttacctagttttgatgaggatgatctcatgaaaattttatccatcattatgcttgatagttgtactacaagagtatttcaacaaacacttaatataatttacaacctctctaaattacaaggctgtatgtccattttcacgaaacatttggtatctttagctatcagcataatgagtaaattaaagagtgctctcgatgggctttctcgtgaagtaggcactatcaccaccggaatggagatcaattctgagttattacagaaatttacccttccaagttctgatcaagctaaattattgaaaattttaactacggttgattttctttacactcacaaaagaaaagaggaagagcgcaacgttaaagaccttcaatctttatatgataagatgaacggcggaccagtgtggtcctctttgagtgagtgcttatctcaatttgaaaagagtcaagccatcaacacttctgccacaatcttacttccgttgatcgaatctcttatggttgtatgcaggcgtagtgacttaagtcaaaatagaaacactgcagtcaaatatgaagatgctaaattattggatttttccaaaacacgtgtcgaaaacttatttttcccatttacagacgcacacaagaagttgttgaatcaaatgattcgttccaatccaaaattaatgagtggtcctttcgcattattggtcaagaatccaaaagttttggattttgacaacaaaagatatttcttcaatgccaaattgaagtctgataatcaagagcgtcctaaattacctattaccgttcgccgtgagcaggttttcttggactcttatagggccttatttttcaagacaaacgatgaaatcaagaattctaaattagagataacattcaaaggagaaagtggtgtcgatgccggtggggtaaccagagaatggtaccaagtattatctagacagatgttcaaccctgattatgctctttttcttcctgtaccaagtgataaaactactttccatcctaatagaacatctggtatcaaccctgagcacctttctttctttaaatttatcgggatgattatagggaaagcaattagagaccaatgctttttggattgccattttagtcgtgaagtatacaagaatattttgggtaggcctgtatctttgaaggatatggagtctcttgatccagattattataaatctttggtgtggattcttgaaaacgatatcacagatattatagaggaaactttttctgttgaaactgatgattatggtgaacataaagttatcaatttgattgaggggggcaaggatataatagttacagaggccaataaacaggattatgtgaaaaaggttgtcgaatataaacttcagacatctgttaaggaacaaatggataactttttagtgggtttctatgcccttatatccaaagatctcattacaatatttgatgagcaggaattggagttattaatcagcggtttgcctgatattgatgtcgacgactggaaaaacaatactacttatgttaattacaccgcaacctgtaaggaagtgagttatttttggagggcagttagatccttcgacgctgaagaacgtgccaagttgttgcagtttgttaccggtactagtaaagttcctttaaatgggtttaaggaattgagcggtgtcaacggtgtttgtaaattttccatccatcgtgattttggttcttctgaaagattaccatcttctcatacctgtttcaatcaattgaatttacctccttatgaaagttatgagacattgcgtggttctttattattggcaatcaatgaagggcatgaagggtttggtcttgcctga

SEQ ID NO: 2671 - DNA, 1992 bp, Saccharomyces cerevisiae
atggatcacagaaaccttgatccgaaaacgctgaaggtcagccaattgagaagagttttggtagaaaatgatgttgcgttccctgccaacgctaggaagcctgtcttggtgaaattgtttgaggagaaagtgaggcaacgtctccaatcttcacctgaggcctcaaaggttagaactagcattcaaaaggttgtgaagtctggggcaaaaaacgcagatcgcaaaaagacattaaagagtaaaaagcttgaatcaagttctagtgagagtaaaactgtcaaagatgaaaatgttgaaactaacaagaggaaaagggaacaaattagtacggataatgaagcgaagatgcaaatacaggaagagaagtctcctaaaaagaaaagaaagaaaagatctagtaaggccaataaaccaccagagtctcctccacaatctaagtcagatgggaaagcaacttctgctgatttaacttctgaactggaaactgtagaagaacttcataagaaagattcttcggatgacaaaccaagggtaaaagagcttccaaaaccagaattgccgaatttaaaagtatcaaacgaatttttagctcaactaaataaagagttagctagtgcagctacggagaattatgatcattctataaaatccacggacttatcgtctatcagaatcgaaacagaagagcctgttggtccttcaactggagcagaaacaagaaatgaaagtgaggtgatggagaatatcaatttggaagtccaacctgaggtgaaggaagcaaaagaagaactaacaaaaatatcagaaacttttgataatcaagacgaagaggatactagtaggttatcgtcgaaaaaaaatatacgaagtccaaaaggtcgcaccaggcacttcattgccaacaaaactaaaagagggatagatattatgaaaccgtttattgcacatctcttcatttggttatggaatggtgctattttcctttcaataatatgtcctattctttttggtctttggtatcgagaacagagaattcaagtaggatattgcggtcatgaaaagcccctgaaatctcttgcaatctcagctttccctcagactgaaagggtagattcagtgttgcaagcttatcgaccaaattgtctcgaatgtcctgagcatggaatatgttcttcttttatgaatgttgagtgtgaaccaggctatgagcctaaaagttctattttagaaacgtatggtattattccttttccaaaatattgtgccaaagatgaaagtaaagaaaaggaggttgatgaactggtttggaaagtaaatgaatatcttaaaaagaagaatgcacaacatgaatgtggtgaaggagagaatctctttgagagtggtgaaacggaaaccaaattatatgatatattctctcattctagaccgtcatgggaaagtcaaagggaattcaatgatcattggaaaaatgtgcttgaaatattaaagaaaaaagatgatattatctggctgccattagattttgaaactaatggaaaaagagagaaatctaaatctaataacactaactatatttatcgttcaacttcaaaaaaatgggttacgttgcaatgtcatttagaaggggatatacaggagtatataacgaaatatggtggttctttatttatcaccctaggcgtccttttccttatcaaaaaaatacaatcgacacttgacaattacgttcaaggagagcagataattgagaaattggtaaaagaggcaattgataaattgaaagatgtaaagaagaacaaaggtgaagaaccttttctgacaacagttcaactaagagctactttattgagcgacataccaaatataaaagaacagaataatctatgggctcaaacgaaagaaaaaatcatgaaagagcaatcagagaatatagaattatatcttcttgaagaaaatggagagatcatgacatgttgggaatggaaagaatga

SEQ ID NO: 2672 - DNA, 1992 bp, Artificial Sequence
  Description of Artificial Sequence: Synthetic polynucleotide
atggatcacagaaaccttgatccgaaaacgttgaaggtcagccaattgagaagagttttggtagaaaatgatgttgcgttccctgccaacgctaggaagcctgtcttggtgaaattgtttgaggagaaagtgaggcaacgtctccaatcttctcctgaggcctccaaggttagaactagcattcaaaaggttgtgaagtctggggcaaaaaacgcagatcgcaaaaagacattaaagagtaaaaagcttgaaagtagttctagtgagagtaaaactgtcaaagatgaaaatgttgaaactaacaagaggaaaagggaacaaattagtacggataatgaagcgaagatgcaaatacaggaagagaagtctcctaaaaagaaaagaaagaaaagatctagtaaggccaataaaccaccagagtctcctccacaatctaagagtgatgggaaagcaacttctgctgatttaacttctgaattggaaactgtagaagaacttcataagaaagattcttctgatgacaaaccaagggtaaaagagcttccaaaaccagaattgccgaatttaaaagtatccaacgaatttttagctcaattgaataaagagttagctagtgcagctacggagaattatgatcattctataaaatccacggacttatcttctatcagaatcgaaacagaagagcctgttggtccttccactggagcagaaacaagaaatgaaagtgaggtgatggagaatatcaatttggaagtccaacctgaggtgaaggaagcaaaagaagaattaacaaaaatatctgaaacttttgataatcaagacgaagaggatactagtaggttatcttctaaaaaaaatataagaagtccaaaaggtcgcaccaggcacttcattgccaacaaaactaaaagagggatagatattatgaaaccgtttattgcacatctcttcatttggttatggaatggtgctattttcctttccataatatgtcctattctttttggtctttggtatagagaacagagaattcaagtaggatattgcggtcatgaaaagcccttgaaatctcttgcaatctctgctttccctcagactgaaagggtagattctgtgttgcaagcttataggccaaattgtctcgaatgtcctgagcatggaatatgttcttcttttatgaatgttgagtgtgaaccaggctatgagcctaaaagttctattttagaaacgtatggtattattccttttccaaaatattgtgccaaagatgaaagtaaagaaaaggaggttgatgaattggtttggaaagtaaatgaatatcttaaaaagaagaatgcacaacatgaatgtggtgaaggagagaatctctttgagagtggtgaaacggaaaccaaattatatgatatattctctcattctagaccgagctgggaaagtcaaagggaattcaatgatcattggaaaaatgtgcttgaaatattaaagaaaaaagatgatattatctggttaccattagattttgaaactaatggaaaaagagagaaatctaaatctaataacactaactatatttatcgttccacttctaaaaaatgggttacgttgcaatgtcatttagaaggggatatacaggagtatataacgaaatatggtggttctttatttatcaccttaggcgtccttttccttatcaaaaaaatacaaagtacacttgacaattacgttcaaggagagcagataattgagaaattggtaaaagaggcaattgataaattgaaagatgtaaagaagaacaaaggtgaagaaccttttttaacaacagttcaattgagagctactttattgagcgacataccaaatataaaagaacagaataatttatgggctcaaacgaaagaaaaaatcatgaaagagcaaagtgagaatatagaattatatcttcttgaagaaaatggagagatcatgacatgttgggaatggaaagaatga

SEQ ID NO: 2673 - DNA, 1125 bp, Saccharomyces cerevisiae
atggctctatcatggaatattcgaatcaggcgcaggtcatggtttagattcatcttaccgattatcgtgctcggtttactgtgctacggtacgtgggcttactgccataaactatgttacgagcaagtcgacaaacgacttcgtcagaaatcagtttcggttggtcttatttgtgcggtatgcttcctagacgtagtcgtgattttcatatggcttcaaatagttatcttggtcggtccaggtacccaaccgcacgtagcaccttttttgatccttcctatagcctctgaagagaagactagcaacacttctcaaaacacttcagtggaatacgatgctgtggttccgcctaagtgttatcagtctgatcctcacggatacccaatatggtgcagtgaatgtcaaagtctgaaaatggaacgaacgcatcattcttcagaactaggccactgcattcctcgctttgatcattactgcatgtggatagggactgttattggtagagacaattatagactctttgtgcagtttgctgcttatttttcaacacttttacttatcatgtgggtgtctatttgcgtttacataagaattattactcaacacaatcataattatagccccaatttaaacgcaaatataatttcaacgttagtgtttgccatccttggatggttattaaccgcaagtttgttggcatcgagtattttttacatgagtcaaaacaagacgtctttggaggctatcatagatagcaaaaggaaaaaatttggaacaaggaagatattttgttattactcggaagcaaacaagttgaggtttgtggtagagttcgatagatctgaatttcactctttctgggacaaaaagtcaatcttagctaatataaaagactttatgggttctaacatacttatgtggataattcctttaggcaagccctatacatctcgatgcaaatctgatggcaaaagcggttcaaaaacaacgctagtggaaatattgggtccctatgaagaaactcttagtgactacaccattcaggccattgaggacaagatatcaagaggagaatatctggccacattgcgggcttctggtgacgatagtgatcctgcttactaa

SEQ ID NO: 2674 - DNA, 1125 bp, Artificial Sequence
  Description of Artificial Sequence: Synthetic polynucleotide
atggctttatcttggaatattagaatcaggcgcaggagttggtttagattcatcttaccgattatcgtgctcggtttattatgctacggtacgtgggcttactgccataaattatgttacgagcaagtcgacaaaagacttcgtcagaaatctgtttctgttggtcttatttgtgcggtatgcttcttggacgtagtcgtgattttcatatggcttcaaatagttatcttggtcggtccaggtacccaaccgcacgtagcaccttttttgatccttcctatagcctctgaagagaagactagcaacacttctcaaaacacttctgtggaatacgatgctgtggttccgcctaagtgttatcagtctgatcctcacggatacccaatatggtgcagtgaatgtcaaagtttgaaaatggaaagaacgcatcattcttctgaattaggccactgcattcctcgctttgatcattactgcatgtggatagggactgttattggtagagacaattatagactctttgtgcagtttgctgcttatttttctacacttttacttatcatgtgggtgtctatttgcgtttacataagaattattactcaacacaatcataattatagccccaatttaaacgcaaatataatttctacgttagtgtttgccatccttggatggttattaaccgcaagtttgttggcaagtagtattttttacatgagtcaaaacaagacgtctttggaggctatcatagatagcaaaaggaaaaaatttggaacaaggaagatattttgttattactctgaagcaaacaagttgaggtttgtggtagagttcgatagatctgaatttcactctttctgggacaaaaagtctatcttagctaatataaaagactttatgggttctaacatacttatgtggataattcctttaggcaagccctatacatctaggtgcaaatctgatggcaaaagcggttccaaaacaacgttagtggaaatattgggtccctatgaagaaactcttagtgactacaccattcaggccattgaggacaagatatctagaggagaatatttggccacattgagagcttctggtgacgatagtgatcctgcttactga

SEQ ID NO: 2675 - DNA, 966 bp, Saccharomyces cerevisiae
atgcttatggatgagtatgaggaaaacaaggacatgtgtccgatctgtaagacagatcgatacctttctccggatgtgaaatttttggtgaatcctgaatgctatcacaggatctgtgagtcgtgtgttgatcgaatatttagtctcggtcctgcccagtgtccatataaagggtgtgacaagattcttagaaagaataagttcaagacccaaatattcgatgatgtggaagttgagaaagaagttgacatcaggaagagagtgttcaatgtgttcaacaaaactatcgatgacttcaatggtgaccttgtggaatataacaaatatttggaagaggtggaagacattatatacaaactagatcacgggatcgatgtggctaagaccgaggagaaactacgcacctacgaggaattaaacaagcaactgattatgaataacttggagagaagcagaacagagatagaaagtttcgaacagagacaaaaattcgaaaaggagatgaaattgaagaagcgactgttggaaagacaaatcgaagaggaggaaagaatgaacaaagagtggacaaagaaagaaatcgtcaaccggttgagtacgaccacccaggatatcaatgaaacaatcgaaggcgttaaaaatacggttaaattgaaaaaatcgtccgctagaaggaaattggaagaactaaatagagttctgaaaaacaatccatatttcaattcaaatgtgaacgtacagaattcgagactcaaagatgctgtaccgttcacgccgtttaacggtgatagagaagcacacccaaggtttacgttgaaaggttcagtatacaatgacccattcatcaaagatcttgagcacaggaaagaatttattgcgtctgggttcaacactaattatgcgtacgaaagggtgttgacagaggcatttatgggcttaggatgtgttatatccgaggagctttaa

SEQ ID NO: 2676 - DNA, 966 bp, Artificial Sequence
  Description of Artificial Sequence: Synthetic polynucleotide
atgcttatggatgagtatgaggaaaacaaggacatgtgtccgatctgtaagacagatagatacctttctccggatgtgaaatttttggtgaatcctgaatgctatcacaggatctgtgagagttgtgttgatagaatatttagtctcggtcctgcccagtgtccatataaagggtgtgacaagattcttagaaagaataagttcaagacccaaatattcgatgatgtggaagttgagaaagaagttgacatcaggaagagagtgttcaatgtgttcaacaaaactatcgatgacttcaatggtgaccttgtggaatataacaaatatttggaagaggtggaagacattatatacaaattggatcacgggatcgatgtggctaagaccgaggagaaattgcgcacctacgaggaattaaacaagcaattgattatgaataacttggagagaagcagaacagagatagaaagtttcgaacagagacaaaaattcgaaaaggagatgaaattgaagaagagattattggaaagacaaatcgaagaggaggaaagaatgaacaaagagtggacaaagaaagaaatcgtcaacagattgagtacgaccacccaggatatcaatgaaacaatcgaaggcgttaaaaatacggttaaattgaaaaaatcttccgctagaaggaaattggaagaattgaatagagttttgaaaaacaatccatatttcaatagtaatgtgaacgtacagaattctagactcaaagatgctgtaccgttcacgccgtttaacggtgatagagaagcacacccaaggtttacgttgaaaggttctgtatacaatgacccattcatcaaagatcttgagcacaggaaagaatttattgcgtctgggttcaacactaattatgcgtacgaaagggtgttgacagaggcatttatgggcttaggatgtgttatatccgaggagctttga

SEQ ID NO: 2677 - DNA, 111 bp, Saccharomyces cerevisiae
atgcaaccatctaccgctaccgccgctccaaaagaaaagaccagcagtgaaaagaaggacaactatattatcaaaggtgtcttctgggacccagcatgtgttattgcttag

SEQ ID NO: 2678 - DNA, 111 bp, Artificial Sequence
  Description of Artificial Sequence: Synthetic polynucleotide
atgcaaccatctaccgctaccgccgctccaaaagaaaagaccagcagtgaaaagaaggacaactatattatcaaaggtgtcttctgggacccagcatgtgttattgcttga

SEQ ID NO: 2679 - DNA, 243 bp, Saccharomyces cerevisiae
atggatagcggaaagagtgatataaataagcatgcatacaaggagacagcgaccccgctgcccgtagatccgccctcttacgaagaaacaatgaagcaagataaggaggaggtcgaagccgatgaaacgacatcttccgcacacagagacagctttatgaggcctgtttacactcaccatccgcatccaagatcccacaagggatatccgggtgcgaagacccttacatatacttcacggtag

SEQ ID NO: 2680 - DNA, 243 bp, Artificial Sequence
  Description of Artificial Sequence: Synthetic polynucleotide
atggatagcggaaagagtgatataaataagcatgcatacaaggagacagcgaccccgttgcccgtagatccgccctcttacgaagaaacaatgaagcaagataaggaggaggtcgaagccgatgaaacgacatcttccgcacacagagacagctttatgaggcctgtttacactcaccatccgcatccaagatcccacaagggatatccgggtgcgaagacccttacatatacttctcgttga

SEQ ID NO: 2681 - DNA, 444 bp, Saccharomyces cerevisiae
atgctggcacaaacattcaaaaaaccacacagagccgttctagaacaggtatctgggaccacggtcttcatcagaaataagagaacaaagagcaagagctcactgtcacctttggcacaaagggtcgtcacgcagttgagtgtgatgtctgcaagcagaaagcagcccaagttgctgaagctggcgcgtgaagacctgattaaacatcagaccattgagaagtgttggtcaatttatcagcagcaacaacgggagcgcagaaatttacagttggaattacaatataagagcattgagagatctatgaaccttctacaagaactcagccctcgtctgtttgaggctgccaatgcttccgagaagggcaagcgattcccgatggaaatgaaggtgcccactgacttccccccaaatacgttatggcattataacttccgaaaatga

SEQ ID NO: 2682 - DNA, 444 bp, Artificial Sequence
  Description of Artificial Sequence: Synthetic polynucleotide
atgttagcacaaacattcaaaaaaccacacagagccgttttggaacaggtatctgggaccacggtcttcatcagaaataagagaacaaagagcaagagcagtttatctcctttggcacaaagggtcgtcacgcagttgagtgtgatgtctgcaagcagaaagcagcccaagttgttgaagttggcgcgtgaagacttgattaaacatcagaccattgagaagtgttggtctatttatcagcagcaacaaagagagcgcagaaatttacagttggaattacaatataagagcattgagagatctatgaaccttttacaagaactcagccctcgtttgtttgaggctgccaatgcttccgagaagggcaagagattcccgatggaaatgaaggtgcccactgacttccccccaaatacgttatggcattataacttcagaaaatga

SEQ ID NO: 2683 - DNA, 1560 bp, Saccharomyces cerevisiae
atgccctctaccacgctactgtttccgcagaaacatattagggccattccaggcaagatatacgcgttcttcagagagctcgtcagcggagttattatatccaagccagatctaagtcatcattattcttgtgaaaatgcgacaaaggaggaaggcaaagatgcagcagatgaagaaaagactaccacaagtttgtttcccgaatcaaataatatagaccgttctttaaatggtggctgctctgtgatcccttgctccatggatgtcagcgatttgaacacgccaatatcgatcacactatctcctgagaatcgtatcaaatcagaagtaaatgccaagtcactgctcggatcaaggccagaacaagatacaggcgcccctatcaaaatgtctactggtgtcacaagctctccattaagtccatcaggctccaccccagaacattccaccaaggtcttgaacaacggcgaagaggagttcatttgtcactactgtgacgctactttcaggattagaggatatctaacgagacatattaagaagcacgccatcgaaaaggcgtatcactgtccattttttaacagtgccactcctcctgatcttagatgccacaattcgggtggttttagcagacgcgatacttataaaactcatttgaaggcaaggcacgtgctgtaccccaaaggtgttaaaccacaagaccgtaacaagtcgtccggccattgcgctcaatgtggtgaatacttttccaccattgaaaatttcgttgagaatcacattgagtctggggactgtaaagctttaccgcaggggtataccaagaaaaatgaaaaaagatctggaaaattaaggaagatcaagacatctaatggtcattctagattcatatccacttcgcaaagtgttgtagaacctaaagtacttttcaacaaggatgccgtagaggctatgaccatagtggctaataacagttcgggcaatgatattatatccaagtacggaaacaacaaattaatgttaaactcggaaaactttaaagtcgacatacccaagagaaagagaaaatatatcaagaaaaagcagcaacaggtatctggatcgacggtaaccacaccagaggtagctacacaaaacaatcaagaagtggcacctgatgaaatctcatccgccacaattttttcaccttttgatactcatctactcgagcccgtcccttctagttcatcggaatcttccgctgaagttatgttccatggcaagcaaatgaagaattttttgattgacataaacagcttcacaaatcaacagcagcaggcacaagataatccttcgttcctgccactcgatattgaacaatcttcatatgatttgagcgaagacgcaatgtcatatcccatcatatccacacaaagcaaccgtgattgcacgcagtatgataacacaaaaatctcacaaatcttacaatcacaactaaatccagaatatctcagcgaaaatcacatgagagagacacaacaatatttgaatttttacaatgacaactttgggtcacaattttga

SEQ ID NO: 2684 - DNA, 1560 bp, Artificial Sequence
  Description of Artificial Sequence: Synthetic polynucleotide
atgccctctaccacgttactttttccgcagaaacatattagggccattccaggcaagatatacgcgttcttcagagagctcgtcagcggagttattatatccaagccagatttgagtcatcattattcttgtgaaaatgcgacaaaggaggaaggcaaagatgcagcagatgaagaaaagactaccacaagtttgtttcccgaaagtaataatatagaccgttctttaaatggtggctgctctgtgatcccttgctccatggatgtcagcgatttgaacacgccaatatccatcacattatctcctgagaatcgtatcaaaagtgaagtaaatgccaagtctttactcggatctaggccagaacaagatacaggcgcccctatcaaaatgtctactggtgtcacaagctctccattaagtccaagtggctccaccccagaacattccaccaaggtcttgaacaacggcgaagaggagttcatttgtcactactgtgacgctactttcaggattagaggatatttgacgagacatattaagaagcacgccatcgaaaaggcgtatcactgtccattttttaacagtgccactcctcctgatcttagatgccacaattctggtggttttagcagacgcgatacttataaaactcatttgaaggcaaggcacgtgttataccccaaaggtgttaaaccacaagaccgtaacaagtcttccggccattgcgctcaatgtggtgaatacttttccaccattgaaaatttcgttgagaatcacattgagtctggggactgtaaagctttaccgcaggggtataccaagaaaaatgaaaaaagatctggaaaattaaggaagatcaagacatctaatggtcattctagattcatatccacttctcaaagtgttgtagaacctaaagtacttttcaacaaggatgccgtagaggctatgaccatagtggctaataacagttctggcaatgatattatatccaagtacggaaacaacaaattaatgttaaactctgaaaactttaaagtcgacatacccaagagaaagagaaaatatatcaagaaaaagcagcaacaggtatctggaagtacggtaaccacaccagaggtagctacacaaaacaatcaagaagtggcacctgatgaaatctcttccgccacaattttttctccttttgatactcatcttctcgagcccgtcccttctagttcttctgaatcttccgctgaagttatgttccatggcaagcaaatgaagaattttttgattgacataaacagcttcacaaatcaacagcagcaggcacaagataatccttctttcttaccactcgatattgaacaatcttcttatgatttgagcgaagacgcaatgtcttatcccatcatatccacacaaagcaaccgtgattgcacgcagtatgataacacaaaaatctctcaaatcttacaatctcaattgaatccagaatatctcagcgaaaatcacatgagagagacacaacaatatttgaatttttacaatgacaactttgggagccaattttga

SEQ ID NO: 2685 - DNA, 4308 bp, Saccharomyces cerevisiae
atggcttatgatgaagatgatggagagataaattttaatgaacttgtggggaacttactaagctcacataaccaagagggacaagaggaaggagaagtgcaaggaggagaacaggaaggagatgattttgaaaaaatatatcctaccagtgaaaatatagaaccaaagcatccagatgacagccagcatatgcataattctcctgaccagaatatcgaaataccacattttgtcgacgaagaagatgagctagtatctgtcgttgcaaatgcggttcaaaatatagacgatgagcaagccaaaccggaaaatcatctggaaaatggatcagaacatgtaacatcggatacagcggatgataatcacgaaaaagaacaacagcaagaatgggctcatatcttacagcaggaaatattaaaatcagacggagagcccttgcgggagaatacagaaaggcgtgtaagcactagtcagcaccatccctctcagcgtactgatgacgctctcgaccaagatgatgaaaatttgaggatggctatcctagagtctctacaagaattaaacacaaatgaggaggaagagaaagagccggaaaaacatgagcatgctgccccgaatgataagttgagcagcaaaaaatcttcaaagaaaaagaaaaaagataaatccaagaacagagaatcatcaaaggataaatcctcaaagaagagtaaatcttcgagccattccaaaaagcatgccaaagaccgtaataaagaaaagcaaagtaaacctactaataatgaaaatacccttgatttaagtaatatactagaaaatctgattcatgaaaatgacaatgctgcaatagacactgccaaacaaacagttgatattcaagataactcccatactgataatacaaacaacgaagatgtggaagcgcaagctttagtggaagcgacactaaaagcatttgaaaacgagctgctaagctctgcgccaaccgaggagccttcacaagaacagtcgattgggcctgtatcttctagaaaagcagttgaaccaccacgaaaaccgactgcagacgatattccattggctatgttacaggcttttaaaccgaaaaagaggcctcctcaagagaagaaaaaaacaaaaagtaagacatccaaggctgcatctacagcaaataaatcacctgcatctgaatctacctccaagaaaaagaaaaagaagaaaactgtaaaggaaagtaataaatctcaagaagcttacgaagatgatgaattttccagaatattagccgatatggttaaccaagtggttaacacttcattaaaagaaacatcaacgcatactgccacacaggataataaattagaaagcgaaagtgattttacttcccctgtacaaagtcaatatactactgaggatgcaagcacagctaatgatgactcgcttgacttgaatcaaatcatgcaaaacgcaatggctatggtttttcaaaatcaaaacgacgatgaatttgatgagaacattgttgaagactttaatcgtggtttaggcgatctgagtgtttccgatttactgccgcatgataacctttctaggatggaaaagaaatcggtgcctaaaagttcgagcaaatctgaaaagaaaacagctatatctaggagagcttccaaaaaggcatctagagatgcctcaagtgtagaattgactgaagtaccttcaaaaccgaagaaaccttccaagacagaagtatctttagaaaagaagttacgcaaaaaatacgtctctattgccaacgaggctgcatctgtggctagaaagaaaagatgggctaaaaacaaagaactaaaggagaaagagaaacttgaacgccaaactgccagagaggaaaggagacataaaaaaaaactagagaagcagaggttggctgaagaacaagaggaactgaaaaaaattgttgaacgaggtccaccttatcccccagatttaagactaactaaaagcggtaaaccaaaaaaaccatacagaagatggactccggaagagctactgaaacgatcacaggaagctgaaaaaccgaggaaggtgaaaaaggaaagaaagaaaaaggaaaagaaaatgaaggtaccttcatctgctttgaagaaaattcctctcttcaactttgtaaagggtaatgttcagccaagtgcaagacatcgtctgaatgacattgaaggttcgctatccactattggattacataaatcgcctgacggtgtccgcaggattctttcgagaccaaagagtgaagatcacgaatggcccctatcagattcatctgcatctcaaaattacgatgcacacctaaaaactgtagtgcataaagaaaaaattcctttccatcccccatggactataccgtctcaaccaccatttgcactacccgtagctagaagaaagaaaataccaaatatcaaaaagtatagaaagagaaccaataattcttttcgtgtctccaaagaaggtacggcaagtactaggaacagaattttaccggccatattactaccgataataaatacattaaaagctgctgcaaaatcgcaaacagctgctggcgccacacctgaggaggcaaggaaacggctggcaaccattattcaacatgccaagtctacagttattagggcagctttacaagcaaggaaaaacagtatgcaagccgctcattctaagggaactaccacagaactggcaacaactgcgtctcgaatgaagaatccgctgaaaatgattcctattttcaatacatctcgagtgaaacaacaattagacaaacaattaccggccagaagtgcaggaacagaaatcagcagctctgaatcccctgataaagccacgcccgatccccactctaattctacaatcgctgggcatactttaaagggcgttactacgccaattaaaatagaagacagcgatgcgaatgttcctcctgttagtatagcggtttcaactatagaaccatcacaagataaactagaacttacgaagagggcagagagcgtagaacctgtggaaaataatgttgaaacagcgaaagaaacccaaagcgtacaagaaattaaggagaatgtcggtaccaaggcttctgaggaagttactctaactgaagacaagacaaatggggatccaaaaaatgaaaagaggatattaattgaatctcctgtcgaaaaaacggataaaaagaagccaggtgagaaaattgctacagatttgaatgaagatgcgagcctgtctgataagaaagatggagatgaaaagtctacattgcattctgatgcagcccaacttacgggtaatgaaccagacagtgtaaacacgacaacaggaaagcccaaattaattgatgtttctctcaaaccgttaaatgaagcaaaaccaaaaattcccatcatatttcccttaaaaagaccgcaaattaagcctgaagttagcgttattaatttagttcaaaatttggtaaataccaaaatacccgaaataaagaatgaatccgttgatttgggaagtaatatcaccgacattctttcctctactatcactaatattctgcccgaaatcacagccactgatgttaaaaactaccagtatgaagatgaaaacgtaaaatacctgaaaaaaacaccaagacaggttttgaatttggatggactagtgcctccatcgggtagatgtattaccaaagctaaacgtgtccgccgcattaaaaagctttctgctgacgccactaccgcaccggaagccgatggaaaggcaaacagcgaatccattacttacacattcgatataccatctccagaagaggtacaaagtaagcgtagtgtagtcctaaaatttgccaaggctagattgaccgaggcggagttgagttgtctaaagaaggagattaacaatgtgaggaaacggagatggagagagatgaactccaccaagaactgggaatatgacgtaaagtctagattaaaaaagcgtgcgaacgcattttttggggaaggagaatcagaaacgaagtctaaatggatcgaagaaagatttcaagaaaaggtaagtcaagaaaagtacaaggatcgccttgaaactactgagacgcaagcaaacaacacgaagattgtgattgacgacaaggagattttgaatattcttgcggtaaacatgaataaccttaacaaagcacgctgtattgaaaaagatattcaagagtcgttcagggaggagaagttagcctctttacaaccaaagaagaagagaaagaaaagcattttacactga

SEQ ID NO: 2686 - DNA, 4308 bp, Artificial Sequence
  Description of Artificial Sequence: Synthetic polynucleotide
atggcttatgatgaagatgatggagagataaattttaatgaacttgtggggaacttattaagctctcataaccaagagggacaagaggaaggagaagtgcaaggaggagaacaggaaggagatgattttgaaaaaatatatcctaccagtgaaaatatagaaccaaagcatccagatgacagccagcatatgcataattctcctgaccagaatatcgaaataccacattttgtcgacgaagaagatgagttggtatctgtcgttgcaaatgcggttcaaaatatagacgatgagcaagccaaaccggaaaatcatttggaaaatggatctgaacatgtaacatctgatacagcggatgataatcacgaaaaagaacaacagcaagaatgggctcatatcttacagcaggaaatattaaaaagtgacggagagcccttgagagagaatacagaaaggcgtgtaagcactagtcagcaccatccctctcagcgtactgatgacgctctcgaccaagatgatgaaaatttgaggatggctatcttggagtctttacaagaattaaacacaaatgaggaggaagagaaagagccggaaaaacatgagcatgctgccccgaatgataagttgagcagcaaaaaatcttccaagaaaaagaaaaaagataaatccaagaacagagaatcttccaaggataaatcctccaagaagagtaaatcttctagccattccaaaaagcatgccaaagaccgtaataaagaaaagcaaagtaaacctactaataatgaaaatacccttgatttaagtaatatattggaaaatttaattcatgaaaatgacaatgctgcaatagacactgccaaacaaacagttgatattcaagataactcccatactgataatacaaacaacgaagatgtggaagcgcaagctttagtggaagcgacattaaaagcatttgaaaacgagttattaagctctgcgccaaccgaggagccttctcaagaacagagtattgggcctgtatcttctagaaaagcagttgaaccaccaagaaaaccgactgcagacgatattccattggctatgttacaggcttttaaaccgaaaaagaggcctcctcaagagaagaaaaaaacaaaaagtaagacatccaaggctgcatctacagcaaataaatctcctgcatctgaatctacctccaagaaaaagaaaaagaagaaaactgtaaaggaaagtaataaatctcaagaagcttacgaagatgatgaattttccagaatattagccgatatggttaaccaagtggttaacacttctttaaaagaaacaagtacgcatactgccacacaggataataaattagaaagcgaaagtgattttacttcccctgtacaaagtcaatatactactgaggatgcaagcacagctaatgatgactctcttgacttgaatcaaatcatgcaaaacgcaatggctatggtttttcaaaatcaaaacgacgatgaatttgatgagaacattgttgaagactttaatcgtggtttaggcgatttgagtgtttccgatttattaccgcatgataacctttctaggatggaaaagaaatctgtgcctaaaagtagtagcaaatctgaaaagaaaacagctatatctaggagagcttccaaaaaggcatctagagatgcctccagtgtagaattgactgaagtaccttccaaaccgaagaaaccttccaagacagaagtatctttagaaaagaagttacgcaaaaaatacgtctctattgccaacgaggctgcatctgtggctagaaagaaaagatgggctaaaaacaaagaattgaaggagaaagagaaacttgaacgccaaactgccagagaggaaaggagacataaaaaaaaattagagaagcagaggttggctgaagaacaagaggaattgaaaaaaattgttgaaagaggtccaccttatcccccagatttaagattaactaaaagcggtaaaccaaaaaaaccatacagaagatggactccggaagagttattgaaaagaagccaggaagctgaaaaaccgaggaaggtgaaaaaggaaagaaagaaaaaggaaaagaaaatgaaggtaccttcttctgctttgaagaaaattcctctcttcaactttgtaaagggtaatgttcagccaagtgcaagacatcgtttgaatgacattgaaggttctttatccactattggattacataaatctcctgacggtgtccgcaggattctttctagaccaaagagtgaagatcacgaatggcccttaagtgattcttctgcatctcaaaattacgatgcacacttgaaaactgtagtgcataaagaaaaaattcctttccatcccccatggactataccgtctcaaccaccatttgcattgcccgtagctagaagaaagaaaataccaaatatcaaaaagtatagaaagagaaccaataattcttttcgtgtctccaaagaaggtacggcaagtactaggaacagaattttaccggccatattattaccgataataaatacattaaaagctgctgcaaaatctcaaacagctgctggcgccacacctgaggaggcaaggaaaagattagcaaccattattcaacatgccaagtctacagttattagggcagctttacaagcaaggaaaaacagtatgcaagccgctcattctaagggaactaccacagaattggcaacaactgcgtctagaatgaagaatccgttaaaaatgattcctattttcaatacatctcgtgtgaaacaacaattagacaaacaattaccggccagaagtgcaggaacagaaatcagcagctctgaatcccctgataaagccacgcccgatccccactctaattctacaatcgctgggcatactttaaagggcgttactacgccaattaaaatagaagacagcgatgcgaatgttcctcctgttagtatagcggtttccactatagaaccatctcaagataaattagaacttacgaagagggcagagagcgtagaacctgtggaaaataatgttgaaacagcgaaagaaacccaaagcgtacaagaaattaaggagaatgtcggtaccaaggcttctgaggaagttactttaactgaagacaagacaaatggggatccaaaaaatgaaaagaggatattaattgaatctcctgtcgaaaaaacggataaaaagaagccaggtgagaaaattgctacagatttgaatgaagatgcgagcttgtctgataagaaagatggagatgaaaagtctacattgcattctgatgcagcccaacttacgggtaatgaaccagacagtgtaaacacgacaacaggaaagcccaaattaattgatgtttctctcaaaccgttaaatgaagcaaaaccaaaaattcccatcatatttcccttaaaaagaccgcaaattaagcctgaagttagcgttattaatttagttcaaaatttggtaaataccaaaatacccgaaataaagaatgaatccgttgatttgggaagtaatatcaccgacattctttcctctactatcactaatattttgcccgaaatcacagccactgatgttaaaaactaccagtatgaagatgaaaacgtaaaatacttgaaaaaaacaccaagacaggttttgaatttggatggattggtgcctccatctggtagatgtattaccaaagctaaacgtgtccgccgcattaaaaagctttctgctgacgccactaccgcaccggaagccgatggaaaggcaaacagcgaatccattacttacacattcgatataccatctccagaagaggtacaaagtaagcgtagtgtagtcttgaaatttgccaaggctagattgaccgaggcggagttgagttgtttgaagaaggagattaacaatgtgaggaaaagaagatggagagagatgaactccaccaagaactgggaatatgacgtaaagtctagattaaaaaagcgtgcgaacgcattttttggggaaggagaaagtgaaacgaagtctaaatggatcgaagaaagatttcaagaaaaggtaagtcaagaaaagtacaaggatcgccttgaaactactgagacgcaagcaaacaacacgaagattgtgattgacgacaaggagattttgaatattcttgcggtaaacatgaataaccttaacaaagcacgctgtattgaaaaagatattcaagagagtttcagggaggagaagttagcctctttacaaccaaagaagaagagaaagaaaagcattttacactga

SEQ ID NO: 2687 - DNA, 1239 bp, Saccharomyces cerevisiae
atgtcagaattacatgctttgcttactttcccagagaggcccatttctcaaagttactatgtaccaaaactgcagcatttcttaaaatctggtataccggctacatatactttggagcaggtcgcagccttcgagcatgaggaaaagaacaggaacggggataaggaattcagagagagcactgacgacaataaaacctcaaacacaacgccgttacacgttttagcaagatcgctacccttggatatcaaggatgaggaactgcaagtggtgatggatatgatgaatattctttttgagtatggggctggatggaattttattgactacgaggacaaaacagtgggtgatttgtttttagagagaaatcaaagtagggagagccctctttatagacggctcgtggaagctggtgtgtctgctgaattattactgagaaaactcaatggtggcgacgtcgaattcttggatacagatgaactaataggtatcgagcctgaggaaagcgttcaaacagcagttgatggtcaaaaagaagaatcagttggtagtgatgacgatgctaccgcggcaaatcaacaagtgtacttaaaaacagaactagagtacaaagacgatgcgcttatcacaaaggaaaataaggacggtgttatgatggattgggaaaccaagattatggaacttgcttccgaaaccttatttcctgatccagaggccactaattctgctacgatcttaaacattggatttggaatggggatcatcgatacattcatccaagctcgaaaaccatatcgtcactatatttgcgaagctcatccagatgttttggccaagatgaaaatggatggttggtatgaaaaggataatgtggttattttagagggaagatggcaagatacgttgaataatttattagacaaaggtgaagttttctttgatggtatttattatgatacatttagcgagcactaccaagacatattggacttatacgatgtcgtggtaggtttaattaaaccagaaggcgttttctcatttttcaacggattaggcgctgacagatcgttgtgttacgatgtatataaagaaattgttgagatcgatgttgctacatatggtatgaaatgcgattacaccagatattctcttgacgagcaattgccagattggaatgatgttaagcggtcttactttaactgtaactattattaccatccacgtatcacgtttgcttaa

SEQ ID NO: 2688 - DNA, 1239 bp, Artificial Sequence
  Description of Artificial Sequence: Synthetic polynucleotide
atgtctgaattacatgctttgcttactttcccagagaggcccatttctcaaagttactatgtaccaaaattacagcatttcttaaaatctggtataccggctacatatactttggagcaggtcgcagccttcgagcatgaggaaaagaacaggaacggggataaggaattcagagagagcactgacgacaataaaaccagtaacacaacgccgttacacgttttagcaagatccttgcccttggatatcaaggatgaggaattacaagtggtgatggatatgatgaatattctttttgagtatggggctggatggaattttattgactacgaggacaaaacagtgggtgatttgtttttagagagaaatcaaagtagggagagccctctttatagaaggctcgtggaagctggtgtgtctgctgaattattattaagaaaactcaatggtggcgacgtcgaattcttggatacagatgaattgataggtatcgagcctgaggaaagcgttcaaacagcagttgatggtcaaaaagaagaatctgttggtagtgatgacgatgctaccgcggcaaatcaacaagtgtacttaaaaacagaattagagtacaaagacgatgcgcttatcacaaaggaaaataaggacggtgttatgatggattgggaaaccaagattatggaacttgcttccgaaaccttatttcctgatccagaggccactaattctgctacgatcttaaacattggatttggaatggggatcatcgatacattcatccaagctagaaaaccatatcgtcactatatttgcgaagctcatccagatgttttggccaagatgaaaatggatggttggtatgaaaaggataatgtggttattttagagggaagatggcaagatacgttgaataatttattagacaaaggtgaagttttctttgatggtatttattatgatacatttagcgagcactaccaagacatattggacttatacgatgtcgtggtaggtttaattaaaccagaaggcgttttctcctttttcaacggattaggcgctgacagaagtttgtgttacgatgtatataaagaaattgttgagatcgatgttgctacatatggtatgaaatgcgattacaccagatattctcttgacgagcaattgccagattggaatgatgttaagagatcttactttaactgtaactattattaccatccacgtatcacgtttgcttga

SEQ ID NO: 2689 - DNA, 2697 bp, Saccharomyces cerevisiae
atgacgtctaggaaaaggtctccgcacgatttcatatttaaagaggaactgggccatggctcttactctactgtgtttaaagctctagataaaaaaagcccgaataaaatttatgccattaaagtttgttcgaagaaacacataatcaaagaagctaaggtaaaatatgtcaccattgaaaagaataccatgaatttgttggcacaaaagcatcacgcgggtataatcaaactatactatacttttcacgatgaggaaaatctttattttgttttggattttgccccaggtggagaactactttccttattgcacaaaatgggtactttcaatgatatatggacgcgtcatttcactgcacagttaattgatgcattagaatttatccattcacatggcatcattcatagagacttaaaaccggaaaacgtccttttagacagggatggtagacttatgattactgattttggggccgctgccaccatagaccctagtttaagcggagattcggccaagtttaactctgacagcaacggctcaaaagacaaccaaaattgcgcttcctttgttggtactgccgaatatgtctctccagagctgcttttatacaaccaatgcggttatggctcagatatatgggcactaggttgcatgatatatcagtttgtccaaggacaaccgccgtttagaggggagaatgagctgaagacatttgaaaaaatcgtagcattagattatccatggggacccaataaccgcatcaataatagcacatcaccaataaatccccttgtaataaacttagtacaaaaaatattggtgatagaggtcaatgagagaatctctctcgaacagataaaaagacacccatatttttcaaaagtagattggaatgataaaatcaaaatatggagaggaatctggcaatcacaaggacaatcgctgcaacaaactactttgggactcccaaatataccgcagaatatactacccaccagacaattacatgtaattgacactccagcacgaagtatacaaatcacaaaacaaaaacgtaagaaaccaacgaaaatttccaacactactagtagcatagtagtatggagaaaaaggcttggtatatcaacaggtaaggatgatttaggcaccgtaccgtccactacgcctgcagtgaccgcccctaatgataccaatgtattaacaaatacggcggcacattctactgcaaatattgccttaccgcctaattcacaatccaatcaagtcaagcgagcacaactagttgcaccaaatagaatacctcccaaagtaccggtaattaatgacaacgtgagaaataagtcaattccgcgcacaaagcctaatgtgccacctttgcaaacatcatcaataccacaaaagttgtcaacatcgtcagcatcgtcagctctatcggcgccgtcaacagagataaggaaccaggacttaacacacactttagatggaagaaactcaattgatattcatgttttaaaacaagactacgtcttcatttatggcattccatatgaacacgaagggcctgctatgtctttgaacagctacaataagatcgataatgatttaattacgtcactagttgcgcagcataaagaagaattaaaaaactcagagtcgtttttacaggtattgactttgaagaagagcggaatgttaagttacaaaaacacagttatggagggaaatgatgatcaagaaaacaaagaacaccagatggctaatatagaagatacagacttgtccatgtacgattttgaattcaatgagttgacaaggaagggttttttaatcctggaaaaatataagaatagaatatggtttatctcgctaccttcatattcaacgttatccaaaataccattcaatgccgtgaagtcttcgacaataaataacaatgaaaattgggtcgattgctttttcagagcaagacaactactagaagaaaagcaaattcttgataaaatcagtaacgtttcctttgatagtaaggcatcgagtgaaccatcatcacctccgcctatttcaagaaaagagcggcctctgagtataggaaataatgtaacaacactcagctatactgcaaaaaatggaagccagaacaatgcaccacaaaacgataatgttggagaagaaaaaccttttcgcatacctagtagtaccaaggataggcccggtgcaaattccactccttcttcaagacatcctagggttttgtcaagcaataacgctggtgaaactccgaaaaaaatgaatggaagattaccaaatagtgcaccttctaccaatacatataccaacggttcggtcccagcttttaatcataggccttctactaatgtagggaacaataagcataatattttaacttcgaagaagcagggatcatccgtattttctccttcatcttctacgaccaagcctcaaatcaaaacaacaggatatcgacagccaacaccttcacctccacttccgcaaatggaattcccaactacgagagaaaagtattctgctccttctaacatggtgatcagtagcagcagatacgaggtcttacatacccttaataacagccaaacaaactttgatagggaaattgctagtaggggtgcctcagcagcatttagaagtttacagaagagtaagaaaaaaaaataa

SEQ ID NO: 2690 - DNA, 2697 bp, Artificial Sequence
  Description of Artificial Sequence: Synthetic polynucleotide
atgacgtctaggaaaaggtctccgcacgatttcatatttaaagaggaattaggccatggctcttactctactgtgtttaaagctttagataaaaaaagcccgaataaaatttatgccattaaagtttgttccaagaaacacataatcaaagaagctaaggtaaaatatgtcaccattgaaaagaataccatgaatttgttggcacaaaagcatcacgcgggtataatcaaactttactatacttttcacgatgaggaaaatctttattttgttttggattttgccccaggtggagaattgctttccttattgcacaaaatgggtactttcaatgatatatggacgcgtcatttcactgcacagttaattgatgcattagaatttatccattctcatggcatcattcatagagacttaaaaccggaaaacgtccttttagacagggatggtagacttatgattactgattttggggccgctgccaccatagaccctagtttaagcggagattctgccaagtttaactctgacagcaacggctctaaagacaaccaaaattgcgcttcctttgttggtactgccgaatatgtctctccagagttgcttttatacaaccaatgcggttatggcagtgatatatgggcattgggttgcatgatatatcagtttgtccaaggacaaccgccgtttagaggggagaatgagttgaagacatttgaaaaaatcgtagcattagattatccatggggacccaataaccgcatcaataatagcacatctccaataaatccccttgtaataaacttagtacaaaaaatattggtgatagaggtcaatgagagaatctctctcgaacagataaaaagacacccatatttttccaaagtagattggaatgataaaatcaaaatatggagaggaatctggcaatctcaaggacaaagtttacaacaaactactttgggactcccaaatataccgcagaatatattgcccaccagacaattacatgtaattgacactccagcaagaagtatacaaatcacaaaacaaaaacgtaagaaaccaacgaaaatttccaacactactagtagcatagtagtatggagaaaaaggcttggtatatctacaggtaaggatgatttaggcaccgtaccgtccactacgcctgcagtgaccgcccctaatgataccaatgtattaacaaatacggcggcacattctactgcaaatattgccttaccgcctaattctcaatccaatcaagtcaagagagcacaattggttgcaccaaatagaatacctcccaaagtaccggtaattaatgacaacgtgagaaataagtctattccgcgcacaaagcctaatgtgccacctttgcaaacatcttctataccacaaaagttgagtacatcttctgcatcttctgctttatctgcgccgtccacagagataaggaaccaggacttaacacacactttagatggaagaaactctattgatattcatgttttaaaacaagactacgtcttcatttatggcattccatatgaacacgaagggcctgctatgtctttgaacagctacaataagatcgataatgatttaattacgtctttggttgcgcagcataaagaagaattaaaaaacagtgagtcttttttacaggtattgactttgaagaagagcggaatgttaagttacaaaaacacagttatggagggaaatgatgatcaagaaaacaaagaacaccagatggctaatatagaagatacagacttgtccatgtacgattttgaattcaatgagttgacaaggaagggttttttaatcttggaaaaatataagaatagaatatggtttatctctttgccttcttattctacgttatccaaaataccattcaatgccgtgaagtcttctacaataaataacaatgaaaattgggtcgattgctttttcagagcaagacaattattggaagaaaagcaaattcttgataaaatcagtaacgtttcctttgatagtaaggcaagtagtgaaccatcttctcctccgcctatttctagaaaagagagacctttgagtataggaaataatgtaacaacactcagctatactgcaaaaaatggaagccagaacaatgcaccacaaaacgataatgttggagaagaaaaaccttttcgcatacctagtagtaccaaggataggcccggtgcaaattccactccttcttctagacatcctagggttttgagtagcaataacgctggtgaaactccgaaaaaaatgaatggaagattaccaaatagtgcaccttctaccaatacatataccaacggttctgtcccagcttttaatcataggccttctactaatgtagggaacaataagcataatattttaacttctaagaagcagggatcttccgtattttctccttcttcttctacgaccaagcctcaaatcaaaacaacaggatataggcagccaacaccttctcctccacttccgcaaatggaattcccaactacgagagaaaagtattctgctccttctaacatggtgatcagtagcagcagatacgaggtcttacatacccttaataacagccaaacaaactttgatagggaaattgctagtaggggtgcctctgcagcatttagaagtttacagaagagtaagaaaaaaaaatga

SEQ ID NO: 2691 - DNA, 675 bp, Saccharomyces cerevisiae
atgaacaacagtgaagatccgtttcaacaagttgttaaggacaccaaggagcaattgaaccgcataaacaattacataactcgtcacaatactgctggtgatgacgatcaagaggaggaaatacaagatattttaaaggatgttgaggaaacaatagttgatttggacagaagcataatcgtaatgaaaagggatgaaaacgaagacgtgagtggtagggaagcacaagttaaaaatataaaacagcaacttgatgctctgaagttgcgttttgatcgaagaatacaggaatctactcaaacaactattcctctagaagagacggtggaaaattcaacacttaacaccagcatggctgagaacaatgatggtggtatgtccaatccgtttcaggaacaaatgttaagagaacaagatgttcatttagatggtattcacaagacaatgcaaaatttgcatattcaagctcaaacaatgggggatgaattagagaaccagggacaattgttggataatatggacgagggtatggacggtgttgtaaataagctggctagaggtcgtaggcaattggaatgggtctacgaaaaaaataaagaaaaatacgacgattgttgtataggacttcttattgtcgtcttgatagttttattagttttggcattcattgcttga

SEQ ID NO: 2692 - DNA, 675 bp, Artificial Sequence
  Description of Artificial Sequence: Synthetic polynucleotide
atgaacaacagtgaagatccgtttcaacaagttgttaaggacaccaaggagcaattgaaccgcataaacaattacataactcgtcacaatactgctggtgatgacgatcaagaggaggaaatacaagatattttaaaggatgttgaggaaacaatagttgatttggacagaagcataatcgtaatgaaaagggatgaaaacgaagacgtgagtggtagggaagcacaagttaaaaatataaaacagcaacttgatgctttgaagttgcgttttgatagaagaatacaggaatctactcaaacaactattcctttggaagagacggtggaaaattctacacttaacaccagcatggctgagaacaatgatggtggtatgtccaatccgtttcaggaacaaatgttaagagaacaagatgttcatttagatggtattcacaagacaatgcaaaatttgcatattcaagctcaaacaatgggggatgaattagagaaccagggacaattgttggataatatggacgagggtatggacggtgttgtaaataagttggctagaggtcgtaggcaattggaatgggtctacgaaaaaaataaagaaaaatacgacgattgttgtataggacttcttattgtcgtcttgatagttttattagttttggcattcattgcttga

SEQ ID NO: 2693 - DNA, 528 bp, Saccharomyces cerevisiae
atgaatgaaagtgagaatagtccccaacataatgaagttacggttcctatggtagaggatacttcaagtaatgctgatattccaatggagcaaattcaacgcgaagacaataagaactacgataaacatgacaatgaatgcttcgatatgaatggcaatcacaataataactctgataacttacaatttgacagtgtaccatcttctgcaacgaaagatttgaaaaacatcaaaagtgtcaccaaccaaaatgtaaaaatagaagaatcgagtagcacaaattcagtcattgaagagtcatctgaacctaaaatatcaaaattagaaaatgtgaaccttgccgcgacggtaggtggttcacaaactagaaaatacctgaatacaaatgtgacaccgcatttattagcgggcatgaggctcatagccgtacaacaaccagaagatccgttacgtgttttaggtgaatatctaatcgagcagagcaatatactgaagagtggagaaaaagagagtaatgctagtaaatga

SEQ ID NO: 2694 - DNA, 528 bp, Artificial Sequence
  Description of Artificial Sequence: Synthetic polynucleotide
atgaatgaaagtgagaatagtccccaacataatgaagttacggttcctatggtagaggatacttctagtaatgctgatattccaatggagcaaattcaacgcgaagacaataagaactacgataaacatgacaatgaatgcttcgatatgaatggcaatcacaataataactctgataacttacaatttgacagtgtaccatcttctgcaacgaaagatttgaaaaacatcaaaagtgtcaccaaccaaaatgtaaaaatagaagaaagtagtagcacaaattctgtcattgaagagtcttctgaacctaaaatatccaaattagaaaatgtgaaccttgccgcgacggtaggtggttctcaaactagaaaatacttgaatacaaatgtgacaccgcatttattagcgggcatgaggctcatagccgtacaacaaccagaagatccgttacgtgttttaggtgaatatttgatcgagcagagcaatatattgaagagtggagaaaaagagagtaatgctagtaaatga

SEQ ID NO: 2695 - DNA, 1509 bp, Saccharomyces cerevisiae
atgaacaacaataatgttacggaagcaacgtcaagggcacagatacggccttattatgatcccgattctttcaatgctgggtatagcgctgttttcaagcccgatgagggtgtagtagatccgcacggatacacaattgcttctaagctaaacgttatcaactcatctccaactacaaagagaatggctaatgcattgtttaaaagctccccaatgaagaaattgtcaaattcagttaacgatggattgtcactggagggaagtaatggcgaaataactggcctgaataattttgaatgggcggaattggttaacatccagaaatggcgaaaaatatttgaacaactgctggatatgtttttcagaaagtattttcaattgctcattcaacagccctttgatgtagcaagactacttatccaagtaggtgagtttaaaatcttcaaaactacagttgacacgaataaacctcaagcaccaataattttgcgggatgaagaaggagatggcgctgcgagagaaggagaagaagatgcttacgatgaggaggagatagatttctttcccatagaaaggaagatcgccgaggcaaactctactgcgcctattatggccgaagaaactgatcattcacatcatgaacctactgatatatccttgactattgcaccacagtccctacatacaattgacgtaatcaacgccctatttgatcaggagggtattcgtggtctatggaaggccaacaacacgacttttatttacaactttctttccctaagcatagatacttggttcacaggattactctcgtcttttttgggtgtccctgacccatattttatggaggtcatcaactctcctgatatttctaagtccttcattttagccttaggcgcgggagtatttaccagtattatattattacctgtggacctgataagaactagattgatagttacatcattcaaaaaaaagaagaatgtcaagacagatggaaagaatatggttactaatactagaagcttgaggcagttaatcagatgctggtcatggcgtaaaaacggagtttccattccattagatatgtggtccctaactattcttcaatctatcaataatagctttttcaacaaattgtttgatttagtcatctacaaccaattccatatcgaaaaatactctcaaaccgtcatgtacaatactatgaagtttttttctaaatcacttgaactatttatcaagttaccattggaaaacctgttacgtcgttgtcaactaaactacttgttgaacgatcagcggttatcatttaaagtagattccactgaattgatagtaaagccaaaaaaatacaatggcatatgggatgtgataagaaacaattctaatacaaatagaggccaactttggaacggttggaaagttggcgttattagtttaatttgcggatatgggttacaaatgatgaataaagttgatatcaacatggaacaagagaagttctga

SEQ ID NO: 2696 - DNA, 1509 bp, Artificial Sequence
  Description of Artificial Sequence: Synthetic polynucleotide
atgaacaacaataatgttacggaagcaacgtctagggcacagataaggccttattatgatcccgattctttcaatgctgggtatagcgctgttttcaagcccgatgagggtgtagtagatccgcacggatacacaattgcttctaagttgaacgttatcaactcttctccaactacaaagagaatggctaatgcattgtttaaaagctccccaatgaagaaattgagcaattctgttaacgatggattgtctttggagggaagtaatggcgaaataactggcttgaataattttgaatgggcggaattggttaacatccagaaatggagaaaaatatttgaacaattattagatatgtttttcagaaagtattttcaattgctcattcaacagccctttgatgtagcaagattacttatccaagtaggtgagtttaaaatcttcaaaactacagttgacacgaataaacctcaagcaccaataattttgagagatgaagaaggagatggcgctgcgagagaaggagaagaagatgcttacgatgaggaggagatagatttctttcccatagaaaggaagatcgccgaggcaaactctactgcgcctattatggccgaagaaactgatcattctcatcatgaacctactgatatatccttgactattgcaccacagtccttgcatacaattgacgtaatcaacgccttatttgatcaggagggtattcgtggtttatggaaggccaacaacacgacttttatttacaactttctttccttaagcatagatacttggttcacaggattactctcttcttttttgggtgtccctgacccatattttatggaggtcatcaactctcctgatatttctaagtccttcattttagccttaggcgcgggagtatttaccagtattatattattacctgtggacttgataagaactagattgatagttacatctttcaaaaaaaagaagaatgtcaagacagatggaaagaatatggttactaatactagaagcttgaggcagttaatcagatgctggtcctggcgtaaaaacggagtttccattccattagatatgtggtccttgactattcttcaatctatcaataatagctttttcaacaaattgtttgatttagtcatctacaaccaattccatatcgaaaaatactctcaaaccgtcatgtacaatactatgaagtttttttctaaatctcttgaattatttatcaagttaccattggaaaacttattacgtcgttgtcaattgaactacttgttgaacgatcagagattatcttttaaagtagattccactgaattgatagtaaagccaaaaaaatacaatggcatatgggatgtgataagaaacaattctaatacaaatagaggccaactttggaacggttggaaagttggcgttattagtttaatttgcggatatgggttacaaatgatgaataaagttgatatcaacatggaacaagagaagttctga

SEQ ID NO: 2697 - DNA, 411 bp, Saccharomyces cerevisiae
atggctaaatttttgaaagcaggtaaagttgctgtcgttgttcgtggtcgttacgctggtaagaaggttgtgatcgttaagccacacgatgagggttctaaatctcatccattcggtcacgctttggttgccggtattgaaaggtacccatcaaaggtcaccaagaagcacggtgccaagaaggtcgctaagagaactaaaatcaagccattcatcaaagtcgtcaactacaaccacttattgccaaccagatacaccttggatgttgaagctttcaagagcgttgtatctacagagacttttgaacaaccatcccaacgtgaagaagccaagaaggttgtaaagaaggcatttgaagaaagacatcaagctggtaaaaaccaatggttcttctccaagttgagattctaa

SEQ ID NO: 2698 - DNA, 411 bp, Artificial Sequence
  Description of Artificial Sequence: Synthetic polynucleotide
atggctaaatttttgaaagcaggtaaagttgctgtcgttgttcgtggtcgttacgctggtaagaaggttgtgatcgttaagccacacgatgagggttctaaatctcatccattcggtcacgctttggttgccggtattgaaaggtacccatctaaggtcaccaagaagcacggtgccaagaaggtcgctaagagaactaaaatcaagccattcatcaaagtcgtcaactacaaccacttattgccaaccagatacaccttggatgttgaagctttcaagagcgttgtatctacagagacttttgaacaaccatcccaacgtgaagaagccaagaaggttgtaaagaaggcatttgaagaaagacatcaagctggtaaaaaccaatggttcttctccaagttgagattctga

SEQ ID NO: 2699 - DNA, 852 bp, Saccharomyces cerevisiae
atgtctcaaagaataattcaaccaagcgcatctgaccaacaattcccaggtaaatctgatggatatgaatatactgttgggcctaagcaagcgataacaagcgaagcttcaacaacatacattccctctagaatatactcagagtctctacttttcaaaaggcaagaagcgtctttatcagcaatggctttcttgttccaggaaatgatttcacagttgcatagaacatgtaaaactgcaggcgattttgaaactaaattaagtgactatggccacaatattggaattcgtctattagaactgctgaattttagggcttctgtatctcctagttctcttcccagagcatctgctttcctttcacaaaatgaatcttcttcaaagttatcaaatgcgtcaaattccccgggcatgttggctaactccagcacagcgacttctgcatctgccaatgaacgactccaagaaaagcaaacagaatcattgtctaactacattacaaagatgaggcgccgtgatctgaaaattctcgatatactgcagtttatccacggtaccctatggtcatatctttttaatcacgtaagtgatgatttggttaaatcttcagaacgtgacaatgaatatatgatagtagataacttccccactttaacccaatttatcccaggtgagaacgtttcttgtgagtacttcgtttgcggcattatcaaaggattccttttcaatgctggatttccatgtggcgtgacagcacatcgaatgccccaaggcggacatagtcaacgaaccgtttatttgatccaatttgacaggcaagtgcttgacagggaaggtttgagatttggctga

SEQ ID NO: 2700 - DNA, 852 bp, Artificial Sequence
  Description of Artificial Sequence: Synthetic polynucleotide
atgtctcaaagaataattcaaccaagcgcatctgaccaacaattcccaggtaaatctgatggatatgaatatactgttgggcctaagcaagcgataacaagcgaagcttctacaacatacattccctctagaatatactctgagtctttacttttcaaaaggcaagaagcgtctttaagtgcaatggctttcttgttccaggaaatgatttctcagttgcatagaacatgtaaaactgcaggcgattttgaaactaaattaagtgactatggccacaatattggaattcgtttattagaattattgaattttagggcttctgtatctcctagttctcttcccagagcatctgctttcctttctcaaaatgaatcttcttccaagttatccaatgcgtctaattccccgggcatgttggctaactccagcacagcgacttctgcatctgccaatgaaaggctccaagaaaagcaaacagaatctttgtctaactacattacaaagatgaggcgccgtgatttgaaaattctcgatatattacagtttatccacggtaccttatggagttatctttttaatcacgtaagtgatgatttggttaaatcttctgaacgtgacaatgaatatatgatagtagataacttccccactttaacccaatttatcccaggtgagaacgtttcttgtgagtacttcgtttgcggcattatcaaaggattccttttcaatgctggatttccatgtggcgtgacagcacatagaatgccccaaggcggacatagtcaaagaaccgtttatttgatccaatttgacaggcaagtgcttgacagggaaggtttgagatttggctga

SEQ ID NO: 2701 - DNA, 1410 bp, Saccharomyces cerevisiae
atgcccccaagaaatacctatgaaaaaggtaatccgaaacgccaaaatagtccatattataagccaagtttcttacggcgtgaagaaactaccaatgatgaggagaagtttcagggccatggtctgaaaaccgaacttcactcagcgttaaagtcttcaaatttgaatcttatccgaagaacttatcaaactggtgaaaatccctatcttagtgatccacacgatcgaggctcatcgagcagatttaacaggcgttatgaacggggtctgaagttttaccaaaagggagaaatcagtaaaagaattgcccaagaaagaacattacaaaaacagcaggaggaggaagaattaaaaagaaagttaaaacaagaagaagacgagaaagataaaagaaaattaattgagtcaggtgatttacccaatttagagttacatgaggataagttcctattagatttgtcaaagttcaagatatactatgataataatcatggctatgaatggtgggacacggcttatttagatgaaaagggtgagttgatggaaaaatatgacatgaatggcacatcgcctgccgaagaaaagctagcagaagatattgatgaagtagacgatgatgatgatgatgagcacccatctataagatatgtagcacatcccttacctgaaaagatcaacgaggcaaaagtatcaatcaaagcatatctaacgcaacatgaaaggaaaagattaaggagaaatagaaggaaaatggcaagagaagcacgggagataaaaattaagttaggactattacctaagcctgaaccgaaagttaaactaagcaacatgatgagtgttttcgagaatgatcaaaacataacggacccaactgcctgggaaaaagtagtgaaagaccaagtggacctcaggaagagaaaacatctggaagaaaacgaaagaagacatgaagatgctattaaaagaaggaaagaagcagtcaatatgaacgttgaaaagccgacagtataccattgtaaggtgttccagttcaaaaacttacagaacccaaaaataagattcaagttgaaaatgaatagtaaagaactatcactaaagggtttatgcctccgtatacgtgatgacggaccaggaataattatagtcgtgggtaacgaaaaatcatgcaaattttatgagaatttggtgatgaagaggataaaatggaatgaagattttgagttgcacacaaacactggggatataaaaatggacatgcataataattcaatatcaaaaacttgggaaggctatttacaagattgtaaattcaaaggctggtttatgaaagtatgcaatgatcaggattctttattacgtacgctgggtcagtttgattcagagcatttttattcacctgttcaaacgtga

SEQ ID NO: 2702 - DNA, 1410 bp, Artificial Sequence
  Description of Artificial Sequence: Synthetic polynucleotide
atgcccccaagaaatacctatgaaaaaggtaatccgaaacgccaaaatagtccatattataagccaagtttcttaagacgtgaagaaactaccaatgatgaggagaagtttcagggccatggtttgaaaaccgaacttcactctgcgttaaagtcttccaatttgaatcttatcagaagaacttatcaaactggtgaaaatccctatcttagtgatccacacgatagaggctcctctagcagatttaacaggcgttatgaaagaggtttgaagttttaccaaaagggagaaatcagtaaaagaattgcccaagaaagaacattacaaaaacagcaggaggaggaagaattaaaaagaaagttaaaacaagaagaagacgagaaagataaaagaaaattaattgagtctggtgatttacccaatttagagttacatgaggataagttcttattagatttgtccaagttcaagatatactatgataataatcatggctatgaatggtgggacacggcttatttagatgaaaagggtgagttgatggaaaaatatgacatgaatggcacatctcctgccgaagaaaagttagcagaagatattgatgaagtagacgatgatgatgatgatgagcacccatctataagatatgtagcacatcccttacctgaaaagatcaacgaggcaaaagtatctatcaaagcatatttgacgcaacatgaaaggaaaagattaaggagaaatagaaggaaaatggcaagagaagcaagagagataaaaattaagttaggattattacctaagcctgaaccgaaagttaaattaagcaacatgatgagtgttttcgagaatgatcaaaacataacggacccaactgcctgggaaaaagtagtgaaagaccaagtggacctcaggaagagaaaacatttggaagaaaacgaaagaagacatgaagatgctattaaaagaaggaaagaagcagtcaatatgaacgttgaaaagccgacagtataccattgtaaggtgttccagttcaaaaacttacagaacccaaaaataagattcaagttgaaaatgaatagtaaagaattaagtttgaagggtttatgcctccgtatacgtgatgacggaccaggaataattatagtcgtgggtaacgaaaaaagttgcaaattttatgagaatttggtgatgaagaggataaaatggaatgaagattttgagttgcacacaaacactggggatataaaaatggacatgcataataattctatatccaaaacttgggaaggctatttacaagattgtaaattcaaaggctggtttatgaaagtatgcaatgatcaggattctttattacgtacgttaggtcagtttgattctgagcatttttattctcctgttcaaacgtga

SEQ ID NO: 2703 - DNA, 2631 bp, Saccharomyces cerevisiae
atggtggtacgagatcaagatgaggcgttgagaaattcttataaatatgttaagctgtatgtcaggcaggaccagctggaggatacggtggacatactcgctaagcaggacgaggacaagtccaacaatgatgacaggcgcagtctagcctcgatattggactcgagcagttccgtcaaaaagaaggggaaaggcagcaacgaaaagtacctaccatgcgtatctttcaacacagttcccagatcaagggtatcttcgcccttagatgaagagaaaagagaatttcctggcgtgcagatctctgcagattatacaatggaggaatattatgacgacgaaagtggctttacctcggacaacaatgccgactacttctccgggaatagctattcgagtaggcgagagggcagtgctagtcccggcaggtattcttctccacctcctgcctctaaaagaaacatcaaaataggtaagatgtttaagatttctgaaaatggtaaaattgtaagggaagactatcctactacacccaccgatatcaatgacgctcttgtgattagtagggcgtatgccaattggagacaactatggatcaagaagaaaaatcagatagatcatcgattagaacaaaagcgcgatttcttcaattacccaacaatactgtttcctccaaacaaaaaaaagtcgtctgagggcgctactcccacaataaaattcaatcctcccatagaagacggctttacgcctttgactaagtctcaaaagcggaaagagcgtgttttgagcgaaaaggttgggttcccgaacactcctcgaacgatattgtgccacatcagcggcaggaaacatacttgggtagcactagattgggcgctacgaactttgattcaaaatacagaccacattgttgtgttggcaaacctgccccgcctgactaagaataatttcgaagacaatgattcgatgagtgagcgaaaaagaatgctaatgatgatggatgatagcaggagtgttagctcagcaagaagatcacgatccagatcgagatcacgatccatatgtacaagaagggcactttctctggggcctgaggaatctgacaacaaattaaagcaccaaaattttatcgagtggacatctggttatacgcagaacgaaatagaacgtaaattgcaagatctttttgattatgttacactcataattccgcaagatcgttctgtcaaggtcactgtcgagatcctaattggcaagactaaaaaaacgcttcttgaggcaataaacatctatttacctgatttctttgtatctagcactttgaggtgggagagaacagacagcttagttcgttggaaatcgaactttctgacagataaactgtgtactaattttccgattccaacgtttattgtaccggcaaagagaatgttcgatttggaaatagatttgcaaaaagagtttaaagaaccggaggtaacgaaacaaaaaaatactagcggtccaaagcctgggttcagccattctaaatcagcagatgctagcattccaactatctcaaatatcaaacggaagcaagataacgattattctatagattcactatgttatgccccagaagctaatggtgctaacaatagtagccgagaggaagcatctgatgatgagcttaacgcttttaaggatgatgagaatgatgtgatgtccgtgaaatccttaacctctaacatttcggtaaaggaaaagttatgtaccatggcaaggaaacgtagaaagagtatggctcagcagttaaatgacgccgatcatgattcatcaataccaccgggacagaggcatttgaaaaaactgaatattattttggaatcttcattaaagttttcattagaaatcgatagcatcactgatagtattgaaaatggggatgtagacgaaaagagagcacactctatggagtcgggctttgaagaactgaaaagagtcatcacaggtggtgctcctccaaggcatgtggctaccccgcagaggtccatgcttgatgttttggacaatccaagttcatctagatccaaatccaagtcaagatcaagctctaagtcaaggataagagacaaatcaaaaccaagctctcctactgctaccgatataaactcaagtgcgagtgcgtcgagatcacgttctccgcaaatcaagttcgcgtcgagtgtcaagaatgtagatggtaatgctgcactgggtgctattaaatctaggcactcgctagacagcccaggggaccagcaacaacaacatcatcatcaccatcatcgtgacacagatcagttgtccgttccaggccttccccatttggcaccttcaaagtcatatagtgtgagttctggtaataaggattcatctttgaggaaagtcagtagctcatcttcgctcagaaaagtaaaatctaatgattcgaactctggtaaacgtattaaaaaaccggtcgtaacttcagcacacttgaaaccaagctcaggcggtggtggtttattctctttttttaagagtaaatcgagatccccgtcatctttcagaaaggaagatgagagtaaaaatacgcctaagcgtggcggattgtttgggttcggaaggctgtag

SEQ ID NO: 2704 - DNA, 2631 bp, Artificial Sequence
  Description of Artificial Sequence: Synthetic polynucleotide
atggtggtaagagatcaagatgaggcgttgagaaattcttataaatatgttaagctttatgtcaggcaggaccagttggaggatacggtggacatactcgctaagcaggacgaggacaagtccaacaatgatgacaggcgcagtttggcctctatattggactccagcagttccgtcaaaaagaaggggaaaggcagcaacgaaaagtacttgccatgcgtatctttcaacacagttcccagaagtagggtatcttctcccttagatgaagagaaaagagaatttcctggcgtgcagatctctgcagattatacaatggaggaatattatgacgacgaaagtggctttaccagtgacaacaatgccgactacttctccgggaatagctattctagtaggagagagggcagtgctagtcccggcaggtattcttctccacctcctgcctctaaaagaaacatcaaaataggtaagatgtttaagatttctgaaaatggtaaaattgtaagggaagactatcctactacacccaccgatatcaatgacgctcttgtgattagtagggcgtatgccaattggagacaattatggatcaagaagaaaaatcagatagatcatagattagaacaaaagcgcgatttcttcaattacccaacaatattgtttcctccaaacaaaaaaaagtcttctgagggcgctactcccacaataaaattcaatcctcccatagaagacggctttacgcctttgactaagtctcaaaagagaaaagagcgtgttttgagcgaaaaggttgggttcccgaacactcctcgcacgatattgtgccacatcagcggcaggaaacatacttgggtagcattggattgggcgcttagaactttgattcaaaatacagaccacattgttgtgttggcaaacttgccccgcttgactaagaataatttcgaagacaatgattctatgagtgagagaaaaagaatgttaatgatgatggatgatagcaggagtgttagcagcgcaagaagatctagatccagatctagatctagatccatatgtacaagaagggcactttctttagggcctgaggaatctgacaacaaattaaagcaccaaaattttatcgagtggacatctggttatacgcagaacgaaatagaacgtaaattgcaagatctttttgattatgttacactcataattccgcaagatcgttctgtcaaggtcactgtcgagatcttgattggcaagactaaaaaaacgcttcttgaggcaataaacatctatttacctgatttctttgtatctagcactttgaggtgggagagaacagacagcttagttcgttggaaaagtaactttttaacagataaattatgtactaattttccgattccaacgtttattgtaccggcaaagagaatgttcgatttggaaatagatttgcaaaaagagtttaaagaaccggaggtaacgaaacaaaaaaatactagcggtccaaagcctgggttcagccattctaaatctgcagatgctagcattccaactatctctaatatcaaaagaaagcaagataacgattattctatagattctttatgttatgccccagaagctaatggtgctaacaatagtagcagagaggaagcatctgatgatgagcttaacgcttttaaggatgatgagaatgatgtgatgtccgtgaaatccttaacctctaacattagtgtaaaggaaaagttatgtaccatggcaaggaaacgtagaaagagtatggctcagcagttaaatgacgccgatcatgattcttctataccaccgggacagaggcatttgaaaaaattgaatattattttggaatcttctttaaagttttctttagaaatcgatagcatcactgatagtattgaaaatggggatgtagacgaaaagagagcacactctatggagagtggctttgaagaattgaaaagagtcatcacaggtggtgctcctccaaggcatgtggctaccccgcagaggtccatgcttgatgttttggacaatccaagttcttctagatccaaatccaagtctagaagcagctctaagtccaggataagagacaaatctaaaccaagctctcctactgctaccgatataaacagtagtgcgagtgcgtccagatctcgttctccgcaaatcaagttcgcgtccagtgtcaagaatgtagatggtaatgctgcattgggtgctattaaatctaggcactctttggacagcccaggggaccagcaacaacaacatcatcatcaccatcatcgtgacacagatcagttgtccgttccaggccttccccatttggcaccttctaagagttatagtgtgagttctggtaataaggattcttctttgaggaaagtcagtagctcttcttctctcagaaaagtaaaatctaatgattccaactctggtaaacgtattaaaaaaccggtcgtaacttctgcacacttgaaaccaagcagtggcggtggtggtttattctctttttttaagagtaaatctagatccccgtcttctttcagaaaggaagatgagagtaaaaatacgcctaagcgtggcggattgtttgggttcggaaggttgtga

SEQ ID NO: 2705 - DNA, 675 bp, Saccharomyces cerevisiae
atgtgggattcgttaattgtaagcatcaacgatacgcacaagttggggctggaggattgtctcgccgtttttggccacgttcccattaccaaggccgtcaagcatgtcagactgacagagatcgacacgcagacgtccacgtttacgctcaagttccttcacacagaaacgggtcagaacatcgagaagattatctacttcattgacaatgacacgggcaacgatacccgcactgctaccggaatcaagcaaatcttcaacaagatgttccgcatcgctgcggagaagaggaagctgtcgctcatccagatcgacactgttgagtacccctgcactctagtagacttgttgatcctggtaggcgtggcgctaccgccattgtgctacctctatcgtcctgcactgcacgctatctttttcctggtccctaatcctgtgggctccaccttagaggcgtggctggatagtgatcttgtgctgcgactcatcattgttgccgagttcctgactcacgccctcgagacgctcattttcgtcgtccctaggctcaagtactaccgtgttcctggcgagttcgtgcccgagtggcttcttctaggtctcctcgaaggttacggtcctgcgagacgtctagatactaaggctcgcactcttggcgaagggtcagttaattag

SEQ ID NO: 2706 - DNA, 675 bp, Artificial Sequence
  Description of Artificial Sequence: Synthetic polynucleotide
atgtgggattctttaattgtaagcatcaacgatacgcacaagttggggttagaggattgtctcgccgtttttggccacgttcccattaccaaggccgtcaagcatgtcagattgacagagatcgacacgcagacgtccacgtttacgctcaagttccttcacacagaaacgggtcagaacatcgagaagattatctacttcattgacaatgacacgggcaacgatacccgcactgctaccggaatcaagcaaatcttcaacaagatgttccgcatcgctgcggagaagaggaagctttctctcatccagatcgacactgttgagtacccctgcactttggtagacttgttgatccttgtaggcgtggcgttaccgccattgtgctacctctatcgtcctgcattgcacgctatctttttcttggtccctaatcctgtgggctccaccttagaggcgtggcttgatagtgatcttgtgttgaggctcatcattgttgccgagttcttgactcacgccctcgagacgctcattttcgtcgtccctaggctcaagtactaccgtgttcctggcgagttcgtgcccgagtggcttcttttgggtctcctcgaaggttacggtcctgcgagacgtttggatactaaggctcgcactcttggcgaagggtctgttaattga

SEQ ID NO: 2707 - DNA, 1902 bp, Saccharomyces cerevisiae
atgagcagtaacaacaacacaaacacagcacctgccaatgcaaattctagccaccaccaccaccatcaccaccatcaccaccaccatcacggtcatggcggaagcaactcgacgctaaacaatcccaagtcgtccttagcggatggtgcacatatcgggaactaccaaatcgtcaaaacgctgggagaggggtcctttggtaaagttaaattggcatatcataccactacgggccaaaaagttgctctaaaaatcattaataagaaggttttggcaaagagtgatatgcagggcagaattgaaagagaaatatcttatctgagactcttaagacacccccacatcatcaaactgtatgatgttatcaaatccaaagatgaaatcattatggttatagagtacgccgggaacgaattgtttgactatattgttcagagagacaaaatgagcgagcaagaggcaagaagatttttccagcagatcatcagtgccgtcgagtactgccataggcacaaaattgtccatagagatctgaagcctgaaaacttactactagatgagcatctgaatgtaaagattgccgattttggtttgtcaaacatcatgactgatggtaatttcttaaagacttcttgtggttctcccaattatgcggctcctgaagttatcagcggtaagctgtacgcaggcccagaagtggacgtgtggtcatgtggggttatcctttatgttatgctttgtcgtcgtctaccgtttgacgatgaaagcatcccagtgcttttcaagaatatcagcaacggtgtttacaccttgcctaaatttttatctcctggagctgctgggctaatcaaaagaatgttaatcgttaatccattgaacagaataagcattcatgaaattatgcaagacgattggttcaaagttgacctgccagaatatctacttccaccagatttgaaaccacacccagaagaagagaatgaaaataatgactcaaaaaaggatggcagcagcccagataacgatgaaattgatgacaaccttgtcaatattttatcatcgaccatgggttacgaaaaagacgagatttatgagtccttagaatcatcagaagacactcctgcattcaacgaaattagggacgcgtacatgttgattaaggagaataaatctttgatcaaggatatgaaggcaaacaaaagcgtcagtgatgaactggatacctttctgtcccagtcacctccaacttttcaacaacaaagcaaatcccatcaaaagagtcaagtagatcatgaaactgccaagcaacacgcaagaaggatggcaagtgctatcactcaacaaaggacatatcaccaatcacccttcatggatcagtataaagaagaagactctacagtttccattttgcctacatctttacctcagatccacagagctaatatgttagcacaaggttcgccagctgcctctaaaatatctcctcttgtaacgaaaaaatctaaaacgagatggcattttggtatacgatctcgctcatatccattagacgttatgggtgaaatttatattgccttgaagaatttgggtgccgaatgggccaagccatctgaagaggatttatggactatcaaattaaggtggaaatatgatattggaaacaagacaaacactaatgaaaaaatacctgatttaatgaaaatggtaattcaattatttcaaattgaaaccaataattatttggtggatttcaaatttgacggctgggaaagtagttatggagatgatactactgtttctaatatttctgaagatgaaatgagtactttttcagcctacccatttttacatttaacaacaaaactaattatggaattagccgttaacagtcaaagcaattga

SEQ ID NO: 2708 - DNA, 1902 bp, Artificial Sequence
  Description of Artificial Sequence: Synthetic polynucleotide
atgagcagtaacaacaacacaaacacagcacctgccaatgcaaattctagccaccaccaccaccatcaccaccatcaccaccaccatcacggtcatggcggaagcaactccacgttgaacaatcccaagtcttccttagcggatggtgcacatatcgggaactaccaaatcgtcaaaacgttgggagaggggtcctttggtaaagttaaattggcatatcataccactacgggccaaaaagttgctttgaaaatcattaataagaaggttttggcaaagagtgatatgcagggcagaattgaaagagaaatatcttatttaagactcttaagacacccccacatcatcaaactttatgatgttatcaaatccaaagatgaaatcattatggttatagagtacgccgggaacgaattgtttgactatattgttcagagagacaaaatgagcgagcaagaggcaagaagatttttccagcagatcatcagtgccgtcgagtactgccataggcacaaaattgtccatagagatttgaagcctgaaaacttattattagatgagcatttgaatgtaaagattgccgattttggtttgtctaacatcatgactgatggtaatttcttaaagacttcttgtggttctcccaattatgcggctcctgaagttatcagcggtaagttgtacgcaggcccagaagtggacgtgtggtcttgtggggttatcctttatgttatgctttgtcgtcgtttaccgtttgacgatgaaagcatcccagtgcttttcaagaatatcagcaacggtgtttacaccttgcctaaatttttatctcctggagctgctgggttgatcaaaagaatgttaatcgttaatccattgaacagaataagcattcatgaaattatgcaagacgattggttcaaagttgacttaccagaatatttacttccaccagatttgaaaccacacccagaagaagagaatgaaaataatgactctaaaaaggatggcagcagcccagataacgatgaaattgatgacaaccttgtcaatattttatcttccaccatgggttacgaaaaagacgagatttatgagtccttagaatcttctgaagacactcctgcattcaacgaaattagggacgcgtacatgttgattaaggagaataaatctttgatcaaggatatgaaggcaaacaaaagcgtcagtgatgaattagatacctttctttcccagtctcctccaacttttcaacaacaaagcaaatcccatcaaaagagtcaagtagatcatgaaactgccaagcaacacgcaagaaggatggcaagtgctatcactcaacaaaggacatatcaccaatctcccttcatggatcagtataaagaagaagactctacagtttccattttgcctacatctttacctcagatccacagagctaatatgttagcacaaggttctccagctgcctctaaaatatctcctcttgtaacgaaaaaatctaaaacgagatggcattttggtataagatctcgctcttatccattagacgttatgggtgaaatttatattgccttgaagaatttgggtgccgaatgggccaagccatctgaagaggatttatggactatcaaattaaggtggaaatatgatattggaaacaagacaaacactaatgaaaaaatacctgatttaatgaaaatggtaattcaattatttcaaattgaaaccaataattatttggtggatttcaaatttgacggctgggaaagtagttatggagatgatactactgtttctaatatttctgaagatgaaatgagtactttttctgcctacccatttttacatttaacaacaaaattgattatggaattagccgttaacagtcaaagcaattga

SEQ ID NO: 2709 - DNA, 597 bp, Saccharomyces cerevisiae
atgaataaagaccaggcagaaaaatatcaagaacggagtctgcgacaaaaatacaacctactacatgtactgccaacactgaattccagagcgttatcgggactatactataaaaattttcataattctgtgaagcgatatcaaatcatgctgccagaacaactgaaaagtgggaaattttgctcccattgcgggtgtgtttacgttcctaattttaacgcaagtcttcagttaacgactaataccgagcaaggtgactccgacgaacttggcggcgagagtatggaaggaccaaaaaaatgtatccaggttaattgcttgaattgtgaaaagtctaaattgtttgagtggaaatctgagttcgttgttccaacatttggacaagatgttagtccgatgatcaatagtaccagcagcgggaaggtttcgtacgcggtaaagaagccccaaaagagtaaaactagtactggtaaggagagatccaagaagagaaagttgaactcacttacaaaccttttatcgaaaagaaatcaagagaaaaaaatggaaaagaagaaaagttcgtcactgtcattagaaagttttatgaaaagttga

SEQ ID NO: 2710 - DNA, 597 bp, Artificial Sequence
  Description of Artificial Sequence: Synthetic polynucleotide
atgaataaagaccaggcagaaaaatatcaagaaagaagtcttagacaaaaatacaacttattacatgtattgccaacattaaattccagagcgttatctggattatactataaaaattttcataattctgtgaagagatatcaaatcatgcttccagaacaattgaaaagtgggaaattttgctcccattgcgggtgtgtttacgttcctaattttaacgcaagtcttcagttaacgactaataccgagcaaggtgactccgacgaacttggcggcgagagtatggaaggaccaaaaaaatgtatccaggttaattgcttgaattgtgaaaagtctaaattgtttgagtggaaatctgagttcgttgttccaacatttggacaagatgttagtccgatgatcaatagtaccagcagcgggaaggtttcttacgcggtaaagaagccccaaaagagtaaaactagtactggtaaggagagatccaagaagagaaagttgaactctcttacaaaccttttatccaaaagaaatcaagagaaaaaaatggaaaagaagaaaagttcttctttatctttagaaagttttatgaaaagttga

SEQ ID NO: 2711 - DNA, 1665 bp, Saccharomyces cerevisiae
atggactcggtgacaaattttttctggaatgacacctataatgctggtactccaactagatcaactctcaaggggaagaaagtgcaaaatggcatagatggaaaaagtcaggcaaagaaagagagcatatctagtggttctagaactagtgatcctacacgtggtagtctgccatcttccagtggacagccaactagtggtggcggttttccctcgacatcaaacatccaaaagatgatggcagataccctggtagagaagataatcaaaatggcattaccaccatcttccaaaacggctgttgatacaattcaccatcgtatggttgctggtaaagaaaggcctaagctgtctgtgcagatcacgagtaggaattttatacagatgaactcgagactaggggtaccattcatgattatggatgaattaataaagatattaaactggactaacccagcgtatacagtatctatcatgttcttatacacgctcattatattgaaaccttttcaaatgctttcttcgctccctatattctatttgttattctgcgtaatggtcccgcaatacctttacattcataagccaaaccctacaagctatctagataataatcaaacaccagcacaaggcccacctttgcgaagacctgaggttcctaaaccagtccctgaactgagccaagaatttgtcttaaacctcacggatttacaaaaccatatgctgctatatgttaaattctacgattttactttactcatattacaaaagtttgcattcttcaccaacgaggctatttcgtcgttttattttattgtattgttaataatagcaacattaaattttctgtacatggataaatttatcaagctcattccaatgagacccgtactgatactgctaggttggggtttttttattgcctcgcatccgtccaatcgtgaatatttgttgactaaattgaattcggaggagacaagattaaaaactttgactataagtactaatctggaatctaagattttgcagcatttgaaactcattgaggctagggagcaccgacttgttatgatctttgagatccaaaagtatcttcctgaatacaaagaatggcgcccagttggattctctgatgacgattattctcttttctctagtttgagaatataccagaggcgtattgaggaaaattcagtgaagtcattagaagaaattgagccacctaaggattgggaatgggaagccaattctcattgggtgcttgatttggatccaaaagaatgggtagaggacgaatttattcagtatgtcgagatagattcagaaacaaaatgggtctatgacctcaatcttgatggacaaaggggctcatatagaaggcgaatgtggaccaacagttgcgtgcggaaaaaactggattctggtatttcttcaaaccttggtgaggaggaagtagttaatccattgagggaagaaacatataggcaaggcgtacatggcgtgacgaagggttcaatgagtggcggtctaactcacagtagtgatgatgaccgcgctgatgaggaaagtataaacggtactattcctaatctcaacaatatcgacgcggatgcatcttatccgtcaatcgaagagctaacagacactctcaattcaactatataa

SEQ ID NO: 2712 - DNA, 1665 bp, Artificial Sequence
  Description of Artificial Sequence: Synthetic polynucleotide
atggactctgtgacaaattttttctggaatgacacctataatgctggtactccaactagatctactctcaaggggaagaaagtgcaaaatggcatagatggaaaaagtcaggcaaagaaagagagcatatctagtggttctagaactagtgatcctacacgtggtagtttaccatcttccagtggacagccaactagtggtggcggttttccctccacaagtaacatccaaaagatgatggcagataccttggtagagaagataatcaaaatggcattaccaccatcttccaaaacggctgttgatacaattcaccatcgtatggttgctggtaaagaaaggcctaagttatctgtgcagatcacgagtaggaattttatacagatgaactctagattaggggtaccattcatgattatggatgaattaataaagatattaaactggactaacccagcgtatacagtatctatcatgttcttatacacgctcattatattgaaaccttttcaaatgctttcttctctccctatattctatttgttattctgcgtaatggtcccgcaatacctttacattcataagccaaaccctacaagctatttggataataatcaaacaccagcacaaggcccacctttgagaagacctgaggttcctaaaccagtccctgaattgagccaagaatttgtcttaaacctcacggatttacaaaaccatatgttattatatgttaaattctacgattttactttactcatattacaaaagtttgcattcttcaccaacgaggctatttcttctttttattttattgtattgttaataatagcaacattaaattttttgtacatggataaatttatcaagctcattccaatgagacccgtattaatattattgggttggggtttttttattgcctctcatccgtccaatcgtgaatatttgttgactaaattgaattctgaggagacaagattaaaaactttgactataagtactaatttggaatctaagattttgcagcatttgaaactcattgaggctagggagcaccgtcttgttatgatctttgagatccaaaagtatcttcctgaatacaaagaatggcgcccagttggattctctgatgacgattattctcttttctctagtttgagaatataccagaggcgtattgaggaaaattctgtgaagtctttagaagaaattgagccacctaaggattgggaatgggaagccaattctcattgggtgcttgatttggatccaaaagaatgggtagaggacgaatttattcagtatgtcgagatagattctgaaacaaaatgggtctatgacctcaatcttgatggacaaaggggctcctatagaaggagaatgtggaccaacagttgcgtgagaaaaaaattggattctggtatttcttccaaccttggtgaggaggaagtagttaatccattgagggaagaaacatataggcaaggcgtacatggcgtgacgaagggttctatgagtggcggtttgactcacagtagtgatgatgaccgcgctgatgaggaaagtataaacggtactattcctaatctcaacaatatcgacgcggatgcatcttatccgtctatcgaagagttgacagacactctcaattctactatatga

SEQ ID NO: 2713 - DNA, 972 bp, Saccharomyces cerevisiae
atgaataaagaagagcaagaagacccacagcaagagcaaatatcaactgttcaggaaaatgatcccaggaatttgcagcaactgggaatgctgttagtatctccagggcttgatgaagacagattgagtgagaaaatgatttcgaagatcaaaaaatccagggatatcgaaaaaaatcaaaaattgctcatatctaggctgtcgcaaaaagaggaagatcatagtggtaagcctcctaccattacgacttctccagcagagaaaaccgtaccctttaagtcgctgaatcattctttaaagaggaaaagggtacctccagcgctaaatttttccgatatacaagcatcttctcatttgcatggatctaaaagtgctccaccaaacataacaagatttccgcagcacaaaaatagccttagggtcagatatatgggtaggatggctcctacgaatcaagattatcatccttcagtggccaattcatatatgacagcaacctacccttatccatatactggactgccaccagtaccatgctacccatattcttcaactccaacacaaacgcacgcatacgaaggctattattccccgatgtatcccggccccttgtataataatggtataataccagccgactaccatgcaaagaggaagaagttggctggtagatcaccacacttggaagatttgacatcgagaaaaagaacctttgtctccaaacaccacaacggagacccaatcataagtaagactgatgaagacattgaatgctctgtcacgaaaaattcattaagtgagggcgcttcacttaacgacgatgccgatgatgacaacgacaaagaaaggatcattattggagaaatctctctgtatgatgatgttttcaaatttgaagttcgcgacgacaaaaatgactatatgaaagcatgtgaaacaatctggactgaatggcataacttgaagaaatga

SEQ ID NO: 2714 - DNA, 972 bp, Artificial Sequence
  Description of Artificial Sequence: Synthetic polynucleotide
atgaataaagaagagcaagaagacccacagcaagagcaaatatctactgttcaggaaaatgatcccaggaatttgcagcaattaggaatgcttttagtatctccagggcttgatgaagacagattgagtgagaaaatgatttccaagatcaaaaaatccagggatatcgaaaaaaatcaaaaattgctcatatctaggctttctcaaaaagaggaagatcatagtggtaagcctcctaccattacgacttctccagcagagaaaaccgtaccctttaagtctttgaatcattctttaaagaggaaaagggtacctccagcgttgaatttttccgatatacaagcatcttctcatttgcatggatctaaaagtgctccaccaaacataacaagatttccgcagcacaaaaatagccttagggtcagatatatgggtaggatggctcctacgaatcaagattatcatccttctgtggccaattcttatatgacagcaacctacccttatccatatactggattaccaccagtaccatgctacccatattcttctactccaacacaaacgcacgcatacgaaggctattattccccgatgtatcccggccccttgtataataatggtataataccagccgactaccatgcaaagaggaagaagttggctggtagatctccacacttggaagatttgacatctagaaaaagaacctttgtctccaaacaccacaacggagacccaatcataagtaagactgatgaagacattgaatgctctgtcacgaaaaattctttaagtgagggcgcttctcttaacgacgatgccgatgatgacaacgacaaagaaaggatcattattggagaaatctctttgtatgatgatgttttcaaatttgaagttcgcgacgacaaaaatgactatatgaaagcatgtgaaacaatctggactgaatggcataacttgaagaaatga

SEQ ID NO: 2715 - DNA, 1701 bp, Saccharomyces cerevisiae
atgatgactcacacattaccaagcgaacagacacgtcttgttcctggatctgactcgagctctcgtcctaaaaagagacggatctcgaagagatcaaagataatagtatccactgtggtctgtattggtttgttgctggttttagtgcaactggcatttccaagcagttttgcattacgttctgcatcacacaagaagaagaatgtcatattcttcgtgacggatgggatgggacctgcgtctttgtccatggcaagatcattcaaccagcatgttaatgatttacctatagacgacatcctgacacttgacgagcattttatcgggtcttcgagaacaaggtcctcggactcactagtcactgactcagctgcgggcgccaccgcatttgcatgtgcattaaagagctataatggggccatcggtgttgatccgcatcacagaccttgtggtacagtgctcgaggcggctaagttagcaggttatctcactgggcttgttgttacgacaagaatcacagatgccactccggcttcattcagttcacatgttgattacagatggcaggaagatcttatcgctacgcaccagttaggcgaatatcctctggggagagtagtagacttactcatgggtggcggcaggagccatttctaccctcaaggcgaaaaggcttctccatatggtcaccacggtgctagaaaagatggaagagatttaatcgatgaggctcaatctaatggctggcagtacgtgggtgaccgtaaaaattttgattctttgttgaaaagccacggtgaaaacgttactttacctttcttgggtctctttgcagataacgacattccttttgaaattgacagagatgaaaaggagtatccttcccttaaggaacaagtcaaggtggctttgggtgccttggaaaaagcttccaatgaggacaaagattctaatgggtttttcttaatggtggaaggctccagaattgatcatgctggtcaccaaaacgatccagcttcgcaggtaagggaggtgttggctttcgatgaagcattccaatacgttttggagtttgctgaaaattccgatacggagactgttttggtctctacgtcggatcatgaaacgggtggtttagtcacttcaagacaagtcactgctagctatcctcagtatgtctggtatccacaggtgctcgccaacgccacccattcaggtgagtttttgaaaagaaaactagtagattttgttcatgagcataagggcgcaagcagcaaaatagaaaatttcatcaaacatgagatcctggaaaaagatttgggtatttacgattacacggatagcgatttagaaacattaattcatttggatgacaacgcaaatgctatccaagacaaactgaatgacatggtatcatttagggcccaaattggctggaccacgcatggtcacagcgcagtcgacgtcaacatatatgcatacgccaataagaaagctacatggtcatatgtcttgaacaatttacaaggcaatcacgaaaatacggaagttggccagttcttagaaaactttttagaattgaacctgaacgaagtcactgatttgattagggacaccaaacacacatcagattttgatgctacagaaatagctagtgaagtacaacattatgacgaatactaccatgagttgaccaactga

SEQ ID NO: 2716 - DNA, 1701 bp, Artificial Sequence
  Description of Artificial Sequence: Synthetic polynucleotide
atgatgactcacacattaccaagcgaacagacacgtcttgttcctggatctgactccagctctcgtcctaaaaagagaagaatctccaagagatccaagataatagtatccactgtggtctgtattggtttgttgttggttttagtgcaattggcatttccaagcagttttgcattacgttctgcatctcacaagaagaagaatgtcatattcttcgtgacggatgggatgggacctgcgtctttgtccatggcaagatctttcaaccagcatgttaatgatttacctatagacgacatcttaacacttgacgagcattttatcgggtcttctagaacaaggtccagtgactctttggtcactgactctgctgcgggcgccaccgcatttgcatgtgcattaaagagctataatggggccatcggtgttgatccgcatcacagaccttgtggtacagtgctcgaggcggctaagttagcaggttatctcactgggcttgttgttacgacaagaatcacagatgccactccggcttctttcagttctcatgttgattacagatggcaggaagatcttatcgctacgcaccagttaggcgaatatcctttagggagagtagtagacttactcatgggtggcggcaggagccatttctaccctcaaggcgaaaaggcttctccatatggtcaccacggtgctagaaaagatggaagagatttaatcgatgaggctcaatctaatggctggcagtacgtgggtgaccgtaaaaattttgattctttgttgaaaagccacggtgaaaacgttactttacctttcttgggtctctttgcagataacgacattccttttgaaattgacagagatgaaaaggagtatccttcccttaaggaacaagtcaaggtggctttgggtgccttggaaaaagcttccaatgaggacaaagattctaatgggtttttcttaatggtggaaggctccagaattgatcatgctggtcaccaaaacgatccagcttctcaggtaagggaggtgttggctttcgatgaagcattccaatacgttttggagtttgctgaaaattccgatacggagactgttttggtctctacgtctgatcatgaaacgggtggtttagtcacttccagacaagtcactgctagctatcctcagtatgtctggtatccacaggtgctcgccaacgccacccattctggtgagtttttgaaaagaaaattagtagattttgttcatgagcataagggcgcaagcagcaaaatagaaaatttcatcaaacatgagatcttggaaaaagatttgggtatttacgattacacggatagcgatttagaaacattaattcatttggatgacaacgcaaatgctatccaagacaaattgaatgacatggtatcctttagggcccaaattggctggaccacgcatggtcacagcgcagtcgacgtcaacatatatgcatacgccaataagaaagctacatggagttatgtcttgaacaatttacaaggcaatcacgaaaatacggaagttggccagttcttagaaaactttttagaattgaacttgaacgaagtcactgatttgattagggacaccaaacacacatctgattttgatgctacagaaatagctagtgaagtacaacattatgacgaatactaccatgagttgaccaactga

SEQ ID NO: 2717 - DNA, 408 bp, Saccharomyces cerevisiae
atgtcgtacaacggaatagggctcaagtcggcaaaagggtcatctacgtcgggccacgtgcagcgatcacttgctagcaacaataggcgcagaccacagggtagtcaacagcagcggcaacaacgacaaaatgcgatcaaaaaggccagccatgacaaggcaagcaggcctcttgctgtgcagaaacagatagagactcatatggagaaacgtgagattgaagtacaagttagcgagctacgggaccgactggaggaggaagaaacgctctcggaagagcagattgacaagaaatgtgaagcgttgagggcaaaactgacgaacgagtggcaagaacagcagcggatgtcctctttgtacacccctcgtaaggcgcgtctaacggaagagcagcatcgacatgaatag

SEQ ID NO: 2718 - DNA, 408 bp, Artificial Sequence
  Description of Artificial Sequence: Synthetic polynucleotide
atgagttacaacggaatagggctcaagtctgcaaaagggagttctacgtctggccacgtgcagagatctcttgctagcaacaataggcgcagaccacagggtagtcaacagcagagacaacaaagacaaaatgcgatcaaaaaggccagccatgacaaggcaagcaggcctcttgctgtgcagaaacagatagagactcatatggagaaacgtgagattgaagtacaagttagcgagttaagagacagattggaggaggaagaaacgctctctgaagagcagattgacaagaaatgtgaagcgttgagggcaaaattaacgaacgagtggcaagaacagcagagaatgtcctctttgtacacccctcgtaaggcgcgtctcacggaagagcagcatcgtcatgaatga

SEQ ID NO: 2719 - DNA, 1329 bp, Saccharomyces cerevisiae
atggccctctttctcagtaagagactgttgagatttaccgtcattgcaggtgcggttattgttctcctcctaacattgaattccaacagtagaactcagcaatatattccgagttccatctccgctgcatttgattttacctcaggatctatatcccctgaacaacaagtcatctctgaggaaaatgatgctaaaaaattagagcaaagtgctctgaattcagaggcaagcgaagactccgaagccatggatgaagaatccaaggctctgaaagctgccgctgaaaaggcagatgccccgatcgacactaaaacaaccatggattatatcactccatcttttgctaacaaagctggtaagccaaaagcttgttacgtcactttggtgagaaacaaggagttgaaaggtttgctaagctccattaaatatgtggaaaacaaaattaacaagaaattcccatatccttgggttttcctaaacgatgaaccttttactgaagaattcaaggaagcagtcaccaaagctgtttcttccgaagttaagtttggtattttgcccaaggaacattggtcatatcctgaatggattaatcaaaccaaggctgctgaaattcgtgcagatgctgccaccaaatacatatacggtggctccgaatcttatagacacatgtgtcgttaccaatctgggtttttctggagacatgaattattagaagagtacgattggtactggcgtgtggaaccagacatcaagttatactgtgatattaattacgacgtttttaagtggatgcaagaaaacgaaaaagtttacggctttaccgtttctattcatgaatatgaagtgacgatcccaacactatggcaaacgtccatggatttcatcaaaaagaaccccgaatacttagatgaaaacaacctgatgagttttctttcgaacgataatggtaaaacatacaatctgtgccatttctggtcaaactttgaaattgcaaacttgaatttgtggaggtcaccagcctacagagagtattttgacactttggatcatcaaggtggatttttctacgaaagatggggcgatgctcccgttcattctattgctgctgctttgtttttgccaaaggataaaatccattatttttcagacattggttaccatcatccaccttatgataactgcccattggacaaggaggtctataacagtaacaactgtgaatgtgaccaaggtaatgatttcactttccaaggttactcttgtggtaaggaatattatgatgctcaagggttggtaaagccaaaaaactggaaaaaattccgtgagtag

SEQ ID NO: 2720 - DNA, 1329 bp, Artificial Sequence
  Description of Artificial Sequence: Synthetic polynucleotide
atggccctctttctcagtaagagattattgagatttaccgtcattgcaggtgcggttattgttctcctccttacattgaattccaacagtagaactcagcaatatattccgagttccatctccgctgcatttgattttacctctggatctatatcccctgaacaacaagtcatctctgaggaaaatgatgctaaaaaattagagcaaagtgctttgaattctgaggcaagcgaagactccgaagccatggatgaagaatccaaggctttgaaagctgccgctgaaaaggcagatgccccgatcgacactaaaacaaccatggattatatcactccatcttttgctaacaaagctggtaagccaaaagcttgttacgtcactttggtgagaaacaaggagttgaaaggtttgttgagctccattaaatatgtggaaaacaaaattaacaagaaattcccatatccttgggttttcttgaacgatgaaccttttactgaagaattcaaggaagcagtcaccaaagctgtttcttccgaagttaagtttggtattttgcccaaggaacattggagttatcctgaatggattaatcaaaccaaggctgctgaaattcgtgcagatgctgccaccaaatacatatacggtggctccgaatcttatagacacatgtgtcgttaccaatctgggtttttctggagacatgaattattagaagagtacgattggtactggcgtgtggaaccagacatcaagttatactgtgatattaattacgacgtttttaagtggatgcaagaaaacgaaaaagtttacggctttaccgtttctattcatgaatatgaagtgacgatcccaacattatggcaaacgtccatggatttcatcaaaaagaaccccgaatacttagatgaaaacaacttgatgagttttctttccaacgataatggtaaaacatacaatttatgccatttctggagcaactttgaaattgcaaacttgaatttgtggaggtctccagcctacagagagtattttgacactttggatcatcaaggtggatttttctacgaaagatggggcgatgctcccgttcattctattgctgctgctttgtttttgccaaaggataaaatccattatttttctgacattggttaccatcatccaccttatgataactgcccattggacaaggaggtctataacagtaacaactgtgaatgtgaccaaggtaatgatttcactttccaaggttactcttgtggtaaggaatattatgatgctcaagggttggtaaagccaaaaaactggaaaaaattccgtgagtga

SEQ ID NO: 2721 - DNA, 1926 bp, Saccharomyces cerevisiae
atggatgttctcaaagaggtgttgtcactagaccaagataaatttgaccagctgaaggaaacgagccgagataaaacaaatgaaacggatgatccttttgaaaactatttgaaggattgtaaatttaaagcgccttcaaacaaagatcagtcaccatttgctaaacttaaatcattacaggaaactcattctaacaatgaagcggctattaatataattattcctcaattgattgattacttaaccgaattcactaataggttatcaaattacacacaagatttagacttcattaaaaaaaagtccaatgaattacagtcattgctcgaatacaactccactaaactggcacatatctctcctatggttaatgatttgatgattcctcctgaactcattgatgacatcattaaagggaagatcaatgaaagctggcaggataatataacattcatagcagataaagaagaaatttataacaagtataggtccaataatctcgatcaagacaacaaggacgcagaaaattcagcaatgctagcaccaaaggattttgataagttatgtcaactcctggacatcctaaaaaatgttattctagaaaggtcgaaaagacttattatttccaaaatcaaaactttgaggagtcataacccagtaccatcgcaaaggatacaaaacaaattattaaaagttcaaaaaattttccccttcataagagataataatctctccttagcccttgagttaagacaggcatattgttacacaatgaaatggtattatagagaatacttttctagatatatcaggtcattgactattttgcaatttcaacaaatcgactcgcaatttgcattgggtaatggcctttctacaacttcagtgagtgggtttaacaattcaccatcattgtttttctcaaattatctaactacatccgcttcaaatgctttctataataaactccctgtaacagatgagaaaattgataaatactttcagataaagaaaagattgaacattttaacacaagaagacaatacggtaatggtatcccaaattgcagaaaataacacaacgaaaaactacattgaaattggatttaaaaatttaaaccttgcaattttagataactgtacggtggagtaccattttttaaaagatttcttcgctatgaatggcgataattttgaggaaattaatggtttattggaacaaatatttcaaccaacttttgatgaagccacaacatacactcaacaactgatccaatataattatgacatttttggtgtattaataagtattcgtgtggccaatcaattacaatttgaatcagaaaggagaggaataccgtctatgtttgatagtttcttgaatggtcaattaattcaattatggcctcgatttcagcaattggtcgattttcaatgcgagagcttacgaaaagcggcaataactacaaatgtggcaaaatatgccggcaactcaagcacatccaatagtagccctttgacctcacctcatgagttaactgtacagttcggtaaatttttatcaagcttcttgacgttggcaataacacataagcagtccatagacgaaagatctgaacccttatacaattccatcattagattaagaaatgatttcgaaacagtcatgacaaagtgcagtaaaaagacgaaatcaccagaaagatttctggctacaaattacatgtatttatacaataacctacagcaattgcatctacatttaaatataaatgactcggatgcacaaaactacaattttgattctgctgaaaatgttggtacgaaagttgcgaatgacgacgataatgattcaagcgtaccactaataatcagagagaccgaaaatcatttcaaaactttagttgaagctttcaccagaaattga

SEQ ID NO: 2722 - DNA, 1926 bp, Artificial Sequence
  Description of Artificial Sequence: Synthetic polynucleotide
atggatgttctcaaagaggtgttgtccttggaccaagataaatttgaccagttgaaggaaacgagcagagataaaacaaatgaaacggatgatccttttgaaaactatttgaaggattgtaaatttaaagcgccttccaacaaagatcagtctccatttgctaaacttaaatctttacaggaaactcattctaacaatgaagcggctattaatataattattcctcaattgattgattacttaaccgaattcactaataggttatccaattacacacaagatttagacttcattaaaaaaaagtccaatgaattacagtctttgctcgaatacaactccactaaattggcacatatctctcctatggttaatgatttgatgattcctcctgaactcattgatgacatcattaaagggaagatcaatgaaagctggcaggataatataacattcatagcagataaagaagaaatttataacaagtataggtccaataatctcgatcaagacaacaaggacgcagaaaattctgcaatgttagcaccaaaggattttgataagttatgtcaactcttggacatcttgaaaaatgttattttggaaaggtccaaaagacttattatttccaaaatcaaaactttgaggagtcataacccagtaccatctcaaaggatacaaaacaaattattaaaagttcaaaaaattttccccttcataagagataataatctctccttagcccttgagttaagacaggcatattgttacacaatgaaatggtattatagagaatacttttctagatatatcaggtctttgactattttgcaatttcaacaaatcgactctcaatttgcattgggtaatggcctttctacaacttctgtgagtgggtttaacaattctccatctttgtttttcagtaattatttgactacatccgcttctaatgctttctataataaactccctgtaacagatgagaaaattgataaatactttcagataaagaaaagattgaacattttaacacaagaagacaatacggtaatggtatcccaaattgcagaaaataacacaacgaaaaactacattgaaattggatttaaaaatttaaaccttgcaattttagataactgtacggtggagtaccattttttaaaagatttcttcgctatgaatggcgataattttgaggaaattaatggtttattggaacaaatatttcaaccaacttttgatgaagccacaacatacactcaacaattgatccaatataattatgacatttttggtgtattaataagtattcgtgtggccaatcaattacaatttgaaagtgaaaggagaggaataccgtctatgtttgatagtttcttgaatggtcaattaattcaattatggcctagatttcagcaattggtcgattttcaatgcgagagcttaagaaaagcggcaataactacaaatgtggcaaaatatgccggcaactccagcacatccaatagtagccctttgacctctcctcatgagttaactgtacagttcggtaaatttttatccagcttcttgacgttggcaataacacataagcagtccatagacgaaagatctgaacccttatacaattccatcattagattaagaaatgatttcgaaacagtcatgacaaagtgcagtaaaaagacgaaatctccagaaagatttttggctacaaattacatgtatttatacaataacttacagcaattgcatttgcatttaaatataaatgacagtgatgcacaaaactacaattttgattctgctgaaaatgttggtacgaaagttgcgaatgacgacgataatgattctagcgtaccattgataatcagagagaccgaaaatcatttcaaaactttagttgaagctttcaccagaaattga

SEQ ID NO: 2723 - DNA, 2388 bp, Saccharomyces cerevisiae
atgagtgatgaaggtgctgataaaagtctagatactaacacagaatttattatacaaacacgatctaggaggtctaatgccggtaataaattacaaaaactattggagcaggagctaagagatatagaatctaccaaaagacaaatttcttcctataagaatggtaatgatgatgaagaagatgaaatagggctgttgtttcaggaagatgaagatgatgaagatttcgaaatgatggcaaaagatgacgatgatgaaggggaagaaaaagaagatgagactcaaagtataaggaaagagccctctcaggcttcaagtgagcaagcagccgatgacttaatgttcagcagtagcgaatctgaggactccagcaacgagaatgatgaagatgcagaggaaaaggaaatacgaagacaagaactactttcaagaaagaaaagaaacaagagattacagaagggtcccgttgtaatcaaaaaacaaaaacctaagcctaagtcaggagaagctataccaagatcgcaccatacccatgaacaattaaacgcagagacgttactattaaatacaaggagaacttctaaaagatcatcggtaatggaaaacacgatgaaagtttatgagaaattgtctaaagctgaaaaaaagagaaaaattatacaagaaagaataaggaaacacaaggagcaggagtctcagcatatgctgacacaagaagagaggctacggattgccaaggagactgagaagctgaatattttgtcactggataagttcaaggaacaagaagtttggaaaaaggagaatcgtctagctttgcagaaaagacaaaagcagaaattccagccaaatgagactatactgcaatttttatctactgcttggctaatgacgccagcgatggagttagaagatcgtaaatattggcaggaacaattgaataaacgtgataagaagaagaaaaaatatccgaggaagccaaagaagaatttaaatctcggaaaacaggacgcatcagatgataaaaagcgggagagtgaagaatcgataaagaacgatggcgacgtgaattctttgggtgagaattcttcatctgtacacaaccagaaaaggattgaggaaacttctactaacgatacagttgaaggagaatcgagtccagatgcagcggtgagtagagtaaattcagacgaattaaagccaacagcattacctgatgttacattggacgcaattgcaaacaagcagagtaccgttgatgaagctcccaacagccaaccacaaaagaatataataactaatgagcaaaaaattaccaatgtaggcgaaccgatacaaaatttacataatgaagaaattaaagatgaaatggtaagtgctctcgagagcagggaaaatacttttgaaaactcatcacctgctgcccaagtggtctcacaaagggataattctgcaacacctacaccatcaaactccactggcactgaagatactatattgatctctccggatacggatataaaaggagagcctgaaccttgtctgaaaaccgaaggcatcgagaacttatctcataatgtaccacaagagaccaaaagcaatactgatgtttctttcttgaaacaagtaacgtttaccgaccatccgcaagtggccataatcgatactgaagagtcaccctcaaaaaaagatacagctaatgttgatgaatcttccgcggaaaactctttatcaacacagacctacgaagggcctgagcaattaacctcaaggaactttgttacactttatgattttcctaatgctcctccaaatctaaaagattttaacacaaacttatttggtgatcgatggtcatacacaaatgggttatccgccactcagcgtccacaagatatgaaaactgttttccactccattttaccatcacctcctcagtcttcagtaccgtctcctaccgtagatatatcacttgatctgtcagctctggcaaatttcccatcttttggggaatacgataagaaaatagtccatcaaatcaacacagagataaataaggatttggaaatcaaaattaaaacacagcctccaacgggtgtcttcttagccaatggtataagaaaaaaatgtttaatcacaaataaagaatgtcagtactttgatccaaggactggtgtgccttattctgatgtggaagcttataaaattattcagcggattcaagatcctatttctaaggaggagggaaggtcagatatcaagcgtgatgaaacgacaaatgaggatagtgacgatcaagtgagattcaagtggtttgggttcaaaaacggcggtatttaccttgatttaagtcaaagacctgcaaaaggtgttcctgaaggattttaa

SEQ ID NO: 2724 - DNA, 2388 bp, Artificial Sequence
  Description of Artificial Sequence: Synthetic polynucleotide
atgagtgatgaaggtgctgataaaagtttggatactaacacagaatttattatacaaacaagatctaggaggtctaatgccggtaataaattacaaaaacttttggagcaggagttaagagatatagaatctaccaaaagacaaatttcttcctataagaatggtaatgatgatgaagaagatgaaatagggttattgtttcaggaagatgaagatgatgaagatttcgaaatgatggcaaaagatgacgatgatgaaggggaagaaaaagaagatgagactcaaagtataaggaaagagccctctcaggcttccagtgagcaagcagccgatgacttaatgttcagcagtagcgaatctgaggactccagcaacgagaatgatgaagatgcagaggaaaaggaaataagaagacaagaattgctttctagaaagaaaagaaacaagagattacagaagggtcccgttgtaatcaaaaaacaaaaacctaagcctaagagtggagaagctataccaagaagtcaccatacccatgaacaattaaacgcagagacgttattattaaatacaaggagaacttctaaaagatcttctgtaatggaaaacacgatgaaagtttatgagaaattgtctaaagctgaaaaaaagagaaaaattatacaagaaagaataaggaaacacaaggagcaggagtctcagcatatgttaacacaagaagagaggttaagaattgccaaggagactgagaagttgaatattttgtctttagataagttcaaggaacaagaagtttggaaaaaggagaatcgtttggctttgcagaaaagacaaaagcagaaattccagccaaatgagactatattgcaatttttatctactgcttggttaatgacgccagcgatggagttagaagatcgtaaatattggcaggaacaattgaataaacgtgataagaagaagaaaaaatatccgaggaagccaaagaagaatttaaatctcggaaaacaggacgcatctgatgataaaaagagagagagtgaagaaagtataaagaacgatggcgacgtgaattctttgggtgagaattcttcttctgtacacaaccagaaaaggattgaggaaacttctactaacgatacagttgaaggagaaagtagtccagatgcagcggtgagtagagtaaatagtgacgaattaaagccaacagcattacctgatgttacattggacgcaattgcaaacaagcagagtaccgttgatgaagctcccaacagccaaccacaaaagaatataataactaatgagcaaaaaattaccaatgtaggcgaaccgatacaaaatttacataatgaagaaattaaagatgaaatggtaagtgctctcgagagcagggaaaatacttttgaaaactcttctcctgctgcccaagtggtctctcaaagggataattctgcaacacctacaccatctaactccactggcactgaagatactatattgatctctccggatacggatataaaaggagagcctgaaccttgtttgaaaaccgaaggcatcgagaacttatctcataatgtaccacaagagaccaaaagcaatactgatgtttctttcttgaaacaagtaacgtttaccgaccatccgcaagtggccataatcgatactgaagagtctccctctaaaaaagatacagctaatgttgatgaatcttccgcggaaaactctttatctacacagacctacgaagggcctgagcaattaacctctaggaactttgttacactttatgattttcctaatgctcctccaaatttgaaagattttaacacaaacttatttggtgatagatggagttacacaaatgggttatccgccactcagcgtccacaagatatgaaaactgttttccactccattttaccatctcctcctcagtcttctgtaccgtctcctaccgtagatatatctcttgatttatctgctttggcaaatttcccatcttttggggaatacgataagaaaatagtccatcaaatcaacacagagataaataaggatttggaaatcaaaattaaaacacagcctccaacgggtgtcttcttagccaatggtataagaaaaaaatgtttaatcacaaataaagaatgtcagtactttgatccaaggactggtgtgccttattctgatgtggaagcttataaaattattcagcgtattcaagatcctatttctaaggaggagggaaggtctgatatcaagcgtgatgaaacgacaaatgaggatagtgacgatcaagtgagattcaagtggtttgggttcaaaaacggcggtatttaccttgatttaagtcaaagacctgcaaaaggtgttcctgaaggattttga

SEQ ID NO: 2725 - DNA, 690 bp, Saccharomyces cerevisiae
atgaacaggattttcggatatgggaacaaaaagagccatgatcagctcttacaagagtcgaatcagtccatgaatcaggcccaacaatcactatcgaacagaatatcccagttagatactcaaatcgcccagttaaacttccagctgcaaaatattcaaaagaatttgcaaagatcaaacaacaagcaaccctcgttaagaaaacaggctttgaagattttaaataaacgtaaacagttagaaaatatgaaggattctttagattctcaatcctggtccatgacgcaagcccagttaacaaatgataacttacagaacacaatgatcactataaacgcactaaagcaaacaaacaatgccatgaaggctcaatacggcaagataaatatcgacaaactacaggacatgcaggatgagatgctggatttaatagaacaaggggatgagctgcaagaagtcttggcaatgaataataacagtggcgagctcgacgacattagtgatgcagagctggatgcagagctggatgctctggcacaagaggatttcactttgccaaccagcgaaaactcattaggtaacgatatgcccagttacttactaggtgcgaatgcgccaccggcttttattgatgaagagccaaacttagatactgaagacaaaaataaagctttagaaagcgctcagtga

SEQ ID NO: 2726 - DNA, 690 bp, Artificial Sequence
  Description of Artificial Sequence: Synthetic polynucleotide
atgaacaggattttcggatatgggaacaaaaagagccatgatcagctcttacaagagagcaatcagtccatgaatcaggcccaacaatctttatctaacagaatatcccagttagatactcaaatcgcccagttaaacttccagttacaaaatattcaaaagaatttgcaaagatctaacaacaagcaaccctctttaagaaaacaggctttgaagattttaaataaacgtaaacagttagaaaatatgaaggattctttagattctcaatcctggtccatgacgcaagcccagttaacaaatgataacttacagaacacaatgatcactataaacgcattgaagcaaacaaacaatgccatgaaggctcaatacggcaagataaatatcgacaaattacaggacatgcaggatgagatgcttgatttaatagaacaaggggatgagttacaagaagtcttggcaatgaataataacagtggcgagctcgacgacattagtgatgcagagttagatgcagagttagatgctttggcacaagaggatttcactttgccaaccagcgaaaactctttaggtaacgatatgcccagttacttattgggtgcgaatgcgccaccggcttttattgatgaagagccaaacttagatactgaagacaaaaataaagctttagaaagcgctcagtga

SEQ ID NO: 2727 - DNA, 627 bp, Saccharomyces cerevisiae
atgtttacaccaattgatcaagctatagaacacttcaagcagaataagtttgtaattgttatggacgatgccggtcgtgaaaatgaaggtgatcttatttgcgctgctgaaaatgtcagcactgaacaaatggcctttcttgtacgccattcctcaggctacgtctgtgcacctatgacgaatgccattgctgataagttggaccttccactactgagaacaggcatgaagtttgaatccaatgatgacgacaggcatggaactgcatacacaataactgtagatgtagcccaaggcactaccacaggtatttctgctcacgacaggtcgatgacttgtagggctcttgcagactcttcctctacgccaaaatcatttttaaaaccagggcacatctgtcccttgagagccgctgatggcggtgttttgcagagaagaggccacactgaggccggtgtcgatttgtgtaaactaagtggactaagtcccgtcgctgttattggcgaattggttaacgatgacgaacaaggaactatgatgagattaaatgactgccaagcgtttggtaagaaacatggcattcctttgatctccatcgaagaattggcccaatatttgaagaaataa

SEQ ID NO: 2728 - DNA, 627 bp, Artificial Sequence
  Description of Artificial Sequence: Synthetic polynucleotide
atgtttacaccaattgatcaagctatagaacacttcaagcagaataagtttgtaattgttatggacgatgccggtcgtgaaaatgaaggtgatcttatttgcgctgctgaaaatgtcagcactgaacaaatggcctttcttgtacgccattccagtggctacgtctgtgcacctatgacgaatgccattgctgataagttggaccttccattattaagaacaggcatgaagtttgaatccaatgatgacgacaggcatggaactgcatacacaataactgtagatgtagcccaaggcactaccacaggtatttctgctcacgacaggtctatgacttgtagggctcttgcagactcttcctctacgccaaaaagttttttaaaaccagggcacatctgtcccttgagagccgctgatggcggtgttttgcagagaagaggccacactgaggccggtgtcgatttgtgtaaattaagtggattgagtcccgtcgctgttattggcgaattggttaacgatgacgaacaaggaactatgatgagattaaatgactgccaagcgtttggtaagaaacatggcattcctttgatctccatcgaagaattggcccaatatttgaagaaatga

SEQ ID NO: 2729 - DNA, 1602 bp, Saccharomyces cerevisiae
atggagcgattgaagcaactggaggaaaaaaggagacaattgaaagagctgcgtgagaggcgaaaacaagccagcttgttccctgggagcgagacgatgggccaccatcccacagaggtgcacgctaaggcaaccatggtcagcgtttcagtgcagaccgacatggaggaaggctcaaagattcaagagccccaatctgcatatcttcgacgtaaggaggttataacatacgacaaaggcattcaaacagatcaaattgaggaagaacaactgcaagaaaatgaaaatcacaccactactgatgctgtcgccattgaaactactgctgccgacgaaaataataaagacaaagctgaaaacgaccagccaaggttagaactagccaaaccttttcttgttgaagaggcggcggcaacgctgagcaacgctagttttgcgcggctggagacagaggtttctgcgtcaggccagcaggcgccatcgaacatgcaacaggataaagacaacctcatgcaatggaacatggtcagtgagaatttacaatcagagacagactgcgattgtatcgctcaggagtatgacccaggaaaaggcgtcttggttgtggtttatctacgattgccgccggcagacctacagtatgctagcagcgaagcggcgtggtctgtggtgaatgtagtcaagtgcgataatgccagcggacgcaacggcctcttgatagatatggtagagttccgtggtacgcggatcatgacagccacgatcctccgtcggtatcatccggaaagcaatgtaatatcaatcttgttggcgaccttgacgggcaagatcatattgtacgagcttagattgaaacagaaaaagccagaaacaccggtagtgtatgtcgtgcagcgaaatatggtggcaagacactactttcagcacccagtggtggctgtaattgaaacaagcagcgtgcaagatcaagagagagtacttgtggcagctgataatggcaatattatggagttgagctgcctggacttgactgttttgcggaagccacagcagctccgtcctgtaccgctatcacagcttttatctttggagaatgatacttgcacatatacggagcgattgcagcggttggcaaagtttgatgaggtaggtatagcttgcatggcgtacacgagtgaggacccgcagtacgtctggatcggtggcgaagacggtggtatatacaaggttttctgggaccaacctgggccgctgtacctctctttggacaacaatgggttccaacctgcagaaaaccactctacgagggtaaccgggttagagtttcattgggacgatgctcggcggctaatgcttctattatcatgttccacggactggacggtgcggctgtgggacgcgcgagcagggaaagctatcataggggcgccattgttgttaggggggcccgtactacgtgcacgctggctcgaaaaaaacaatggaggggaaaatagtcgcactctacggtgtcaagtgtggtgtgcagatggtcgcctcgttgttgtaaattgggctttcgatgctaagacgtccctctacacggccactgttatctcctaa

SEQ ID NO: 2730 - DNA, 1602 bp, Artificial Sequence
  Description of Artificial Sequence: Synthetic polynucleotide
atggagagattgaagcaattggaggaaaaaaggagacaattgaaagagttgcgtgagaggagaaaacaagccagcttgttccctgggagcgagacgatgggccaccatcccacagaggtgcacgctaaggcaaccatggtcagcgtttctgtgcagaccgacatggaggaaggctccaagattcaagagccccaatctgcatatcttcgtcgtaaggaggttataacatacgacaaaggcattcaaacagatcaaattgaggaagaacaattacaagaaaatgaaaatcacaccactactgatgctgtcgccattgaaactactgctgccgacgaaaataataaagacaaagctgaaaacgaccagccaaggttagaattggccaaaccttttcttgttgaagaggcggcggcaacgttgagcaacgctagttttgcgagattggagacagaggtttctgcgtctggccagcaggcgccatctaacatgcaacaggataaagacaacctcatgcaatggaacatggtcagtgagaatttacaaagtgagacagactgcgattgtatcgctcaggagtatgacccaggaaaaggcgtcttggttgtggtttatttaagattgccgccggcagacttacagtatgctagcagcgaagcggcgtggtctgtggtgaatgtagtcaagtgcgataatgccagcggacgcaacggcctcttgatagatatggtagagttccgtggtacgagaatcatgacagccacgatcctccgtcgttatcatccggaaagcaatgtaatatccatcttgttggcgaccttgacgggcaagatcatattgtacgagcttagattgaaacagaaaaagccagaaacaccggtagtgtatgtcgtgcagagaaatatggtggcaagacactactttcagcacccagtggtggctgtaattgaaacaagcagcgtgcaagatcaagagagagtacttgtggcagctgataatggcaatattatggagttgagctgcttggacttgactgttttgagaaagccacagcagctccgtcctgtaccgttatctcagcttttatctttggagaatgatacttgcacatatacggagagattgcagcgtttggcaaagtttgatgaggtaggtatagcttgcatggcgtacacgagtgaggacccgcagtacgtctggatcggtggcgaagacggtggtatatacaaggttttctgggaccaacctgggccgttgtacctctctttggacaacaatgggttccaacctgcagaaaaccactctacgagggtaaccgggttagagtttcattgggacgatgctcgtcgtttaatgcttttattaagttgttccacggactggacggtgagattatgggacgcgcgtgcagggaaagctatcataggggcgccattgttgttaggggggcccgtattacgtgcacgctggctcgaaaaaaacaatggaggggaaaatagtcgcactttgagatgtcaagtgtggtgtgcagatggtcgcctcgttgttgtaaattgggctttcgatgctaagacgtccctctacacggccactgttatctcctga

SEQ ID NO: 2731 - DNA, 885 bp, Saccharomyces cerevisiae
atggacattaacatagacgatattcttgcagaactggataaggaaactactgctgtcgactctaccaagatcacgcaaggttcttcttccactacccacagagatgcaaatacaatagtgggttcgtccttagacttgaatgacaagactcagatatatgtctctccccagcaggatttttctgacttgatgaagtcttggaaaaatgaacggtgttcgccagaactcttaccatatcctcatcagttgatgaaaagattattgaatcgaatatccatgcaatctcaattaattgaaaacatttcaatgggattcctcgatatgcaaaatgcttctaatgcgaacccgcctatgcctaacgaatctaaattgcctttactctgcatggaaactgagttagaaagattgaaatttgttattagaagctacatacgatgtaggctaagcaaaattgacaaattctcactttatttgcgccaattaaatgaagatgaaaattcgctgatctctcttacagatttactatccaaagatgaaatcaaataccatgacacgcattccctgatctggttgaaactagtcaatgattctatcctgaaatacatgcccgaagaacttcaggctattaatgatacagaaggtagcgtaaacatgatagatgagcccgactggaacaaatttgtctttatacacgttaacggcccaccagatggtaaatggaacgaagatccgctattgcaggaaaacgagttcggtaaaccttgctacacggtcacaatacccgatttaaaggaagaggttgaactcactattggaagtatttacgttatgagatatgaagtcattagggatctgctgagagacgacaaagttgctcttatttga

SEQ ID NO: 2732 - DNA, 885 bp, Artificial Sequence
  Description of Artificial Sequence: Synthetic polynucleotide
atggacattaacatagacgatattcttgcagaattagataaggaaactactgctgtcgactctaccaagatcacgcaaggttcttcttccactacccacagagatgcaaatacaatagtgggttcttccttagacttgaatgacaagactcagatatatgtctctccccagcaggatttttctgacttgatgaagtcttggaaaaatgaaagatgttctccagaactcttaccatatcctcatcagttgatgaaaagattattgaatagaatatccatgcaatctcaattaattgaaaacatttccatgggattcctcgatatgcaaaatgcttctaatgcgaacccgcctatgcctaacgaatctaaattgcctttactctgcatggaaactgagttagaaagattgaaatttgttattagaagctacataagatgtaggttgagcaaaattgacaaattctctctttatttgcgccaattaaatgaagatgaaaattctttgatctctcttacagatttattatccaaagatgaaatcaaataccatgacacgcattccttaatctggttgaaattggtcaatgattctatcttgaaatacatgcccgaagaacttcaggctattaatgatacagaaggtagcgtaaacatgatagatgagcccgactggaacaaatttgtctttatacacgttaacggcccaccagatggtaaatggaacgaagatccgttattgcaggaaaacgagttcggtaaaccttgctacacggtcacaatacccgatttaaaggaagaggttgaactcactattggaagtatttacgttatgagatatgaagtcattagggatttattaagagacgacaaagttgctcttatttga

SEQ ID NO: 2733 - DNA, 2301 bp, Saccharomyces cerevisiae
atgggaaataggtctttgacagaggcagaccacgccctgctgtccaagcccttggtaccgacatctgcggaacatacacaaacgcaagagtatcctcgtcctttcgtagatggcagcaattctcagagcgggtctgaactacaggcttctccacaaggtcagtttggagaaaaggcattgactagtactaatcgcttcattcccctggcaaatgatgacccgggtatgcagcacgagatgggtcttgatccctcaatgaggcgtagaagagaagaatgggcagaacgtggtgcggcaaaaatcgtcaaagatgttgtcgacccagctacgggggagttaactaagcatgttgtcaagatgggaataaaggacttcaagtttggagagcaactcggggatggatcatattctagtgttgttctggctaccgcccgtgattcgggcaagaaatatgcagtaaaagtgttgagtaaagaatatctgatccgtcaaaaaaaagttaaatacgtcacagtggagaaattggctttgcagaagctgaatggcaccaagggcatattcaagcttttcttcactttccaggacgaggcaagcttgtatttccttctagaatatgccccccacggtgatttcttgggcttgattaagaaatatggatctttaaacgagacatgtgcacgctattatgcgtcgcagatcatcgatgccgttgactccttgcataatatcggcattattcacagggatatcaagcccgaaaacatattgctcgacaaaaatatgaaagtgaagttgacggattttggtacagccaaaattttaccggaggaaccttcgaacaccgcagatggcaagccttatttcgatttgtatgctaagtcgaaatcatttgttggtaccgcagaatatgtttctcctgagctactgaatgataattatacagattcccgttgtgacatttgggcatttggttgcatattgtaccaaatgcttgcgggaaaaccgccttttaaagctgccaatgaatatttgacattccaaaaagtaatgaagattcaatatgcgtttactgcaggttttccgcaaatagtaaaagatttagttaaaaaactattagttagggatccaaatgatagattgaccataaagcagatcaaagcacacctctttttccatgaagtcaactttgaagatggttctgtttgggatgataatccaccggagatacagccatataaaataaatgcagaggcgatgaagcccctgcaaaaggtttctgaatctgataccactgtcaaaatggccaaccttcagctggctggtaatggacatgcagatactcccctgcaagcaccagcagcgacctctcaagagcattctgtgatcagtatgactgcagcaaccgccgcattcaataaagattatacaagtcaacccaaattggggagcaagtcaagcacatctgttagatctgcctccaacaacacagatcgcgaggtaattcaaaagaaggtttcaaaaaatcgcgcatctgtatcatctccttcaatttctactacatcacgggggaaagataatagaagtcgctcttctgacgccttctggtcacgctacttgcaaaatatggatgaacgtgtcttgttgatgaaggaggtagcgctttccacacgaaacttagaggactcacctgtaggtcttgagaacgtggctctggactacaagaaccctcttgatatcgagcctcctactgatagtgcaggcaaattttacaagaaaatgtttctaataacaaacctaggcagagcacttgtttttgtcaagagaagaagtctcagcatgtgggaagaacaggaatttgaattgcaattcgaactagagttgaatgacgttgagaagatacgctttataagtgatcaagtccttgaaattgacggttccaggacgattttcataggatgcaaagagagagcagttttaatgaaactatggaaattaatacataatggaatgaccgccaaacctaaagtagtatcgccgaagtcggaccataaaatgtttgataagttcattcttcaaaaaagacagaatacaaaaaaaaagaatcaagctcctcccgtacctcaatcgaataggctaataaatggtttaccggaccgttgcatcttaaagacacccgaagaaggcgcacttcacacaaaacgtcccacttcgttgcagacccgatcgtcatctaattactcaaaattgctggcaagatcgacacaaatgcggaaaaacatgacacggacagatgaaaaatga

SEQ ID NO: 2734 - DNA, 2301 bp, Artificial Sequence
  Description of Artificial Sequence: Synthetic polynucleotide
atgggaaataggtctttgacagaggcagaccacgccttattatccaagcccttggtaccgacatctgcggaacatacacaaacgcaagagtatcctcgtcctttcgtagatggcagcaattctcagagcgggtctgaattacaggcttctccacaaggtcagtttggagaaaaggcattgactagtactaatcgcttcattcccttggcaaatgatgacccgggtatgcagcacgagatgggtcttgatccctctatgaggcgtagaagagaagaatgggcagaacgtggtgcggcaaaaatcgtcaaagatgttgtcgacccagctacgggggagttaactaagcatgttgtcaagatgggaataaaggacttcaagtttggagagcaactcggggatggatcctattctagtgttgttttggctaccgcccgtgattctggcaagaaatatgcagtaaaagtgttgagtaaagaatatttgatccgtcaaaaaaaagttaaatacgtcacagtggagaaattggctttgcagaagttgaatggcaccaagggcatattcaagcttttcttcactttccaggacgaggcaagcttgtatttccttttagaatatgccccccacggtgatttcttgggcttgattaagaaatatggatctttaaacgagacatgtgcacgctattatgcgtctcagatcatcgatgccgttgactccttgcataatatcggcattattcacagggatatcaagcccgaaaacatattgctcgacaaaaatatgaaagtgaagttgacggattttggtacagccaaaattttaccggaggaaccttccaacaccgcagatggcaagccttatttcgatttgtatgctaagagtaaaagttttgttggtaccgcagaatatgtttctcctgagttattgaatgataattatacagattcccgttgtgacatttgggcatttggttgcatattgtaccaaatgcttgcgggaaaaccgccttttaaagctgccaatgaatatttgacattccaaaaagtaatgaagattcaatatgcgtttactgcaggttttccgcaaatagtaaaagatttagttaaaaaattattagttagggatccaaatgatagattgaccataaagcagatcaaagcacacctctttttccatgaagtcaactttgaagatggttctgtttgggatgataatccaccggagatacagccatataaaataaatgcagaggcgatgaagcccttgcaaaaggtttctgaatctgataccactgtcaaaatggccaaccttcagttagctggtaatggacatgcagatactcccttgcaagcaccagcagcgacctctcaagagcattctgtgatcagtatgactgcagcaaccgccgcattcaataaagattatacaagtcaacccaaattggggagcaagagcagcacatctgttagatctgcctccaacaacacagatcgcgaggtaattcaaaagaaggtttccaaaaatcgcgcatctgtatcttctccttctatttctactacatctagagggaaagataatagaagtcgctcttctgacgccttctggagccgctacttgcaaaatatggatgaacgtgtcttgttgatgaaggaggtagcgctttccacaagaaacttagaggactctcctgtaggtcttgagaacgtggctttggactacaagaaccctcttgatatcgagcctcctactgatagtgcaggcaaattttacaagaaaatgtttttaataacaaacttgggcagagcacttgtttttgtcaagagaagaagtctcagcatgtgggaagaacaggaatttgaattgcaattcgaattagagttgaatgacgttgagaagatacgctttataagtgatcaagtccttgaaattgacggttccaggacgattttcataggatgcaaagagagagcagttttaatgaaattatggaaattaatacataatggaatgaccgccaaacctaaagtagtatccccgaagagtgaccataaaatgtttgataagttcattcttcaaaaaagacagaatacaaaaaaaaagaatcaagctcctcccgtacctcaaagcaataggttgataaatggtttaccggaccgttgcatcttaaagacacccgaagaaggcgcacttcacacaaaacgtcccacttctttgcagaccaggagttcttctaattactctaaattgttggcaagatctacacaaatgagaaaaaacatgacaagaacagatgaaaaatga

SEQ ID NO: 2735 - DNA, 951 bp, Saccharomyces cerevisiae
atgagtatcaccactactagaagaagaaaccaagatagtgtctgctgcaaggcaacgagagcctccattaaggtggaagctgtctcaggccagacagtttttgaaaagcaaaaactgctacacaatttcgatgagttgccagaatggcaaaaagataatgacaaaattctcaccgggtacgttcgtgaaacactgtcatggaaaaagtgcttatattctttattttattggaacaacgagactgtgaacatttatacacatttggtaccggctatcgtatacttcgtgtttgccattacgttgaccaactactttctaattcccgttttcccctccacttcctggtccgattacaccgttataaacattttcttgatgggcgctttctcatgtctcatgtgcagtagctgtttccactgcatgaagcaacactctgaaaagcaaagcaatttctggagcaagctcgactacttggggattatcagtttgatttcctgttctatgatccctataatatactttggttacttcgaccacatatcctacttcagtcttttcacgattgttactttagtcctggcaacattttgtacagtctgtgtcctccacgacaagtttaacacttccacatttcgtccatttagggccatgtttttcatattgtttggatttagtggcttactcccattgaccacagggtttttcaagttcggtatccaaggggttcttaacagaataaaagtcagctttgtgttttgggaagctctcttttacatttcaggggctgtaatctacgggtttaggattcctgaaactttggctccagggaagttcgatttcttcggtagctctcatcaaatatttcatattatggtggttcttggttctgtatgccacttgaaagccattatcgattcttacaaattaatgcattctcatatccacccttga

SEQ ID NO: 2736 - DNA, 951 bp, Artificial Sequence
  Description of Artificial Sequence: Synthetic polynucleotide
atgagtatcaccactactagaagaagaaaccaagatagtgtctgctgcaaggcaacgagagcctccattaaggtggaagctgtctccggccagacagtttttgaaaagcaaaaattattacacaatttcgatgagttgccagaatggcaaaaagataatgacaaaattctcaccgggtacgttcgtgaaacattatcttggaaaaagtgcttatattctttattttattggaacaacgagactgtgaacatttatacacatttggtaccggctatcgtatacttcgtgtttgccattacgttgaccaactactttttgattcccgttttcccctccacttcctggtccgattacaccgttataaacattttcttgatgggcgctttctcttgtctcatgtgcagtagctgtttccactgcatgaagcaacactctgaaaagcaaagcaatttctggagcaagctcgactacttggggattatcagtttgatttcctgttctatgatccctataatatactttggttacttcgaccacatatcctacttcagtcttttcacgattgttactttagtcttggcaacattttgtacagtctgtgtcctccacgacaagtttaacacttccacatttcgtccatttagggccatgtttttcatattgtttggatttagtggcttactcccattgaccacagggtttttcaagttcggtatccaaggggttcttaacagaataaaagtcagctttgtgttttgggaagctctcttttacatttctggggctgtaatctacgggtttaggattcctgaaactttggctccagggaagttcgatttcttcggtagctctcatcaaatatttcatattatggtggttcttggttctgtatgccacttgaaagccattatcgattcttacaaattaatgcattctcatatccacccttga

SEQ ID NO: 2737 - DNA, 372 bp, Saccharomyces cerevisiae
atgagcacgagaacaaaggccctgaatgcatacaggcatggcttaagagcaacccgaatagctttccggaatgatgctgaagtattactagccgcgagagctaaaatgcgttcaggaatgttatgtcccccagatcctaaactcaccacagaggatcagattcaacatttagaggatgtggctgtttttttgagacgaaacctggttcagggcaaaaaggttgatggctcaagtactaaggagcctaggtaccatttgaacattcacaaagacaccgaattgggtgacaatgagacgattgcagaccctacggcaagagtgaaaacaaacttaaaggcaagaccatttaaatgctctgataaaaagcaatga

SEQ ID NO: 2738 - DNA, 372 bp, Artificial Sequence
  Description of Artificial Sequence: Synthetic polynucleotide
atgagcacgagaacaaaggccttgaatgcatacaggcatggcttaagagcaaccagaatagctttcagaaatgatgctgaagtattattagccgcgagagctaaaatgcgttctggaatgttatgtcccccagatcctaaactcaccacagaggatcagattcaacatttagaggatgtggctgtttttttgagaagaaacttggttcagggcaaaaaggttgatggctccagtactaaggagcctaggtaccatttgaacattcacaaagacaccgaattgggtgacaatgagacgattgcagaccctacggcaagagtgaaaacaaacttaaaggcaagaccatttaaatgctctgataaaaagcaatga

SEQ ID NO: 2739 - DNA, 1086 bp, Saccharomyces cerevisiae
atgcgctcctccatgtttagatgtgtgagtcgcgctcattacagcacaagtgtcacagaagatttcataaatagcattctagcaagggctcaagaggcaacagcaaaagcttcctccaatgctctcaaattggacaagatgaaggagggtagaatgcaaaataagaggagaaacgggaatcagaataggaatagtatgaacaataaagaaagcaggggtagagagggaaatcaaggagaaagaaacatgagactgaaaaaccgttctagtgattctgttcgtgctaacaagcagcagtggaataaaggtgctaatacgtcttttgtaaagaatcctactggaaatacagtagttatgcagccacagttcaaaaagatgcagaatggcaaaaataatttgaaaggagatgcgagagtcgaagatgatttacttgatgtcttcaattcgtcgatggagcaaaaacctgttaatttcaatggaacccccaaatctaaagcaaggtttcaaaaaaagagtcatatcttaacagcatctaaaaggagaaaggctcctcaacagcagctacagaaggttatcaagagacctgtcagttcagaatatgtactagaagagcccactcctttatctttgttagaatatactcctcaagtttttccaacaaaggaatccagattagtcaactttaccttagatagcttgaaaaaatccaattaccccatttacagatcgccaaatttgggaatcctcaaagtacatgatttcaccctaaacacgccaaactttggtaaatatacaccaggatcctccttgatttttgccaaagagcctcaattgcagaatttacttattgaagaagacccagaagattttcataggcaagtaacaggagaatatcaactcttaaaaccatatgtgaaaaaagattttgaaaaactgacgaaatctaaagatactgtgagtaagctcgtacaaaatagtcaagttgtgaggttatcattacaatctgttgttatgggctccgaggaaaagaaattggtatatgatgtttgttctggaatgaaaccaatttctgaattacaacagtaa

SEQ ID NO: 2740 - DNA, 1086 bp, Artificial Sequence
  Description of Artificial Sequence: Synthetic polynucleotide
atgcgctcctccatgtttagatgtgtgagtcgcgctcattacagcacaagtgtcacagaagatttcataaatagcattttggcaagggctcaagaggcaacagcaaaagcttcctccaatgctctcaaattggacaagatgaaggagggtagaatgcaaaataagaggagaaacgggaatcagaataggaatagtatgaacaataaagaaagcaggggtagagagggaaatcaaggagaaagaaacatgagattgaaaaaccgttctagtgattctgttcgtgctaacaagcagcagtggaataaaggtgctaatacgtcttttgtaaagaatcctactggaaatacagtagttatgcagccacagttcaaaaagatgcagaatggcaaaaataatttgaaaggagatgcgagagtcgaagatgatttacttgatgtcttcaattcttctatggagcaaaaacctgttaatttcaatggaacccccaaatctaaagcaaggtttcaaaaaaagagtcatatcttaacagcatctaaaaggagaaaggctcctcaacagcagttacagaaggttatcaagagacctgtcagttctgaatatgtattggaagagcccactcctttatctttgttagaatatactcctcaagtttttccaacaaaggaatccagattagtcaactttaccttagatagcttgaaaaaatccaattaccccatttacagatctccaaatttgggaatcctcaaagtacatgatttcaccttgaacacgccaaactttggtaaatatacaccaggatcctccttgatttttgccaaagagcctcaattgcagaatttacttattgaagaagacccagaagattttcataggcaagtaacaggagaatatcaactcttaaaaccatatgtgaaaaaagattttgaaaaattaacgaaatctaaagatactgtgagtaagctcgtacaaaatagtcaagttgtgaggttatctttacaatctgttgttatgggctccgaggaaaagaaattggtatatgatgtttgttctggaatgaaaccaatttctgaattacaacagtga

SEQ ID NO: 2741 - DNA, 3036 bp, Saccharomyces cerevisiae
atggtaaaaaagaaaacgaataatgacaaaggaaaagaagtaaaggaaaatgaaggaaagctcgatatagatagcgaatcctcacctcacgaaagagaaaatgacaaaaaaaaaacagaagatgatagtctacgtgcaacagaaagtgaagagacgaatacacataatgctaacccaaatgaaacagtacgagctgataaattttcccaggaagagagtcgaccaatcgaagacagtccacatactgataaaaacacagcacaagaaagctgtcagcctagcagcgcagaagataatgtcataaatacagatattacaagcttaaatgaaaaaacctccacgaatgatgaacaggaaaaagggttgccactgaaaataagcgaaggtccttttacaatctctaccctattagacaatgtaccatctgacttgatatacacatgttgtgaggcgtatgagaaccacatattcttgggaacaactacaggtgatcttttacattactttgaacttgaacgtggaaactatatgcttgtgtcgcaaacaaagtttgatgcagaatcaaattcgaagatagacaaaatccttcttttacctaaagtagaaggcgcactaatattatgtgataacgaactagttttatttattctcccagaatttgcaccaaggcccaacacaactagacttaaaggtattagtgatgtcgttatttgtaatttttcccgaagctcgaaggcttatagaatatatgcatttcacgcagaaggcgtaagactactcaaaatatctgcagattcattagtacttaccaaagcttttaatttcaaactaatagataaagcttgtgcgcacgaagaaacattaatggtttcgaagttaaatagttacgaacttataaatctaaagtcgtcacaggtaattccattatttcgaataagtgagactgacgaagacttagaacctataataaccagtttcaatgaacagagtgaatttttagtttgttctggaggaggatcatacgatagtggggcgatggccttagtggtaaatcatcatggcgacataataaaaggaactatagtgctaaaaaattatccaagaaatgtaattgttgagtttccctacataatcgctgagtctgctttccagtcggttgacatatattctgccttgccgagtgaaaaatcccagttgttgcaaagtataactacttctggatcggatttaaaaatttcaaaatctgacaatgtattcactaataccaataattctgaagaattcaaagaaaaaatattcaataagttgagacttgagcctctgacacatagtgataataaatttagaattgaaagagaacgcgcctttgttgaagagtcttatgaagaaaagacctctttaatcgtttataataatttagggattcatttattagttccaacgccgatggtcttacgttttacatcatgtgaagagtccgaaattgataatattgaagatcaattgaaaaagcttgcgaagaaggatttaacaaaatttgagcacattgaagcgaaatatttgatgtctcttttattgtttctaatgaccttacattacgatcacatagaagatgaggtaatgaaaaagtggtgtgacttttctgacaaagttgacatcagaatattattttatatgtttggctggaaagtctatagcgagatctggtgcttccatgggttaataaatatagttgaaaggttgaaaagcttgaagctaactaacaaatgcgagaatattctaaaaatgcttctgatgatgaagaatgaactaaagaaaaagaataaaactggactcttaacgaatgactttgatgatataatgaaaactattgatataactttattcaaattaagattggaaaaaaaggaaactataactgttgatatgtttgaacgcgaaagttacgacgaaattatcagagagattaatttacatgatgataaacttcctaggatagagttactaattgagatatataaagaaaaaggggaatatcttaaagcactaaatcttttgagggaagctggggattacatttcactagtttcattcattgaagaaaatctcaaaaaacttcctgaggattatatcaaagaaagaatagccgatgatcttctcctcactcttaaacaaggcgacgaaaatactgaggaatgcgccatcaaaaaggttcttaaaatattggacatggcatgtattaataaaaacgactttttaaacaaaatacccgcagaagaaacatccctgaaggtatcattcatagaacaactcggtgtccaaaacagcaacgattccaaatttctctttaactattatttggcgaaattgcgagaaataatcaaccaaagtaacatatggtccattcttggagattttatcaaagagtacaaagacgatttcgcgtatgataagacagatataacaaattttattcatatcaaattaaagcatagtcttcagtgcgaaaatttttccaaatattatgaaaaatgtgaaaacttgaaatcggaaaatgaaaaagatgatgagtttattaatttcaccttcgacgaaatttccaagatcgataaagaacacatattgaccttgttatttttccccaatgaattaacaaactgggtttcttccgaagaattgctgaaaatatatttgtcatttaatgatttcagaagtgtagaaaaatacataggcaagcagaacttggttgcggtgatgaaacaatacttggacatatcttctttgaattactcagttgaattagtgactaatttgctacagagaaattttgaacttttagatgatacagatattcaattaaagatcctcgaaactataccttccgtatttcccgtacaaacaatatccgaattgcttttaaaggtacttattaagtatcaagaaaagaaggaggaatctaatttgcggaaatgtttgttgaaaaatcaaatatccatttctgacgaactaagccggaattttgatagtcaaggataa

SEQ ID NO: 2742 - DNA, 3036 bp, Artificial Sequence
  Description of Artificial Sequence: Synthetic polynucleotide
atggtaaaaaagaaaacgaataatgacaaaggaaaagaagtaaaggaaaatgaaggaaagctcgatatagatagcgaatcctcccctcacgaaagagaaaatgacaaaaaaaaaacagaagatgatagtttacgtgcaacagaaagtgaagagacgaatacacataatgctaacccaaatgaaacagtaagagctgataaattttcccaggaagagagtaggccaatcgaagacagtccacatactgataaaaacacagcacaagaaagctgtcagcctagcagcgcagaagataatgtcataaatacagatattacaagcttaaatgaaaaaacctccacgaatgatgaacaggaaaaagggttgccattgaaaataagcgaaggtccttttacaatctctaccttattagacaatgtaccatctgacttgatatacacatgttgtgaggcgtatgagaaccacatattcttgggaacaactacaggtgatcttttacattactttgaacttgaacgtggaaactatatgcttgtgagtcaaacaaagtttgatgcagaaagtaattctaagatagacaaaatccttcttttacctaaagtagaaggcgcattaatattatgtgataacgaattggttttatttattctcccagaatttgcaccaaggcccaacacaactagacttaaaggtattagtgatgtcgttatttgtaatttttccagaagctctaaggcttatagaatatatgcatttcacgcagaaggcgtaagattactcaaaatatctgcagattctttagtacttaccaaagcttttaatttcaaattgatagataaagcttgtgcgcacgaagaaacattaatggtttccaagttaaatagttacgaacttataaatttgaagagttctcaggtaattccattatttagaataagtgagactgacgaagacttagaacctataataaccagtttcaatgaacagagtgaatttttagtttgttctggaggaggatcttacgatagtggggcgatggccttagtggtaaatcatcatggcgacataataaaaggaactatagtgttgaaaaattatccaagaaatgtaattgttgagtttccctacataatcgctgagtctgctttccagtctgttgacatatattctgccttgccgagtgaaaaatcccagttgttgcaaagtataactacttctggaagtgatttaaaaatttccaaatctgacaatgtattcactaataccaataattctgaagaattcaaagaaaaaatattcaataagttgagacttgagcctttaacacatagtgataataaatttagaattgaaagagaacgcgcctttgttgaagagtcttatgaagaaaagacctctttaatcgtttataataatttagggattcatttattagttccaacgccgatggtcttacgttttacatcttgtgaagagtccgaaattgataatattgaagatcaattgaaaaagcttgcgaagaaggatttaacaaaatttgagcacattgaagcgaaatatttgatgtctcttttattgtttttgatgaccttacattacgatcacatagaagatgaggtaatgaaaaagtggtgtgacttttctgacaaagttgacatcagaatattattttatatgtttggctggaaagtctatagcgagatctggtgcttccatgggttaataaatatagttgaaaggttgaaaagcttgaagttgactaacaaatgcgagaatattttgaaaatgcttttgatgatgaagaatgaattgaagaaaaagaataaaactggactcttaacgaatgactttgatgatataatgaaaactattgatataactttattcaaattaagattggaaaaaaaggaaactataactgttgatatgtttgaacgcgaaagttacgacgaaattatcagagagattaatttacatgatgataaacttcctaggatagagttattgattgagatatataaagaaaaaggggaatatcttaaagcattgaatcttttgagggaagctggggattacatttctttggtttctttcattgaagaaaatctcaaaaaacttcctgaggattatatcaaagaaagaatagccgatgatcttctcctcactcttaaacaaggcgacgaaaatactgaggaatgcgccatcaaaaaggttcttaaaatattggacatggcatgtattaataaaaacgactttttaaacaaaatacccgcagaagaaacatccttgaaggtatctttcatagaacaactcggtgtccaaaacagcaacgattccaaatttctctttaactattatttggcgaaattgagagaaataatcaaccaaagtaacatatggtccattcttggagattttatcaaagagtacaaagacgatttcgcgtatgataagacagatataacaaattttattcatatcaaattaaagcatagtcttcagtgcgaaaatttttccaaatattatgaaaaatgtgaaaacttgaaaagtgaaaatgaaaaagatgatgagtttattaatttcaccttcgacgaaatttccaagatcgataaagaacacatattgaccttgttatttttccccaatgaattaacaaactgggtttcttccgaagaattgttgaaaatatatttgagttttaatgatttcagaagtgtagaaaaatacataggcaagcagaacttggttgcggtgatgaaacaatacttggacatatcttctttgaattactctgttgaattagtgactaatttgttacagagaaattttgaacttttagatgatacagatattcaattaaagatcctcgaaactataccttccgtatttcccgtacaaacaatatccgaattgcttttaaaggtacttattaagtatcaagaaaagaaggaggaatctaatttgagaaaatgtttgttgaaaaatcaaatatccatttctgacgaattgagcagaaattttgatagtcaaggatga

SEQ ID NO: 2743 - DNA, 1971 bp, Saccharomyces cerevisiae
atggcacctttaaccaagaagacaaacggaaaacgttctgctaaagaagttagtcattcagaaaagaaattagccaaaaaacctagaatttctattgattcgtctgatgaagaatcagaactatccaaaaaggaagatgctgtatcctcttcatcagatgatgatgatttggatgatttaagtaccagtgactctgaagcagaagaagaagctgacgaattagatatttccgatgacagtgaggaacatgaaaatgagaatgaagagaaagaaggaaaggacaaatctgaaggaggtgaaaatggaaatcacactgaacaaagaaaactgctaaaagaaaggaaaatgcaaagaaaatctggtacccaagtgcaacaaattaaatccgtctgggaaagattgcgtgtgaagaccccacctttaccaaaacagattcgtgaaaaactttccaacgaaatctgggagctatctaaggactgtatcagtgatcttgtcttaaagcatgatgcttcccgtattgttcaaactttagtcaagtattcgtccaaagatcgtcgtgaacaaattgtcgatgctttaaagggaaaattttatgttctagccacatctgcgtacggtaagtatctattggttaagttactgcattatggttcaagaagttcaaggcaaactataataaatgaattacacggttctttgagaaaattaatgagacatcgtgagggtgcctacgttgttgaagatttatttgttctttatgccacacatgaacaaagacaacaaatgattaaagagttttggggctctgaatatgctgtatttagagaaacccacaaagatttgaccattgagaaagtttgtgaaagtagcattgaaaaaaggaatattatcgccagaaacttgattggtaccattaccgcatcagtagaaaagggttccaccggctttcaaattctacatgctgctatgagagaatatgtgaaaatagccaacgaaaaggaaatatctgaaatgatcgaattgcttcatgaacaattcgctgaattggtgcatactccagaaggttcagacgttgcttgtactttggttgctagagctaacgccaaggaaagaaagttaattttaaaggctttgaaaaaccacgccgaaaaattgatcaaaaatgagtacggtaatattgtcttcattacaattctgaactgtgttgacgatacagttttagtattcaagactttcagtcctactgttaaggaacatttgcaagaattcataattgataagtttggtagaaggccttggttatacatactattaggtttggacggtaagtatttctcacctatcgtcaagaatgaattattgagatacattgaactgtccaaagccacctctaagaaggatcctttacaaagaaggcacgaacttttgtcaaaattcgcccccatgtttttaagcactatatcaaaagattattccagtatattgacagagaatctaggctgtcagttcattgccgaagttctaataaacgatgagttgtacgcgcagctgaatgaaaaagaccaagaaaagtatcaacaggtcttaaacaacattttaactacttttaagggtgacataaccgaagaagagcacccaatacatagagcattttctactagactattaaaggcactaattcaaggtggtaaatggaataacaaagaaaaaaaggtcataccattaaaaaatgttcaaggcttaggcgttccatttgctgaaaagttatacgatgaaattattgactcctccaacttgttagaatggattaataacgctgatagttcatttacaattgttgcactgtatgaaacgttaaaagatcaaaaagaagggaaaccatttttgaaggatttgagaggagttcagagtaaaatcaccactgatgaaagtaacaaaggctctcagcttttggctaaattgttaaaataa

SEQ ID NO: 2744 - DNA, 1971 bp, Artificial Sequence
  Description of Artificial Sequence: Synthetic polynucleotide
atggcacctttaaccaagaagacaaacggaaaacgttctgctaaagaagttagtcattctgaaaagaaattagccaaaaaacctagaatttctattgattcttctgatgaagaaagtgaattatccaaaaaggaagatgctgtatcctcttcttctgatgatgatgatttggatgatttaagtaccagtgactctgaagcagaagaagaagctgacgaattagatatttccgatgacagtgaggaacatgaaaatgagaatgaagagaaagaaggaaaggacaaatctgaaggaggtgaaaatggaaatcacactgaacaaagaaaattattgaaagaaaggaaaatgcaaagaaaatctggtacccaagtgcaacaaattaaatccgtctgggaaagattgcgtgtgaagaccccacctttaccaaaacagattcgtgaaaaactttccaacgaaatctgggagctttctaaggactgtatcagtgatcttgtcttaaagcatgatgcttcccgtattgttcaaactttagtcaagtattcttccaaagatcgtcgtgaacaaattgtcgatgctttaaagggaaaattttatgttttggccacatctgcgtacggtaagtatcttttggttaagttattacattatggttccagaagttctaggcaaactataataaatgaattacacggttctttgagaaaattaatgagacatcgtgagggtgcctacgttgttgaagatttatttgttctttatgccacacatgaacaaagacaacaaatgattaaagagttttggggctctgaatatgctgtatttagagaaacccacaaagatttgaccattgagaaagtttgtgaaagtagcattgaaaaaaggaatattatcgccagaaacttgattggtaccattaccgcatctgtagaaaagggttccaccggctttcaaattttgcatgctgctatgagagaatatgtgaaaatagccaacgaaaaggaaatatctgaaatgatcgaattgcttcatgaacaattcgctgaattggtgcatactccagaaggttctgacgttgcttgtactttggttgctagagctaacgccaaggaaagaaagttaattttaaaggctttgaaaaaccacgccgaaaaattgatcaaaaatgagtacggtaatattgtcttcattacaattttgaactgtgttgacgatacagttttagtattcaagactttcagtcctactgttaaggaacatttgcaagaattcataattgataagtttggtagaaggccttggttatacatattattaggtttggacggtaagtatttcagtcctatcgtcaagaatgaattattgagatacattgaattatccaaagccacctctaagaaggatcctttacaaagaaggcacgaacttttgagtaaattcgcccccatgtttttaagcactatatccaaagattattccagtatattgacagagaatttgggctgtcagttcattgccgaagttttgataaacgatgagttgtacgcgcagttgaatgaaaaagaccaagaaaagtatcaacaggtcttaaacaacattttaactacttttaagggtgacataaccgaagaagagcacccaatacatagagcattttctactagattattaaaggcattgattcaaggtggtaaatggaataacaaagaaaaaaaggtcataccattaaaaaatgttcaaggcttaggcgttccatttgctgaaaagttatacgatgaaattattgactcctccaacttgttagaatggattaataacgctgatagttcttttacaattgttgcattatatgaaacgttaaaagatcaaaaagaagggaaaccatttttgaaggatttgagaggagttcagagtaaaatcaccactgatgaaagtaacaaaggctctcagcttttggctaaattgttaaaatga

SEQ ID NO: 2745 - DNA, 1755 bp, Saccharomyces cerevisiae
atgggaatacacataccatatctcacgtcaaagacatcgcaatcaaatgttggtgatgccgttggcaacgctgatagtgtagagttcaacagtgagcatgactcaccttcaaagagaggtaaaattacacttgagtcacatgaaatacagagggctcccgctagcgatgatgaagataggattcaaattaaacccgtgaacgacgaggatgacacgtcggtcatgatcacttttaaccaatctctttcgcccttcatcatcactctgacttttgtcgcatccatatccggtttcatgtttggttacgacactggttatatatccagtgcgctgatctcgatcggcacagatctggaccacaaggtacttacttatggggagaaggaaattgtcactgcggctacctctctgggagctttgattaccagtattttcgccggtactgcagctgacatatttggtaggaaacgttgtttaatgggttcgaatctgatgtttgtcattggcgcaatcttacaggtctccgcacacacattctggcaaatggctgttggtagactgatcatgggtttcggtgtcggtatcggctccttgatcgcgccacttttcatcagtgaaattgctcccaaaatgatcagagggagactaactgtcatcaattccttatggttgactggtggtcaattagtcgcttacggttgcggtgctgggttaaactacgtcaacaatggttggagaattcttgttggattgtcactaattcccactgctgtgcaattcacatgcctgtgctttttacctgacactccaagatactacgttatgaagggcgacttggcaagggctactgaggtgttgaagagaagttacactgacacttcggaggaaatcattgaacgtaaggtggaagaacttgttactttgaatcaatctattcctggtaagaatgtccctgaaaaagtctggaataccatcaaagaattgcacacagtaccatctaatctaagggctttgatcattggttgtggtttacaagcaattcaacagtttaccggttggaattcgttgatgtatttctctggtaccatcttcgaaactgtcggtttcaaaaattcttccgctgtttcaatcatcgtgtccggtaccaattttattttcactttagttgcctttttttccattgacaaaataggccgtagaaccatattattgattggattaccaggcatgaccatggctttagtcgtgtgctctattgctttccattttctaggtattaagtttgatggcgctgtcgctgtggtggtttcctccggtttctcctcttggggtattgtgatcatcgtatttattatcgtatttgctgcgttctacgctcttggtatcggtactgttccatggcaacaatcggaactattcccccaaaacgtgagaggtattgggacttcatatgcaactgctacaaactgggctggttcactggttattgcatccacatttttgaccatgttacagaatatcactcctgcaggtacatttgcctttttcgcgggattgtcgtgcttatcaaccattttctgctacttctgttatccagaattatcgggattggagttagaagaggtacaaactattttgaaggacgggttcaacatcaaagcctcgaaagctttggccaagaagagaaaacagcaagttgccagagttcatgaattgaaatatgaaccaactcaagagattatagaggatatatag

SEQ ID NO: 2746 - DNA, 1755 bp, Artificial Sequence
  Description of Artificial Sequence: Synthetic polynucleotide
atgggaatacacataccatatctcacgtccaagacatctcaaagcaatgttggtgatgccgttggcaacgctgatagtgtagagttcaacagtgagcatgactctccttctaagagaggtaaaattacacttgagtctcatgaaatacagagggctcccgctagcgatgatgaagataggattcaaattaaacccgtgaacgacgaggatgacacgagtgtcatgatcacttttaaccaatctctttctcccttcatcatcactttaacttttgtcgcatccatatccggtttcatgtttggttacgacactggttatatatccagtgcgttgatctccatcggcacagatttggaccacaaggtacttacttatggggagaaggaaattgtcactgcggctacctctttgggagctttgattaccagtattttcgccggtactgcagctgacatatttggtaggaaacgttgtttaatgggtagtaatttaatgtttgtcattggcgcaatcttacaggtctccgcacacacattctggcaaatggctgttggtagattgatcatgggtttcggtgtcggtatcggctccttgatcgcgccacttttcatcagtgaaattgctcccaaaatgatcagagggagattaactgtcatcaattccttatggttgactggtggtcaattagtcgcttacggttgcggtgctgggttaaactacgtcaacaatggttggagaattcttgttggattgtccttgattcccactgctgtgcaattcacatgcttgtgctttttacctgacactccaagatactacgttatgaagggcgacttggcaagggctactgaggtgttgaagagaagttacactgacacttccgaggaaatcattgaacgtaaggtggaagaacttgttactttgaatcaatctattcctggtaagaatgtccctgaaaaagtctggaataccatcaaagaattgcacacagtaccatctaatttaagggctttgatcattggttgtggtttacaagcaattcaacagtttaccggttggaattctttgatgtatttctctggtaccatcttcgaaactgtcggtttcaaaaattcttccgctgtttccatcatcgtgtccggtaccaattttattttcactttagttgcctttttttccattgacaaaataggccgtagaaccatattattgattggattaccaggcatgaccatggctttagtcgtgtgctctattgctttccattttttaggtattaagtttgatggcgctgtcgctgtggtggtttcctccggtttctcctcttggggtattgtgatcatcgtatttattatcgtatttgctgcgttctacgctcttggtatcggtactgttccatggcaacaaagtgaattattcccccaaaacgtgagaggtattgggacttcttatgcaactgctacaaactgggctggttctttggttattgcatccacatttttgaccatgttacagaatatcactcctgcaggtacatttgcctttttcgcgggattgtcttgcttatctaccattttctgctacttctgttatccagaattatctggattggagttagaagaggtacaaactattttgaaggacgggttcaacatcaaagcctccaaagctttggccaagaagagaaaacagcaagttgccagagttcatgaattgaaatatgaaccaactcaagagattatagaggatatatga

SEQ ID NO: 2747 - DNA, 1152 bp, Saccharomyces cerevisiae
atggtcgtgacatttttgcaggacctggaagttttgcaagatgcattattaaataatttgcaaaaattaagtgcaatctcccgcagaaaagaaagcggagaaagcaagcatgataataaggacagttttgcagccattgccaacgaacacaatgatgaagaagaagagattgaatttgaggatttggtgaatattatagagagcaaagtttcagatttcgaatcggtactgaaatgtagtattgtggaaatgacctacaaataccccgaattaaaattacagtgggaaaaaagccctagatacgatcaatgcgataagttgcatattgtgaagcttgataaacaaatgaacgaggacatatatgctcagttggtcgaagaactggatttcgtgttgcaattcgtcgattggttctattgctaccgcctgaaagtcaaagagattctacgacaacaccacaaacgtgacttagcttggaacgacgagaaaagagaccgcgctataaaatttcacgctgtggattacgacaagcttcaccaaggaacgtcgtcatcgtcaagcttaacgtccacatcgatggaaaaagccagcactagagagaagcttttgagcaaaacaaaacaactgacgaataacttggtgagaggaaatcaaattttgcagtccggaattttacaaagtgacctgaatttggatgaattgagagcccaaaccaattccttaacacaaatcgatgacaagtacactcaattcgaaaccgtcttcaagaaaactgccgatttggtcaaagtactggaaaatgcctcccatcaagagaaacgagatgtctatttatcacttgggttcctcctatgctgcgtctcgtgggttctatggcgtcgtattttcaagttacctgttaaactcggcctctggctgctattcaagtttttcaagggtatactcgtcaccctaggtctagttaaaagctatgcaggctcctcgtcctctcttcaagcacccagtcttgtgctaaatgcacccattctagccactacaactacatcctcagcaacctctgtggaaccattcgcatctgtatcagccgtcagtagtatccagcgggctgtcgatgaggccgtggacaggatcgtctcacatgatgagctatga

SEQ ID NO: 2748 - DNA, 1152 bp, Artificial Sequence
  Description of Artificial Sequence: Synthetic polynucleotide
atggtcgtgacatttttgcaggacttggaagttttgcaagatgcattattaaataatttgcaaaaattaagtgcaatctcccgcagaaaagaaagcggagaaagcaagcatgataataaggacagttttgcagccattgccaacgaacacaatgatgaagaagaagagattgaatttgaggatttggtgaatattatagagagcaaagtttctgatttcgaaagtgtattgaaatgtagtattgtggaaatgacctacaaataccccgaattaaaattacagtgggaaaaaagccctagatacgatcaatgcgataagttgcatattgtgaagcttgataaacaaatgaacgaggacatatatgctcagttggtcgaagaattagatttcgtgttgcaattcgtcgattggttctattgctaccgcttaaaagtcaaagagattttaagacaacaccacaaacgtgacttagcttggaacgacgagaaaagagaccgcgctataaaatttcacgctgtggattacgacaagcttcaccaaggaacgtcttcttcttctagcttaacgtccacatctatggaaaaagccagcactagagagaagcttttgagcaaaacaaaacaattaacgaataacttggtgagaggaaatcaaattttgcagtccggaattttacaaagtgacttgaatttggatgaattgagagcccaaaccaattccttaacacaaatcgatgacaagtacactcaattcgaaaccgtcttcaagaaaactgccgatttggtcaaagtattggaaaatgcctcccatcaagagaaaagagatgtctatttatctcttgggttcctcctttgctgcgtctcttgggttttatggcgtcgtattttcaagttacctgttaaactcggcctctggttgttattcaagtttttcaagggtatactcgtcaccttgggtttagttaaaagctatgcaggctcctcctcctctcttcaagcacccagtcttgtgttgaatgcacccattttagccactacaactacatcctctgcaacctctgtggaaccattcgcatctgtatctgccgtcagtagtatccagcgtgctgtcgatgaggccgtggacaggatcgtctctcatgatgagttgtga

SEQ ID NO: 2749 - DNA, 2244 bp, Saccharomyces cerevisiae
atgagacgagaaacggtgggtgaattttcttcagatgacgatgatgatattcttttggaattaggcaccaggcctccaaggtttactcaaataccgccatcatcagcagcattacaaacacaaattcccactactttggaggttacaacgaccacattaaacaataaacagagtaaaaatgataaccaactggttaaccaactgaataaagctcaaggtgaagcaagcatgcttcgtgataaaataaactttttgaacattgaaagggaaaaggaaaagaatattcaagccgtcaaagttaatgaattgcaagtcaagcatcttcaagagttggctaaattaaaacaagaattacagaaactggaagatgagaagaagttcttacagatggaagcgagaggaaaatcgaaaagggaagttattacgaatgtaaaaccaccgtcaacaacattatcaacaaacacaaacactataacgccagattcgtcctcagttgcaatcgaagcaaaacctcaatcaccacaatcaaaaaaacgtaagataagtgataatttactgaaaaaaaatatggttcccctaaacccaaataggattattcccgatgaaacgagtttatttctagagtcaatattacttcatcaaataataggcgctgacctgagcacaatagaaatattaaatagattgaagcttgactacatcacagagtttaaatttaagaatttcgtcattgctaaaggagcccccatagggaagtccatagtttctctacttttgcgatgtaaaaagacgttgaccctcgacaggttcatagatactttgctagaggatatagctgttttgatcaaggaaatatcagttcatccaaatgaatcgaaattagctgtcccatttctcgttgcattgatgtatcagattgtacaatttcgtcctagtgccactcataatttagcactgaaggattgttttctttttatttgcgatttaataagaatctatcatcatgtattgaaagtaccgatacatgaatcaaatatgaatttgcatgtagaacctcagattttccaatatgaactgatagactatttgataatttcgtattcctttgatctcctagaaggtatattaagggtactgcagtcgcatcctaagcaaacttatatggaattttttgatgaaaatattctaaaatcatttgaatttgtctacaaactagcactaaccatttcatacaagccaatggtaaatgtaatatttagtgcagtcgaggtcgttaatattatcactagtataatattaaatatggacaattcctcagatctgaaatccttgataagcggtagttggtggagagattgtattacaagattatacgctcttttggaaaaggaaattaagagtggcgacgtatataatgaaaatgtggatactacaactcttcatatgtcgaagtaccatgacttttttgggttaatccgaaatataggtgataatgaattgggaggattgatatcaaagctgatttatactgaccgattgcaaagtgtcccaagggtaatttctaaagaggatattgggatggatagcgacaaattcactgcccctataataggttacaagatggaaaaatggcttttgaagttaaaagatgaagttttaaatatttttgaaaatttattaatgatctatggagacgatgcgaccatagtaaatggagaaatgctcatccactcctctaaattcttatccagggagcaagcgttaatgatagaaaggtacgtgggacaagactccccgaacttggacctcagatgccatcttattgaacatactttaaccataatatataggctatggaaagaccatttcaaacaattgcgtgaagaacaaatcaagcaggtagaaagccaattgattatgtcactatggaggtttctcgtatgccaaaccgaaactgtgacagcaaacgaaagagaaatgagagatcatcgacaccttgtagatagtttgcatgatctgacgataaaggatcaagcctcttattacgaagatgcctttgaggatttaccagaatatatcgaagaagaattgaagatgcaattgaataaaagaacggggagaataatgcaagtaaagtacgatgagaaatttcaagaaatggcaagaactattcttgagtcaaaatcattcgatctaaccacactagaggaggccgattcattatatatctcaatgggactgtaa

SEQ ID NO: 2750 - DNA, 2244 bp, Artificial Sequence
  Description of Artificial Sequence: Synthetic polynucleotide
atgagaagagaaacggtgggtgaattttcttctgatgacgatgatgatattcttttggaattaggcaccaggcctccaaggtttactcaaataccgccatcttctgcagcattacaaacacaaattcccactactttggaggttacaacgaccacattaaacaataaacagagtaaaaatgataaccaattggttaaccaattgaataaagctcaaggtgaagcaagcatgcttcgtgataaaataaactttttgaacattgaaagggaaaaggaaaagaatattcaagccgtcaaagttaatgaattgcaagtcaagcatcttcaagagttggctaaattaaaacaagaattacagaaattagaagatgagaagaagttcttacagatggaagcgagaggaaaatctaaaagggaagttattacgaatgtaaaaccaccgtccacaacattatctacaaacacaaacactataacgccagattcttcctctgttgcaatcgaagcaaaacctcaatctccacaaagtaaaaaacgtaagataagtgataatttattgaaaaaaaatatggttcccttaaacccaaataggattattcccgatgaaacgagtttatttttggagagtatattacttcatcaaataataggcgctgacttgagcacaatagaaatattaaatagattgaagcttgactacatcacagagtttaaatttaagaatttcgtcattgctaaaggagcccccatagggaagtccatagtttctttacttttgagatgtaaaaagacgttgaccctcgacaggttcatagatactttgttggaggatatagctgttttgatcaaggaaatatctgttcatccaaatgaaagtaaattagctgtcccatttctcgttgcattgatgtatcagattgtacaatttcgtcctagtgccactcataatttagcattgaaggattgttttctttttatttgcgatttaataagaatctatcatcatgtattgaaagtaccgatacatgaaagtaatatgaatttgcatgtagaacctcagattttccaatatgaattgatagactatttgataatttcttattcctttgatctcttggaaggtatattaagggtattacagtctcatcctaagcaaacttatatggaattttttgatgaaaatattttgaaaagttttgaatttgtctacaaattggcattgaccatttcttacaagccaatggtaaatgtaatatttagtgcagtcgaggtcgttaatattatcactagtataatattaaatatggacaattccagtgatttgaaatccttgataagcggtagttggtggagagattgtattacaagattatacgctcttttggaaaaggaaattaagagtggcgacgtatataatgaaaatgtggatactacaactcttcatatgtccaagtaccatgacttttttgggttaatcagaaatataggtgataatgaattgggaggattgatatccaagttgatttatactgacagattgcaaagtgtcccaagggtaatttctaaagaggatattgggatggatagcgacaaattcactgcccctataataggttacaagatggaaaaatggcttttgaagttaaaagatgaagttttaaatatttttgaaaatttattaatgatctatggagacgatgcgaccatagtaaatggagaaatgctcatccactcctctaaattcttatccagggagcaagcgttaatgatagaaaggtacgtgggacaagactccccgaacttggacctcagatgccatcttattgaacatactttaaccataatatataggctttggaaagaccatttcaaacaattgcgtgaagaacaaatcaagcaggtagaaagccaattgattatgtctctttggaggtttctcgtatgccaaaccgaaactgtgacagcaaacgaaagagaaatgagagatcataggcaccttgtagatagtttgcatgatttgacgataaaggatcaagcctcttattacgaagatgcctttgaggatttaccagaatatatcgaagaagaattgaagatgcaattgaataaaagaacggggagaataatgcaagtaaagtacgatgagaaatttcaagaaatggcaagaactattcttgagagtaaatctttcgatttgaccacattagaggaggccgattctttatatatctctatgggattatga

SEQ ID NO: 2751 - DNA, 267 bp, Saccharomyces cerevisiae
atgggtaagggtactccttcattcggtaagcgtcacaacaaatctcacaccttgtgtaacagatgtggtcgtcgttctttccatgttcaaaagaagacctgttcctcttgtggttacccatccgctaagactagatctcacaactgggctgccaaggcaaagagaagacacactactggtaccggtagaatgagatatttgaagcatgtctccagaagatttaagaacggtttccaaaccggttctgctaaggctacttctgcttaa

SEQ ID NO: 2752 - DNA, 267 bp, Artificial Sequence
  Description of Artificial Sequence: Synthetic polynucleotide
atgggtaagggtactccttctttcggtaagcgtcacaacaaatctcacaccttgtgtaacagatgtggtcgtcgttctttccatgttcaaaagaagacctgttcctcttgtggttacccatccgctaagactagatctcacaactgggctgccaaggcaaagagaagacacactactggtaccggtagaatgagatatttgaagcatgtctccagaagatttaagaacggtttccaaaccggttctgctaaggctacttctgcttga

SEQ ID NO: 2753 - DNA, 1566 bp, Saccharomyces cerevisiae
atgtcccatctcttcccaccatcatcaccagttgctggtaaacctttggaaagcccacaaaaagaacctggtaagcttgctaatacttctgtattgaccttaggaagaaaacggtataattacgaattggaagagtatcctactccagacccgtcgtctagcatcggaagacaatcttcaccagtgaaagatatcacttcacgtttaaatgagaccaaatctgccttgtcatctccttcaaagcaagaaaaggtgcttgcaggccctatcgagattgaattagatgcatcggatccctcacgtttagccatcggtaggaaaaaatcagtctgcaacattattttgccatgcagaaagaatatctctaggcagcacgcttttatttcatacgccgccgacagaaatgaaataaaattggaatgtaatggaactaatgggttgtccgttcacttgccttactccatgcagttgcatttggtaaaacccttcccaacaaggaacttttataaactagtggcagaagagcctttgacctcgcaaaatactaaacaatcgcatggaaaaactcttcaaaagaaccaaaacttcatcagctttgttttggctaaaggtgaaactgttactttcccctatatccaaggaagtttcataaattttacaggcgtcacagtctgtctttcattgaaaaaagtagcaccttatcctggcgatggcaacaataactttgacgaagagaactcgacagaaacggaggatgagttgtgtttattaacaacaacgagcgatgatttttcttggcaaaaagaaacaccttcgatgaaatttgtcccagttgagcattcacctcgtacagaacagatctcaaaaccattacttattgcatctcctgctcttgtgaaaaactcccccattagttatagaacaacaccccaaacatctttcgttattaatcagccatcaactccaaagaaactgaagcgtaaatcaatttcattgaaaaataacactatacaagagacaccacttcctaaagataaaataattgggacattaagtgccagtactaggagtggtggcattaatgaagaagaatctttcgcagcagttgcaaaaaaaactaaagagctgtcttctacaaccgcgattgtatctcctgcacaaaaacgtcttaagacttcattgaatattattcccgaaatttctcggtcgctctcagaaagaggaattcggtttgatgacctagttcatgtgctatgtaatcatcttgcattttctaaccttcaacaaacgcctttatcccaattgcaaaacatcaattccaacacttcacaattaagcaaagatgaactaaaaaaggtcttggagactatttcttgcattggtattattgtgcgtgaaggaaaagatgcgtctggcaagccattagaagacgagtattactatgatgttgaaaacgatgatagcgacgagagaaagattttgtataattcgttaaaaggcaggagccgattaaggtcgtgcaggaagaaacataaacagtatttctggaagaggccgaccaaataa

SEQ ID NO: 2754 - DNA, 1566 bp, Artificial Sequence
  Description of Artificial Sequence: Synthetic polynucleotide
atgtcccatctcttcccaccatcttctccagttgctggtaaacctttggaaagcccacaaaaagaacctggtaagcttgctaatacttctgtattgaccttaggaagaaaaagatataattacgaattggaagagtatcctactccagacccgtcttctagcatcggaagacaatcttctccagtgaaagatatcacttctcgtttaaatgagaccaaatctgccttgtcttctccttctaagcaagaaaaggtgcttgcaggccctatcgagattgaattagatgcatctgatccctctcgtttagccatcggtaggaaaaaatctgtctgcaacattattttgccatgcagaaagaatatctctaggcagcacgcttttatttcttacgccgccgacagaaatgaaataaaattggaatgtaatggaactaatgggttgtccgttcacttgccttactccatgcagttgcatttggtaaaacccttcccaacaaggaacttttataaattagtggcagaagagcctttgacctctcaaaatactaaacaatctcatggaaaaactcttcaaaagaaccaaaacttcatcagctttgttttggctaaaggtgaaactgttactttcccctatatccaaggaagtttcataaattttacaggcgtcacagtctgtctttctttgaaaaaagtagcaccttatcctggcgatggcaacaataactttgacgaagagaactccacagaaacggaggatgagttgtgtttattaacaacaacgagcgatgatttttcttggcaaaaagaaacaccttctatgaaatttgtcccagttgagcattctcctcgtacagaacagatctccaaaccattacttattgcatctcctgctcttgtgaaaaactcccccattagttatagaacaacaccccaaacatctttcgttattaatcagccatctactccaaagaaattgaagcgtaaatccatttctttgaaaaataacactatacaagagacaccacttcctaaagataaaataattgggacattaagtgccagtactaggagtggtggcattaatgaagaagaatctttcgcagcagttgcaaaaaaaactaaagagctttcttctacaaccgcgattgtatctcctgcacaaaaacgtcttaagacttctttgaatattattcccgaaatttctaggtctctctctgaaagaggaattagatttgatgacttggttcatgtgttgtgtaatcatcttgcattttctaaccttcaacaaacgcctttatcccaattgcaaaacatcaattccaacacttctcaattaagcaaagatgaattgaaaaaggtcttggagactatttcttgcattggtattattgtgcgtgaaggaaaagatgcgtctggcaagccattagaagacgagtattactatgatgttgaaaacgatgatagcgacgagagaaagattttgtataattctttaaaaggcaggagcagattaaggagttgcaggaagaaacataaacagtatttctggaagaggccgaccaaatga

SEQ ID NO: 2755 - DNA, 1155 bp, Saccharomyces cerevisiae
atgtccaagagcaaaactttcttatttacctctgaatccgtcggtgaaggtcacccagacaagatttgtgaccaagtttctgatgctattttggacgcttgtttagaacaagatccattctccaaggttgcctgtgaaacagctgccaaaactggtatgattatggttttcggtgaaattaccaccaaagctagacttgactaccaacaaatagtaagagataccatcaagaagattggttatgacgattctgccaagggtttcgactacaagacatgtaatgttttagtagctatcgaacaacaatctccagatatcgctcaaggtctgcactatgaaaagagcttagaagacttaggtgctggtgaccaaggtataatgtttggttacgctacagacgaaactccagaagggttaccattgaccattcttttggctcacaaattgaacatggctatggcagatgctagaagagatggttctctcccatggttgagaccagacacaaagactcaagtcactgtcgaatacgaagacgacaatggtagatgggttccaaagaggatagataccgttgttatttctgctcaacatgctgatgaaatttccaccgctgacttgagaactcaacttcaaaaagatattgttgaaaaggtcataccaaaggatatgttagacgaaaataccaaatatttcatccaaccatccggtagattcgtcatcggtggtcctcaaggtgacgctggtttgaccggtagaaagattattgtcgacgcttacggtggtgcctcatccgtcggtggtggtgccttctccggtaaggactattccaaggtcgatcgttccgctgcttacgctgctagatgggttgccaagtctctagttgccgctggtttgtgtaagagagtccaagtccaattttcatatgctattggtattgctgaaccattgtctttacatgtggacacctatggtacagctacaaaatcagatgacgaaatcattgaaattattaagaagaacttcgacttgagaccaggtgtgttagtaaaggaattagatttggctagaccaatttacttaccaaccgcttcttatggtcacttcactaatcaagagtactcatgggaaaaaccaaagaaattggaattttaa

SEQ ID NO: 2756 - DNA, 1155 bp, Artificial Sequence
  Description of Artificial Sequence: Synthetic polynucleotide
atgtccaagagcaaaactttcttatttacctctgaatccgtcggtgaaggtcacccagacaagatttgtgaccaagtttctgatgctattttggacgcttgtttagaacaagatccattctccaaggttgcctgtgaaacagctgccaaaactggtatgattatggttttcggtgaaattaccaccaaagctagacttgactaccaacaaatagtaagagataccatcaagaagattggttatgacgattctgccaagggtttcgactacaagacatgtaatgttttagtagctatcgaacaacaatctccagatatcgctcaaggtttacactatgaaaagagcttagaagacttaggtgctggtgaccaaggtataatgtttggttacgctacagacgaaactccagaagggttaccattgaccattcttttggctcacaaattgaacatggctatggcagatgctagaagagatggttctctcccatggttgagaccagacacaaagactcaagtcactgtcgaatacgaagacgacaatggtagatgggttccaaagaggatagataccgttgttatttctgctcaacatgctgatgaaatttccaccgctgacttgagaactcaacttcaaaaagatattgttgaaaaggtcataccaaaggatatgttagacgaaaataccaaatatttcatccaaccatccggtagattcgtcatcggtggtcctcaaggtgacgctggtttgaccggtagaaagattattgtcgacgcttacggtggtgcctcttccgtcggtggtggtgccttctccggtaaggactattccaaggtcgatcgttccgctgcttacgctgctagatgggttgccaagtctttggttgccgctggtttgtgtaagagagtccaagtccaattttcttatgctattggtattgctgaaccattgtctttacatgtggacacctatggtacagctacaaaatctgatgacgaaatcattgaaattattaagaagaacttcgacttgagaccaggtgtgttagtaaaggaattagatttggctagaccaatttacttaccaaccgcttcttatggtcacttcactaatcaagagtactcttgggaaaaaccaaagaaattggaattttga

SEQ ID NO: 2757 - DNA, 825 bp, Saccharomyces cerevisiae
atgatctctgtcatggcggatgagaaacataaggagtattttaagctatactactttcagtacatgataattggtctatgtacgatattattcctctattcggagatatccctggtacctaggggccaaaacatcgaatttagtcttgatgaccccagtatatcaaaacgttatgtacctaacgaactcgtgggcccactagaatgtttgattttgagtgttggactgagtaacatggtcgtcttctggacctgcatgtttgacaaggacttactgaagaagaatagagtaaagagactaagagagaggccggacggaatctcgaacgattttcacttcatgcatactagcattctatgtctgatgctgattataagcataaatgctgccctaacaggcgccttaaagttgattataggaaacttgaggcctgactttgttgatagatgtatacctgacctccaaaagatgagtgattcagattctttggtttttggcttggacatttgcaagcagactaacaaatggattctatacgaaggcttaaaaagcactccaagcggacattcaagtttcatagtcagtaccatgggctttacatatctttggcaaagggttttcaccacacgcaatacaagaagttgcatttggtgccctttattagctctagtagtaatggtttcaagggttatcgatcacagacatcattggtacgatgttgtctctggagctgttctagcatttttagtcatttattgttgctggaaatggacatttacaaacttggcgaaaagagacatacttccttcaccggttagtgtttag

SEQ ID NO: 2758 - DNA, 825 bp, Artificial Sequence
  Description of Artificial Sequence: Synthetic polynucleotide
atgatctctgtcatggcggatgagaaacataaggagtattttaagttgtactactttcagtacatgataattggtttgtgtacgatattattcctctattctgagatatccttagtacctaggggccaaaacatcgaatttagtcttgatgaccccagtatatccaaacgttatgtacctaacgaactcgtgggcccattggaatgtttgattttgagtgttggattgagtaacatggtcgtcttctggacctgcatgtttgacaaggacttattgaagaagaatagagtaaagagattgagagagaggccggacggaatctccaacgattttcacttcatgcatactagcattctttgtttgatgttgattataagcataaatgctgccttaacaggcgccttaaagttgattataggaaacttgaggcctgactttgttgatagatgtatacctgacctccaaaagatgagtgattctgattctttggtttttggcttggacatttgcaagcagactaacaaatggattttatacgaaggcttaaaaagcactccaagcggacattctagtttcatagtcagtaccatgggctttacatatctttggcaaagggttttcaccacacgcaatacaagaagttgcatttggtgccctttattagctttggtagtaatggtttccagggttatcgatcacagacatcattggtacgatgttgtctctggagctgttttagcatttttagtcatttattgttgctggaaatggacatttacaaacttggcgaaaagagacatacttccttctccggttagtgtttga

SEQ ID NO: 2759 - DNA, 384 bp, Saccharomyces cerevisiae
atgatctgttatttccttgttgtaactataaattttctaaaagaaaagacaaccatttgccattattttgttaacattttttcattgtttttgtttttgtttgtttttgtttttgtttttatttttgtctactttttttatgttattttgttttatcgtttctgttcgttgtttacctattttcctgccaattcaatttggtactatctttctattatcaatattttctttcccttatgtttttttctatatgaaaacttcacagggagaaatagaagaaaatgttcattattctgtttaactttgataaaaattacttatacgtctcccaatcatggtttcatggtcactggtaaggaaaaattcgaaaaactacgggactaa

SEQ ID NO: 2760 - DNA, 384 bp, Artificial Sequence
  Description of Artificial Sequence: Synthetic polynucleotide
atgatctgttatttccttgttgtaactataaattttttgaaagaaaagacaaccatttgccattattttgttaacattttttctttgtttttgtttttgtttgtttttgtttttgtttttatttttgtctactttttttatgttattttgttttatcgtttctgttctttgtttacctattttcctgccaattctatttggtactatctttctattatcaatattttctttcccttatgtttttttttatatgaaaacttcacagggagaaatagaagaaaatgttctttattctgtttaactttgataaaaattacttatacgtctcccaatcatggtttcatggtcactggtaaggaaaaattcgaaaaattaagagactga

SEQ ID NO: 2761 - DNA, 2526 bp, Saccharomyces cerevisiae
atggacctcccaactgttaatagcacaacaagcatttccgacaatgtggatttaaagaactactatgaggacttgcttttcaagaataacagcggaaaatcgctatccgatttaccccgtaaactgaatgataactccaataattcaggaagtgatacggttgatccgcttgctggcctgaataatttgagaaactcaataaaaagtgcgggaaatggtatggaaaacaggaggacttttgacgatattgattttatgggtaggtttccgtatttgccaccagtgccaaatcaacaacagcaaccgttttctcaccagaacgggttcattcaagaacacccttccagtaatttgacctcttttcaaatgtcttcgtctaattcagagccgatgtccgcaccgcccatttcatccaataacaataatttaaactctactcaaatgggtaattatcaagctcaacaacggtcgttcccgcaatttaatggaaattcatttcattcaaatggaaacgacctaatggggaatcggatggattcagactacatgcgtttaatgaataaaacaaacataggttttacttccaatagcggcagcaattttgctgccccatcacacagtgctggcaacccatctagtatgaacaaccaacaagtaccatcatttaattggcaacagccatctcatccagagtctaccattaggagatcctcctacatatcagatactctaatcaaccatcaaatgcctgacgctcggcaaaagcaaacatcccaagtgcagcagcaacacgctcaaggtttcaatcttttcaatagcagattcaactatgacaacttgaactcaacccatttgaccgccaaaggtgtgcccgagtttggaaatggtgtacaacctccgtatccttatgataacgagcctaataatgccagtatcagcaatagtaataacaacaacaacagtcacaatatggttccaatgcaacagtttcgccggaatacacaaccggtagcgagcttcaatccatcccttcctacttttcaacaacaacagcaacaaccacaacaaccacaacaaccaagaaacgttaatgtacctacttctttcaatggcgaacgtgttgatgatgttcagcttgttcaacttcaaagaagcagttctgtcccttcttctacaaactcacataaccttcagaacgagaacagcaatgaaggaaatgtatctttggacaatggtttagttttaattcagggtaaacacttgacttcgtccaaaaccttacacgatttatacagcgactgtggcagcggctattttgctagctctgcagtttttgaattcacagataatattaagaaaatgctgaagttgcacgattctaatgaaagttacgacgcgaagaacatgggcttaatcgatgaagaaggtaatacataccaatctttattaaatttcttggacattttaagaagttgcaacatgaattacgttaatgatccagagtcgaataatggaattgtttccaataatggaggcaataaaaataggaggaagggctctttcacaacagaactatcatgcaggaatgctaataactcctttttaccttatacaccattggtactggttgctttgaaaaatgggaaacttgaactactatctactccacaagctaccaatttgttgttaaagagaggtgacttggttattattgatggtgaccgtggaagggatttagtattggttgttgagccctctgtcgatttgaatttagcattatttataaattttctgaaaaagaaaattcactttgactctttaattacaagtgagtcacagcactatcgcaatgatgagtttattcaaatgttgattgactcaaaaaatgggcaaaagaaaaaattaaatcccaaattgtatgatgttgttgaattaactgagttaatcataccatctaaacaagtcttacgttttgccaccccgtgggaggtaacaacgaatttgcacaataaatttgaagatgaattaaaagccttgcatattgctcagagtaaattacaagcgttaaatgataattcaaaatctcaaaatacaaatgacagttcttccaataattttacgaatgctgcaacttattcaaagcctaaattgaatatcaagattttaaacgcagaattccaatttgatagaaagaaattaacgttttactacgtttgtgaggagagaaatgattttagagacttgataaaagagctgttcaaatattacaagacaagaatttggttgtgtgccatcccgaataatctgtctattgattctaagtattatgataaacaacaaaaagagctgaaattatatcaaaacatagtaaaaaattacaatgctgaagatttaatgaatgtcaatgagttttcgcagaacagggggaataacagagttaattttgcacctccgttgaacgaaattgaactcgacaactttcagattgctgtgtatgaagaattagttcacgaattatttcattaa

SEQ ID NO: 2762 - DNA, 2526 bp, Artificial Sequence
  Description of Artificial Sequence: Synthetic polynucleotide
atggacctcccaactgttaatagcacaacaagcatttccgacaatgtggatttaaagaactactatgaggacttgcttttcaagaataacagcggaaaatctttatccgatttaccccgtaaattgaatgataactccaataattctggaagtgatacggttgatccgcttgctggcttgaataatttgagaaacagcataaaaagtgcgggaaatggtatggaaaacaggaggacttttgacgatattgattttatgggtaggtttccgtatttgccaccagtgccaaatcaacaacagcaaccgttttctcaccagaacgggttcattcaagaacacccttccagtaatttgacctcttttcaaatgtcttcttctaattctgagccgatgtccgcaccgcccatttcttccaataacaataatttaaactctactcaaatgggtaattatcaagctcaacaaagatctttcccgcaatttaatggaaattcttttcattctaatggaaacgacttgatggggaatagaatggattctgactacatgcgtttaatgaataaaacaaacataggttttacttccaatagcggcagcaattttgctgccccatctcacagtgctggcaacccatctagtatgaacaaccaacaagtaccatcttttaattggcaacagccatctcatccagagtctaccattaggagatcctcctacatatctgatactttgatcaaccatcaaatgcctgacgctagacaaaagcaaacatcccaagtgcagcagcaacacgctcaaggtttcaatcttttcaatagcagattcaactatgacaacttgaactctacccatttgaccgccaaaggtgtgcccgagtttggaaatggtgtacaacctccgtatccttatgataacgagcctaataatgccagtatcagcaatagtaataacaacaacaacagtcacaatatggttccaatgcaacagtttcgcagaaatacacaaccggtagcgagcttcaatccatcccttcctacttttcaacaacaacagcaacaaccacaacaaccacaacaaccaagaaacgttaatgtacctacttctttcaatggcgaacgtgttgatgatgttcagcttgttcaacttcaaagaagcagttctgtcccttcttctacaaactctcataaccttcagaacgagaacagcaatgaaggaaatgtatctttggacaatggtttagttttaattcagggtaaacacttgacttcttccaaaaccttacacgatttatacagcgactgtggcagcggctattttgctagctctgcagtttttgaattcacagataatattaagaaaatgttgaagttgcacgattctaatgaaagttacgacgcgaagaacatgggcttaatcgatgaagaaggtaatacataccaatctttattaaatttcttggacattttaagaagttgcaacatgaattacgttaatgatccagagagcaataatggaattgtttccaataatggaggcaataaaaataggaggaagggctctttcacaacagaattaagttgcaggaatgctaataactcctttttaccttatacaccattggtattggttgctttgaaaaatgggaaacttgaattattatctactccacaagctaccaatttgttgttaaagagaggtgacttggttattattgatggtgaccgtggaagggatttagtattggttgttgagccctctgtcgatttgaatttagcattatttataaattttttgaaaaagaaaattcactttgactctttaattacaagtgagagccagcactatcgcaatgatgagtttattcaaatgttgattgactctaaaaatgggcaaaagaaaaaattaaatcccaaattgtatgatgttgttgaattaactgagttaatcataccatctaaacaagtcttacgttttgccaccccgtgggaggtaacaacgaatttgcacaataaatttgaagatgaattaaaagccttgcatattgctcagagtaaattacaagcgttaaatgataattctaaatctcaaaatacaaatgacagttcttccaataattttacgaatgctgcaacttattccaagcctaaattgaatatcaagattttaaacgcagaattccaatttgatagaaagaaattaacgttttactacgtttgtgaggagagaaatgattttagagacttgataaaagagcttttcaaatattacaagacaagaatttggttgtgtgccatcccgaataatttatctattgattctaagtattatgataaacaacaaaaagagttgaaattatatcaaaacatagtaaaaaattacaatgctgaagatttaatgaatgtcaatgagttttcccagaacagggggaataacagagttaattttgcacctccgttgaacgaaattgaactcgacaactttcagattgctgtgtatgaagaattagttcacgaattatttcattga

SEQ ID NO: 2763 - DNA, 1827 bp, Saccharomyces cerevisiae
atgaaggtcattctccttaagccggttcagttgccaatgctactcttaatactattaaaatttattatggccgctaaggaaggcaaaatacatgtcttagaattcaatgcgagcagtgaatacacgcttgataagagaagagttatctccataaatggctacagcgctacatttggcccagaaattcgagttaaatccggtgacactcttaacttgaaattgactaactggatatgttcagaagaagaagctagtaaagacagtgatgtttggaaggattactgttcaacagctttacattttcatggggtggtacctttagcaaatgaatttgatggaattccaggtttaacacagcccactattggatatggagaaagttattggtataattttaccattgatcaatcaacctgtggtactttttggtaccattcgcattcatcagtacaatacggtgacggtatgagaggtgttctgatagttgaatgcgatgattatgataatcatgtggcaaatactattaattctgtgagagacatagagacactagatgacggtgttgttacaatgaaaaaagataaacacacgaaggaattgacggattatgaagttcaagaaaggattatcactttgagtgattggtataccaattggaatttggacattttaaacgacaaggttttgtcatctaccgggggtacagatcccaaatttgatggatcattaataaatggaaaatcatctgacggtgaaactatcaaaataggatttaacaccgagtatcttcttttgagaatcgtaaactcaggaatgtctggtactcaagtctttcaccttgatggattccaattaattgttctagaagccgacgggattatgattaaaccgttcattgtacaaacgataaatttagcggtcggacaaagatatacaattttggtcaaactaaagtctgacactagttttattcgtatgattaatggctgtaacaaaatgatgggttatataacaaaacagtggtggttttacaaagaaggcgctcatttggacctaccaaagaaccccaatgacgtttccatcgaacacttgcctggtttcactaaggccgagctttatcgcgacatagaaccaacgcaagaagagaataaaaagttacgcacaaaggctgatcctgttgcagttttcgaattcgattatgcttattacaaagatgaaagcacgaaacaaaagtatgggactgggatgtataaggtgaacgaacggacattcagcgagtacgtaaaagacccggtaaggttcggattcaacgaaacatatgatattgtaatcaactcactggaccacatgagacacccatggcatatgcatggccatcacttccagataatatctcttggcaataaaggtgatggcccatttcacaaagacgtacaagagggcaaggcatggagccgctatcagaacgatttacgtcacctggcccgaaccggaaaggcaccgatggtaagggatagcattaacattgcaggaaattcttacgcggttttgagaattaacaccgagatgcccggaaaatggcttttacattgtcatgtggagtggcacatgatgaaggggcttggcattgtctttgaggttccgacaacaaccgaggacagtaccaaacaagcaactacagctgtattatcgtaccctaccaaggaacctgaccctaacactgttgtccatacagccgcacttgaacaaaataagtccaaggtaatagccgtctacatcctaatcatgtgtgcggttgatgctatcttctactggttgctcatgtaa

SEQ ID NO: 2764 - DNA, 1827 bp, Artificial Sequence
  Description of Artificial Sequence: Synthetic polynucleotide
atgaaggtcattctccttaagccggttcagttgccaatgttgctcttaatattattaaaatttattatggccgctaaggaaggcaaaatacatgtcttagaattcaatgcgagcagtgaatacacgcttgataagagaagagttatctccataaatggctacagcgctacatttggcccagaaattagagttaaatccggtgacactcttaacttgaaattgactaactggatatgttctgaagaagaagctagtaaagacagtgatgtttggaaggattactgttctacagctttacattttcatggggtggtacctttagcaaatgaatttgatggaattccaggtttaacacagcccactattggatatggagaaagttattggtataattttaccattgatcaatccacctgtggtactttttggtaccattctcattcttctgtacaatacggtgacggtatgagaggtgttttgatagttgaatgcgatgattatgataatcatgtggcaaatactattaattctgtgagagacatagagacattagatgacggtgttgttacaatgaaaaaagataaacacacgaaggaattgacggattatgaagttcaagaaaggattatcactttgagtgattggtataccaattggaatttggacattttaaacgacaaggttttgtcttctaccgggggtacagatcccaaatttgatggatctttaataaatggaaaatcttctgacggtgaaactatcaaaataggatttaacaccgagtatcttcttttgagaatcgtaaactctggaatgtctggtactcaagtctttcaccttgatggattccaattaattgttttggaagccgacgggattatgattaaaccgttcattgtacaaacgataaatttagcggtcggacaaagatatacaattttggtcaaattgaagtctgacactagttttattcgtatgattaatggctgtaacaaaatgatgggttatataacaaaacagtggtggttttacaaagaaggcgctcatttggacttaccaaagaaccccaatgacgtttccatcgaacacttgcctggtttcactaaggccgagctttatcgcgacatagaaccaacgcaagaagagaataaaaagttacgcacaaaggctgatcctgttgcagttttcgaattcgattatgcttattacaaagatgaaagcacgaaacaaaagtatgggactgggatgtataaggtgaacgaaagaacattcagcgagtacgtaaaagacccggtaaggttcggattcaacgaaacatatgatattgtaatcaactctttggaccacatgagacacccatggcatatgcatggccatcacttccagataatatctcttggcaataaaggtgatggcccatttcacaaagacgtacaagagggcaaggcatggagccgctatcagaacgatttacgtcacttggccagaaccggaaaggcaccgatggtaagggatagcattaacattgcaggaaattcttacgcggttttgagaattaacaccgagatgcccggaaaatggcttttacattgtcatgtggagtggcacatgatgaaggggcttggcattgtctttgaggttccgacaacaaccgaggacagtaccaaacaagcaactacagctgtattatcttaccctaccaaggaacctgaccctaacactgttgtccatacagccgcacttgaacaaaataagtccaaggtaatagccgtctacatcttaatcatgtgtgcggttgatgctatcttctactggttgctcatgtga

SEQ ID NO: 2765 - DNA, 3429 bp, Saccharomyces cerevisiae
atggcaatcaatggtaacagtattcctgccataaaggataataccatcggtccatggaaactaggtgaaactctcggtctagggagcactggtaaagtccagcttgctcgtaatggatccacaggacaagaggcggcagttaaggtaatatcaaaagcagtattcaataccggtaatgtcagcggtacttcgattgttggctccaccaccccagatgctctaccatatggtatagaacgcgaaataatcattatgaagttgttaaaccacccaaatgtgttacgtttatatgatgtctgggaaacaaatacagatttataccttgttttagaatacgcggagaaaggtgagttgttcaacttattggttgagagaggtcctctgccagagcatgaagctatcaggttttttagacaaattattattggtgtgtcgtactgtcatgcgttgggtattgtccatcgtgatctaaaaccggaaaatctattattagatcataaatataacatcaagattgcagattttggtatggctgctttggaaactgaaggaaagctactggagacgtcgtgcggatcaccacattatgctgcaccagaaattgtatctggtataccgtatcaaggtttcgcaagtgatgtgtggtcatgcggtgtgatcctattcgcccttcttactggtcggttaccctttgacgaggaagatggaaatataagaacactattacttaaagttcaaaaaggtgagttcgaaatgccttctgatgatgaaatttcgcgtgaagctcaggatttgattagaaaaatcttaaccgttgatcctgaaagaagaatcaagaccagagatatactcaaacatccgctattacaaaaatatccaagtataagagattctaaaagtattagaggcttaccaagagaagacacatatctcacgccattatcagaaagtaattcttctattgacgctacgattttgcaaaatttagtaatattatggcatggaagagatcctgaaggaattaaggaaaaactaagagaacctggcgctaatgcagaaaagacattatatgcactactgtatagatttaagtgtgacactcaaaaagagcttattaagcaacagcaagttaagaagaggcagtcaattagtagcgtttctgtttccccatctaaaaaagtatcgacaactccacaacgcagaagaaatagagaatctttaattagtgtaacatcttctcgtaaaaagccaatatccttcaacaaattcactgcctccagtgcctcctccagcaatctaactacacccggttcttcaaaacgcctttcaaaaaacttctcttcaaagaagaaattatctacaatcgttaaccaatcttctccaacaccagcatcacgtaataaaagagcttcggttataaatgtggaaaagaatcaaaaaagagcctctatcttttctactaccaagaagaacaaaagatcttctagatctatcaagagaatgtcattgataccaagcatgaaacgtgaatcggtgacaacaaaattaatgtcaacatatgcgaaattggcagaggatgacgattgggaatacattgagaaggaaacaaagagaacgagctcaaattttgcaactttgatagatgaaatttttgagtacgaaaagtacgaacaaataaggaaagagaaggaagagctagaacgtaaagtgagagaagcaaaagcacgtgaagagctggaacgtagaagacgtaaacaagaagaaaaagaacgtgcaagaaaattactagaaaaggaagatctgaaaagaaaacaggaggaactcaagaagcaaattgaaattgatataagtgatctagagcaagagctgtccaaacacaaagaggaaaaactggatggtaatattagatctatctctgctcctatggaaaatgaagagaaaaatatcaatcatttggaggttgatattgacaatattctccgtcgccgcaacttttctttacaaactagacctgtgtcaaggcttgatccgggtataatgttctccagtccaactgaggaagtaagtccagtggaaccaaagagaacagaaaatgaaagacttacaacagaaaagaaaattttagaaactatcagaagatcaaaattcttgggttcatcatttaatatcgataaagagttgaaattgtctaaaatggaatatccaagtataattgcaccacaaagattgtcagaggagcgagtggtgtcagattctaatgatggatatgaatctttgatcctcccgaaggatgggaatggcgtatctcaattaaaggatagtaccgcaacaactgctcccgtctctgatggtaggttgaggaagatctctgaaattagagtaccacaatttactagaaaatcaaggcattttagtgagtccaataaaaggctatctgtcctgtcgatgtactctaccaaggagtcgtttaccaacttggttgatattttgaaaaacggtaaccttgatgtcaataaccaacaaagccaaagaattccaacaccaagaagtgcggatgattcagaatttctttttgaaactgtcaacgaagaagctgaatatacaggaaatagttcgaacgatgagagattgtacgatgtcggtgattccactatcaaagacaaatccgcgttaaagctgaactttgcagatcgttttaatggatcgaacgaagcgaaacaaactgataacttacatcttccgatccttcctccgcttaatggtgacaatgaattgcgtaaacagaatagccaagagggtgaccaggcacatccaaagattaaatcgatgataccagaatcaggctcttcttcacatactgaaaaggaagaagaaaatgaggaaaaggaagagaaaaagccagaacaacacaaacaagaagaggatcaagaaaaaagagagaaagtagtagatgatatggagccaccattgaacaaatctgtgcaaaaaattagggaaaaaaatgctggctcgcaggcaaaggatcattcaaaagatcacttaaaagagcataagcaggataaaaatacagcaattggaaatggttccttctttagaaaattctcaaaatcttcggacaaaacaatggaattgtatgccaagatttctgcaaaacaattgtttaatggtttagagaagctgttgcgtggttggactcagtatggtttaaaaaatataaaatcgcaccccaacaatctgaccttaacgggtaaactatcgagtgataatatattctcactacgttcaacactctttgaggttaatatttatccgagaggtaagatgagcgttgtgcagttcaagaaagtttctggttcattcaaagctgtcaaaaagttggtcaatgaagttgagaacgtcctgaataaggaaggcgttctacaaaaatag

SEQ ID NO: 2766 - DNA, 3429 bp, Artificial Sequence
  Description of Artificial Sequence: Synthetic polynucleotide
atggcaatcaatggtaacagtattcctgccataaaggataataccatcggtccatggaaattgggtgaaactctcggtttggggagcactggtaaagtccagcttgctcgtaatggatccacaggacaagaggcggcagttaaggtaatatccaaagcagtattcaataccggtaatgtcagcggtacttctattgttggctccaccaccccagatgctttgccatatggtatagaacgcgaaataatcattatgaagttgttaaaccacccaaatgtgttacgtttatatgatgtctgggaaacaaatacagatttataccttgttttagaatacgcggagaaaggtgagttgttcaacttattggttgagagaggtcctttaccagagcatgaagctatcaggttttttagacaaattattattggtgtgtcttactgtcatgcgttgggtattgtccatcgtgatttgaaaccggaaaatttattattagatcataaatataacatcaagattgcagattttggtatggctgctttggaaactgaaggaaagttattggagacgagttgcggatctccacattatgctgcaccagaaattgtatctggtataccgtatcaaggtttcgcaagtgatgtgtggtcctgcggtgtgatcttattcgcccttcttactggtagattaccctttgacgaggaagatggaaatataagaacattattacttaaagttcaaaaaggtgagttcgaaatgccttctgatgatgaaatttctcgtgaagctcaggatttgattagaaaaatcttaaccgttgatcctgaaagaagaatcaagaccagagatatactcaaacatccgttgttacaaaaatatccaagtataagagattctaaaagtattagaggcttaccaagagaagacacatatctcacgccattatctgaaagtaattcttctattgacgctacgattttgcaaaatttagtaatattatggcatggaagagatcctgaaggaattaaggaaaaattgagagaacctggcgctaatgcagaaaagacattatatgcattattatatagatttaagtgtgacactcaaaaagagcttattaagcaacagcaagttaagaagaggcagagtattagtagcgtttctgtttccccatctaaaaaagtatctacaactccacaacgcagaagaaatagagaatctttaattagtgtaacatcttctcgtaaaaagccaatatccttcaacaaattcactgcctccagtgcctcctccagcaatttaactacacccggttcttctaaacgcctttctaaaaacttctcttccaagaagaaattatctacaatcgttaaccaatcttctccaacaccagcatctcgtaataaaagagcttctgttataaatgtggaaaagaatcaaaaaagagcctctatcttttctactaccaagaagaacaaaagatcttctagatctatcaagagaatgtctttgataccaagcatgaaacgtgaatctgtgacaacaaaattaatgtctacatatgcgaaattggcagaggatgacgattgggaatacattgagaaggaaacaaagagaacgagcagtaattttgcaactttgatagatgaaatttttgagtacgaaaagtacgaacaaataaggaaagagaaggaagagttagaacgtaaagtgagagaagcaaaagcacgtgaagagttagaacgtagaagacgtaaacaagaagaaaaagaacgtgcaagaaaattattggaaaaggaagatttgaaaagaaaacaggaggaactcaagaagcaaattgaaattgatataagtgatttagagcaagagctttccaaacacaaagaggaaaaattggatggtaatattagatctatctctgctcctatggaaaatgaagagaaaaatatcaatcatttggaggttgatattgacaatattctccgtcgccgcaacttttctttacaaactagacctgtgtctaggcttgatccgggtataatgttctccagtccaactgaggaagtaagtccagtggaaccaaagagaacagaaaatgaaagacttacaacagaaaagaaaattttagaaactatcagaagaagtaaattcttgggttcttcttttaatatcgataaagagttgaaattgtctaaaatggaatatccaagtataattgcaccacaaagattgagtgaggagagagtggtgtctgattctaatgatggatatgaatctttgatcctcccgaaggatgggaatggcgtatctcaattaaaggatagtaccgcaacaactgctcccgtctctgatggtaggttgaggaagatctctgaaattagagtaccacaatttactagaaaatctaggcattttagtgagtccaataaaaggttatctgtcctttctatgtactctaccaaggagtcttttaccaacttggttgatattttgaaaaacggtaaccttgatgtcaataaccaacaaagccaaagaattccaacaccaagaagtgcggatgattctgaatttctttttgaaactgtcaacgaagaagctgaatatacaggaaatagtagtaacgatgagagattgtacgatgtcggtgattccactatcaaagacaaatccgcgttaaagttgaactttgcagatcgttttaatggaagtaacgaagcgaaacaaactgataacttacatcttccgatccttcctccgcttaatggtgacaatgaattgcgtaaacagaatagccaagagggtgaccaggcacatccaaagattaaatctatgataccagaaagtggctcttcttctcatactgaaaaggaagaagaaaatgaggaaaaggaagagaaaaagccagaacaacacaaacaagaagaggatcaagaaaaaagagagaaagtagtagatgatatggagccaccattgaacaaatctgtgcaaaaaattagggaaaaaaatgctggctctcaggcaaaggatcattctaaagatcacttaaaagagcataagcaggataaaaatacagcaattggaaatggttccttctttagaaaattctccaaatcttctgacaaaacaatggaattgtatgccaagatttctgcaaaacaattgtttaatggtttagagaagttgttgcgtggttggactcagtatggtttaaaaaatataaaatctcaccccaacaatttgaccttaacgggtaaattatccagtgataatatattctctttacgttccacactctttgaggttaatatttatccgagaggtaagatgagcgttgtgcagttcaagaaagtttctggttctttcaaagctgtcaaaaagttggtcaatgaagttgagaacgtcttgaataaggaaggcgttttgcaaaaatga

SEQ ID NO: 2767 - DNA, 1992 bp, Saccharomyces cerevisiae
atgacgcttggtaatagacgccatgggcggaataatgagggaagctctaatatgaatatgaatcgtaacgaccttgacgatgtttcccattacgagatgaaggaaatacaaccaaaggaaaaacaaattggctctatagaaccggaaaatgaagtagaatattttgaaaaaacagtggaaaaaaccattgaaaatatggaatatgaaggtgaacatcatgcatcttacttacggaggttcattgactcgtttagaagagcggaaggctcgcatgcaaattccccagactcgagcaactctaatgggactactcctatatccacaaaagattccagctctcaattggacaatgagttgaatcggaagagctcatacatcactgttgatggtattaaacagtcaccacaagaacaagaacagaaacaagaaaatttgaaaaagagtataaagccccgtcatacggtgatgatgtccctagggactggtattggtactggtttgctggtcggtaactccaaagttttgaacaatgcaggtccgggtggtttgatcattggttatgctattatgggtagttgtgtttactgtattattcaagcttgtggtgaattagcggttatatacagtgatttgattggtggatttaatacatatcctttgtttttggtcgaccctgcacttggcttttctgttgcttggcttttttgcttacaatggctatgtgtttgtcctctagaattggtcactgcatccatgactatcaaatattggacgacatctgtgaacccggatgttttcgttgttatcttctacgtactaatcgttgttatcaacgtttttggagctaagggttatgcagaggcagatttcttcttcaattgttgtaaaattctgatgatagttggatttttcattctcgccattattattgattgtggtggtgcaggtaccgatggttacataggtagcaaatattggcgtgatcccggagccttccgtggtgatacacccatccagaggttcaaaggtgtcgttgccacatttgtcacagcagcgttcgcctttggtatgagtgaacagctggctatgactgccagtgaacaatccaatccaagaaaggctattccatcggcggcaaagaaaatgatttatagaattctgtttgtgttcttggcgtctttaacgttagttggtttccttgtaccttacacctcagatcaattgctaggggccgcaggttcagccactaaagcgtcgccctacgtcatcgctgtctcctctcatggtgttcgtgtggttcctcatttcataaacgctgtcatcctgttgtctgttctttccgttgctaacggtgccttctataccagttctcgtattttgatgtcgttggccaaacaaggtaatgcacccaaatgtttcgattacatcgatagggaaggtagacctgctgctgctatgcttgtcagtgcattatttggtgtcattgcattctgtgcctcatctaaaaaggaagaggacgttttcacctggttgttagcaatctccggtttgtctcaattattcacgtggattaccatttgtttgtctcacattaggtttagaagagctatgaaagtgcaaggaaggtccttaggagaggttggttataaatctcaagtcggtgtctgggggtcggcttacgctgtccttatgatggtgttagctttaatcgcccaattttgggttgccattgccccaattggtggaggaggtaagttaagtgcccaatcattttttgagaattatttggctatgccaatctggattgctttatacatcttttacaaagtttggaaaaaagattggagtttattcattcccgctgataaagtagacttagtttctcatagaaacatctttgatgaagaattattaaaacaagaagatgaagaatataaagagagattaagaaacggaccatactggaaaagagttcttgatttctggtgttaa

SEQ ID NO: 2768 - DNA, 1992 bp, Artificial Sequence
  Description of Artificial Sequence: Synthetic polynucleotide
atgacgcttggtaatagacgccatgggagaaataatgagggaagctctaatatgaatatgaatcgtaacgaccttgacgatgtttcccattacgagatgaaggaaatacaaccaaaggaaaaacaaattggctctatagaaccggaaaatgaagtagaatattttgaaaaaacagtggaaaaaaccattgaaaatatggaatatgaaggtgaacatcatgcatcttacttaagaaggttcattgactcttttagaagagcggaaggctctcatgcaaattccccagactccagcaactctaatgggactactcctatatccacaaaagattccagctctcaattggacaatgagttgaatagaaagagctcttacatcactgttgatggtattaaacagtctccacaagaacaagaacagaaacaagaaaatttgaaaaagagtataaagccccgtcatacggtgatgatgtccttagggactggtattggtactggtttgttggtcggtaactccaaagttttgaacaatgcaggtccgggtggtttgatcattggttatgctattatgggtagttgtgtttactgtattattcaagcttgtggtgaattagcggttatatacagtgatttgattggtggatttaatacatatcctttgtttttggtcgaccctgcacttggcttttctgttgcttggcttttttgcttacaatggttatgtgtttgtcctttggaattggtcactgcatccatgactatcaaatattggacgacatctgtgaacccggatgttttcgttgttatcttctacgtattgatcgttgttatcaacgtttttggagctaagggttatgcagaggcagatttcttcttcaattgttgtaaaattttgatgatagttggatttttcattctcgccattattattgattgtggtggtgcaggtaccgatggttacataggtagcaaatattggcgtgatcccggagccttccgtggtgatacacccatccagaggttcaaaggtgtcgttgccacatttgtcacagcagcgttcgcctttggtatgagtgaacagttagctatgactgccagtgaacaatccaatccaagaaaggctattccatctgcggcaaagaaaatgatttatagaattttatttgtgttcttggcgtctttaacgttagttggtttccttgtaccttacacctctgatcaattgttgggggccgcaggttctgccactaaagcgtctccctacgtcatcgctgtctcctctcatggtgttcgtgtggttcctcatttcataaacgctgtcatcttgttgtctgttctttccgttgctaacggtgccttctataccagttctcgtattttgatgtctttggccaaacaaggtaatgcacccaaatgtttcgattacatcgatagggaaggtagacctgctgctgctatgcttgtcagtgcattatttggtgtcattgcattctgtgcctcttctaaaaaggaagaggacgttttcacctggttgttagcaatctccggtttgtctcaattattcacgtggattaccatttgtttgtctcacattaggtttagaagagctatgaaagtgcaaggaaggtccttaggagaggttggttataaatctcaagtcggtgtctgggggtctgcttacgctgtccttatgatggtgttagctttaatcgcccaattttgggttgccattgccccaattggtggaggaggtaagttaagtgcccaaagtttttttgagaattatttggctatgccaatctggattgctttatacatcttttacaaagtttggaaaaaagattggagtttattcattcccgctgataaagtagacttagtttctcatagaaacatctttgatgaagaattattaaaacaagaagatgaagaatataaagagagattaagaaacggaccatactggaaaagagttcttgatttctggtgttga

SEQ ID NO: 2769 - DNA, 306 bp, Saccharomyces cerevisiae
atgtcggactcagaagtcaatcaagaagctaagccagaggtcaagccagaagtcaagcctgagactcacatcaatttaaaggtgtccgatggatcttcagagatcttcttcaagatcaaaaagaccactcctttaagaaggctgatggaagcgttcgctaaaagacagggtaaggaaatggactccttaagattcttgtacgacggtattagaattcaagctgatcagacccctgaagatttggacatggaggataacgatattattgaggctcacagagaacagattggtggtgctacgtattag

SEQ ID NO: 2770 - DNA, 306 bp, Artificial Sequence
  Description of Artificial Sequence: Synthetic polynucleotide
atgtctgactctgaagtcaatcaagaagctaagccagaggtcaagccagaagtcaagcctgagactcacatcaatttaaaggtgtccgatggatcttctgagatcttcttcaagatcaaaaagaccactcctttaagaaggttgatggaagcgttcgctaaaagacagggtaaggaaatggactccttaagattcttgtacgacggtattagaattcaagctgatcagacccctgaagatttggacatggaggataacgatattattgaggctcacagagaacagattggtggtgctacgtattga

SEQ ID NO: 2771 - DNA, 402 bp, Saccharomyces cerevisiae
atgaacaacaagctcatatatcgttcggttagatttgcaacccataacagccagcttttacttccacctttggttctctacagaaggatactaaggcagcataagctgctacctggtccccaaagggagatgggtgaccaatacgtgcgaaacgagttcaagttgcacaaagatatcgataacccgttgcatatagtcggctttttagcttcctggcaagattatctccacatgatttccaacggtaaatggaaagatgccactttatcttcggaaaccctggagaaactatcccctgagcaaacagttcaactgtatgaattgatgaaggaaacacagaaacttcaccaagacaatgaaatagaatcaagtaaggacgtgaagcggaacaacaaggattag

SEQ ID NO: 2772 - DNA, 402 bp, Artificial Sequence
  Description of Artificial Sequence: Synthetic polynucleotide
atgaacaacaagctcatatatcgttctgttagatttgcaacccataacagccagcttttacttccacctttggttctctacagaaggatattaaggcagcataagttattgcctggtccccaaagggagatgggtgaccaatacgtgagaaacgagttcaagttgcacaaagatatcgataacccgttgcatatagtcggctttttagcttcctggcaagattatctccacatgatttccaacggtaaatggaaagatgccactttatcttctgaaaccttagagaaactttcccctgagcaaacagttcaattatatgaattgatgaaggaaacacagaaacttcaccaagacaatgaaatagaaagtagtaaggacgtgaagagaaacaacaaggattga

SEQ ID NO: 2773 - DNA, 564 bp, Saccharomyces cerevisiae
atgataataacaattaaattcgagtcgaaggaaaaattggtctccatgaaacaatatataacagtagttggagtgtccgttaatcaagagggcaccttttcttggcgtcctgggactttttatatgaaaattcatgaagaaagtgcggcgggcccctttgcgaagggggccgaaatatcggatcttagtaatagttctgctattggatgtggtattagcataaatcaagagggaggcgatggttctattagggtaaaagagagcagcttgaggaagaaacaggaaaggatgagtacaaaatatccgacaacgatgagttgccgagaggcatttgatcaactgacgagttgctattcgattggagggcaatttagaagctattacagatatggagattttacatcatgtgacaagcaggtgtccaaattcaagttttgtattatccacggcaatgaccctgtgaaagtgcaggaatggtataaagatcaggtttccaacaataaggcattggaaaataccagtggggttatatggcaggagagggagaccactgcaaataagtga

SEQ ID NO: 2774 - DNA, 564 bp, Artificial Sequence
  Description of Artificial Sequence: Synthetic polynucleotide
atgataataacaattaaattcgagtctaaggaaaaattggtctccatgaaacaatatataacagtagttggagtgtccgttaatcaagagggcaccttttcttggcgtcctgggactttttatatgaaaattcatgaagaaagtgcggcgggcccctttgcgaagggggccgaaatatctgatcttagtaatagttctgctattggatgtggtattagcataaatcaagagggaggcgatggttctattagggtaaaagagagcagcttgaggaagaaacaggaaaggatgagtacaaaatatccgacaacgatgagttgcagagaggcatttgatcaattaacgagttgctattctattggagggcaatttagaagctattacagatatggagattttacatcttgtgacaagcaggtgtccaaattcaagttttgtattatccacggcaatgaccctgtgaaagtgcaggaatggtataaagatcaggtttccaacaataaggcattggaaaataccagtggggttatatggcaggagagggagaccactgcaaataagtga

SEQ ID NO: 2775 - DNA, 432 bp, Saccharomyces cerevisiae
atggagaccaatttttccttcgactcgaatttaattgttattatcattatcacgttgtttgccacaagaattattgctaaaagatttttatctactccaaaaatggtatcccaggaaacagttgctcacgtaaaggatctgattggccaaaaggaagtgtttgttgcagcaaagacatactgcccttactgtaaagctactttgtctaccctcttccaagaattgaacgttcccaaatccaaggcccttgtgttggaattagatgaaatgagcaatggctcagagattcaagacgctttagaagaaatctcgggccaaaaaactgtacctaacgtatacatcaatggcaagcacattggtggtaacagcgatttggaaactttgaagaaaaatggcaagttagctgaaatattgaagccggtatttcaatag

SEQ ID NO: 2776 - DNA, 432 bp, Artificial Sequence
  Description of Artificial Sequence: Synthetic polynucleotide
atggagaccaatttttccttcgactctaatttaattgttattatcattatcacgttgtttgccacaagaattattgctaaaagatttttatctactccaaaaatggtatcccaggaaacagttgctcacgtaaaggatttgattggccaaaaggaagtgtttgttgcagcaaagacatactgcccttactgtaaagctactttgtctaccctcttccaagaattgaacgttcccaaatccaaggcccttgtgttggaattagatgaaatgagcaatggcagtgagattcaagacgctttagaagaaatcagtggccaaaaaactgtacctaacgtatacatcaatggcaagcacattggtggtaacagcgatttggaaactttgaagaaaaatggcaagttagctgaaatattgaagccggtatttcaatga

SEQ ID NO: 2777 - DNA, 1452 bp, Saccharomyces cerevisiae
atgagtagctccacaaagtgcaagaaagcatacgaagcggtagtcaaaatggttacgcatagattcaactccaaagcagtccgcaattaccatcaaccacaaggtttaaacaggagtctggcaacccgcaatgcagctagagttaggggtatggtcccttcaagaagagggggcgtgggactgtataagagttcaagtagcaagttgatgaataaactaggaagacaaaagacatggataaatgagtttgaacattttaattctctgcacgaaattgcatatacccctaacattgcgttaagtagtgaaatccaaaaatatttaaaggcattggaaacaaactatcggtccatctatgagaaaagttcagaattactggataagaagctggaagaaattgacaagaaatggatagagaaaaacgggtgtatacctgatgcatctaaagacgatgtggagaaaaatctaagaaagcaatatttagcagatgtacaggacgtaaaaaacgaacatatacctgtgatgaattgtgaacctggtgggtctcagttcaagtatctctgtaaaactattgagttattatcatccaacaagacaatttgttttgccatcgatgtagaggcatttgaatttgatacagacattgttacagagattggcatcgccatatatgatccaagagaaaacatttattccttgatgccgattataagaagttatcatttaattgttgctgaagcgttaccgttaagaaacaagaaattcgtatgcgactttaaagactgctttttacttggagaaagtcttgtattaccattggaacaatgtgtagagttcattcagtcgttgattaatttctatatgaaatgtgagacggaccaagatacaacctgggaaagagcgtttgtgggtcatgctatagcgggggatattaagtggctgaagaaaattggggtccatgtacctgaattggataatgaacttaccaaaccggaggactcaacggagagcaaaggtgttagaaaacatgttaagatgcttgacacagagaaaatttatagcatgtgttatggcaagaagggtagcagtttaggtaaactactaaggctttttcacttgccacatgccttcttacataacgcaggcaatgatgcatattacacgttgctcctgatgctgaagttaggagattataactttagaaagcaaattggggcagatgatttagaaacaatgggatataggataagagaatggtttaagcgtgaggcggacgaacccaaaattttgccaatgtcgtacgtgctaagtgtgatgaatgccaataatagcaaaccgaaagttgatgataagggaagaaagaagccgagggatcttgtacctcagacggaatttagcgggtctcattggtttcaaaatgcacgcgcagccttcaaaagtactcttgtgtga

SEQ ID NO: 2778 - DNA, 1452 bp, Artificial Sequence
  Description of Artificial Sequence: Synthetic polynucleotide
atgagtagctccacaaagtgcaagaaagcatacgaagcggtagtcaaaatggttacgcatagattcaactccaaagcagtccgcaattaccatcaaccacaaggtttaaacaggagtttagcaacccgcaatgcagctagagttaggggtatggtcccttccagaagagggggcgtgggattgtataagagtagtagtagcaagttgatgaataaattaggaagacaaaagacatggataaatgagtttgaacattttaattctttacacgaaattgcatatacccctaacattgcgttaagtagtgaaatccaaaaatatttaaaggcattggaaacaaactatagatccatctatgagaaaagttctgaattattagataagaagttggaagaaattgacaagaaatggatagagaaaaacgggtgtatacctgatgcatctaaagacgatgtggagaaaaatttaagaaagcaatatttagcagatgtacaggacgtaaaaaacgaacatatacctgtgatgaattgtgaacctggtgggtctcagttcaagtatctctgtaaaactattgagttattatcttccaacaagacaatttgttttgccatcgatgtagaggcatttgaatttgatacagacattgttacagagattggcatcgccatatatgatccaagagaaaacatttattccttgatgccgattataagaagttatcatttaattgttgctgaagcgttaccgttaagaaacaagaaattcgtatgcgactttaaagactgctttttacttggagaaagtcttgtattaccattggaacaatgtgtagagttcattcagtctttgattaatttctatatgaaatgtgagacggaccaagatacaacctgggaaagagcgtttgtgggtcatgctatagcgggggatattaagtggttaaagaaaattggggtccatgtacctgaattggataatgaacttaccaaaccggaggacagtacggagagcaaaggtgttagaaaacatgttaagatgcttgacacagagaaaatttatagcatgtgttatggcaagaagggtagcagtttaggtaaattattgaggctttttcacttgccacatgccttcttacataacgcaggcaatgatgcatattacacgttgctcttaatgttgaagttaggagattataactttagaaagcaaattggggcagatgatttagaaacaatgggatataggataagagaatggtttaagcgtgaggcggacgaacccaaaattttgccaatgagttacgtgttgagtgtgatgaatgccaataatagcaaaccgaaagttgatgataagggaagaaagaagccgagggatcttgtacctcagacggaatttagcgggtctcattggtttcaaaatgcacgcgcagccttcaaaagtactcttgtgtga

SEQ ID NO: 2779 - DNA, 1344 bp, Saccharomyces cerevisiae
atgtcatcgcaaaacctcaatgataatccaaaaaatacatcctcagcagctgaagataagaagaaacaaacttcatccttaaagttggcaccaataccaaccacatcgccatggaaatcatcttcgccagatagcaatacagtaattcctgtagaggaactaagagatatatcaaagactgcaaagccaagtaaaaatggttcggggtcaattaaattaacaagcaataccaaatggactccaattacgccgtctgttataatctcaggttccaaggacacaaattcaaagtcaggaaagaactctaaaaattctaagactaataaaaaaatgaaaaagcgtggcaaatataataacgatatcaataaaaaggactttaacggtcaaaccaacagtacatcggaaataagtaacgtttccaatcttgaatccaaacctttagatgctaacgctaaagtaaacatacattcaagctcaggagcaactgccaatgggaatataaagaggataacaaacaacaacaattcaaccaacggtagacaatcaagaaattatcaaaacaggaatggcaaaacaagatacaacaacaatagtagacacagtcaggcggctaataatgccatctccttcccaaataattatcaggctagacctgaatatattcccaatgccagccactggttgaacaacaattcaagaaatagctataaacaactgtcatacttccgtcaacagcagtattataataacatcaactatcaacaacaattgcaaacaccatattattactcaatggaacctatttttaaatctatcgaaagtatcaaaaaccaaattgaattctattttagtgaagagaacttgaaaacagatgaatttttaagatctaaattcaaaaaagccaatgacggatttatccccatgagtttgatagggaaattttaccgtatggttaatttatctcttggtggagacccaaatttaattttggcatctatgagagaagttttacaacataaagaaacaaaccatttggaaattgcccttggaagcatagaaggtgctcagaagaacatggcagatgatttcaatccattggaaaactattttattaggcgcgaaaattgggctgaatacgctatggaaagtaattttgatgaaaatgatgacgaaactgaaaaatacaacattgagaaactattgggaccgaacgatttagacaattattcttatatgggctatccaaacttctttcccagtaatgaaaatgggaaaaagagtcagagctatgaccaaggtgaaattagcaggcagtttgaacaaaacttacaaataaatgattaa

SEQ ID NO: 2780 - DNA, 1344 bp, Artificial Sequence
  Description of Artificial Sequence: Synthetic polynucleotide
atgtcttctcaaaacctcaatgataatccaaaaaatacatcctctgcagctgaagataagaagaaacaaacttcttccttaaagttggcaccaataccaaccacatctccatggaaatcttcttctccagatagcaatacagtaattcctgtagaggaattgagagatatatccaagactgcaaagccaagtaaaaatggttctgggtctattaaattaacaagcaataccaaatggactccaattacgccgtctgttataatcagtggttccaaggacacaaattctaagagtggaaagaactctaaaaattctaagactaataaaaaaatgaaaaagcgtggcaaatataataacgatatcaataaaaaggactttaacggtcaaaccaacagtacaagtgaaataagtaacgtttccaatcttgaatccaaacctttagatgctaacgctaaagtaaacatacattctagcagtggagcaactgccaatgggaatataaagaggataacaaacaacaacaattctaccaacggtagacaatctagaaattatcaaaacaggaatggcaaaacaagatacaacaacaatagtagacacagtcaggcggctaataatgccatctccttcccaaataattatcaggctagacctgaatatattcccaatgccagccactggttgaacaacaattctagaaatagctataaacaattatcttacttccgtcaacagcagtattataataacatcaactatcaacaacaattgcaaacaccatattattactccatggaacctatttttaaatctatcgaaagtatcaaaaaccaaattgaattctattttagtgaagagaacttgaaaacagatgaatttttaagatctaaattcaaaaaagccaatgacggatttatccccatgagtttgatagggaaattttaccgtatggttaatttatctcttggtggagacccaaatttaattttggcatctatgagagaagttttacaacataaagaaacaaaccatttggaaattgcccttggaagcatagaaggtgctcagaagaacatggcagatgatttcaatccattggaaaactattttattaggcgcgaaaattgggctgaatacgctatggaaagtaattttgatgaaaatgatgacgaaactgaaaaatacaacattgagaaacttttgggaccgaacgatttagacaattattcttatatgggctatccaaacttctttcccagtaatgaaaatgggaaaaagagtcagagctatgaccaaggtgaaattagcaggcagtttgaacaaaacttacaaataaatgattga

SEQ ID NO: 2781 - DNA, 1503 bp, Saccharomyces cerevisiae
atgtcatttgaaaatttacataaagtcaatgctgaggcattggaagatgcagtggttgagatctgctcctcattgcaggttgatgcagcaaagttggacgaactaacagcgtacttcattgaatgtatggaaaaggggttgaataacacctctgtaggcgaagaaaagacggtggacaagggtctacccatgatccctacatatgtaaccagtttgcccaatgggacggaacgtggtgttttgctggctgcagatttaggtgggactcacttcagagtgtgttctgtgactttgaatggtgacggaacctttgatatgcagcaattgaagtctaagattccggaagaatatctaaatgacaaggatgtcaccagcgaggagctgtttagctacctgggtcgccgtacaagggccttcgttaggaagcatcatcctgagttgttgaagtccacgggggagaacataaaacctttgaaaatgggatttaccttctcatatcccgttgaccaaacctctttgagttccggtactttaatcagatggaccaaaagcttcaagattgaagacacggtcggcaaggatgtcgtgaggttataccaggagcaattagacattcaggggctctctatgattaatgtggtagctttgaccaacgacacggttggcactttcctatcccactgctacacttcaggctctcgtccatcgagtgctggtgagattagcgagcctgtcattggttgtatctttggtactggtactaacggttgctatatggaggatattgaaaacatcaagaagctaccagatgagctcagaacaagactgctgcatgaaggaaaaacccaaatgtgcatcaacatcgaatggggttctttcgacaatgaattgaaacatttgtctgctacaaagtatgacatcgatattgaccaaaaattttctccaaatccaggttaccatctatttgaaaaaagaatttccggcatgtacttgggtgagctgttaaggaacatcctggtggacttgcatgcaaggggcttaatcttgggacagtatcgtaattacgatcaattacctcaccgtttaaagactcctttccaattgtgcagtgaagttctttccaggattgaaatcgatgattcgacaaacttgcgtgaaactgaattgtcgtttttgcagagtttgaggctaccgaccacttttgaagaacgtaaagcaattcaaaatctggtccgttccattacgagaaggtctgcatatctagcagccgttccgattgccgccatcctaatcaagacaaacgctttgaacaaaagatatcacggtgaggtagaaattggttttgacggttatgtcatcgaatactatcctggattcagatccatgctgagacatgctttggcattaagtccaattggcactgagggtgaacgtaagatacatttgcgtctagccaaagatgggtccggtgttggcgcagctttgtgtgctctggtggcataa

SEQ ID NO: 2782 - DNA, 1503 bp, Artificial Sequence
  Description of Artificial Sequence: Synthetic polynucleotide
atgagttttgaaaatttacataaagtcaatgctgaggcattggaagatgcagtggttgagatctgctcctctttgcaggttgatgcagcaaagttggacgaattaacagcgtacttcattgaatgtatggaaaaggggttgaataacacctctgtaggcgaagaaaagacggtggacaagggtttgcccatgatccctacatatgtaaccagtttgcccaatgggacggaacgtggtgttttgttggctgcagatttaggtgggactcacttcagagtgtgttctgtgactttgaatggtgacggaacctttgatatgcagcaattgaagtctaagattccggaagaatatttgaatgacaaggatgtcaccagcgaggagttatttagctacttgggtcgccgtacaagggccttcgttaggaagcatcatcctgagttgttgaagtccacgggggagaacataaaacctttgaaaatgggatttaccttctcttatcccgttgaccaaacctctttgagttccggtactttaatcagatggaccaaaagcttcaagattgaagacacggtcggcaaggatgtcgtgaggttataccaggagcaattagacattcaggggctctctatgattaatgtggtagctttgaccaacgacacggttggcactttcttatcccactgctacacttctggctctcgtccatctagtgctggtgagattagcgagcctgtcattggttgtatctttggtactggtactaacggttgctatatggaggatattgaaaacatcaagaagttaccagatgagctcagaacaagattattacatgaaggaaaaacccaaatgtgcatcaacatcgaatggggttctttcgacaatgaattgaaacatttgtctgctacaaagtatgacatcgatattgaccaaaaattttctccaaatccaggttaccatttatttgaaaaaagaatttccggcatgtacttgggtgagttattaaggaacatcttagtggacttgcatgcaaggggcttaatcttgggacagtatcgtaattacgatcaattacctcaccgtttaaagactcctttccaattgtgcagtgaagttctttccaggattgaaatcgatgattctacaaacttgcgtgaaactgaattgagttttttgcagagtttgaggttaccgaccacttttgaagaacgtaaagcaattcaaaatttggtccgttccattacgagaaggtctgcatatttggcagccgttccgattgccgccatcttaatcaagacaaacgctttgaacaaaagatatcacggtgaggtagaaattggttttgacggttatgtcatcgaatactatcctggattcagatccatgttgagacatgctttggcattaagtccaattggcactgagggtgaacgtaagatacatttgcgtttggccaaagatgggtccggtgttggcgcagctttgtgtgctttggtggcatga

SEQ ID NO: 2783 - DNA, 1119 bp, Saccharomyces cerevisiae
atgtttagaatagctaaaaacctcgtacggacttttgagcagagcgtgcaagataccctggcactctcgcaggactcgagcaatctggacgctttctttcagtctataccaccaaatttgttgtctgctcagttggaatcacccgtagatgcggtttctgaaggtgttaagcacaccaacgtcaatgaaacgctttccggtctccgcattgtttgggtggacgagatgcagttccaactgcagtcctttttcgactatatagtaggtttcaatgatgatccggtgccggtggtcagtaatcaacacggattttcgtacccagattaccgtcgtatcacatccatcttcaatgaacactgtggccgaactttgaaggtcaacatatggtcagctaaaggaggcacgttcagagacgagtatatcagcattatatcgaaggagagcgacgatttggacgatgtttctctaaaccatgacgagaggaggccatctagtggggaagcgcaccagttccaagcactcgggttcaaagtccaatggacgcctttgatagcttccactttcacataccatatcctgaacgtgaacatcccagatggacccgcccaatcggcagggctcatcccagatgaagactacattatcggctgccaagatggcctgttggccacgggaggggagacgcttttacaagatattgttagatcaagagcaaactacgatctggtcctttatgtctacaacaaagtttctgactgtgtgagaccaatcacagttcatataggtcccgacggcaggttgggttgcaacgttggatacgggtttcttcacaggattccaacagtaaagcactgtccacaacaagcacagcagcaggggcaagatgacaaccctgttcctgttcctgttccagtagaatctgagacggcttttgtgccatcagcattcacagcaccaccggtgccaacaaagaagaaatcaaaaaataaaaagggtacccagccattggcaatggatgactattttaatgaaggcagagataagtcatctaccgctgcgaagtcagcagaatctgacatcctcgccccaccaccacaaaaacagtcatcctctgattaa

SEQ ID NO: 2784 - DNA, 1119 bp, Artificial Sequence
  Description of Artificial Sequence: Synthetic polynucleotide
atgtttagaatagctaaaaacctcgtaagaacttttgagcagagcgtgcaagataccttggcactctctcaggactccagcaatttggacgctttctttcagtctataccaccaaatttgttgtctgctcagttggaaagtcccgtagatgcggtttctgaaggtgttaagcacaccaacgtcaatgaaacgctttccggtctccgcattgtttgggtggacgagatgcagttccaattgcagtcctttttcgactatatagtaggtttcaatgatgatccggtgccggtggtcagtaatcaacacggattttcttacccagattaccgtcgtatcacatccatcttcaatgaacactgtggcagaactttgaaggtcaacatatggagtgctaaaggaggcacgttcagagacgagtatatcagcattatatccaaggagagcgacgatttggacgatgtttctttgaaccatgacgagaggaggccatctagtggggaagcgcaccagttccaagcactcgggttcaaagtccaatggacgcctttgatagcttccactttcacataccatatcttgaacgtgaacatcccagatggacccgcccaaagtgcagggctcatcccagatgaagactacattatcggctgccaagatggccttttggccacgggaggggagacgcttttacaagatattgttagatctagagcaaactacgatttggtcctttatgtctacaacaaagtttctgactgtgtgagaccaatcacagttcatataggtcccgacggcaggttgggttgcaacgttggatacgggtttcttcacaggattccaacagtaaagcactgtccacaacaagcacagcagcaggggcaagatgacaaccctgttcctgttcctgttccagtagaatctgagacggcttttgtgccatctgcattcacagcaccaccggtgccaacaaagaagaaatctaaaaataaaaagggtacccagccattggcaatggatgactattttaatgaaggcagagataagtcttctaccgctgcgaagtctgcagaatctgacatcctcgccccaccaccacaaaaacagtcttcctctgattga

SEQ ID NO: 2785 - DNA, 1554 bp, Saccharomyces cerevisiae
atgcaagtgaccacaagatttatatctgcgatagtctcgttttgcctgtttgcttctttcacgttggctgaaaacagcgcaagagctacgccgggatcagatttactcgttctaacagagaagaaatttaaatcattcatcgaatctcatccgttagtcctcgtcgagttttttgctccatggtgtttgcattctcagatcttacgccctcacttagaagaggccgcctctattttaaaggagcataacgtcccagttgttcaaattgattgtgaggctaacagtatggtttgcctgcaacaaactataaatacctacccaaccttgaaaatctttaaaaatggtcgtatttttgatggtcaagtctatcgcggtgtcaagatcaccgatgaaatcactcagtacatgattcagctatacgaggcttctgtcatttatttaaattccgaagatgaaatccaaccatacttggaaaatgcaactttaccagtagtaataaacagaggcttgacaggcttgaatgaaacgtatcaagaagtcgcactggaccttgctgaggattacgtctttttatcccttctagattcagaagataagtcattatcaatccacttgccaaacactacagaaccaattctgtttgatggaaatgtagactctttggtcggaaattccgttgctctaactcagtggttaaaagtggtaattttaccttactttaccgacatcgaacctgatctcttccccaagtacatttctagcaatttgccgttggcttacttcttttatacttctgaggaagaattggaagattacactgatcttttcacgcagttaggtaaggaaaatcgtggccaaataaatttcattgcattaaactctacaatgttcccacaccacgttagattcctaaatatgagagaacagttcccattatttgctatccataatatgatcaataatctgaaatatggtttaccacaactaccagaagaagagtacgcgaaattagaaaaaccacaaccactagacagagatatgatcgttcagttggtaaaagattaccgtgaaggtactgccaagccaattgttaagtcagaagagattccaaaagaacaaaagtccaatgtttataaaatagttgggaagacacatgacgacattgttcatgatgatgacaaggatgtccttgtcaaatattacgcgacatggtgtattcatagtaaaaggtttgcgcctatttacgaagaaattgcaaatgtcttagcatctgatgaatctgttcgcgataaaatcttgatcgccgaagtagattcaggggcaaatgatatcttaagttttcctgtgacaggatatccaaccattgctttgtatcctgccggaaataactctaagcctattatcttcaataaaattagaaatttggaagatgttttcgaatttatcaaggaatcaggtacacatcacattgacggccaggcaatttatgataaattgcaccaggccaaggattctgaagtgtctactgaagataccgtacatgatgaattataa

SEQ ID NO: 2786 - DNA, 1554 bp, Artificial Sequence
  Description of Artificial Sequence: Synthetic polynucleotide
atgcaagtgaccacaagatttatatctgcgatagtcagtttttgcttatttgcttctttcacgttggctgaaaacagcgcaagagctacgccgggaagtgatttactcgttttgacagagaagaaatttaaatctttcatcgaatctcatccgttagtcctcgtcgagttttttgctccatggtgtttgcattctcagatcttacgccctcacttagaagaggccgcctctattttaaaggagcataacgtcccagttgttcaaattgattgtgaggctaacagtatggtttgcttacaacaaactataaatacctacccaaccttgaaaatctttaaaaatggtcgtatttttgatggtcaagtctatcgcggtgtcaagatcaccgatgaaatcactcagtacatgattcagttatacgaggcttctgtcatttatttaaattccgaagatgaaatccaaccatacttggaaaatgcaactttaccagtagtaataaacagaggcttgacaggcttgaatgaaacgtatcaagaagtcgcattggaccttgctgaggattacgtctttttatcccttttagattctgaagataagtctttatctatccacttgccaaacactacagaaccaattttatttgatggaaatgtagactctttggtcggaaattccgttgctttgactcagtggttaaaagtggtaattttaccttactttaccgacatcgaacctgatctcttccccaagtacatttctagcaatttgccgttggcttacttcttttatacttctgaggaagaattggaagattacactgatcttttcacgcagttaggtaaggaaaatcgtggccaaataaatttcattgcattaaactctacaatgttcccacaccacgttagattcttgaatatgagagaacagttcccattatttgctatccataatatgatcaataatttgaaatatggtttaccacaattaccagaagaagagtacgcgaaattagaaaaaccacaaccattggacagagatatgatcgttcagttggtaaaagattaccgtgaaggtactgccaagccaattgttaagtctgaagagattccaaaagaacaaaagtccaatgtttataaaatagttgggaagacacatgacgacattgttcatgatgatgacaaggatgtccttgtcaaatattacgcgacatggtgtattcatagtaaaaggtttgcgcctatttacgaagaaattgcaaatgtcttagcatctgatgaatctgttcgcgataaaatcttgatcgccgaagtagattctggggcaaatgatatcttaagttttcctgtgacaggatatccaaccattgctttgtatcctgccggaaataactctaagcctattatcttcaataaaattagaaatttggaagatgttttcgaatttatcaaggaaagtggtacacatcacattgacggccaggcaatttatgataaattgcaccaggccaaggattctgaagtgtctactgaagataccgtacatgatgaattatga

SEQ ID NO: 2787 - DNA, 408 bp, Saccharomyces cerevisiae
atgatgtttaatatttaccttttcgtcacttttttttccaccattcttgcaggttccctgtcagatttggaaatcggtattatcaagagaataccggtagaagattgcttaattaaggcaatgccaggtgataaagttaaggttcattatacaggatctttattagaatcgggaactgtatttgactcaagttattcaagaggctctcctatcgcttttgaacttggcgttggcagagtaattaaaggttgggatcaaggtgttgccggcatgtgcgttggcgaaaaaagaaagctgcaaattccaagttctttggcctacggagaaagaggtgtcccaggcgtcattcctccaagtgctgatttggtgtttgatgtcgaattggtagacgtgaaatcagccgcctag

SEQ ID NO: 2788 - DNA, 408 bp, Artificial Sequence
  Description of Artificial Sequence: Synthetic polynucleotide
atgatgtttaatatttaccttttcgtcacttttttttccaccattcttgcaggttccttaagtgatttggaaatcggtattatcaagagaataccggtagaagattgcttaattaaggcaatgccaggtgataaagttaaggttcattatacaggatctttattagaatctggaactgtatttgacagcagttattctagaggctctcctatcgcttttgaacttggcgttggcagagtaattaaaggttgggatcaaggtgttgccggcatgtgcgttggcgaaaaaagaaagttacaaattccaagttctttggcctacggagaaagaggtgtcccaggcgtcattcctccaagtgctgatttggtgtttgatgtcgaattggtagacgtgaaaagtgccgcctga

SEQ ID NO: 2789 - DNA, 2319 bp, Saccharomyces cerevisiae
atggatataaactcaaatgcctcagtaagccccagaccagatggtttaccgatgactgctggatataattctgcttctggaaaggtgcgaaatagtatcagatccataataaaccacccagaggatagtgcaagagccaaagagcgcagtgaaacgaacagtcctaagaataatggcaacaaaaaacctagaaagaaaagaaaaacatttagttgtgatacttgcaggagagtgaagacaaggtgcgattttgaacctttcattggaaaatgttacagatgtaacgttctgcagcttgattgctccttagccaggaataaagacaatgaaattttgaatactttacgtgaggatggtctactaaagaagatcaactcaattaatcacaaccttggttctttctctcatttgaatgcggactctcccaacgaaagccaaagtagttttgaaaagaatggaacggtcaattttgataattacatgatcgataaaaggctttcatctttagaagagcacataaaatctttacaccagaaaatggacttgataatcaccacagcaaagatgtcttataacagcgatatcaaaggccctggagatgatattcagaacgtggatttcagctcaaataagacgtacgatagtcgtctaacttcgggctcagagacgataaggaaaacaggggaatatagaaaagaaaatcttttcttaaatggatttaagttgaaggaatctcctttaaaattgctacatgatattgatgagaggctatttccatcgaaggctacatctaaagctgcgaagctagctggacagcaaaggccatatgctgttgcaagagtgaactttctccatttttatgagaataatcaggaattatgccataagcttgcaaaagaatttctggtgagatcccatttctggataattccaggtgggagaaaagagatagacgtggaatatgcccactcacacctatttattacaagtgtttttactattatcgctatgagttttgctgacaacgataaatacgctgcagaacaagaaatattgtatcctttagtggagagattactcactaatacgttaaccatgtttgaaaagttaacagcgtttgatattgaggctattttatattgctgtatgttccatatttcgcgaaaggcaaagagatataggcaactgaagtttaattctctggtactaagcaattttgcgctcaatagcttgttacatgtaatagatttttatcagataaaggatagggttttggtaaaagaagtgtataatcccgaagatctttatcatctaagaatactaaattcactaactgcctgctatttagaatattccattagttacggcgatattagggaacaggatgatatgcttaaagagtttaataaacttgtggcgaaatttcctcaggcgaattttggtgatgacattaaaatcagtgagataaatttaggtgacatcgtaaatggcatctttataaaccttaaaaattattttgcgcagtgtttggatgactttaacaatgacagatatggaggtaacgcagatacttttatctttgtttttccagagctaaattattggctgaaaaattgggaagagcttttagcaaaggatggcgcgggcgtgctattgttcacatttgatttttatcatatcatgatatgtcgcacttttatcacagaattttcttccacgctaaaaagcaaccaaaggtttttgaaactaattcttaatacgatgaaagaacattcattttcgctgttgaatgggtttttgagactaccgccaacgttaataaggggtgctccgatttttacttgtcatcaactagtctacgcctgtttaactctttgtgactatctttattggttcgattcttctgaacgtcaacgcgttttgagtctttgtacaaaagtgtactggcatttgagcactataggggaaaaaatgaatgaggctactgataacgttggaaaaatcataaaatctataattgatactagtaagactcgtattaattttggcagtttgtcaaaagagaatagtgataatgataaaatgtcgactaatgctaataactacacaggagcaggaaatctgcacgccgcgaaacccgctacttcgcctactaatgttggtactttgcacgagaacttgtccagtagtcacttcatgattcctgacgtcgaccaattcaattcctttgaagacttttttcaggatttttttgatagtttaaaaccaaattcccaaaaaatgtttaccagcgataagaagactgaacaaactacttaa

SEQ ID NO: 2790 - DNA, 2319 bp, Artificial Sequence
  Description of Artificial Sequence: Synthetic polynucleotide
atggatataaacagtaatgcctctgtaagccccagaccagatggtttaccgatgactgctggatataattctgcttctggaaaggtgagaaatagtatcagatccataataaaccacccagaggatagtgcaagagccaaagagcgcagtgaaacgaacagtcctaagaataatggcaacaaaaaacctagaaagaaaagaaaaacatttagttgtgatacttgcaggagagtgaagacaaggtgcgattttgaacctttcattggaaaatgttacagatgtaacgttttacagcttgattgctccttagccaggaataaagacaatgaaattttgaatactttacgtgaggatggtttattgaagaagatcaactctattaatcacaaccttggttctttctctcatttgaatgcggactctcccaacgaaagccaaagtagttttgaaaagaatggaacggtcaattttgataattacatgatcgataaaaggctttcttctttagaagagcacataaaatctttacaccagaaaatggacttgataatcaccacagcaaagatgtcttataacagcgatatcaaaggccctggagatgatattcagaacgtggatttcagcagtaataagacgtacgatagtcgtttgacttctggcagtgagacgataaggaaaacaggggaatatagaaaagaaaatcttttcttaaatggatttaagttgaaggaatctcctttaaaattgttgcatgatattgatgagaggttatttccatctaaggctacatctaaagctgcgaagttggctggacagcaaaggccatatgctgttgcaagagtgaactttctccatttttatgagaataatcaggaattatgccataagcttgcaaaagaatttttagtgagatcccatttctggataattccaggtgggagaaaagagatagacgtggaatatgcccactctcacctttttattacaagtgtttttactattatcgctatgagttttgctgacaacgataaatacgctgcagaacaagaaatattgtatcctttagtggagagattactcactaatacgttaaccatgtttgaaaagttaacagcgtttgatattgaggctattttatattgctgtatgttccatatttctagaaaggcaaagagatataggcaattgaagtttaattctttagtattgagcaattttgcgctcaatagcttgttacatgtaatagatttttatcagataaaggatagggttttggtaaaagaagtgtataatcccgaagatctttatcatttaagaatattgaattctttgactgcctgctatttagaatattccattagttacggcgatattagggaacaggatgatatgcttaaagagtttaataaacttgtggcgaaatttcctcaggcgaattttggtgatgacattaaaatcagtgagataaatttaggtgacatcgtaaatggcatctttataaaccttaaaaattattttgcgcagtgtttggatgactttaacaatgacagatatggaggtaacgcagatacttttatctttgtttttccagagttgaattattggttgaaaaattgggaagagcttttagcaaaggatggcgcgggcgtgttattgttcacatttgatttttatcatatcatgatatgtcgcacttttatcacagaattttcttccacgttgaaaagcaaccaaaggtttttgaaattgattcttaatacgatgaaagaacattctttttctttgttgaatgggtttttgagattaccgccaacgttaataaggggtgctccgatttttacttgtcatcaattggtctacgcctgtttaactctttgtgactatctttattggttcgattcttctgaacgtcaacgcgttttgagtctttgtacaaaagtgtactggcatttgagcactataggggaaaaaatgaatgaggctactgataacgttggaaaaatcataaaatctataattgatactagtaagactcgtattaattttggcagtttgagtaaagagaatagtgataatgataaaatgtctactaatgctaataactacacaggagcaggaaatttacacgccgcgaaacccgctacttctcctactaatgttggtactttgcacgagaacttgtccagtagtcacttcatgattcctgacgtcgaccaattcaattcctttgaagacttttttcaggatttttttgatagtttaaaaccaaattcccaaaaaatgtttaccagcgataagaagactgaacaaactacttga

SEQ ID NO: 2791 - DNA, 1509 bp, Saccharomyces cerevisiae
atgccaatttggaaaacacaaacattcttcactagtatttctgttattcaaatagtcaataaagaaaccaaagtttctacaaaaaaagaaaaggatagcatgttgaaccagttgaacacaatcttaagatttttattcttgtttctgcagttaattaaatcatccgctgcagttgaacctaatggtggaccgaatattctagatcacaacattatgttggttaacactaatgcaacgatccctaaaaaggaacaaactgattttgaggtgatttctccaacaaaacaaacacaagtagatgaagactgtaaaaaaggcttgtatcatattgagaatgctggaaatttgattgaactgcaagctaaatgttggaaagtggtaggaaacattgaaatatcaagtaactacagcggatctcttattgatctagggttaataagagagatagagggagatcttattatcaagaataacaaacacatttttagaatccagggttataatttagagtctttgggaaagttggaattggatagcctaacttcctttgtatcattagactttcccgctttaaaagaagttgaaaccgttgattggagagttttgcctattctaagtagtgttgtcattaacggaaatattaaaaagatcaaaaatattatcatatctgatactgcattaacctccatcgattacttcaataacgtcaagaaagtggatattttcaatatcaacaataacaggtttttagaaaatttattcgcaagtttagaaagtgttactaaacaactaaccgtccactctaatgccaaagagctggaacttgatttgagcaacttacacacggttgaaaatatgaccattaaggacgtttcagaaattaaactagctaaactttcctctgtgaacagttctctagagttcatcgagaatcaattttcaagcttggaactaccacttttggcaaaagttcaaggaacgttggggttaatagataataaaaatctgaaaaagctaaacttttcgaatgccaccgatattcaagggggtctaatgattgctaacaatacagagcttgccaaaattgatttcttccccaagttgaggcaaattggcggtgcaatatattttgaaggtagctttgataaaattgacctcccagagctaaagttagtaaaaggtagcgcttatatcaaaagttcatctgaggaattaaactgtgaagaatttacatcaccaaaagccggtcgttcgatcataagaggcggtaaaatcgaatgcacatctggtatgaaaagtaaaatgctgaatgttgatgaagaggggaatgtactaggaaagcaggaaactgacaatgataatggaaagaaagaaaaaggaaaaaatggtgcaaaaagtcaaggaagttcaaagaagatggaaaacagtgctccgaagaacatttttattgatgctttcaaaatgtcagtttatgcagttttcacggtattgttctcgataattttttag

SEQ ID NO: 2792 - DNA, 1509 bp, Artificial Sequence
  Description of Artificial Sequence: Synthetic polynucleotide
atgccaatttggaaaacacaaacattcttcactagtatttctgttattcaaatagtcaataaagaaaccaaagtttctacaaaaaaagaaaaggatagcatgttgaaccagttgaacacaatcttaagatttttattcttgtttttgcagttaattaaatcttccgctgcagttgaacctaatggtggaccgaatattttagatcacaacattatgttggttaacactaatgcaacgatccctaaaaaggaacaaactgattttgaggtgatttctccaacaaaacaaacacaagtagatgaagactgtaaaaaaggcttgtatcatattgagaatgctggaaatttgattgaattacaagctaaatgttggaaagtggtaggaaacattgaaatatctagtaactacagcggatctcttattgatttagggttaataagagagatagagggagatcttattatcaagaataacaaacacatttttagaatccagggttataatttagagtctttgggaaagttggaattggatagcttaacttcctttgtatctttagactttcccgctttaaaagaagttgaaaccgttgattggagagttttgcctattttaagtagtgttgtcattaacggaaatattaaaaagatcaaaaatattatcatatctgatactgcattaacctccatcgattacttcaataacgtcaagaaagtggatattttcaatatcaacaataacaggtttttagaaaatttattcgcaagtttagaaagtgttactaaacaattgaccgtccactctaatgccaaagagttagaacttgatttgagcaacttacacacggttgaaaatatgaccattaaggacgtttctgaaattaaattggctaaactttcctctgtgaacagttctttggagttcatcgagaatcaattttctagcttggaattaccacttttggcaaaagttcaaggaacgttggggttaatagataataaaaatttgaaaaagttgaacttttctaatgccaccgatattcaagggggtttgatgattgctaacaatacagagcttgccaaaattgatttcttccccaagttgaggcaaattggcggtgcaatatattttgaaggtagctttgataaaattgacctcccagagttgaagttagtaaaaggtagcgcttatatcaaaagttcttctgaggaattaaactgtgaagaatttacatctccaaaagccggtcgttccatcataagaggcggtaaaatcgaatgcacatctggtatgaaaagtaaaatgttgaatgttgatgaagaggggaatgtattgggaaagcaggaaactgacaatgataatggaaagaaagaaaaaggaaaaaatggtgcaaaaagtcaaggaagttccaagaagatggaaaacagtgctccgaagaacatttttattgatgctttcaaaatgtctgtttatgcagttttcacggtattgttctctataattttttga

SEQ ID NO: 2793 - DNA, 1473 bp, Saccharomyces cerevisiae
atggaaagcaaagaaatatcaattaggtcaagaacccctccatcgaagctatattccatccaatcatgtattggcagaggtaactttggtgatgtgtataaagcagtggatagagttacgcaagaaattgtggcaattaaggtggtcaacctggagcattccgacgaagacattgaactgttagcacaggaaattttttttctggcggaattgaaatctcctcttattacaaactatattgcaacaatgttagaagatgtctctatgtggattgtcatggaatattgcggcggtggatcatgttcagatttactgaagcgaagttacgtcaacggtttgcctgaagaaaaagtttccttcattattcatgaagtcaccttgggtttgaaatacctgcatgagcaaaggaaaattcatcgtgatatcaaagcagctaatattttactaaatgaagaaggtatggttaagttgggtgatttcggagtaagtggccacattcgttccactttgaaaagggacacttttgtaggaacgccgtattggatggctccggaagttgtttgctgcgaagttgatgggtataatgagaaagcagatatatggtccttgggtatcaccacctatgagttactcaagggcttacccccattatctaaatatgatcctatgaaagttatgactaacttaccaaaaaggaagcctccaaaattacaaggtcccttttcggatgcagcaaaggatttcgtagctggttgtcttgttaaaacacctgctgatcggccatcggcatataacttgttatcatttgaatttgttaagaatatcaccataacgaacttgaaaagtgatgttgatctaattaaacagaaaaaggttcaggagagatatacaaaagttcccaaataccctcttcaaaatcgcttgtataaaaacagcaacacagtgaggggaaaggaattttggaattttgaatcgacaagactaagcacaacacaaatttccaaagaggaattatctcccattacacaagactctccaacatcatctttaaatatggaaagtccttatttacttcatgggcaaactgtaacgccgataaccaacccaagttcttcatcatttagaaaatgtacgcaaccagttttcgagcttgattcaggaatggatatagattcaggctgcccaaatgctcaagcagagaccgaaatagttcctctctctaatcataataagaagcataaaaagaacgatattcaggcgttgaagatagaaaagtttgactacttgaaaaacattgtatctcatattctcaacagaatgtatgatcgtgcgcgcgacgatgaaacaagaaaatacgtaaatgaaatgttaaagcaattcattaaaactgaggcaaacgttcctggatttaatgaggtttttatagaagagatctcactaagaattgaagcaataaagaaaggattcgtttaa

SEQ ID NO: 2794 - DNA, 1473 bp, Artificial Sequence
  Description of Artificial Sequence: Synthetic polynucleotide
atggaaagcaaagaaatatctattaggagcagaacccctccatctaagctttattccatccaaagctgtattggcagaggtaactttggtgatgtgtataaagcagtggatagagttacgcaagaaattgtggcaattaaggtggtcaacttggagcattccgacgaagacattgaattattagcacaggaaattttttttttggcggaattgaaatctcctcttattacaaactatattgcaacaatgttagaagatgtctctatgtggattgtcatggaatattgcggcggtggatcttgttctgatttattgaagagaagttacgtcaacggtttgcctgaagaaaaagtttccttcattattcatgaagtcaccttgggtttgaaatacttgcatgagcaaaggaaaattcatcgtgatatcaaagcagctaatattttattgaatgaagaaggtatggttaagttgggtgatttcggagtaagtggccacattcgttccactttgaaaagggacacttttgtaggaacgccgtattggatggctccggaagttgtttgctgcgaagttgatgggtataatgagaaagcagatatatggtccttgggtatcaccacctatgagttactcaagggcttacccccattatctaaatatgatcctatgaaagttatgactaacttaccaaaaaggaagcctccaaaattacaaggtcccttttctgatgcagcaaaggatttcgtagctggttgtcttgttaaaacacctgctgatagaccatctgcatataacttgttatcttttgaatttgttaagaatatcaccataacgaacttgaaaagtgatgttgatttgattaaacagaaaaaggttcaggagagatatacaaaagttcccaaataccctcttcaaaatcgcttgtataaaaacagcaacacagtgaggggaaaggaattttggaattttgaatctacaagattgagcacaacacaaatttccaaagaggaattatctcccattacacaagactctccaacatcttctttaaatatggaaagtccttatttacttcatgggcaaactgtaacgccgataaccaacccaagttcttcttcttttagaaaatgtacgcaaccagttttcgagcttgattctggaatggatatagattctggctgcccaaatgctcaagcagagaccgaaatagttcctctctctaatcataataagaagcataaaaagaacgatattcaggcgttgaagatagaaaagtttgactacttgaaaaacattgtatctcatattctcaacagaatgtatgatcgtgcgcgcgacgatgaaacaagaaaatacgtaaatgaaatgttaaagcaattcattaaaactgaggcaaacgttcctggatttaatgaggtttttatagaagagatctctttgagaattgaagcaataaagaaaggattcgtttga

SEQ ID NO: 2795 - DNA, 1449 bp, Saccharomyces cerevisiae
atggatttttatactactgatatcaacaaaaatgttgtgcctttgttcagtaaaggaacagtagcaagaacagcatcaaaagcacagtatccatcatggtgcaacaacgcgttaaagttaactaatattcttcttaaatctcttcgatgtaaatttcaaacgaaccgctgcgaggatgatcgaggttttgaggtatattgtgttattttaaaaagcatcgctttattaatggccgcgaaagaatcattgatattactacaaatacctccttctttaccatcaggatttccatttcgttcaccccaactgtcatttacatatttatcaacccgtcttagtgggagccaacacaaatctacgcattctcatcacatcaatcatcaaactcatcccattcatagtagcagtagcaacagtaatagtaataaccgtattcctacaaaaacagattcctccaaacagcatacacagcatttctcttttgctaatgcgggagcctccaatagagacgaactgctatcaatcgtgcgcaaaattgataaatctaatttgaagtgttgtgactgcggtagcaccgcaacagtagaatgggtgtcaatcaatttattgtgtatattgtgtatcaaatgttcgggcgttcatcgatctctgggttcacatatctccaaaattagatctttaacgctggataatttcacctcgttagagttgatgcatcttttacaaaataatgtttccaatagtaatgttaatgccatttatgaaagcaatctcaggaactttccagttaaaaaaataactgcaaattctgatgactcggaaagatccaaattcattattgataagtatcaatttaaaaagtttgttatcgacagcaaccaaggcagagaggcttctttgaagtctttaattaaagctatccatttagatagtgttttcatgatgcaaagagccatcgcccaaagtaaatattccctaagagaattgacggcaagcgaaaaagagcagaatgatctaaaccattcttccatttttcaatattccctaaagcactatgaaattgttgatggaacgcccattttttttattacagaatttttattgtgcaatggtattcatatagataatttaccgaagattactacgaattggtctccaaaggttttagaatattgggaaactaagttggagatgtacggaacattccaagctgtaaatacttctcgtccaagatcagggccgcatttaaatatgcattcaaatgtagattcagcttcgtcctacaataagaaacacgatttgagagttaacatacctgaaagaagtgcctcagcaagtaaaaggtggagtttgagctccattcctaagtcttctcaaaatttgatgtccccaacaaacttattaacaatgcataagtctttaaaattggccaaaaaggacaaaaaataa

SEQ ID NO: 2796 - DNA, 1449 bp, Artificial Sequence
  Description of Artificial Sequence: Synthetic polynucleotide
atggatttttatactactgatatcaacaaaaatgttgtgcctttgttcagtaaaggaacagtagcaagaacagcatccaaagcacagtatccatcttggtgcaacaacgcgttaaagttaactaatattcttcttaaatctcttcgctgtaaatttcaaacgaaccgctgcgaggatgatagaggttttgaggtatattgtgttattttaaaaagcatcgctttattaatggccgcgaaagaatctttgatattattacaaatacctccttctttaccatctggatttccatttcgttccccccaattatcttttacatatttatctacccgtcttagtgggagccaacacaaatctacgcattctcatcacatcaatcatcaaactcatcccattcatagtagcagtagcaacagtaatagtaataaccgtattcctacaaaaacagattcctccaaacagcatacacagcatttctcttttgctaatgcgggagcctccaatagagacgaattattatctatcgtgcgcaaaattgataaatctaatttgaagtgttgtgactgcggtagcaccgcaacagtagaatgggtgtccatcaatttattgtgtatattgtgtatcaaatgttctggcgttcatagatctttgggttctcatatctccaaaattagatctttaacgttagataatttcaccagtttagagttgatgcatcttttacaaaataatgtttccaatagtaatgttaatgccatttatgaaagcaatctcaggaactttccagttaaaaaaataactgcaaattctgatgactctgaaagatccaaattcattattgataagtatcaatttaaaaagtttgttatcgacagcaaccaaggcagagaggcttctttgaagtctttaattaaagctatccatttagatagtgttttcatgatgcaaagagccatcgcccaaagtaaatattccttgagagaattgacggcaagcgaaaaagagcagaatgatttgaaccattcttccatttttcaatattccttgaagcactatgaaattgttgatggaacgcccattttttttattacagaatttttattgtgcaatggtattcatatagataatttaccgaagattactacgaattggtctccaaaggttttagaatattgggaaactaagttggagatgtacggaacattccaagctgtaaatacttctcgtccaagaagcgggccgcatttaaatatgcattctaatgtagattctgcttcttcctacaataagaaacacgatttgagagttaacatacctgaaagaagtgcctctgcaagtaaaaggtggagtttgagctccattcctaagtcttctcaaaatttgatgtccccaacaaacttattaacaatgcataagtctttaaaattggccaaaaaggacaaaaaatga

SEQ ID NO: 2797 - DNA, 90 bp, Saccharomyces cerevisiae
atgaaaagatcatataaaacccttccaacatattttttttccttctttggtcccttcaaggaaagagcggtctttcttcttgttctataa

SEQ ID NO: 2798 - DNA, 90 bp, Artificial Sequence
  Description of Artificial Sequence: Synthetic oligonucleotide
atgaaaagatcttataaaacccttccaacatattttttttccttctttggtcccttcaaggaaagagcggtctttcttcttgttttgtga

SEQ ID NO: 2799 - DNA, 201 bp, Saccharomyces cerevisiae
atgcaattcaagaccatcgtcgctgccttcgctactgttgccgctgtccaagctgctaacgtttctaccaatggttccaaccgtaccaacggttccaacaccaccagcaccaagatctccactggtgctgctgcttccaacgctttgggtgctggtgtcttcggtgctgccgtcgctgccggtgtcgctttcttattctaa

SEQ ID NO: 2800 - DNA, 201 bp, Artificial Sequence
  Description of Artificial Sequence: Synthetic polynucleotide
atgcaattcaagaccatcgtcgctgccttcgctactgttgccgctgtccaagctgctaacgtttctaccaatggttccaaccgtaccaacggttccaacaccaccagcaccaagatctccactggtgctgctgcttccaacgctttgggtgctggtgtcttcggtgctgccgtcgctgccggtgtcgctttcttattctga

SEQ ID NO: 2801 - DNA, 330 bp, Saccharomyces cerevisiae
atggaaaagaaaatcaagaatttctcgagttccttatatatgaggagaaaagccaggaaaaccaccgcgatgacacacagcaccatatctcatgtaacaaacgtgaaaaaagcgatgattttttttctgctttctttttctcatttctcaagcggatattccgcttgcaaaaagaaaaggcgtggctctggtcttcgctattttggaaataaactttggcgtcctacgcccagaagcggccaaagcggccaatcacgcccgaagacgggaccgcacggctcccaacgagtcgtttttttggaactgaaaaaggcccaacgttgggcctag

SEQ ID NO: 2802 - DNA, 330 bp, Artificial Sequence
  Description of Artificial Sequence: Synthetic polynucleotide
atggaaaagaaaatcaagaatttctctagttccttatatatgaggagaaaagccaggaaaaccaccgcgatgacacacagcaccatatctcatgtaacaaacgtgaaaaaagcgatgattttttttttactttctttttctcatttcagtagcggatattccgcttgcaaaaagaaaaggcgtggctctggtcttcgctattttggaaataaactttggcgtcctacgcccagaagcggccaaagcggccaaagtcgcccgaagacgggaccgcacggctcccaaagagtcgtttttttggaattgaaaaaggcccaacgttgggcctga

SEQ ID NO: 2803 - DNA, 240 bp, Saccharomyces cerevisiae
atgcacgcccgcgactggtttttagtttttattgcaattttcattcctcccttagcagtctggctaaaaagaggtttttttaccaaggatctgctcattaactttctgttatttttactagggtttttccctggtctgatccatgctttgtacgtgatcagctgtcatccatatgaggagaacgaggcccggtactcacacctctcctcctcggatgataactatggtagtttagcatga

SEQ ID NO: 2804 - DNA, 240 bp, Artificial Sequence
  Description of Artificial Sequence: Synthetic polynucleotide
atgcacgcccgcgactggtttttagtttttattgcaattttcattcctcccttagcagtctggttgaaaagaggtttttttaccaaggatttactcattaactttttattatttttattagggtttttccctggtttgatccatgctttgtacgtgatcagctgtcatccatatgaggagaacgaggccagatactctcacctctcctccagtgatgataactatggtagtttagcatga

SEQ ID NO: 2805 - DNA, 1320 bp, Saccharomyces cerevisiae
atggacttactgggcgatatagtggagaaagatacatctgactctgttgaaagtaatgacaatggcactcttagtaccaacaactgtggaacgggatttcccgagttgtacaaacccaagaaaatatcatcttggaaggaaagactaagagaaaaaagagcccaaaagaaaaaaactagtggcaaggatgctgaaaagcaacaaacgagtacagacgccccactatccgaggcaaaatctatccataatgaaaatattaaagttctgcagggaatgagtgatgaacaaatcgtgcaagaacgtgaggatctgtataactctttagatcccaaactgattgccaagctattgaaaaacataaataaaagagcgaaggacgaaaacaacactccattatttgcagaaatagaaggcgcttctggtacctgggtaggtggcaacaagcaaggcatatacgatctaccaccgttagacgatgaagatgtagacgttgccttagaaattaggcctatgttaggcaaagatgcaaaacatgttcaatttgaagaagcaggaaaagaaaaagacgtggaagaagaagcaaaaactaatgatgacgtcgatgatatcgcacccttagatttccagatggcacaatgcattgatcatatgaaaaatgaagagctattcaaagacgttcattttatcaaagaggagagccaaaatgaaatcaatttagagaaacttgatataaatgatcctaatttcaacgataaattacacgaaaaatacttccctgatttgcccaaagaggtcgacaaattaaaatggatgcaaccggttcagcaaaaaacagacaagaattacatcattgaagacgtatctgaatgtaggtttgactttaatggcgaccttgttccacccacaagacaaatagactctaccattcactcagggttgcaccatcacagcgactcgcctgaactcgccggttacaccatagtggagttagaacatttagcaagatccacttttccttctcaaaggtgcattgctatacaaactttggggagaatactttataagctaggccaaaaaagctactaccagctagtgccagaaatagatgcagacacatacaaggaagacggaagcatatcgaacgttatggataagatctattccatgttttgggacttgattaaagacggaaaagtcatcgaatccttagaaatctcctctgatgagaaattcactagaaatttgtcagtcagaaattatgctattgatgcactttggttatggaaacaaggcggtggggacttccgaaccaagaaatag

SEQ ID NO: 2806 - DNA, 1320 bp, Artificial Sequence
  Description of Artificial Sequence: Synthetic polynucleotide
atggacttattaggcgatatagtggagaaagatacatctgactctgttgaaagtaatgacaatggcactcttagtaccaacaactgtggaacgggatttcccgagttgtacaaacccaagaaaatatcttcttggaaggaaagattgagagaaaaaagagcccaaaagaaaaaaactagtggcaaggatgctgaaaagcaacaaacgagtacagacgccccattgtccgaggcaaaatctatccataatgaaaatattaaagttttacagggaatgagtgatgaacaaatcgtgcaagaacgtgaggatttatataactctttagatcccaaattgattgccaagttgttgaaaaacataaataaaagagcgaaggacgaaaacaacactccattatttgcagaaatagaaggcgcttctggtacctgggtaggtggcaacaagcaaggcatatacgatttaccaccgttagacgatgaagatgtagacgttgccttagaaattaggcctatgttaggcaaagatgcaaaacatgttcaatttgaagaagcaggaaaagaaaaagacgtggaagaagaagcaaaaactaatgatgacgtcgatgatatcgcacccttagatttccagatggcacaatgcattgatcatatgaaaaatgaagagcttttcaaagacgttcattttatcaaagaggagagccaaaatgaaatcaatttagagaaacttgatataaatgatcctaatttcaacgataaattacacgaaaaatacttccctgatttgcccaaagaggtcgacaaattaaaatggatgcaaccggttcagcaaaaaacagacaagaattacatcattgaagacgtatctgaatgtaggtttgactttaatggcgaccttgttccacccacaagacaaatagactctaccattcactctgggttgcaccatcacagcgactctcctgaactcgccggttacaccatagtggagttagaacatttagcaagatccacttttccttctcaaaggtgcattgctatacaaactttggggagaatactttataagttgggccaaaaaagctactaccagttggtgccagaaatagatgcagacacatacaaggaagacggaagcataagcaacgttatggataagatctattccatgttttgggacttgattaaagacggaaaagtcatcgaatccttagaaatctcctctgatgagaaattcactagaaatttgtctgtcagaaattatgctattgatgcactttggttatggaaacaaggcggtggggacttcagaaccaagaaatga

SEQ ID NO: 2807 - DNA, 1272 bp, Saccharomyces cerevisiae
atggaaaacttatgccctccacctccttcccaaatgaaggatttttccactcctccaagaaacaggcatcgtcacaaaagatcctttgctatatctggagattttgaattcttaaaacaacctgcctctgcgcctgttttgccttctgcgtacgactcacctaccttcgaaaatacaccaagaagagtaagcggtatgagcgtaacaatgcctgatgaatctcaaaatgaatcagcattactaaactcaccaagcccaaggttttttattagcgaagcatccacatattcatcaccaattaaaggagtgccggacgctatcattaatttggatgatgtgctcattaataaaccaaaaatgtgtagatcacatcgcaaaaccaaatcagtaccagtaaaattggacgaattttattcctcccataaatgtagctcagtaccagaattaactataaatgaagaaatagatgaagatgacaccaaccctcagttgctggagcccgtaaaaccattatcatcaacttctctatctactgatatgaatgaagataaaaaaatgacactaaaaaatgccaggagccataactcgttaaaaattcaggcacaaaagcaaaggtactacaactcagcaaggtatctgcctttgaatagtgaggaccgagcaacagatccacaaattttaacgaagcaaagctctgttacgtctttattttcttctaggtcaattacacctgtatcttgtaacattaacaatgcgggtagaatcaatgcaatcagtggtaattatctagatgacgtcctttatgaccttgacacccctgccacaactctaattcaggatattgataaccttcaaactagtatcaacgaaagggttaggttgtcaccacaatcctcgtcgataaaaaagtatttttccaaagatggaaaatctgttagcagcttcaatttccagtctcaggagtgcgatatggtatcttttactgaggattttgcccatgtaacatcattgtcttcttctattcttgactctgagaaacaaacagacgacgaagaagaagagagtattccggaagaaatactacgaggagaacccctccacgtatacaacgaaactagtggatctgataaaagtgtcattttgccgacgaaacaaaaatctgctcccattaacaaggatagtaagcacagttcaactcagtatgaagaaaaatcttttaagaagaatagaaagttcaaaattttcgccaagttattctgcactaggaaatag

SEQ ID NO: 2808 - DNA, 1272 bp, Artificial Sequence
  Description of Artificial Sequence: Synthetic polynucleotide
atggaaaacttatgccctccacctccttcccaaatgaaggatttttccactcctccaagaaacaggcatcgtcacaaaagatcctttgctatatctggagattttgaattcttaaaacaacctgcctctgcgcctgttttgccttctgcgtacgactctcctaccttcgaaaatacaccaagaagagtaagcggtatgagcgtaacaatgcctgatgaatctcaaaatgaaagtgcattattaaactctccaagcccaaggttttttattagcgaagcatccacatattcttctccaattaaaggagtgccggacgctatcattaatttggatgatgtgctcattaataaaccaaaaatgtgtagaagccatcgcaaaaccaaatctgtaccagtaaaattggacgaattttattcctcccataaatgtagctctgtaccagaattaactataaatgaagaaatagatgaagatgacaccaaccctcagttgttggagcccgtaaaaccattatcttctacttctttatctactgatatgaatgaagataaaaaaatgacattaaaaaatgccaggagccataactctttaaaaattcaggcacaaaagcaaaggtactacaactctgcaaggtatttacctttgaatagtgaggacagggcaacagatccacaaattttaacgaagcaaagctctgttacgtctttattttcttctaggtctattacacctgtatcttgtaacattaacaatgcgggtagaatcaatgcaatcagtggtaattatttggatgacgtcctttatgaccttgacacccctgccacaactttgattcaggatattgataaccttcaaactagtatcaacgaaagggttaggttgtctccacaatcctcttctataaaaaagtatttttccaaagatggaaaatctgttagcagcttcaatttccagtctcaggagtgcgatatggtatcttttactgaggattttgcccatgtaacatctttgtcttcttctattcttgactctgagaaacaaacagacgacgaagaagaagagagtattccggaagaaatattaagaggagaacccctccacgtatacaacgaaactagtggatctgataaaagtgtcattttgccgacgaaacaaaaatctgctcccattaacaaggatagtaagcacagttctactcagtatgaagaaaaatcttttaagaagaatagaaagttcaaaattttcgccaagttattctgcactaggaaatga

SEQ ID NO: 2809 - DNA, 384 bp, Saccharomyces cerevisiae
atgccacagtcttttacgtctattgcgagaattggtgactatattttgaagtcacccgtcctctccaagttatgtgttccagttgccaatcagttcattaacctcgcaggttacaagaagttagggctcaaatttgacgacttaattgcagaggaaaatcccatcatgcagaccgctttaagaagactccctgaagatgaatcttatgccagagcatatagaataatcagggctcatcaaaccgagttgactcatcatttactgccaagaaacgaatggatcaaagcccaagaggatgttccttacctgttgccatacatattagaagctgaagctgcagctaaggagaaggacgagttagacaacatagaggtctccaaatga

SEQ ID NO: 2810 - DNA, 384 bp, Artificial Sequence
  Description of Artificial Sequence: Synthetic polynucleotide
atgccacagtcttttacgtctattgcgagaattggtgactatattttgaagtctcccgtcctctccaagttatgtgttccagttgccaatcagttcattaacctcgcaggttacaagaagttagggctcaaatttgacgacttaattgcagaggaaaatcccatcatgcagaccgctttaagaagactccctgaagatgaatcttatgccagagcatatagaataatcagggctcatcaaaccgagttgactcatcatttattaccaagaaacgaatggatcaaagcccaagaggatgttccttacttgttgccatacatattagaagctgaagctgcagctaaggagaaggacgagttagacaacatagaggtctccaaatga

SEQ ID NO: 2811 - DNA, 978 bp, Saccharomyces cerevisiae
atgattgaagagaatttgaaacagaaaatccacgataagttcgttgcagccaaaaagaatgggcatctgaaagtaacgcatgcagaatccaagaagttgaaagatcctcaaacgacgacacaatattgggtgacatttgctccatctttggcacttaagccagacgctaacaagaatagcgattcaaaggcggaggacccgttcgccaatcccgacgaagaactagtggtgactgaagatctaaatggtgacggagaatataagctgctactcaacaaatttcctgtggtccctgaacatagtctcctagtgacaagcgagtttaaagaccagagatctgctttgacgccaagtgacttgatgactgcttataatgtgctctgttctctccaaggagacaaggacgatgatgtcacttgtgaaaggtatctggtcttttataattgtggacctcatagcggttcctcacaagatcacaaacacttgcagatcatgcaaatgcctgaaaaatttataccttttcaggacgtattgtgcaacggaaaggatcatttcttgcccaccttcaacgcagagccattacaagatgataaggtttcctttgctcatttcgtcttgccgctgccggaatcgtctgatcaagtggacgaagatcttcttgctatgtgttacgtatctttgatgcagagagcacttacatttttccaagattggaccaatgagtctccggagttgaccaagtcatacaatgtgctactgaccaagaaatggatctgtgtagttccaagatcgcatgccaagagtggaccgccattgatgttaaacattaactccacggggtactgtggtatgatcctcgttaaagacagagaaaaactagagaacctcactgaagatcctcatcttgtggacaagtcgttactgcaatgcggtttccccaacacagcaggccaaaaaccaacagagtatcactattaa

SEQ ID NO: 2812 - DNA, 978 bp, Artificial Sequence
  Description of Artificial Sequence: Synthetic polynucleotide
atgattgaagagaatttgaaacagaaaatccacgataagttcgttgcagccaaaaagaatgggcatttgaaagtaacgcatgcagaatccaagaagttgaaagatcctcaaacgacgacacaatattgggtgacatttgctccatctttggcacttaagccagacgctaacaagaatagcgattctaaggcggaggacccgttcgccaatcccgacgaagaattagtggtgactgaagatttgaatggtgacggagaatataagttacttctcaacaaatttcctgtggtccctgaacatagtctcttggtgacaagcgagtttaaagaccagagatctgctttgacgccaagtgacttgatgactgcttataatgtgctctgttctctccaaggagacaaggacgatgatgtcacttgtgaaaggtatttagtcttttataattgtggacctcatagcggttcctctcaagatcacaaacacttgcagatcatgcaaatgcctgaaaaatttataccttttcaggacgtattgtgcaacggaaaggatcatttcttgcccaccttcaacgcagagccattacaagatgataaggtttcctttgctcatttcgtcttgccgttaccggaaagctctgatcaagtggacgaagatcttcttgctatgtgttacgtatctttgatgcagagagcacttacatttttccaagattggaccaatgagtctccggagttgaccaagtcctacaatgtgttgttgaccaagaaatggatctgtgtagttccaagaagccatgccaagagtggaccgccattgatgttaaacattaactccacggggtactgtggtatgatcctcgttaaagacagagaaaaattagagaacctcactgaagatcctcatcttgtggacaagtctttattacaatgcggtttccccaacacagcaggccaaaaaccaacagagtatcactattga

SEQ ID NO: 2813 - DNA, 1104 bp, Saccharomyces cerevisiae
atgccgcgaattactcaagagatatcttacaattgcgattatggcgacaatactttcaaccttgctattgatataggaggcactctggctaaagtagtcttctcgcctatacacagtaacaggctgatgttctacaccattgaaacagagaaaattgacaagttcatggaacttctgcattctattatcaaagaacataacaatggatgctatagaatgactcatataattgccactggtggtggcgccttcaagttttatgatttgttgtatgaaaattttcctcaaataaaaggtatatcgaggttcgaagaaatggaaggcttaattcacggtttagactttttcattcatgagattcccgatgaagttttcacttacaacgatcaagatggcgaaaggataatacccaccagttccggcaccatggactcaaaggctatctacccataccttctagtcaatatagggtcgggtgtctcaatattaaaagtcaccgaaccaaacaattttagtagagtaggcggttcttcactgggaggaggaactctttggggcctattatcactaattactggcgctcaaacttatgatcagatgctcgattgggcacaagagggtgacaattctagcgttgatatgctagttggagatatttatggaacagactataataaaattggtctaaagtcgtcagctattgcaagttcatttggtaaagttttccaaaatagaatgacatctaacaaatctttggaaaacaacgaaaataaattatattcctcacatgagtctattgagaaaaacaatggacaaatgtttaagaatcctgatatttgtaaaagtcttctattcgccatctccaacaatattgggcaaatagcttatttgcaagctaaaatcaataatatacagaatatatactttggcggatcttataccagaggacatttgactaccatgaacactttgagctacgctattaatttttggtcacaaggatcaaagcaagcgttttttctcaaacatgaaggctatttgggtgcaatgggtgctttcctaagcgcgtctcgtcattcatctactaagaaaacaagtacgtag

SEQ ID NO: 2814 - DNA, 1104 bp, Artificial Sequence
  Description of Artificial Sequence: Synthetic polynucleotide
atgccgagaattactcaagagatatcttacaattgcgattatggcgacaatactttcaaccttgctattgatataggaggcactttggctaaagtagtcttcagtcctatacacagtaacaggttgatgttctacaccattgaaacagagaaaattgacaagttcatggaacttttacattctattatcaaagaacataacaatggatgctatagaatgactcatataattgccactggtggtggcgccttcaagttttatgatttgttgtatgaaaattttcctcaaataaaaggtatatctaggttcgaagaaatggaaggcttaattcacggtttagactttttcattcatgagattcccgatgaagttttcacttacaacgatcaagatggcgaaaggataatacccaccagttccggcaccatggactccaaggctatctacccataccttttggtcaatatagggtctggtgtcagtatattaaaagtcaccgaaccaaacaattttagtagagtaggcggttcttctttgggaggaggaactctttggggcttattaagtttgattactggcgctcaaacttatgatcagatgctcgattgggcacaagagggtgacaattctagcgttgatatgcttgttggagatatttatggaacagactataataaaattggtttgaagagttctgctattgcaagttcttttggtaaagttttccaaaatagaatgacatctaacaaatctttggaaaacaacgaaaataaattatattcctctcatgagtctattgagaaaaacaatggacaaatgtttaagaatcctgatatttgtaaaagtcttttattcgccatctccaacaatattgggcaaatagcttatttgcaagctaaaatcaataatatacagaatatatactttggcggatcttataccagaggacatttgactaccatgaacactttgagctacgctattaatttttggtctcaaggatccaagcaagcgttttttctcaaacatgaaggctatttgggtgcaatgggtgctttcttgagcgcgtctcgtcattcttctactaagaaaacaagtacgtga

SEQ ID NO: 2815 - DNA, 1158 bp, Saccharomyces cerevisiae
atggatacagggagtgcgagcataaaggactatgagaccgtgttaacggatattgaggattctattgctgtgagcagcgaagaagtgctaaataaccaagaactaaggctcaaaaatacattgcacgaaattacttccagcattctggcaataaatgaagagaacaagtttgtgaatcctcttaggaacgatgagagcttagacgtagagggaaaggaggtctttgtaaatccaaaaattctgagtgcaaaaatcaaggagttcaataaactaatggagttacttaagttgacttacttggaacaggagacattggactatttcttcaggtttactttgtcctcgacgaaacctttgcagttagattccgaaaaagacccccaatttgtaaaacttaatgaaagagttaatgatttaaaggaagaaatttcgaatgttcaagaaagcaaaatagaacaaatcaaagctgaaatccaagagaccggtcacaactttgcagaaaggcaagatttaataaatgagttgtatctggaagccactggtgatattgaaaattgttgggattcgctcaatgaactaaaaaatttaacaaacaaagaagataagaatatgatgggagaaaaagatacgatattaaattcaagtgattcagatgattttgtggaagagacatacacgaattggcaaaaactactatttttgcagaagcaaaatcaaaggttaacgaaagagctcaaggaaatgcatgaagttaaaaatcaaataatacgaaaaggagagcaatcaaaaaaagaggattctggacatttaatggccaatgaatcagaattatgtcagtcaattaatttgctaacaaaattttgggaaaagcactttttactcaaagggtcaaagacgactatattaaattttgaaatctttacccagcttggaaaagtacaatttgaaataaaggatatgcaatatataattgccatatctttaagcgatttaaaaaggccaatgataaaagacattactattttacaaaaagcgggtggcaatatagtcacagacattgaagcgagcagtaaatttaacaataagtacagaaataatactaaggtgcaaatctttgaggtaatggatgacattataagcgagctaacaaacgaataa

SEQ ID NO: 2816 - DNA, 1158 bp, Artificial Sequence
  Description of Artificial Sequence: Synthetic polynucleotide
atggatacagggagtgcgagcataaaggactatgagaccgtgttaacggatattgaggattctattgctgtgagcagcgaagaagtgttgaataaccaagaattgaggctcaaaaatacattgcacgaaattacttccagcattttggcaataaatgaagagaacaagtttgtgaatcctcttaggaacgatgagagcttagacgtagagggaaaggaggtctttgtaaatccaaaaattttaagtgcaaaaatcaaggagttcaataaattaatggagttacttaagttgacttacttggaacaggagacattggactatttcttcaggtttactttgtcctctacgaaacctttgcagttagattccgaaaaagacccccaatttgtaaaacttaatgaaagagttaatgatttaaaggaagaaatttctaatgttcaagaaagcaaaatagaacaaatcaaagctgaaatccaagagaccggtcacaactttgcagaaaggcaagatttaataaatgagttgtatttggaagccactggtgatattgaaaattgttgggattctctcaatgaattgaaaaatttaacaaacaaagaagataagaatatgatgggagaaaaagatacgatattaaatagtagtgattctgatgattttgtggaagagacatacacgaattggcaaaaattactttttttgcagaagcaaaatcaaaggttaacgaaagagctcaaggaaatgcatgaagttaaaaatcaaataataagaaaaggagagcaaagtaaaaaagaggattctggacatttaatggccaatgaaagtgaattatgtcagagtattaatttgttgacaaaattttgggaaaagcactttttactcaaagggtccaagacgactatattaaattttgaaatctttacccagcttggaaaagtacaatttgaaataaaggatatgcaatatataattgccatatctttaagcgatttaaaaaggccaatgataaaagacattactattttacaaaaagcgggtggcaatatagtcacagacattgaagcgagcagtaaatttaacaataagtacagaaataatactaaggtgcaaatctttgaggtaatggatgacattataagcgagttgacaaacgaatga

SEQ ID NO: 2817 - DNA, 714 bp, Saccharomyces cerevisiae
atggccccaaaaaaagttttactcgctcttacctcatataacgatgtattctacagtgacggcgccaagaccggtgtttttgttgtagaagccttacatcccttcaacacattccgaaaagaaggttttgaagtcgattttgtatctgaaaccggaaaatttggttgggatgagcattccttagccaaagattttctaaatggtcaagacgaaacggattttaaaaataaagactcagatttcaacaagacattggctaaaattaagacaccaaaagaggtgaatgccgatgattaccaaattttttttgcatctgcaggccacggtaccttatttgactatcctaaggctaaagacttgcaggacattgcttccgaaatttatgctaacggtggtgttgtcgcagctgtttgtcacggtcctgctatttttgatgggttaacagacaaaaaaacaggaagaccattgatcgaaggtaaatctatcaccggttttactgatgttggtgaaaccattttgggtgttgatagtattttgaaagccaagaatttggcaaccgttgaagatgttgctaaaaaatatggcgctaagtatttagctccggttgggccctgggatgattactctattactgacggaagactggtaacaggtgtgaatcctgcttctgcgcactccactgccgtaagatccatcgacgctttaaaaaactga

SEQ ID NO: 2818 - DNA, 714 bp, Artificial Sequence
  Description of Artificial Sequence: Synthetic polynucleotide
atggccccaaaaaaagttttactcgctcttacctcttataacgatgtattctacagtgacggcgccaagaccggtgtttttgttgtagaagccttacatcccttcaacacattcagaaaagaaggttttgaagtcgattttgtatctgaaaccggaaaatttggttgggatgagcattccttagccaaagattttttgaatggtcaagacgaaacggattttaaaaataaagacagtgatttcaacaagacattggctaaaattaagacaccaaaagaggtgaatgccgatgattaccaaattttttttgcatctgcaggccacggtaccttatttgactatcctaaggctaaagacttgcaggacattgcttccgaaatttatgctaacggtggtgttgtcgcagctgtttgtcacggtcctgctatttttgatgggttaacagacaaaaaaacaggaagaccattgatcgaaggtaaatctatcaccggttttactgatgttggtgaaaccattttgggtgttgatagtattttgaaagccaagaatttggcaaccgttgaagatgttgctaaaaaatatggcgctaagtatttagctccggttgggccctgggatgattactctattactgacggaagattggtaacaggtgtgaatcctgcttctgcgcactccactgccgtaagatccatcgacgctttaaaaaactga

SEQ ID NO: 2819 - DNA, 1587 bp, Saccharomyces cerevisiae
atgaaattgtcttccgcttttgtattatctgctatcaccgttgccgctttaggcgaaagtattactactacgataactgctaccaaaaatgggcatgtttacaccaagactgtcactcaagatgctacttttgtctgggcaggagaaggcgctgcggtaacctccgcagtaactgaagcgtctactgtcgctgcaacgtctgctgccgctgaaacatctgttgccgctgaaacatctattgttgagccttccacttctgctcagggcacctctgctgatgaagggtctggttcgagtataaccaccactattacagccaccaaaaatggacatgtctacacaaagaccgtcacccaggatgctactttcgtatggactggagagggtgaacgtgctcctgcctcaactgttgctactgtcgaaacatctgttgccgctgaaacatctgttgctgaaccttctacctctgctcagggcacctctgctgatgaagggtctggttcgagtataaccaccactattacagccaccaaaaatggacatgtctacacaaagaccgtcacccaggacgctactttcgtatggactggtgagggtgaacgtgctcctgtctcaaccgttgctactgtcgaaacagctgcttctccagtaacatctgttgctgaaccttctgcctctactgatgaaggatctggttcgagtataactaccactattacagccaccaaaaatggacatgtctacacaaagaccgtcacccaggacgctactttcgtatggactggtgagggtgaacgcgctcctgcctccaccgttgcaacttctagtatttctgctattgaaattccctccactactgaggcctctattgtggaggcttcttctgctgttgagacttcctctgctgctgagacttcctctgctgttgagacttcctctgctgttgagacttcctctgctgttgagacttcttctgctgctgagacttcctctgctgctgagacttcctctgccgttgagacttcctctgctgttgagatttcttctgctgttgagacttctgctgttgagacttcttcttcttcctctactatcgagaccacttctgttaaaagcttatctcctactcagacttctctttcatcttctgtccaggcttcttctcctattgagacttcttctgctgcaaaaacctcttctgttgtgccaactttttcttctactactactgaaaattcctctaattctaaatccacgtctgcagttgtagcatctactaccacctcctctgagtcaagcgctactattgttactcctactagaattgggcaagcttacacagagagttcttctagggatgcccaatctgttcgtacccatgaaagtaacaattggtcatcaagttcttctgcaagcacaaaaatggtatcctctattacaagagttcaaaccactaccgctggtattttcactaacggtaagtcgtccacaactcctcaaatcgtgaattacacgggtgcggctgattctatcgccgctggtacgggtctgatgggcgctgcgctcgctgccgttatctttttgtaa

SEQ ID NO: 2820 - DNA, 1587 bp, Artificial Sequence
  Description of Artificial Sequence: Synthetic polynucleotide
atgaaattgtcttccgcttttgtattatctgctatcaccgttgccgctttaggcgaaagtattactactacgataactgctaccaaaaatgggcatgtttacaccaagactgtcactcaagatgctacttttgtctgggcaggagaaggcgctgcggtaacctccgcagtaactgaagcgtctactgtcgctgcaacgtctgctgccgctgaaacatctgttgccgctgaaacatctattgttgagccttccacttctgctcagggcacctctgctgatgaagggtctggtagtagtataaccaccactattacagccaccaaaaatggacatgtctacacaaagaccgtcacccaggatgctactttcgtatggactggagagggtgaacgtgctcctgcctctactgttgctactgtcgaaacatctgttgccgctgaaacatctgttgctgaaccttctacctctgctcagggcacctctgctgatgaagggtctggtagtagtataaccaccactattacagccaccaaaaatggacatgtctacacaaagaccgtcacccaggacgctactttcgtatggactggtgagggtgaacgtgctcctgtctccaccgttgctactgtcgaaacagctgcttctccagtaacatctgttgctgaaccttctgcctctactgatgaaggatctggtagtagtataactaccactattacagccaccaaaaatggacatgtctacacaaagaccgtcacccaggacgctactttcgtatggactggtgagggtgaacgcgctcctgcctccaccgttgcaacttctagtatttctgctattgaaattccctccactactgaggcctctattgtggaggcttcttctgctgttgagacttcctctgctgctgagacttcctctgctgttgagacttcctctgctgttgagacttcctctgctgttgagacttcttctgctgctgagacttcctctgctgctgagacttcctctgccgttgagacttcctctgctgttgagatttcttctgctgttgagacttctgctgttgagacttcttcttcttcctctactatcgagaccacttctgttaaaagcttatctcctactcagacttctctttcttcttctgtccaggcttcttctcctattgagacttcttctgctgcaaaaacctcttctgttgtgccaactttttcttctactactactgaaaattcctctaattctaaatccacgtctgcagttgtagcatctactaccacctcctctgagagcagcgctactattgttactcctactagaattgggcaagcttacacagagagttcttctagggatgcccaatctgttcgtacccatgaaagtaacaattggtcttccagttcttctgcaagcacaaaaatggtatcctctattacaagagttcaaaccactaccgctggtattttcactaacggtaagtcttccacaactcctcaaatcgtgaattacacgggtgcggctgattctatcgccgctggtacgggtttgatgggcgctgcgctcgctgccgttatctttttgtga

SEQ ID NO: 2821 - DNA, 1710 bp, Saccharomyces cerevisiae
atgaaggatttaaaattatcgaatttcaaaggcaaatttataagcagaaccagtcactggggacttacgggtaagaagttgcggtatttcatcactatcgcatctatgacgggcttctccctgtttggatacgaccaagggttgatggcaagtctaattactggtaaacagttcaactatgaatttccagcaaccaaagaaaatggcgatcatgacagacacgcaactgtagtgcagggcgctacaacctcctgttatgaattaggttgtttcgcaggttctctattcgttatgttctgcggtgaaagaattggtagaaaaccattaatcctgatgggttccgtaataaccatcattggtgccgttatttctacatgcgcatttcgtggttactgggcattaggccagtttatcatcggaagagtcgtcaccggtgttggaacagggttgaatacatctactattcccgtttggcaatcagaaatgtcaaaagctgaaaatagagggttgctggtcaatttagaaggttccacaattgcttttggtactatgattgcttattggattgattttgggttgtcttataccaacagttctgttcagtggagattccccgtgtcaatgcaaatcgtttttgctctcttcctgcttgctttcatgattaaactacctgaatcgccacgttggctgatttctcaaagtcgaacagaagaagctcgctacttggtaggaacactagacgacgcggatccaaatgatgaggaagttataacagaagttgctatgcttcacgatgctgttaacaggaccaaacacgagaaacattcactgtcaagtttgttctccagaggcaggtcccaaaatcttcagagggctttgattgcagcttcaacgcaatttttccagcaatttactggttgtaacgctgccatatactactctactgtattattcaacaaaacaattaaattagactatagattatcaatgatcataggtggggtcttcgcaacaatctacgccttatctactattggttcattttttctaattgaaaagctaggtagacgtaagctgtttttattaggtgccacaggtcaagcagtttcattcacaattacatttgcatgcttggtcaaagaaaataaagaaaacgcaagaggtgctgccgtcggcttatttttgttcattacattctttggtttgtctttgctatcattaccatggatatacccaccagaaattgcatcaatgaaagttcgtgcatcaacaaacgctttctccacatgtactaattggttgtgtaactttgcggttgtcatgttcaccccaatatttattggacagtccggttggggttgctacttattttttgctgttatgaattatttatacattccagttatcttctttttctaccctgaaaccgccggaagaagtttggaggaaatcgacatcatctttgctaaagcatacgaggatggcactcaaccatggagagttgctaaccatttgcccaagttatccctacaagaagtcgaagatcatgccaatgcattgggctcttatgacgacgaaatggaaaaagaggactttggtgaagatagagtagaagacacctataaccaaattaacggcgataattcgtctagttcttcaaacatcaaaaatgaagatacagtgaacgataaagcaaattttgagggttga

SEQ ID NO: 2822 - DNA, 1710 bp, Artificial Sequence
  Description of Artificial Sequence: Synthetic polynucleotide
atgaaggatttaaaattatccaatttcaaaggcaaatttataagcagaaccagtcactggggacttacgggtaagaagttgagatatttcatcactatcgcatctatgacgggcttctccttatttggatacgaccaagggttgatggcaagtttgattactggtaaacagttcaactatgaatttccagcaaccaaagaaaatggcgatcatgacagacacgcaactgtagtgcagggcgctacaacctcctgttatgaattaggttgtttcgcaggttctttattcgttatgttctgcggtgaaagaattggtagaaaaccattaatcttgatgggttccgtaataaccatcattggtgccgttatttctacatgcgcatttcgtggttactgggcattaggccagtttatcatcggaagagtcgtcaccggtgttggaacagggttgaatacatctactattcccgtttggcaaagtgaaatgtccaaagctgaaaatagagggttgttggtcaatttagaaggttccacaattgcttttggtactatgattgcttattggattgattttgggttgtcttataccaacagttctgttcagtggagattccccgtgtccatgcaaatcgtttttgctctcttcttgcttgctttcatgattaaattacctgaatctccacgttggttgatttctcaaagtaggacagaagaagctcgctacttggtaggaacattagacgacgcggatccaaatgatgaggaagttataacagaagttgctatgcttcacgatgctgttaacaggaccaaacacgagaaacattctttatccagtttgttctccagaggcaggtcccaaaatcttcagagggctttgattgcagcttccacgcaatttttccagcaatttactggttgtaacgctgccatatactactctactgtattattcaacaaaacaattaaattagactatagattatctatgatcataggtggggtcttcgcaacaatctacgccttatctactattggttctttttttttgattgaaaagttgggtagacgtaagttatttttattaggtgccacaggtcaagcagtttctttcacaattacatttgcatgcttggtcaaagaaaataaagaaaacgcaagaggtgctgccgtcggcttatttttgttcattacattctttggtttgtctttgttatctttaccatggatatacccaccagaaattgcatctatgaaagttcgtgcaagcacaaacgctttctccacatgtactaattggttgtgtaactttgcggttgtcatgttcaccccaatatttattggacagtccggttggggttgctacttattttttgctgttatgaattatttatacattccagttatcttctttttctaccctgaaaccgccggaagaagtttggaggaaatcgacatcatctttgctaaagcatacgaggatggcactcaaccatggagagttgctaaccatttgcccaagttatccttacaagaagtcgaagatcatgccaatgcattgggctcttatgacgacgaaatggaaaaagaggactttggtgaagatagagtagaagacacctataaccaaattaacggcgataattcttctagttcttccaacatcaaaaatgaagatacagtgaacgataaagcaaattttgagggttga

SEQ ID NO: 2823 - DNA, 729 bp, Saccharomyces cerevisiae
atgctcctatttccaagaagaactaatatagcctttttcaaaacaacaggcatttttgctaattttcctttgctaggtagaaccattacaacttcaccatctttccttacacataaactgtcaaaggaagtaaccagggcatcaacttcgcctccaagaccaaagagaattgttgtcgcaattactggtgcgactggtgttgcactgggaatcagacttctacaagtgctaaaagagttgagcgtagaaacccatttggtgatttcaaaatggggtgcagcaacaatgaaatatgaaacagattgggaaccgcatgacgtggcggccttggcaaccaagacatactctgttcgtgatgtttctgcatgcatttcgtccggatctttccagcatgatggtatgattgttgtgccctgttccatgaaatcactagctgctattagaatcggttttacagaggatttaattacaagagctgccgatgtttcgattaaagagaatcgtaagttactactggttactcgggaaacccctttatcttccatccatcttgaaaacatgttgtctttatgcagggcaggtgttataatttttcctccggtacctgcgttttatacaagacccaagagccttcatgacctattagaacaaagtgttggcaggatcctagactgctttggcatccacgctgacacttttcctcgttgggaaggaataaaaagcaagtaa

SEQ ID NO: 2824 - DNA, 729 bp, Artificial Sequence
  Description of Artificial Sequence: Synthetic polynucleotide
atgctcttatttccaagaagaactaatatagcctttttcaaaacaacaggcatttttgctaattttcctttgttgggtagaaccattacaacttctccatctttccttacacataaattatccaaggaagtaaccagggcatctacttctcctccaagaccaaagagaattgttgtcgcaattactggtgcgactggtgttgcattgggaatcagacttttacaagtgttgaaagagttgagcgtagaaacccatttggtgatttccaaatggggtgcagcaacaatgaaatatgaaacagattgggaaccgcatgacgtggcggccttggcaaccaagacatactctgttcgtgatgtttctgcatgcatttcttccggatctttccagcatgatggtatgattgttgtgccctgttccatgaaatctttggctgctattagaatcggttttacagaggatttaattacaagagctgccgatgtttctattaaagagaatcgtaagttattattggttactagagaaacccctttatcttccatccatcttgaaaacatgttgtctttatgcagggcaggtgttataatttttcctccggtacctgcgttttatacaagacccaagagccttcatgacttattagaacaaagtgttggcaggatcttggactgctttggcatccacgctgacacttttcctcgttgggaaggaataaaaagcaagtga

SEQ ID NO: 2825 - DNA, 1512 bp, Saccharomyces cerevisiae
atgaggaagctaaatccagctttagaatttagagactttatccaggtcttaaaagatgaagatgacttaatcgaaattaccgaagagattgatccaaatctcgaagtaggtgcaattatgaggaaggcctatgaatcccacttaccagccccgttatttaaaaatctcaaaggtgcttcgaaggatcttttcagcattttaggttgcccagccggtttgagaagtaaggagaaaggagatcatggtagaattgcccatcatctggggctcgacccaaaaacaactatcaaggaaatcatagattatttgctggagtgtaaggagaaggaacctctccccccaatcactgttcctgtgtcatctgcaccttgtaaaacacatatactttctgaagaaaaaatacatctacaaagcctgccaacaccatatctacatgtttcagacggtggcaagtacttacaaacgtacggaatgtggattcttcaaactccagataaaaaatggactaattggtcaattgctagaggtatggttgtagatgacaagcatatcactggtctggtaattaaaccacaacatattagacaaattgctgactcttgggcagcaattggaaaagcaaatgaaattcctttcgcgttatgttttggcgttcccccagcagctattttagttagttccatgccaattcctgaaggtgtttctgaatcggattatgttggcgcaatcttgggtgagtcggttccagtagtaaaatgtgagaccaacgatttaatggttcctgcaacgagtgagatggtatttgagggtactttgtccttaacagatacacatctggaaggcccatttggtgagatgcatggatatgttttcaaaagccaaggtcatccttgtccattgtacactgtcaaggctatgagttacagagacaatgctattctacctgtttcgaaccccggtctttgtacggatgagacacataccttgattggttcactagtggctactgaggccaaggagctggctattgaatctggcttgccaattctggatgcctttatgccttatgaggctcaggctctttggcttatcttaaaggtggatttgaaagggctgcaagcattgaagacaacgcctgaagaattttgtaagaaggtaggtgatatttactttaggacaaaagttggttttatagtccatgaaataattttggtggcagatgatatcgacatatttaacttcaaagaagtcatctgggcctacgttacaagacatacacctgttgcagatcagatggcttttgatgatgtcacttcttttcctttggctccctttgtttcgcagtcatccagaagtaagactatgaaaggtggaaagtgcgttactaattgcatatttagacagcaatatgagcgcagttttgactacataacttgtaattttgaaaagggatatccaaaaggattagttgacaaagtaaatgaaaattggaaaaggtacggatataaataa

SEQ ID NO: 2826 - DNA, 1512 bp, Artificial Sequence
  Description of Artificial Sequence: Synthetic polynucleotide
atgaggaagttgaatccagctttagaatttagagactttatccaggtcttaaaagatgaagatgacttaatcgaaattaccgaagagattgatccaaatctcgaagtaggtgcaattatgaggaaggcctatgaatcccacttaccagccccgttatttaaaaatctcaaaggtgcttccaaggatcttttcagcattttaggttgcccagccggtttgagaagtaaggagaaaggagatcatggtagaattgcccatcatttggggctcgacccaaaaacaactatcaaggaaatcatagattatttgttggagtgtaaggagaaggaacctctccccccaatcactgttcctgtgtcttctgcaccttgtaaaacacatatactttctgaagaaaaaatacatttacaaagcttgccaacaccatatttgcatgtttctgacggtggcaagtacttacaaacgtacggaatgtggattcttcaaactccagataaaaaatggactaattggtctattgctagaggtatggttgtagatgacaagcatatcactggtttagtaattaaaccacaacatattagacaaattgctgactcttgggcagcaattggaaaagcaaatgaaattcctttcgcgttatgttttggcgttcccccagcagctattttagttagttccatgccaattcctgaaggtgtttctgaaagtgattatgttggcgcaatcttgggtgagtctgttccagtagtaaaatgtgagaccaacgatttaatggttcctgcaacgagtgagatggtatttgagggtactttgtccttaacagatacacatttggaaggcccatttggtgagatgcatggatatgttttcaaaagccaaggtcatccttgtccattgtacactgtcaaggctatgagttacagagacaatgctattttacctgtttctaaccccggtctttgtacggatgagacacataccttgattggttctttggtggctactgaggccaaggagttggctattgaatctggcttgccaattttagatgcctttatgccttatgaggctcaggctctttggcttatcttaaaggtggatttgaaagggttgcaagcattgaagacaacgcctgaagaattttgtaagaaggtaggtgatatttactttaggacaaaagttggttttatagtccatgaaataattttggtggcagatgatatcgacatatttaacttcaaagaagtcatctgggcctacgttacaagacatacacctgttgcagatcagatggcttttgatgatgtcacttcttttcctttggctccctttgtttctcagtcttccagaagtaagactatgaaaggtggaaagtgcgttactaattgcatatttagacagcaatatgagcgcagttttgactacataacttgtaattttgaaaagggatatccaaaaggattagttgacaaagtaaatgaaaattggaaaaggtacggatataaatga

SEQ ID NO: 2827 - DNA, 540 bp, Saccharomyces cerevisiae
atgagagaatataccagtaaaaaagaactaaaggaagagattgaaaaaaaatatgaaaaatatgatgcagaatttgaaacaatctctgaatctcaaaaagacgaaaaagttgaaacagtggatagaacaccctctgaaaacctctcttatcaattgggctgggttaatttattattagagtgggaagcaaaggaaattgctgggtataatgtggaaactcctgcgcctggttataaatggaacaatttaggaggattataccagtcattttataaaaaatacggaatctactccattaaggagcaaagagccaagctgagagaggccgtaaacgaggtctataaatggatatctactttatctgatgatgagctctttcaagcgggaaatagaaaatgggctacaactaaagctatgtggcctgtgtataaatggatccatatcaacacggttgctcctttcacaaactttagaggaaaaattagaaaatggaagagactagtgcctgaagaacaacgcataaaaaggaggaagatataa

SEQ ID NO: 2828 - DNA, 540 bp, Artificial Sequence
  Description of Artificial Sequence: Synthetic polynucleotide
atgagagaatataccagtaaaaaagaattgaaggaagagattgaaaaaaaatatgaaaaatatgatgcagaatttgaaacaatctctgaatctcaaaaagacgaaaaagttgaaacagtggatagaacaccctctgaaaacctctcttatcaattgggctgggttaatttattattagagtgggaagcaaaggaaattgctgggtataatgtggaaactcctgcgcctggttataaatggaacaatttaggaggattataccagtctttttataaaaaatacggaatctactccattaaggagcaaagagccaagttgagagaggccgtaaacgaggtctataaatggatatctactttatctgatgatgagctctttcaagcgggaaatagaaaatgggctacaactaaagctatgtggcctgtgtataaatggatccatatcaacacggttgctcctttcacaaactttagaggaaaaattagaaaatggaagagattagtgcctgaagaacaacgcataaaaaggaggaagatatga

SEQ ID NO: 2829 - DNA, 1035 bp, Saccharomyces cerevisiae
atgtctaatacagttctagtttctggcgcttcaggttttattgccttgcatatcctgtcacaattgttaaaacaagattataaggttattggaactgtgagatcccatgaaaaagaagcaaaattgctaagacaatttcaacataaccctaatttaactttagaaattgttccggacatttctcatccaaatgctttcgataaggttctgcagaaacgtggacgtgagattaggtatgttctacacacggcctctccttttcattatgatactaccgaatatgaaaaagacttattgattcccgcgttagaaggtacaaaaaacatcctaaattctatcaagaaatatgcagcagacactgtagagcgtgttgttgtgacttcttcttgtactgctattataacccttgcaaagatggacgatcccagtgtggtttttacagaagagagttggaacgaagcaacctgggaaagctgtcaaattgatgggataaatgcttactttgcatccaagaagtttgctgaaaaggctgcctgggagttcacaaaagagaatgaagatcacatcaaattcaaactaacaacagtcaacccttctcttctttttggtcctcaacttttcgatgaagatgtgcatggccatttgaatacttcttgcgaaatgatcaatggcctaattcataccccagtaaatgccagtgttcctgattttcattccatttttattgatgtaagggatgtggccctagctcatctgtatgctttccagaaggaaaataccgcgggtaaaagattagtggtaactaacggtaaatttggaaaccaagatatcctggatattttgaacgaagattttccacaattaagaggtctcattcctttgggtaagcctggcacaggtgatcaagtcattgaccgcggttcaactacagataatagtgcaacgaggaaaatacttggctttgagttcagaagtttacacgaaagtgtccatgatactgctgcccaaattttgaagaagcagaacagattatga

SEQ ID NO: 2830 - DNA, 1035 bp, Artificial Sequence
  Description of Artificial Sequence: Synthetic polynucleotide
atgtctaatacagttttggtttctggcgcttctggttttattgccttgcatatcttatctcaattgttaaaacaagattataaggttattggaactgtgagatcccatgaaaaagaagcaaaattgttaagacaatttcaacataaccctaatttaactttagaaattgttccggacatttctcatccaaatgctttcgataaggttttacagaaacgtggacgtgagattaggtatgttttgcacacggcctctccttttcattatgatactaccgaatatgaaaaagacttattgattcccgcgttagaaggtacaaaaaacatcttgaattctatcaagaaatatgcagcagacactgtagagcgtgttgttgtgacttcttcttgtactgctattataacccttgcaaagatggacgatcccagtgtggtttttacagaagagagttggaacgaagcaacctgggaaagctgtcaaattgatgggataaatgcttactttgcatccaagaagtttgctgaaaaggctgcctgggagttcacaaaagagaatgaagatcacatcaaattcaaattaacaacagtcaacccttctcttctttttggtcctcaacttttcgatgaagatgtgcatggccatttgaatacttcttgcgaaatgatcaatggcttaattcataccccagtaaatgccagtgttcctgattttcattccatttttattgatgtaagggatgtggccttagctcatttatatgctttccagaaggaaaataccgcgggtaaaagattagtggtaactaacggtaaatttggaaaccaagatatcttagatattttgaacgaagattttccacaattaagaggtctcattcctttgggtaagcctggcacaggtgatcaagtcattgaccgcggttctactacagataatagtgcaacgaggaaaatacttggctttgagttcagaagtttacacgaaagtgtccatgatactgctgcccaaattttgaagaagcagaacagattatga

SEQ ID NO: 2831 - DNA, 363 bp, Saccharomyces cerevisiae
atggtcaaattaacttcaatcgccgctggtgtcgctgccatcgctgctactgcttccgcaaccaccactctagctcaatctgacgaaagagtcaacttggttgaattgggtgtctacgtctctgatatcagagctcacttggcccaatactacatgttccaagccgcccacccaacggaaacctacccagttgaagttgctgaagccgttttcaactacggtgacttcaccaccatgttgactggtattgccccagaccaagtgaccagaatgatcaccggtgttccatggtactccagcagattaaagccagccatctccagtgctctatccaaggtcggtatctacactatcgcaaactag

SEQ ID NO: 2832 - DNA, 363 bp, Artificial Sequence
  Description of Artificial Sequence: Synthetic polynucleotide
atggtcaaattaacttctatcgccgctggtgtcgctgccatcgctgctactgcttccgcaaccaccactttggctcaatctgacgaaagagtcaacttggttgaattgggtgtctacgtctctgatatcagagctcacttggcccaatactacatgttccaagccgcccacccaacggaaacctacccagttgaagttgctgaagccgttttcaactacggtgacttcaccaccatgttgactggtattgccccagaccaagtgaccagaatgatcaccggtgttccatggtactccagcagattaaagccagccatctccagtgctttgtccaaggtcggtatctacactatcgcaaactga

SEQ ID NO: 2833 - DNA, 5391 bp, Saccharomyces cerevisiae
atgaaagtttccgataggcgtaagtttgaaaaagcaaactttgacgagtttgagtcggctctaaataacaaaaacgacttggtacattgtccctcaataactttatttgaatcgatccccacggaagtgcggtcattctacgaagacgaaaagtctggcctaatcaaagtggtaaaattcagaactggtgcaatggataggaaaaggtcttttgaaaaaattgtcatttccgtcatggtcgggaaaaatgtacaaaagttcctgacatttgttgaagacgaaccagatttccagggcggaccaatcccttcaaagtatcttattcccaagaaaatcaacttgatggtctacacgttgtttcaagtgcatactttgaaattcaatagaaaggattacgataccctttctcttttttacctcaacagaggatactataatgagttgagtttccgtgtcctggaacgttgtcacgaaatagcgagtgccaggccgaacgacagctctacgatgcgtactttcactgactttgtttctggcgcacctattgtaaggagtcttcagaaaagcaccataaggaaatatgggtacaatttggcaccctacatgttcttgttactacacgtagatgagctatcgattttttctgcataccaagcaagtttacctggcgaaaagaaagtcgacacagagcggctgaagcgtgatctatgcccacgtaaacccattgagataaagtacttttcacagatatgtaacgatatgatgaacaaaaaagaccgattgggtgatattttgcatattatcttgcgagcatgtgcgctcaatttcggggcgggtccccgtggtggcgctggtgacgaagaggatcgatctattacgaatgaagaacccattattccctctgtggacgagcatggcttgaaagtatgtaagttgcgtagtcctaacactccacgaagactcagaaaaacactagatgccgtgaaagctttattggtgtcgtcttgtgcttgtactgcaagggatttagatatatttgatgacaccaacggcgttgcaatgtggaaatggatcaaaattctgtaccacgaagtagcgcaggaaaccacgctgaaggactcttatagaataactttggtaccttcttctgatggtatatcagtatgtggaaaactttttaatcgcgagtatgtccgcggcttttactttgcatgcaaggctcagttcgataacctttggggagagttgaacaactgcttttatatgcctacagtggttgatattgccagcctcattttgcgtaatcgagaagttttgttcagagagccaaagcgaggaattgacgagtatctggaaaacgattcttttcttcaaatgatacctgttaaatatcgtgaaattgtgctgcccaagttgagaagagatactaacaaaatgaccgcggctcttaaaaataaagtcactgttgcaattgacgagcttacggtgccacttatgtggatggtccattttgccgtaggatacccttaccgttatccagagcttcagctactcgcttttgccggtcctcagcgcaacgtatacgtcgatgatacaacaagacgcatccaactgtacactgattacaacaagaacggttcatcggagcctcgacttaagacgcttgacggactcacttcagattacgtgttttattttgtcactgtgctaaggcaaatgcaaatatgtgcgcttggtaacagttatgacgcttttaatcatgatccttggatggatgtggtgggatttgaggatccagatcaagtaacaaatcgagacatttcgaggatagttttgtattcctacatgtttctgaataccgcgaagggctgtctggttgaatacgcaacttttcggcagtacatgagggaacttccgaagaatgcacctcagaagctgaattttcgggagatgcgtcaggggttgattgccctaggacggcactgcgtaggtagcagatttgaaacagatttgtacgagtcggcgacgagtgaactcatggccaatcattccgttcaaacagggcgaaatatttacggtgtggattccttttcgttaactagtgtcagtgggacgaccgccactttattgcaggaacgagcttccgagcgctggattcaatggttaggccttgaaagcgactaccattgttcattctctagtactcggaatgcggaagacgtagtggcaggtgaggcggcgagttcagatcatgatcaaaaaatttcaagagtaacgcgaaaaaggccccgagagcccaagagtacaaacgatatcctcgtcgcaggccagaaactctttggcagctcctttgaattcagggacttgcatcagttgcgcttatgtcatgaaatatacatggcagacacaccctctgtggcagtacaggccccaccgggctatggtaagacggagttatttcatctccccttgatagcactggcgtctaagggcgacgtgaaatatgtgtcgtttctgtttgtaccgtacacagtgttgcttgctaattgcatgatcaggttgagccgatgcggttgcttgaatgtggcccctgtaagaaactttattgaagaaggttgcgatggcgttactgatttatacgtggggatctacgatgatcttgctagcactaatttcacagacaggatagctgcgtgggagaatattgttgagtgcacctttaggaccaacaacgtaaaattgggttacctcattgtagatgagtttcacaactttgaaacggaggtctaccggcagtcgcaatttgggggcataactaaccttgattttgacgcttttgagaaagcaatctttttgagcggcacagcacctgaggctgtagctgatgctgcgttgcagcgtattgggcttacgggactggccaagaagtcgatggacatcaacgagctcaaacggtcggaagatctcagcagaggtctatccagctatccaacacggatgtttaatctaatcaaggagaaatccgaggtgcctttagggcatgttcataaaatttggaagaaagtggaatcacagcccgaagaagcactgaagcttcttttagccctctttgaaattgaaccagagtcgaaggccattgtagttgcaagcacaaccaacgaagtggaagaattggcctgctcttggagaaagtattttagggtggtatggatacacgggaagctgggtgctgcagaaaaggtgtctcgcacaaaggagtttgtcactgacggtagcatgcgagttctcatcggaacgaaattagtgactgaaggaattgacattaagcaattgatgatggtgatcatgcttgataatagacttaatattattgagctcattcaaggcgtagggagactaagagatgggggcctctgttatctattatctagaaaaaacagttgggcggcaaggaatcgtaagggtgaattaccaccgattaaggaaggctgtataaccgaacaggtacgcgagttctatggacttgaatcaaagaaaggaaaaaagggccagcatgttggatgctgtggctccaggacagacctgtctgctgacacagtggaactgatagaaagaatggacagattggctgaaaaacaggcgacagcttccatgtcgatcattgcgttaccgtctagcttccaggagagcaatagcagtgacaggtgcagaaagtattgcagcagtgatgaggacagcgacacgtgcattcatggtagtgctaatgccagtaccaatgcgactaccaactccagcactaatgctactaccactgccagcaccaacgtcaggactagtgctactaccactgccagcatcaacgtcaggactagtgcgattaccactgaaagtaccaactccagcactaatgctactaccactgccagcaccaacgtcaggactagtgctactaccactgccagcatcaacgtcaggactagtgcgactaccactgaaagtaccaactccaacactagtgctactaccaccgaaagtaccgactccaacactagtgctactaccaccgaaagtaccgactccaacactagtgctactaccactgctagcaccaactccagcactaatgccactaccactgctagcaccaactccagcactaatgccactaccactgaaagtaccaacgctagtgccaaggaggacgccaataaagatggcaatgctgaggataatagattccatccagtcaccgacattaacaaagagtcgtataagcggaaagggagtcaaatggttttgctagagagaaagaaactgaaagcacaatttcccaatacttccgagaatatgaatgtcttacagtttcttggatttcggtctgacgaaattaaacatcttttcctctatggtattgacgtatacttctgcccagagggagtattcacacaatacggattatgcaagggctgtcaaaagatgttcgagctctgtgtctgttgggctggccagaaagtatcgtatcggaggatggcttgggaagcactagctgtggagagaatgctgcgaaatgacgaggaatacaaagaatacttggaagacatcgagccatatcatggggaccctgtaggatatttgaaatattttagcgtaaaaaggggagagatctactctcagatacagagaaattatgcttggtacctggccattactagaagaagagaaacaattagtgtattggattcgacaagaggcaagcaagggagccaagttttccgcatgtctggaaggcagatcaaagagttgtattataaagtatggagcaacttgcgtgaatcgaagacagaggtgctgcagtactttttgaactgggacgagaaaaagtgccgggaagaatgggaggcaaaagacgatacggtctttgtggaagcgctcgagaaagttggagtttttcagcgtttgcgttccatgacgagcgctggactgcagggtccgcagtacgtcaagctgcagtttagcaggcatcatcgacagttgaggagcagatatgaattaagtctaggaatgcacttgcgagatcagcttgcgctgggagttaccccatctaaagtgccgcattggacggcattcctgtcgatgctgatagggctgttctacaataaaacatttcggcagaaactggaatatcttttggagcagatttcggaggtgtggttgttaccacattggcttgatttggcaaacgttgaagttctcgctgcagataacacgagggtaccgctgtacatgctgatggtagcggttcacaaagagctggatagcgatgatgttccagacggtagatttgatataatattactatgtagagattcgagcagagaagttggagagtga

SEQ ID NO: 2834 - DNA, 5391 bp, Artificial Sequence
  Description of Artificial Sequence: Synthetic polynucleotide
atgaaagtttccgataggcgtaagtttgaaaaagcaaactttgacgagtttgagtctgctttgaataacaaaaacgacttggtacattgtccctccataactttatttgaaagtatccccacggaagtgagatctttctacgaagacgaaaagtctggcttaatcaaagtggtaaaattcagaactggtgcaatggataggaaaaggtcttttgaaaaaattgtcatttccgtcatggtcgggaaaaatgtacaaaagttcttaacatttgttgaagacgaaccagatttccagggcggaccaatcccttctaagtatcttattcccaagaaaatcaacttgatggtctacacgttgtttcaagtgcatactttgaaattcaatagaaaggattacgataccctttctcttttttacctcaacagaggatactataatgagttgagtttccgtgtcttggaacgttgtcacgaaatagcgagtgccaggccgaacgacagctctacgatgcgtactttcactgactttgtttctggcgcacctattgtaaggagtcttcagaaaagcaccataaggaaatatgggtacaatttggcaccctacatgttcttgttattacacgtagatgagttatccattttttctgcataccaagcaagtttacctggcgaaaagaaagtcgacacagagaggttaaagcgtgatttatgcccacgtaaacccattgagataaagtacttttcccagatatgtaacgatatgatgaacaaaaaagacagattgggtgatattttgcatattatcttgagagcatgtgcgctcaatttcggggcgggtccccgtggtggcgctggtgacgaagaggatagatctattacgaatgaagaacccattattccctctgtggacgagcatggcttgaaagtatgtaagttgcgtagtcctaacactccaagaagactcagaaaaacattagatgccgtgaaagctttattggtgtcttcttgtgcttgtactgcaagggatttagatatatttgatgacaccaacggcgttgcaatgtggaaatggatcaaaattttataccacgaagtagcgcaggaaaccacgttgaaggactcttatagaataactttggtaccttcttctgatggtatatctgtatgtggaaaactttttaatcgcgagtatgtccgcggcttttactttgcatgcaaggctcagttcgataacctttggggagagttgaacaactgcttttatatgcctacagtggttgatattgccagcctcattttgcgtaatagagaagttttgttcagagagccaaagagaggaattgacgagtatttggaaaacgattcttttcttcaaatgatacctgttaaatatcgtgaaattgtgttacccaagttgagaagagatactaacaaaatgaccgcggctcttaaaaataaagtcactgttgcaattgacgagcttacggtgccacttatgtggatggtccattttgccgtaggatacccttaccgttatccagagcttcagttgctcgcttttgccggtcctcagcgcaacgtatacgtcgatgatacaacaagacgcatccaattgtacactgattacaacaagaacggttcttctgagcctcgtcttaagacgcttgacggactcacttctgattacgtgttttattttgtcactgtgttaaggcaaatgcaaatatgtgcgcttggtaacagttatgacgcttttaatcatgatccttggatggatgtggtgggatttgaggatccagatcaagtaacaaatagagacatttctaggatagttttgtattcctacatgtttttgaataccgcgaagggctgtttggttgaatacgcaacttttagacagtacatgagggaacttccgaagaatgcacctcagaagttgaattttagagagatgcgtcaggggttgattgccttaggaagacactgcgtaggtagcagatttgaaacagatttgtacgagtctgcgacgagtgaactcatggccaatcattccgttcaaacagggagaaatatttacggtgtggattccttttctttaactagtgtcagtgggacgaccgccactttattgcaggaaagagcttccgagcgctggattcaatggttaggccttgaaagcgactaccattgttctttctctagtactagaaatgcggaagacgtagtggcaggtgaggcggcgagttctgatcatgatcaaaaaatttctagagtaacgagaaaaaggcccagagagcccaagagtacaaacgatatcctcgtcgcaggccagaaactctttggcagctcctttgaattcagggacttgcatcagttgcgcttatgtcatgaaatatacatggcagacacaccctctgtggcagtacaggccccaccgggctatggtaagacggagttatttcatctccccttgatagcattagcgtctaagggcgacgtgaaatatgtgtcctttttgtttgtaccgtacacagtgttgcttgctaattgcatgatcaggttgagcagatgcggttgcttgaatgtggcccctgtaagaaactttattgaagaaggttgcgatggcgttactgatttatacgtggggatctacgatgatcttgctagcactaatttcacagacaggatagctgcgtgggagaatattgttgagtgcacctttaggaccaacaacgtaaaattgggttacctcattgtagatgagtttcacaactttgaaacggaggtctacagacagtctcaatttgggggcataactaaccttgattttgacgcttttgagaaagcaatctttttgagcggcacagcacctgaggctgtagctgatgctgcgttgcagcgtattgggcttacgggattggccaagaagtctatggacatcaacgagctcaaaagaagtgaagatctcagcagaggtttatccagctatccaacaagaatgtttaatttgatcaaggagaaatccgaggtgcctttagggcatgttcataaaatttggaagaaagtggaatctcagcccgaagaagcattgaagcttcttttagccctctttgaaattgaaccagagtctaaggccattgtagttgcaagcacaaccaacgaagtggaagaattggcctgctcttggagaaagtattttagggtggtatggatacacgggaagttgggtgctgcagaaaaggtgtctcgcacaaaggagtttgtcactgacggtagcatgagagttctcatcggaacgaaattagtgactgaaggaattgacattaagcaattgatgatggtgatcatgcttgataatagacttaatattattgagctcattcaaggcgtagggagattgagagatgggggcctctgttatcttttatctagaaaaaacagttgggcggcaaggaatcgtaagggtgaattaccaccgattaaggaaggctgtataaccgaacaggtacgcgagttctatggacttgaatccaagaaaggaaaaaagggccagcatgttggatgctgtggctccaggacagacttgtctgctgacacagtggaattgatagaaagaatggacagattggctgaaaaacaggcgacagcttccatgtccatcattgcgttaccgtctagcttccaggagagcaatagcagtgacaggtgcagaaagtattgcagcagtgatgaggacagcgacacgtgcattcatggtagtgctaatgccagtaccaatgcgactaccaactccagcactaatgctactaccactgccagcaccaacgtcaggactagtgctactaccactgccagcatcaacgtcaggactagtgcgattaccactgaaagtaccaactccagcactaatgctactaccactgccagcaccaacgtcaggactagtgctactaccactgccagcatcaacgtcaggactagtgcgactaccactgaaagtaccaactccaacactagtgctactaccaccgaaagtaccgactccaacactagtgctactaccaccgaaagtaccgactccaacactagtgctactaccactgctagcaccaactccagcactaatgccactaccactgctagcaccaactccagcactaatgccactaccactgaaagtaccaacgctagtgccaaggaggacgccaataaagatggcaatgctgaggataatagattccatccagtcaccgacattaacaaagagtcttataagagaaaagggagtcaaatggttttgttggagagaaagaaattgaaagcacaatttcccaatacttccgagaatatgaatgtcttacagtttcttggatttagatctgacgaaattaaacatcttttcctctatggtattgacgtatacttctgcccagagggagtattcacacaatacggattatgcaagggctgtcaaaagatgttcgagctctgtgtctgttgggctggccagaaagtatcttatagaaggatggcttgggaagcattggctgtggagagaatgttaagaaatgacgaggaatacaaagaatacttggaagacatcgagccatatcatggggaccctgtaggatatttgaaatattttagcgtaaaaaggggagagatctactctcagatacagagaaattatgcttggtacttggccattactagaagaagagaaacaattagtgtattggattctacaagaggcaagcaagggagccaagttttccgcatgtctggaaggcagatcaaagagttgtattataaagtatggagcaacttgcgtgaatccaagacagaggtgttacagtactttttgaactgggacgagaaaaagtgcagagaagaatgggaggcaaaagacgatacggtctttgtggaagcgctcgagaaagttggagtttttcagcgtttgcgttccatgacgagcgctggattacagggtccgcagtacgtcaagttacagtttagcaggcatcatagacagttgaggagcagatatgaattaagtttgggaatgcacttgagagatcagcttgcgttgggagttaccccatctaaagtgccgcattggacggcattcttgtccatgttgatagggcttttctacaataaaacatttagacagaaattagaatatcttttggagcagatttctgaggtgtggttgttaccacattggcttgatttggcaaacgttgaagttctcgctgcagataacacgagggtaccgttgtacatgttaatggtagcggttcacaaagagttagatagcgatgatgttccagacggtagatttgatataatattattatgtagagattctagcagagaagttggagagtga

SEQ ID NO: 2835 - DNA, 3834 bp, Saccharomyces cerevisiae
atgacgcttggtaacagttatgacgcttttaatcatgatccttggatggatgtggtgggatttgaggatccaaatcaagtaacaaatcgagacatttcgaggatagttttgtattcctacatgtttctgaataccgcgaagggctgtctggttgaatacgcaacttttcggcagtacatgagggaacttccgaagaatgcacctcagaagctgaattttcgggagatgcgtcaggggttgattgccctaggacggcactgcgtaggtagcagatttgaaacagatttgtacgagtcggcgacgagtgaactcatggccaatcattccgttcaaacagggcgaaatatttacggtgtggattccttttcgttaactagtgtcagtgggacgaccgccactttattgcaggaacgagcttccgagcgctggattcaatggttaggccttgaaagcgactaccattgttcattctctagtactcggaatgcggaagacgtagtggcaggtgaggcggcgagttcagatcatcaccaaaaaatctcaagagtaacgcgaaaaaggccccgagagcccaagagtacaaacgatatcctcgttgcaggccagaaactctttggcagctcctttgaattcagggacttgcatcagttgcgcttatgttatgaaatatacatggcagacacaccctctgtggcagtacaggccccaccgggctatggtaagacggagttatttcatctccccttgatagcactggcgtctaagggcgacgtgaaatatgtgtcgtttctgtttgtaccgtacacagtgttgcttgctaattgcatgatcaggttgggccgatgcggttgcttgaatgtggcccctgtaagaaactttattgaagaaggttacgatggcgttactgatttatacgtggggatctacgatgatcttgctagcactaatttcacagacaggatagctgcgtgggagaatattgttgagtgcacctttaggaccaacaacgtaaaattgggttacctcattgtagatgagtttcacaactttgaaacggaggtctaccggcagtcgcaatttgggggcataactaaccttgattttgacgcttttgagaaagcaatctttttgagcggcacagcccctgaggctgtagctgatgctgcgttgcagcgtattgggcttacgggactggccaagaaatcgatggacatcaacgagctcaaacggtcggaagatctcagcagaggtctatccagctatccaacacggatgtttaatctaatcaaggagaaatccgaggtgcctttagggcatgttcataaaattcggaagaaagtggaatcacagcccgaagaagcactgaagcttcttttagccctctttgaaagtgaaccagagtcgaaggccattgtagttgcaagcacaaccaacgaagtggaagaattggcctgctcttggagaaagtattttagggtggtatggatacacgggaagctggatgctgcagaaaaggtgtctcgcacaaaggagtttgtcacggacggtaacatgcgagttctcatcggaacgaaattagtgactgaaggaattgacattaagcaattgatgatggtgatcatgcttgataatagacttaatattattgagctcattcaaggcgtagggagactaagagatgggggcctctgttatctattatctagaaaaaacagttgggcggcaaggaatcgtaagggtgaattaccaccaattaaggaaggctgtataaccgaacaggtacgcgagttctatggacttgaatcaaagaaaggaaaaaagggccagcatgttggatgctgtggctccaggacagacctgtctgctgacacagtggaactgatagaaagaatggacagattggctgaaaaacaggcgacagcttccatgtcgatcgttgcgttaccgtctaacttccaggagagcaatagcagtgacaggtacagaaagtattgcagcagtgatgaggacagcaacacgtgcattcatggtagtgctaatgccagtactaacgccagtactaatgcgattaccactgctagtaccaacgtcaggactaatgcgactaccaatgctagtactaatgcgactaccaatgccagtaccaatgcgactaccaactccagcactaatgctactaccactgccagcaccaacgtcaggactagtgctactaccactgccagcatcaacgtcaggactagtgctactaccactgaaagtaccaactccagcactaatgcgactaccactgccagcatcaacgtcaggactagtgctactaccactaaaagtatcaactccagcactaatgctactatcactgaaagtaccaactccaacactaatgctactaccactgaaagtaccaactccaaaactagtgctactaccactgctagcaccaactccaacactagtgctactaccaccgaaagtaccaactccaaaactagtgctactaccactgctagcaccaactccaacactagtgctactaccaccgaaagtaccaactccaacactagtgctactaccactgctagcaccaactccagcactaatgctactaccactgaaagtaccaacgctagtgccaaggaggacgccaataaagatggcaatgctgaggataatagattccatccagtcaccgacattaacaaagagtcgtataagcggaaagggagtcaaatggttttgctagagagaaagaaactgaaagcacaatttcccaatacttccgagaatatgaatgtcttacagtttcttggatttcggtctgacgaaattaaacatcttttcctctatggtattgacatatacttctgcccagagggcgtattcacacaatacggattatgcaagggctgtcaaaagatgttcgagctctgtgtctgttgggctggccagaaagtatcgtataggaggatggcttgggaagcactagctgtggagagaatgctgcgaaatgacgaggaatacaaagaatacttggaagacatcgagccatatcatggggaccctgtaggatatttgaaatattttagcgtaaaaaggagagagatctactctcagatacagagaaattatgcttggtacctggccattactagaagaagagaaacaattagtgtattggattcgacaagaggcaagcaagggagccaagttttccgcatgtctggaaggcagatcaaagagttgtattataaagtatggagcaacttgcgtgaatcgaagacagaggtgctgcagtactttttgaactgggacgaaaaaaagtgccaggaagaatgggaggcaaaagacgatacggtctttgtggaagcgctcgagaaagttggagtttttcagcgtttgcgttccatgacgagcgctggactgcagggtccgcagtacgtcaagctgcagtttagcaggcatcatcgacagttgaggagcagatatgaattaagcctaggaatgcacttgcgagatcagattgcgctgggagttaccccatctaaagtgccgcattggacggcattcctctcgatgctgatagggctgttctacaataaaacatttcggcagaaactggagtatcttttggagcagatttcggaggtgtggttgttaccacattggcttgatttggcaaacgttgaagttctcgctgcagataacacgaaggtaccactgtacatgctgatggtagcggttcacaaagagctggatagcgatgatgttccagacggtagatttgatataatattactatgtagagattcgagcagagaagttggagagtga

SEQ ID NO: 2836 - DNA, 3834 bp, Artificial Sequence
  Description of Artificial Sequence: Synthetic polynucleotide
atgacgcttggtaacagttatgacgcttttaatcatgatccttggatggatgtggtgggatttgaggatccaaatcaagtaacaaatagagacatttctaggatagttttgtattcctacatgtttttgaataccgcgaagggctgtttggttgaatacgcaacttttagacagtacatgagggaacttccgaagaatgcacctcagaagttgaattttagagagatgcgtcaggggttgattgccttaggaagacactgcgtaggtagcagatttgaaacagatttgtacgagtctgcgacgagtgaactcatggccaatcattccgttcaaacagggagaaatatttacggtgtggattccttttctttaactagtgtcagtgggacgaccgccactttattgcaggaaagagcttccgagcgctggattcaatggttaggccttgaaagcgactaccattgttctttctctagtactagaaatgcggaagacgtagtggcaggtgaggcggcgagttctgatcatcaccaaaaaatctccagagtaacgagaaaaaggcccagagagcccaagagtacaaacgatatcctcgttgcaggccagaaactctttggcagctcctttgaattcagggacttgcatcagttgcgcttatgttatgaaatatacatggcagacacaccctctgtggcagtacaggccccaccgggctatggtaagacggagttatttcatctccccttgatagcattagcgtctaagggcgacgtgaaatatgtgtcctttttgtttgtaccgtacacagtgttgcttgctaattgcatgatcaggttgggccgttgcggttgcttgaatgtggcccctgtaagaaactttattgaagaaggttacgatggcgttactgatttatacgtggggatctacgatgatcttgctagcactaatttcacagacaggatagctgcgtgggagaatattgttgagtgcacctttaggaccaacaacgtaaaattgggttacctcattgtagatgagtttcacaactttgaaacggaggtctacagacagtctcaatttgggggcataactaaccttgattttgacgcttttgagaaagcaatctttttgagcggcacagcccctgaggctgtagctgatgctgcgttgcagcgtattgggcttacgggattggccaagaaatctatggacatcaacgagctcaaaagaagtgaagatctcagcagaggtttatccagctatccaacaagaatgtttaatttgatcaaggagaaatccgaggtgcctttagggcatgttcataaaattagaaagaaagtggaatctcagcccgaagaagcattgaagcttcttttagccctctttgaaagtgaaccagagtctaaggccattgtagttgcaagcacaaccaacgaagtggaagaattggcctgctcttggagaaagtattttagggtggtatggatacacgggaagttggatgctgcagaaaaggtgtctcgcacaaaggagtttgtcacggacggtaacatgagagttctcatcggaacgaaattagtgactgaaggaattgacattaagcaattgatgatggtgatcatgcttgataatagacttaatattattgagctcattcaaggcgtagggagattgagagatgggggcctctgttatcttttatctagaaaaaacagttgggcggcaaggaatcgtaagggtgaattaccaccaattaaggaaggctgtataaccgaacaggtacgcgagttctatggacttgaatccaagaaaggaaaaaagggccagcatgttggatgctgtggctccaggacagacttgtctgctgacacagtggaattgatagaaagaatggacagattggctgaaaaacaggcgacagcttccatgtccatcgttgcgttaccgtctaacttccaggagagcaatagcagtgacaggtacagaaagtattgcagcagtgatgaggacagcaacacgtgcattcatggtagtgctaatgccagtactaacgccagtactaatgcgattaccactgctagtaccaacgtcaggactaatgcgactaccaatgctagtactaatgcgactaccaatgccagtaccaatgcgactaccaactccagcactaatgctactaccactgccagcaccaacgtcaggactagtgctactaccactgccagcatcaacgtcaggactagtgctactaccactgaaagtaccaactccagcactaatgcgactaccactgccagcatcaacgtcaggactagtgctactaccactaaaagtatcaactccagcactaatgctactatcactgaaagtaccaactccaacactaatgctactaccactgaaagtaccaactccaaaactagtgctactaccactgctagcaccaactccaacactagtgctactaccaccgaaagtaccaactccaaaactagtgctactaccactgctagcaccaactccaacactagtgctactaccaccgaaagtaccaactccaacactagtgctactaccactgctagcaccaactccagcactaatgctactaccactgaaagtaccaacgctagtgccaaggaggacgccaataaagatggcaatgctgaggataatagattccatccagtcaccgacattaacaaagagtcttataagagaaaagggagtcaaatggttttgttggagagaaagaaattgaaagcacaatttcccaatacttccgagaatatgaatgtcttacagtttcttggatttagatctgacgaaattaaacatcttttcctctatggtattgacatatacttctgcccagagggcgtattcacacaatacggattatgcaagggctgtcaaaagatgttcgagctctgtgtctgttgggctggccagaaagtatcttataggaggatggcttgggaagcattggctgtggagagaatgttaagaaatgacgaggaatacaaagaatacttggaagacatcgagccatatcatggggaccctgtaggatatttgaaatattttagcgtaaaaaggagagagatctactctcagatacagagaaattatgcttggtacttggccattactagaagaagagaaacaattagtgtattggattctacaagaggcaagcaagggagccaagttttccgcatgtctggaaggcagatcaaagagttgtattataaagtatggagcaacttgcgtgaatccaagacagaggtgttacagtactttttgaactgggacgaaaaaaagtgccaggaagaatgggaggcaaaagacgatacggtctttgtggaagcgctcgagaaagttggagtttttcagcgtttgcgttccatgacgagcgctggattacagggtccgcagtacgtcaagttacagtttagcaggcatcatagacagttgaggagcagatatgaattaagcttgggaatgcacttgagagatcagattgcgttgggagttaccccatctaaagtgccgcattggacggcattcctctctatgttgatagggcttttctacaataaaacatttagacagaaattagagtatcttttggagcagatttctgaggtgtggttgttaccacattggcttgatttggcaaacgttgaagttctcgctgcagataacacgaaggtaccattgtacatgttaatggtagcggttcacaaagagttagatagcgatgatgttccagacggtagatttgatataatattattatgtagagattctagcagagaagttggagagtga

SEQ ID NO: 2837 - DNA, 651 bp, Saccharomyces cerevisiae
atgcaagcaagtttacctggcgaaaagaaagtcgacacagagcggctgaagcgtgatctatgcccacgtaaacccattgagataaagtacttttcacagatatgtaacgatatgatgaacaaaaaggaccgattgggtgatattttgcatattatcttgcgagcatgtgcactcaatttcggggcgggtccccgtggtggcgctggtgacgaagaggatcgatctattacgaatgaagaacccattattccctctgtggacgagcatggcctgaaagtatgtaagttgcgcagtcctaacactccacgaagactcagaaaaacactagatgccgtgaaagctttattggtgtcgtcttgtgcttgtaccgcaagggatttagatatatttgatgacaacaacggcgttgcaatgtggaaatggatcaaaattctgtaccacgaagtagcgcaggaaaccacgctgaaggactcttatagaataactttggtaccttcttctgatggtatatcagatacccttaccgttatccagagcttcagctactcgcttttgccggtcctcagcgcaacgtatacgtcgatgatacaacaagacgcatccaactgtacactgattacaacaagaacggttcatcggagcctcgactaa

SEQ ID NO: 2838 - DNA, 651 bp, Artificial Sequence
  Description of Artificial Sequence: Synthetic polynucleotide
atgcaagcaagtttacctggcgaaaagaaagtcgacacagagaggttaaagcgtgatttatgcccacgtaaacccattgagataaagtacttttcccagatatgtaacgatatgatgaacaaaaaggacagattgggtgatattttgcatattatcttgagagcatgtgcactcaatttcggggcgggtccccgtggtggcgctggtgacgaagaggatagatctattacgaatgaagaacccattattccctctgtggacgagcatggcttgaaagtatgtaagttgcgcagtcctaacactccaagaagactcagaaaaacattagatgccgtgaaagctttattggtgtcttcttgtgcttgtaccgcaagggatttagatatatttgatgacaacaacggcgttgcaatgtggaaatggatcaaaattttataccacgaagtagcgcaggaaaccacgttgaaggactcttatagaataactttggtaccttcttctgatggtatatctgatacccttaccgttatccagagcttcagctactctcttttgccggtcctcagcgcaacgtatacgtctatgatacaacaagacgcatccaactgtacattaattacaacaagaacggttcatagaagcctcgactga

SEQ ID NO: 2839 - DNA, 651 bp, Saccharomyces cerevisiae
atgcaagcaagtttacctggcgaaaagaaagtcgacacagagcggctgaagcgtgatctatgcccacgtaaacccattgagataaagtacttttcacagatatgtaacgatatgatgaacaaaaaggaccgattgggtgatattttgcatattatcttgcgagcatgtgcactcaatttcggggcgggtccccgtggtggcgctggtgacgaagaggatcgatctattacgaatgaagaacccattattccctctgtggacgagcatggcctgaaagtatgtaagttgcgcagtcctaacactccacgaagactcagaaaaacactagatgccgtgaaagctttattggtgtcgtcttgtgcttgtaccgcaagggatttagatatatttgatgacaacaacggcgttgcaatgtggaaatggatcaaaattctgtaccacgaagtagcgcaggaaaccacgctgaaggactcttatagaataactttggtaccttcttctgatggtatatcagtatgtggaaaactttggggagagttgaacaactgcttccatatgccagcctcattttgcgtaatcgagaagttttgttcagagaaccgaagcgaggaattgacgagtatctggaaaacgattcttttcttcaaatga

SEQ ID NO: 2840 - DNA, 651 bp, Artificial Sequence
  Description of Artificial Sequence: Synthetic polynucleotide
atgcaagcaagtttacctggcgaaaagaaagtcgacacagagaggttaaagcgtgatttatgcccacgtaaacccattgagataaagtacttttcccagatatgtaacgatatgatgaacaaaaaggacagattgggtgatattttgcatattatcttgagagcatgtgcactcaatttcggggcgggtccccgtggtggcgctggtgacgaagaggatagatctattacgaatgaagaacccattattccctctgtggacgagcatggcttgaaagtatgtaagttgcgcagtcctaacactccaagaagactcagaaaaacattagatgccgtgaaagctttattggtgtcttcttgtgcttgtaccgcaagggatttagatatatttgatgacaacaacggcgttgcaatgtggaaatggatcaaaattttataccacgaagtagcgcaggaaaccacgttgaaggactcttatagaataactttggtaccttcttctgatggtatatctgtatgtggaaaactttggggagagttgaacaactgcttccatatgccagcctctttttgcgtaatcgagaagttttgttctgagaacagaagcgaggaattgacgagtatctggaaaacgattcttttcttcaaatga

SEQ ID NO: 2841 - DNA, 369 bp, Saccharomyces cerevisiae
atgaaagtttccgataggcgtaagtttgaaaaagcaaactttgacgagtttgagtcggctctaaataacaaaaacgacttggtacattgtccctcaataactttatttgaatcgatccccacggaagtgcggtcattctacgaagacgaaaagtctggcctaatcaaagtggtaaaattcagaactggtgcaatggataggaaaaggtcttttgaaaaagttgtcatttccgtcatggtcgggaaaaatgtaaaaaagttcctgacgtttgttgaagacgaaccagatttccagggcggaccaatcccttcaaacaaaccacgtgatggtctacacgttgtttcaagtgcatactttgaaattcaatag

SEQ ID NO: 2842 - DNA, 369 bp, Artificial Sequence
  Description of Artificial Sequence: Synthetic polynucleotide
atgaaagtttccgataggcgtaagtttgaaaaagcaaactttgacgagtttgagtctgctttgaataacaaaaacgacttggtacattgtccctccataactttatttgaaagtatccccacggaagtgagatctttctacgaagacgaaaagtctggcttaatcaaagtggtaaaattcagaactggtgcaatggataggaaaaggtcttttgaaaaagttgtcatttccgtcatggtcgggaaaaatgtaaaaaagttcttgacgtttgttgaagacgaaccagatttccagggcggaccaatcccttccaacaaaccacgtgatggtttacacgttgtttctagtgcatactttgaaattcaatga

SEQ ID NO: 2843 - DNA, 324 bp, Saccharomyces cerevisiae
atggtaaacttagctaacgttttaaccaacgcgactgcagctacgctgagcgcatggtctaatacagttccgttagagacatattttcattttgatgaggcatcaggatttggcgactactatttgaatgtatccgtaatctggatgaatgaaaccctttatgaaaccagaattgtcccagctattatcaatgtccgcgaatggcttgaccatatggaggcaaacgatccttcacctagtgtaactaacccatacgaaacttcaggttattatgccttttcaacagtagtacctgttttaatggggaatatgaaagtagcataa

SEQ ID NO: 2844 - DNA, 324 bp, Artificial Sequence
  Description of Artificial Sequence: Synthetic polynucleotide
atggtaaacttagctaacgttttaaccaacgcgactgcagctacgttgagcgcatggtctaatacagttccgttagagacatattttcattttgatgaggcatctggatttggcgactactatttgaatgtatccgtaatctggatgaatgaaaccctttatgaaaccagaattgtcccagctattatcaatgtccgcgaatggcttgaccatatggaggcaaacgatccttctcctagtgtaactaacccatacgaaacttctggttattatgccttttctacagtagtacctgttttaatggggaatatgaaagtagcatga

SEQ ID NO: 2845 - DNA, 696 bp, Saccharomyces cerevisiae
atgtcagcttgcccttgcaacatcgttatactcccagtcgagattttgaagaattcatctaaagatactaagtatagcttgtatacaacaattaatcgaggatatgatgtcccaagactcaaatatggcatcatagttagccctcgagtgcacagccttgagactttattcagtgatctgggctttgacaagaatatagagaaatcctcgctttacttattattaaatgatcctaccttagcataccctaatttccatgaacattttgaacagcttaaaggtgaaacaaacaaagatttatctctaccgacatattatattccgaaggtccagtttttgacagaggcattcgattcagaacataccctagcaaccatcggctacaaaccaaataataaggagagttatgagatcacaggttttacatccatgggtaatggttatggtataaaactattcaattacagtgtaattcatatgatgcggtctcataagtgtaaaagagtggttgcagatattatcatggagcatgacctattgggttactatgaaaagaagcttggctttgtagaggtgcaaaggttcaaagttctcaaagaacagcaccaagtaaaggtatttgacgataaagttgactttaccaaagactttcatgtgatcaaaatgattaaagagttgggaaatcatagattgtag

SEQ ID NO: 2846 - DNA, 696 bp, Artificial Sequence
  Description of Artificial Sequence: Synthetic polynucleotide
atgtctgcttgcccttgcaacatcgttatactcccagtcgagattttgaagaattcttctaaagatactaagtatagcttgtatacaacaattaatagaggatatgatgtcccaagactcaaatatggcatcatagttagccctagagtgcacagccttgagactttattcagtgatttgggctttgacaagaatatagagaaatcctctctttacttattattaaatgatcctaccttagcataccctaatttccatgaacattttgaacagcttaaaggtgaaacaaacaaagatttatctttaccgacatattatattccgaaggtccagtttttgacagaggcattcgattctgaacataccttggcaaccatcggctacaaaccaaataataaggagagttatgagatcacaggttttacatccatgggtaatggttatggtataaaattattcaattacagtgtaattcatatgatgagatctcataagtgtaaaagagtggttgcagatattatcatggagcatgacttgttgggttactatgaaaagaagcttggctttgtagaggtgcaaaggttcaaagttctcaaagaacagcaccaagtaaaggtatttgacgataaagttgactttaccaaagactttcatgtgatcaaaatgattaaagagttgggaaatcatagattgtga

SEQ ID NO: 2847 - DNA, 1491 bp, Saccharomyces cerevisiae
atgacggccgcacatcctgttgctcagttaactgccgaggcataccctaaagtcaagagaaacccaaatttcaaagttctcgactcggaagatttggcgtactttcgttcgattttgtcaaatgatgaaatcttaaactctcaagctccagaagagcttgcttcgtttaaccaggactggatgaaaaaatatagaggccagtccaatttaattctcttgccaaactccactgataaagtgtccaagattatgaaatactgtaacgataaaaagttggcagtagtaccacaaggtggtaacaccgacttggtcggagcctctgttccggtatttgatgagattgttctttctctaagaaatatgaacaaagtcagagattttgatccagttagcgggactttcaagtgtgacgcgggtgtcgttatgcgtgatgcgcatcaatttttacacgaccatgaccatatcttcccattggatctgccttctagaaacaactgtcaagtgggcggtgtagtttcaacaaatgcaggtggtttgaactttttaagatatgggtctctacacggtaatgttttgggtttggaagtggtgctacccaacggtgagattatcagcaatatcaatgccctaaggaaggacaatactggttatgacttgaaacaattattcatcggtgcagagggtactatcggtgtcgttactggtgtatccatagttgcagcagcaaagccaaaagccttgaatgccgtattttttggtattgagaatttcgataccgttcagaaattatttgtcaaggctaaaagtgaattatctgagattttatctgcttttgaattcatggaccgtggctccattgaatgtacgatagaatacttgaaggacttgcctttccctctggagaaccaacacaacttttatgttcttattgaaacgtcagggtccaataagagacacgacgatgagaagctgactgctttcctcaaagataccacagattctaaattaatttcggagggtatgatggctaaggacaaagccgattttgatagactttggacctggagaaaatctgttccaacagcttgtaattcttacggtggtatgtacaagtatgacatgtcacttcaattgaaagatttatattccgtatctgcggctgtgacggagagattaaacgcagccggtttgattggtgatgcaccaaaaccagttgttaaatcatgtggttatggtcatgtcggtgacggaaacatccatttaaatatcgcggtaagagaatttacaaaacagattgaggacttactagaaccatttgtttatgaatatattgcatcaaagaaaggttccatcagtgctgagcatgggatcggtttccataagaaaggtaagttacactacaccagaagtgatattgaaattagatttatgaaggatatcaaaaatcactacgatccaaatggaatcttaaacccatacaagtacatttga

SEQ ID NO: 2848 - DNA, 1491 bp, Artificial Sequence
  Description of Artificial Sequence: Synthetic polynucleotide
atgacggccgcacatcctgttgctcagttaactgccgaggcataccctaaagtcaagagaaacccaaatttcaaagttctcgactctgaagatttggcgtactttcgttctattttgagcaatgatgaaatcttaaactctcaagctccagaagagcttgcttcttttaaccaggactggatgaaaaaatatagaggccagtccaatttaattctcttgccaaactccactgataaagtgtccaagattatgaaatactgtaacgataaaaagttggcagtagtaccacaaggtggtaacaccgacttggtcggagcctctgttccggtatttgatgagattgttctttctttgagaaatatgaacaaagtcagagattttgatccagttagcgggactttcaagtgtgacgcgggtgtcgttatgcgtgatgcgcatcaatttttacacgaccatgaccatatcttcccattggatttaccttctagaaacaactgtcaagtgggcggtgtagtttctacaaatgcaggtggtttgaactttttaagatatgggtctttacacggtaatgttttgggtttggaagtggtgttacccaacggtgagattatcagcaatatcaatgccttaaggaaggacaatactggttatgacttgaaacaattattcatcggtgcagagggtactatcggtgtcgttactggtgtatccatagttgcagcagcaaagccaaaagccttgaatgccgtattttttggtattgagaatttcgataccgttcagaaattatttgtcaaggctaaaagtgaattatctgagattttatctgcttttgaattcatggaccgtggctccattgaatgtacgatagaatacttgaaggacttgcctttccctttagagaaccaacacaacttttatgttcttattgaaacgtctgggtccaataagagacacgacgatgagaagttgactgctttcctcaaagataccacagattctaaattaatttctgagggtatgatggctaaggacaaagccgattttgatagactttggacctggagaaaatctgttccaacagcttgtaattcttacggtggtatgtacaagtatgacatgtctcttcaattgaaagatttatattccgtatctgcggctgtgacggagagattaaacgcagccggtttgattggtgatgcaccaaaaccagttgttaaaagttgtggttatggtcatgtcggtgacggaaacatccatttaaatatcgcggtaagagaatttacaaaacagattgaggacttattggaaccatttgtttatgaatatattgcatccaagaaaggttccatcagtgctgagcatgggatcggtttccataagaaaggtaagttacactacaccagaagtgatattgaaattagatttatgaaggatatcaaaaatcactacgatccaaatggaatcttaaacccatacaagtacatttga

SEQ ID NO: 2849 - DNA, 1509 bp, Saccharomyces cerevisiae
atgacaaaatcagacgaaacaacagctaccagcttgaatgctaaaactctaaagagttttgaatcaactcttccaataccaacttacccaagagaaggtgttaaacaaggtattgttcatctgggagtcggtgcattccaccgttcccatttagctgttttcatgcaccgtctgatgcaggagcaccacttaaaggactggtccatatgtggtgttggtttaatgaaggcagatgcacttatgcgcgatgccatgaaggcccaagattgcctatacacccttgtggagcgtggtatcaaggacactaacgcttatatcgtcggttccattactgcttacatgtacgctcccgatgatccaagagctgttattgaaaagatggccaatccagacacacacattgtttctttgacggtcacagaaaacggttactaccacagtgaagcaacaaactccttaatgacagatgctcccgagattatcaatgatttgaaccacccagaaaagccagatactctgtatgggtacctatatgaagccctgttgttgcgttacaagagaggtcttaccccattcactattatgtcatgtgacaacatgccccaaaatggtgtcacagtaaagaccatgcttgttgcatttgccaagttaaagaaggatgagaaattcgccgcctggattgaagacaaggttacttctcctaacagcatggtggaccgtgtgaccccacgttgtaccgataaagagcgtaaatacgttgctgacacctggggaatcaaagatcaatgtcccgttgtcgcagaacctttcatccaatgggttcttgaagacaacttctccgatggccgtcctccatgggaacttgttggtgttcaggtcgtcaaggatgtcgattcctacgaattgatgaagttgcgtctacttaacggtggacattctgctatgggatatttgggatacttggcaggctacacctatatacatgaggttgtcaacgacccaactatcaacaagtatatccgtgttttgatgcgtgaggaagttatcccattattgcctaaagtgccaggtgttgatttcgaagagtacactgcatcagtgttggaaagattctccaatccagcaattcaggacactgtcgcacgtatttgtttgatgggctctggtaagatgcctaagtatgttttgccatcaatttacgagcagttgcgtaaaccagatggtaagtacaagttgttggcagtatgtgttgctggctggttccgttacctgactggtgtagacatgaatgggaagccattcgaaatcgaggatcctatggcaccaaccttgaaggcagccgcagttaagggcggtaaagatcctcacgaactgcttaacattgaggtgcttttcagtcctgagattcgtgacaacaaagaattcgttgcacaattgacccactccctagaaacagtttacgataaagggccaattgccgctattaaggaaattttagaccaagtgtga

SEQ ID NO: 2850 - DNA, 1509 bp, Artificial Sequence
  Description of Artificial Sequence: Synthetic polynucleotide
atgacaaaaagtgacgaaacaacagctaccagcttgaatgctaaaactttgaagagttttgaatctactcttccaataccaacttacccaagagaaggtgttaaacaaggtattgttcatttaggagtcggtgcattccaccgttcccatttagctgttttcatgcaccgtttaatgcaggagcaccacttaaaggactggtccatatgtggtgttggtttaatgaaggcagatgcacttatgcgcgatgccatgaaggcccaagattgcttatacacccttgtggagcgtggtatcaaggacactaacgcttatatcgtcggttccattactgcttacatgtacgctcccgatgatccaagagctgttattgaaaagatggccaatccagacacacacattgtttctttgacggtcacagaaaacggttactaccacagtgaagcaacaaactccttaatgacagatgctcccgagattatcaatgatttgaaccacccagaaaagccagatactttatatgggtacttatatgaagccttattgttgcgttacaagagaggtcttaccccattcactattatgtcctgtgacaacatgccccaaaatggtgtcacagtaaagaccatgcttgttgcatttgccaagttaaagaaggatgagaaattcgccgcctggattgaagacaaggttacttctcctaacagcatggtggaccgtgtgaccccacgttgtaccgataaagagcgtaaatacgttgctgacacctggggaatcaaagatcaatgtcccgttgtcgcagaacctttcatccaatgggttcttgaagacaacttctccgatggccgtcctccatgggaacttgttggtgttcaggtcgtcaaggatgtcgattcctacgaattgatgaagttgcgtttacttaacggtggacattctgctatgggatatttgggatacttggcaggctacacctatatacatgaggttgtcaacgacccaactatcaacaagtatatccgtgttttgatgcgtgaggaagttatcccattattgcctaaagtgccaggtgttgatttcgaagagtacactgcatctgtgttggaaagattctccaatccagcaattcaggacactgtcgcacgtatttgtttgatgggctctggtaagatgcctaagtatgttttgccatctatttacgagcagttgcgtaaaccagatggtaagtacaagttgttggcagtatgtgttgctggctggttccgttacttgactggtgtagacatgaatgggaagccattcgaaatcgaggatcctatggcaccaaccttgaaggcagccgcagttaagggcggtaaagatcctcacgaattgcttaacattgaggtgcttttcagtcctgagattcgtgacaacaaagaattcgttgcacaattgacccactccttagaaacagtttacgataaagggccaattgccgctattaaggaaattttagaccaagtgtga

SEQ ID NO: 2851 - DNA, 1695 bp, Saccharomyces cerevisiae
atgtctagtgcgcaatcctctattgatagcgatggagatgttcgagatgctgatattcatgtcgcaccacccgtggaaaaagagtggtcagatggatttgatgacaacgaagtcataaacggggataacgttgagccaccaaaaagagggctcataggttatcttgtcatttacttactgtgttatccaatatcctttgggggtttcctgcctggttgggatagtggtatcacagcaggtttcattaacatggacaactttaaaatgaacttcggttcttacaagcatagcactggtgaatattatttgagcaacgtgcgtatgggtcttcttgtggctatgttcagtattggatgtgccataggtggccttatttttgcccgtcttgctgatactttaggtagaaggctggcaattgtgatcgtggtgttggtatatatggttggtgcaattattcagatcagttcaaatcacaaatggtaccagtactttgtcggtaagatcatctacggtcttggtgctggtggctgttcggtgttgtgtccaatgcttttgtctgaaatagcccccacagatttgagaggtggactggtctcattgtaccaactgaacatgacgttcggtattttcttgggttattgtagcgtttatggtacgagaaaatacgataacactgcacaatggagagtcccccttgggctttgctttttatgggctttgattatcatcattggtatgttattggttccagagtccccaagatatctgattgaatgtgagagacacgaagaggcccgtgcttccattgccaaaatcaacaaggtttcaccagaggatccatgggtactcaaacaggctgatgaaatcaacgccggtgtccttgcccaaagggaactaggagaagcttcatggaaagaacttttctctgtaaaaactaaagtccttcaacgtttgatcacaggtattcttgtgcaaacctttttgcaacttactggtgaaaactacttcttcttctacggaactaccatttttaaatcagtcggtcttactgatgggtttgagacgtcgatcgtcctaggtacagtgaacttcttctccactattattgctgttatggtcgtagacaaaattggccgtcgtaaatgtctgttatttggtgcagctgggatgatggcttgtatggtcatatttgcaagtatcggggtgaaatgtctttaccctcatggccaggacggtccttcttcgaaaggtgcaggtaatgccatgattgtgttcacttgtttctatatattctgctttgcaacgacatgggctcctgttgcttatattgtggttgccgagtcgttcccttcgaaggtcaagtctagagccatgtcgatttcaactgcatgcaactggttatggcaatttttgatcggttttttcacaccattcattactgggtctatccacttctattatggttatgtgttcgtaggttgtttggttgctatgtttttgtacgttttcttctttttaccagaaacgattggtctatctttggaggaaatccaattactatacgaagaaggtataaaaccatggaaatctgcatcttgggtcccaccttctaggagaggtatttcttccgaagaaagtaagaccgagaagaaggattggaagaaatttttgaagttctcaaagaattctgattga

SEQ ID NO: 2852 - DNA, 1695 bp, Artificial Sequence
  Description of Artificial Sequence: Synthetic polynucleotide
atgtctagtgcgcaatcctctattgatagcgatggagatgttagagatgctgatattcatgtcgcaccacccgtggaaaaagagtggtctgatggatttgatgacaacgaagtcataaacggggataacgttgagccaccaaaaagagggctcataggttatcttgtcatttacttattatgttatccaatatcctttgggggtttcttacctggttgggatagtggtatcacagcaggtttcattaacatggacaactttaaaatgaacttcggttcttacaagcatagcactggtgaatattatttgagcaacgtgcgtatgggtcttcttgtggctatgttcagtattggatgtgccataggtggccttatttttgcccgtcttgctgatactttaggtagaaggttagcaattgtgatcgtggtgttggtatatatggttggtgcaattattcagatcagtagtaatcacaaatggtaccagtactttgtcggtaagatcatctacggtcttggtgctggtggctgttctgtgttgtgtccaatgcttttgtctgaaatagcccccacagatttgagaggtggattagtctctttgtaccaattgaacatgacgttcggtattttcttgggttattgtagcgtttatggtacgagaaaatacgataacactgcacaatggagagtcccccttgggctttgctttttatgggctttgattatcatcattggtatgttattggttccagagtccccaagatatttgattgaatgtgagagacacgaagaggcccgtgcttccattgccaaaatcaacaaggtttctccagaggatccatgggtactcaaacaggctgatgaaatcaacgccggtgtccttgcccaaagggaattaggagaagcttcttggaaagaacttttctctgtaaaaactaaagtccttcaacgtttgatcacaggtattcttgtgcaaacctttttgcaacttactggtgaaaactacttcttcttctacggaactaccatttttaaatctgtcggtcttactgatgggtttgagacgtccatcgtcttgggtacagtgaacttcttctccactattattgctgttatggtcgtagacaaaattggccgtcgtaaatgtcttttatttggtgcagctgggatgatggcttgtatggtcatatttgcaagtatcggggtgaaatgtctttaccctcatggccaggacggtccttcttctaaaggtgcaggtaatgccatgattgtgttcacttgtttctatatattctgctttgcaacgacatgggctcctgttgcttatattgtggttgccgagagtttcccttctaaggtcaagtctagagccatgtctatttctactgcatgcaactggttatggcaatttttgatcggttttttcacaccattcattactgggtctatccacttctattatggttatgtgttcgtaggttgtttggttgctatgtttttgtacgttttcttctttttaccagaaacgattggtctttctttggaggaaatccaattattgtacgaagaaggtataaaaccatggaaatctgcatcttgggtcccaccttctaggagaggtatttcttccgaagaaagtaagaccgagaagaaggattggaagaaatttttgaagttctccaagaattctgattga

SEQ ID NO: 2853 - DNA, 333 bp, Saccharomyces cerevisiae
atgaaaattttggcactagccgtcgcctttcaaggcttggcattggtatgctgtacggatacaacagacaattataacaattttacgcataatacatcgacattttaccgcatagcggattatgataagagattttggagcgtaaaactaccaccagtgaattggactacttgcggtaatgaagatcatccatggattactatccactacgacgagattgataaactcgttgacgataaactggcaagttgggacaaaggacctgttcccgatcgtgaagaatttaggaactccatccttagacaagcgagatgcgaccgcccacattactag

SEQ ID NO: 2854 - DNA, 333 bp, Artificial Sequence
  Description of Artificial Sequence: Synthetic polynucleotide
atgaaaattttggcattggccgtcgcctttcaaggcttggcattggtatgctgtacggatacaacagacaattataacaattttacgcataatacatctacattttaccgcatagcggattatgataagagattttggagcgtaaaattaccaccagtgaattggactacttgcggtaatgaagatcatccatggattactatccactacgacgagattgataaactcgttgacgataaattggcaagttgggacaaaggacctgttcccgatcgtgaagaatttaggaactccatccttagacaagcgagatgcgaccgcccacattactga

SEQ ID NO: 2855 - DNA, 588 bp, Saccharomyces cerevisiae
atggccttcaccacaattcgatcgttaaccattttttccggttcttcgtttgacatgcctacgttcttcgtgcttgcaaaaggtggagatgggtctggggtctttttcattagtctgcactcatctattttatatgcccgttttccgcttttaaatatcttgtcgcaacactctccagtatactgttcgcgaaggtttccgcctgataacgatttaataaccggattgggaaatatacgatgcggtcaattggtgaaaaaggccttacgcagagtatgcaatgtaccgcctgatcatcagctgatcgcttcagtgcgatcgattggatatgctagagtagcattcgtgttttgtacgtgtacgtctgaatgtcgggataatttgcagagtgtgacaagaacttcaggccatcaaacaacaattagtcaaccatgcacagatatacagtcaacacggaagtgctcgaccatttttgtctctgctgttatgcaaacgggaactataactttcttctggacgttccatttccccatccccttacaacgcatagtaaaccaaaagcagccaccgcctcaatcctacgtttaa

SEQ ID NO: 2856 - DNA, 588 bp, Artificial Sequence
  Description of Artificial Sequence: Synthetic polynucleotide
atggccttcaccacaattcgttccttaaccattttttccggttcttcttttgacatgcctacgttcttcgtgcttgcaaaaggtggagatgggtctggggtctttttcattagtttacactcttctattttatatgcccgttttccgcttttaaatatcttgtctcaacactctccagtatactgttctagaaggtttccgcctgataacgatttaataaccggattgggaaatataagatgcggtcaattggtgaaaaaggccttacgcagagtatgcaatgtaccgcctgatcatcagttaatcgcttctgtgagatctattggatatgctagagtagcattcgtgttttgtacgtgtacgtctgaatgtagagataatttgcagagtgtgacaagaacttctggccatcaaacaacaattagtcaaccatgcacagatatacagagtacaagaaagtgctccaccatttttgtctctgctgttatgcaaacgggaactataactttcttctggacgttccatttccccatccccttacaacgcatagtaaaccaaaagcagccaccgcctcaatcctacgtttga

SEQ ID NO: 2857 - DNA, 486 bp, Saccharomyces cerevisiae
atgtcaaacgaagaaccggaaaaaatggttaacgatcgaattgtggtgaaggccatcgagccaaaagatgaggaagcctggaacaaactgtggaaggagtatcagggtttccaaaaaacggttatgcctccggaagtagccaccactaccttcgcaaggtttatagaccctacggtcaaactatggggtgctctagcctttgacaccgagaccggcgatgcaattggctttgcacactacctgaaccatttgacgtcgtggcatgtcgaagaagttgtctacatgaatgacttatatgtcactgaacgcgcaagagtcaaaggcgtaggtagaaagctcatagaatttgtatacagccgtgccgatgagctcggtacgcctgcagtgtactgggttacagaccattacaatcaccgcgcacagttgctgtacaccaaagtggcttacaagacagataaggttctttacaagagaaacggatactga

SEQ ID NO: 2858 - DNA, 486 bp, Artificial Sequence
  Description of Artificial Sequence: Synthetic polynucleotide
atgtccaacgaagaaccggaaaaaatggttaacgatagaattgtggtgaaggccatcgagccaaaagatgaggaagcctggaacaaattatggaaggagtatcagggtttccaaaaaacggttatgcctccggaagtagccaccactaccttcgcaaggtttatagaccctacggtcaaattatggggtgctttggcctttgacaccgagaccggcgatgcaattggctttgcacactacttgaaccatttgacgagctggcatgtcgaagaagttgtctacatgaatgacttatatgtcactgaacgcgcaagagtcaaaggcgtaggtagaaagctcatagaatttgtatacagccgtgccgatgagctcggtacgcctgcagtgtactgggttacagaccattacaatcaccgcgcacagttgttgtacaccaaagtggcttacaagacagataaggttctttacaagagaaacggatactga

SEQ ID NO: 2859 - DNA, 1887 bp, Saccharomyces cerevisiae
atggaccctggtattgctaatcataccctccccgaggaatttgaagaggttgtcgttcccgagatgctggaaaaggaagtaggagccaaggtcgatgtcaagccaacgctaaccacatcttctccagcaccttcttacattgaattgatagatccaggtgtgcataacatcgagatttacgcagaaatgtacaaccgcccgatctaccgtgtcgcattattcttctcacttttcctcattgcctatgcttacggattagatggtaatatccgttacactttccaggcgtacgcgacttcgtcgtactcccagcactcgctgctatcgaccgtcaactgtattaagacggttattgcggctgtaggccagatcttctttgccagattatcagatatcttcggcagattttccattatgattgtcagtatcattttttatagcatggggaccatcattgagtcgcaagcggtgaatattacaagatttgcagttggtggttgtttttaccaattgggtcttaccggtattattctaattttggaagttattgcttctgacttttccaacttgaactggaggttgttagccttattcattccagctttaccatttatcatcaacacctggattagcgggaacgtaacaagtgccatagatgctaattggaaatggggtattggtatgtgggcttttatactgccgctagcttgtattccgcttggaatttgtatgttgcacatgaggtatttagcaagaaagcatgctaaagatagattgaagcccgagttcgaagcgctaaacaaattgaagtggaagtccttttgtatagacatcgcattttggaaattggatatcattggaatgttattaattactgtatttttcgggtgtgtattggttccattcaccttagcgggtggtttgaaagaggaatggaaaactgcgcatattattgtccctgaagtcattggttgggttgtagtgttaccactgtacatgctatgggaaataaagtactcgagacatccattgacaccttgggacttgattcaagatagaggtatctttttcgctctactcatcgcattctttatcaattttaactggtatatgcaaggtgattacatgtatactgtactagtcgttgcagttcatgaatccataaagtccgctacaagaattacctccttgtattcatttgtttctgttatcgttggtacaatcctcgggttcatactgattaaagttagaaggactaagccttttattatatttggcatttcttgttggatcgtctcatttggtttgctggtccattaccgtggtgactccggtgctcattccggtatcattggctctttgtgtctattaggtttcggtgcaggttcatttacctatgtgactcaagcttccatccaagcatccgctaaaactcatgcaagaatggcggtagtaacctcattataccttgccacttataatattggttctgcatttggtagttctgttagcggagctgtctggactaatatcctacccaaagaaatttcaaaaagaatttccgatccaaccttagctgcacaagcgtacggttctccatttacattcattacaacttatacctggggaacaccagaaagaatagctttagtcatgtcttaccgctatgttcaaaagattttatgtatcataggtttggtattctgctttcctttgttaggttgcgcattcatgttgagaaatcataaactaacagattctattgctcttgaaggcaatgatcatttggaaagtaaaaacacctttgaaattgaggaaaaggaagaaagttttttgaaaaataaattctttacgcactttacaagcagtaaagataggaaagattaa

SEQ ID NO: 2860 - DNA, 1887 bp, Artificial Sequence
  Description of Artificial Sequence: Synthetic polynucleotide
atggaccctggtattgctaatcataccctccccgaggaatttgaagaggttgtcgttcccgagatgttggaaaaggaagtaggagccaaggtcgatgtcaagccaacgttgaccacatcttctccagcaccttcttacattgaattgatagatccaggtgtgcataacatcgagatttacgcagaaatgtacaaccgcccgatctaccgtgtcgcattattcttctctcttttcctcattgcctatgcttacggattagatggtaatatccgttacactttccaggcgtacgcgacttcttcctactcccagcactctttattatctaccgtcaactgtattaagacggttattgcggctgtaggccagatcttctttgccagattaagtgatatcttcggcagattttccattatgattgtcagtatcattttttatagcatggggaccatcattgagtctcaagcggtgaatattacaagatttgcagttggtggttgtttttaccaattgggtcttaccggtattattttaattttggaagttattgcttctgacttttccaacttgaactggaggttgttagccttattcattccagctttaccatttatcatcaacacctggattagcgggaacgtaacaagtgccatagatgctaattggaaatggggtattggtatgtgggcttttatattaccgttagcttgtattccgcttggaatttgtatgttgcacatgaggtatttagcaagaaagcatgctaaagatagattgaagcccgagttcgaagcgttgaacaaattgaagtggaagtccttttgtatagacatcgcattttggaaattggatatcattggaatgttattaattactgtatttttcgggtgtgtattggttccattcaccttagcgggtggtttgaaagaggaatggaaaactgcgcatattattgtccctgaagtcattggttgggttgtagtgttaccattgtacatgttatgggaaataaagtactctagacatccattgacaccttgggacttgattcaagatagaggtatctttttcgctttactcatcgcattctttatcaattttaactggtatatgcaaggtgattacatgtatactgtattagtcgttgcagttcatgaatccataaagtccgctacaagaattacctccttgtattcttttgtttctgttatcgttggtacaatcctcgggttcatattgattaaagttagaaggactaagccttttattatatttggcatttcttgttggatcgtcagttttggtttgttggtccattaccgtggtgactccggtgctcattccggtatcattggctctttgtgtcttttaggtttcggtgcaggttcttttacctatgtgactcaagcttccatccaagcatccgctaaaactcatgcaagaatggcggtagtaaccagtttataccttgccacttataatattggttctgcatttggtagttctgttagcggagctgtctggactaatatcttgcccaaagaaatttccaaaagaatttccgatccaaccttagctgcacaagcgtacggttctccatttacattcattacaacttatacctggggaacaccagaaagaatagctttagtcatgtcttaccgctatgttcaaaagattttatgtatcataggtttggtattctgctttcctttgttaggttgcgcattcatgttgagaaatcataaattaacagattctattgctcttgaaggcaatgatcatttggaaagtaaaaacacctttgaaattgaggaaaaggaagaaagttttttgaaaaataaattctttacgcactttacaagcagtaaagataggaaagattga

SEQ ID NO: 2861 - DNA, 1443 bp, Saccharomyces cerevisiae
atgtctgagttaggtgagtattctaaattagaaaacaaagagcttagaacggagtttgaattgacaaattttccttttccaggcacaactgataacgactccgatgacggaagccaagggcagaactctttgaatatcattactcctgacatggatgatactctggttaatgatgtacttcgagaaaacgataaaaagtctagtatgagaatggcttttatgaatctagcaaactctattcttggtgccggaataattactcagccgttcgcgatcaaaaatgctggtatattaggcgggctattatcatacgtagccctcggatttatagttgattggacgttaagacttattgtcattaacttgactcttgctggcaagagaacataccagggtacggtcgaacatgtaatgggtaaaaaagggaaattgctgattctatttacaaacgggttatttgcatttggtggatgtattggttattgcataattattggggatacgataccccacgtactcagagctatattcagccagaacgatggtaatgtacatttttggctcaggcgaaatgtcataattgtaatggtcactactttcatttcctttccgttatcaatgaagagaaacatagaggcactatcaaaggcatctttcttggccgttataagtatgattataattgtactgacagtggtaattagaggacctatgctgccctatgattggaaaggtcattctctgaagttatctgattttttcatgaaagctactatattcagaagtctctctgtcatttcctttgcgttggtttgtcatcataatactagttttattttcttttccatgaggaatagaagtgtggcaaaatttaccaggttaacgcatatcagtatcattatctcagtaatatgctgtgcactaatgggatattcgggatttgcagttttcaaagaaaaaacaaaaggcaatgttttaaacagtttcccaggaacagacactgctatcaacatagccagactctgtttcggatttaacatgctaaccacattccccatggaaatttttgttttgagagatgttgtcggtaacttgttacatgaatgcaaccttattaaaaattatgacgaacacactcaattatcaggtaaacagcacgtcgttataacttcttcactagtcttcatcaccatgggtatatcattaactacatgtaatttaggagcattatttgaactgattggggccactacggcatcgactatggcttacattttgccgccatacacaaatttgttgttaactagtaagaagaagagttggaaggaaaggcttcctttctatctttgtatatgctttggtttcatgattatgataatcagcagcacccaaactattattgatgcagttaatggttctgatggacagcactgccaaatatag

SEQ ID NO: 2862 - DNA, 1443 bp, Artificial Sequence
  Description of Artificial Sequence: Synthetic polynucleotide
atgtctgagttaggtgagtattctaaattagaaaacaaagagcttagaacggagtttgaattgacaaattttccttttccaggcacaactgataacgactccgatgacggaagccaagggcagaactctttgaatatcattactcctgacatggatgatactttggttaatgatgtacttagagaaaacgataaaaagtctagtatgagaatggcttttatgaatttggcaaactctattcttggtgccggaataattactcagccgttcgcgatcaaaaatgctggtatattaggcgggttattatcttacgtagccctcggatttatagttgattggacgttaagacttattgtcattaacttgactcttgctggcaagagaacataccagggtacggtcgaacatgtaatgggtaaaaaagggaaattgttaattttatttacaaacgggttatttgcatttggtggatgtattggttattgcataattattggggatacgataccccacgtactcagagctatattcagccagaacgatggtaatgtacatttttggctcaggagaaatgtcataattgtaatggtcactactttcatttcctttccgttatctatgaagagaaacatagaggcattatccaaggcatctttcttggccgttataagtatgattataattgtattaacagtggtaattagaggacctatgttgccctatgattggaaaggtcattctttgaagttatctgattttttcatgaaagctactatattcagaagtctctctgtcatttcctttgcgttggtttgtcatcataatactagttttattttcttttccatgaggaatagaagtgtggcaaaatttaccaggttaacgcatatcagtatcattatctctgtaatatgctgtgcattaatgggatattctggatttgcagttttcaaagaaaaaacaaaaggcaatgttttaaacagtttcccaggaacagacactgctatcaacatagccagactctgtttcggatttaacatgttgaccacattccccatggaaatttttgttttgagagatgttgtcggtaacttgttacatgaatgcaaccttattaaaaattatgacgaacacactcaattatctggtaaacagcacgtcgttataacttcttctttggtcttcatcaccatgggtatatctttaactacatgtaatttaggagcattatttgaattgattggggccactacggcatctactatggcttacattttgccgccatacacaaatttgttgttaactagtaagaagaagagttggaaggaaaggcttcctttctatctttgtatatgctttggtttcatgattatgataatcagcagcacccaaactattattgatgcagttaatggttctgatggacagcactgccaaatatga

SEQ ID NO: 2863 - DNA, 1773 bp, Saccharomyces cerevisiae
atgacaaattcaaaagaagacgccgacatagaggagaagcatatgtacaatgagccggtcacaaccctctttcacgacgttgaagcttcacaaacacaccacagacgtgggtcaataccattgaaagatgagaaaagtaaagaattgtatccattgcgctctttcccgacgagagtaaatggcgaggatacgttctctatggaggatggcataggtgatgaagatgaaggagaagtacagaacgctgaagtgaagagagagcttaagcaaagacatattggtatgattgcccttggtggtactattggtacaggtcttttcattggtttatccacacctctgaccaacgccggcccagtgggcgctcttatatcatatttatttatgggttctttggcatattctgtcacgcagtccttgggtgaaatggctacattcatccctgttacatcctctttcacagttttctcacaaagattcctttctccagcatttggtgcggccaatggttacatgtattggttttcttgggcaatcacttttgccctggaacttagtgtagttggccaagtcattcaattttggacgtacaaagttccactggcggcatggattagtattttttgggtaattatcacaataatgaacttgttccctgtcaaatattacggtgaattcgagttctgggtcgcttccatcaaagttttagccattatcgggtttctaatatactgtttttgtatggtttgtggtgctggggttaccggcccagttggattccgttattggagaaacccaggtgcctggggtccaggtataatatctaaggataaaaacgaagggaggttcttaggttgggtttcctctttgattaacgctgccttcacatttcaaggtactgaactagttggtatcactgctggtgaagctgcaaaccccagaaaatccgttccaagagccatcaaaaaagttgttttccgtatcttaaccttctacattggctctctattattcattggacttttagttccatacaatgaccctaaactaacacaatctacttcctacgtttctacttctccctttattattgctattgagaactctggtacaaaggttttgccacatatcttcaacgctgttatcttaacaaccattatttctgccgcaaattcaaatatttacgttggttcccgtattttatttggtctatcaaagaacaagttggctcctaaattcctgtcaaggaccaccaaaggtggtgttccatacattgcagttttcgttactgctgcatttggcgctttggcttacatggagacatctactggtggtgacaaagttttcgaatggctattaaatatcactggtgttgcaggcttttttgcatggttatttatctcaatctcgcacatcagatttatgcaagctttgaaataccgtggcatctctcgtgacgagttaccatttaaagctaaattaatgcccggcttggcttattatgcggccacatttatgacgatcattatcattattcaaggtttcacggcttttgcaccaaaattcaatggtgttagctttgctgccgcctatatctctattttcctgttcttagctgtttggatcttatttcaatgcatattcagatgcagatttatttggaagattggagatgtcgacatcgattccgatagaagagacattgaggcaattgtatgggaagatcatgaaccaaagactttttgggacaaattttggaatgttgtagcatag

SEQ ID NO: 2864 - DNA, 1773 bp, Artificial Sequence
  Description of Artificial Sequence: Synthetic polynucleotide
atgacaaattctaaagaagacgccgacatagaggagaagcatatgtacaatgagccggtcacaaccctctttcacgacgttgaagcttctcaaacacaccacagacgtgggtccataccattgaaagatgagaaaagtaaagaattgtatccattgcgctctttcccgacgagagtaaatggcgaggatacgttctctatggaggatggcataggtgatgaagatgaaggagaagtacagaacgctgaagtgaagagagagcttaagcaaagacatattggtatgattgcccttggtggtactattggtacaggtcttttcattggtttatccacacctttgaccaacgccggcccagtgggcgctcttatatcttatttatttatgggttctttggcatattctgtcacgcagtccttgggtgaaatggctacattcatccctgttacatcctctttcacagttttctctcaaagattcctttctccagcatttggtgcggccaatggttacatgtattggttttcttgggcaatcacttttgccttggaacttagtgtagttggccaagtcattcaattttggacgtacaaagttccattggcggcatggattagtattttttgggtaattatcacaataatgaacttgttccctgtcaaatattacggtgaattcgagttctgggtcgcttccatcaaagttttagccattatcgggtttttaatatactgtttttgtatggtttgtggtgctggggttaccggcccagttggattccgttattggagaaacccaggtgcctggggtccaggtataatatctaaggataaaaacgaagggaggttcttaggttgggtttcctctttgattaacgctgccttcacatttcaaggtactgaattggttggtatcactgctggtgaagctgcaaaccccagaaaatccgttccaagagccatcaaaaaagttgttttccgtatcttaaccttctacattggctctttattattcattggacttttagttccatacaatgaccctaaattaacacaatctacttcctacgtttctacttctccctttattattgctattgagaactctggtacaaaggttttgccacatatcttcaacgctgttatcttaacaaccattatttctgccgcaaatagtaatatttacgttggttcccgtattttatttggtttatccaagaacaagttggctcctaaattcttatctaggaccaccaaaggtggtgttccatacattgcagttttcgttactgctgcatttggcgctttggcttacatggagacatctactggtggtgacaaagttttcgaatggttgttaaatatcactggtgttgcaggcttttttgcatggttatttatctccatcagccacatcagatttatgcaagctttgaaataccgtggcatctctcgtgacgagttaccatttaaagctaaattaatgcccggcttggcttattatgcggccacatttatgacgatcattatcattattcaaggtttcacggcttttgcaccaaaattcaatggtgttagctttgctgccgcctatatctctattttccttttcttagctgtttggatcttatttcaatgcatattcagatgcagatttatttggaagattggagatgtcgacatcgattccgatagaagagacattgaggcaattgtatgggaagatcatgaaccaaagactttttgggacaaattttggaatgttgtagcatga

SEQ ID NO: 2865 - DNA, 1848 bp, Saccharomyces cerevisiae
atgctaagctatttccaagggtttgtgcccatacacacaatattttactccgtgttccatcctacagaaggttctaagattaaatacgagtttccgccaaataatttgaaaaatcatggtattaatttcaacacatttaaaaactacatcataccgaagcctatattatgccacaagttgatcacttttaagtatggtacatataggattgtatgttatcctgtgacaatcaattctccaatatatgctaggaatttttttagttttaattttgtatttgtattcccatatgattgtgagacgtctccctacgaaccagctattactaggctgggcaaaatgttcaaagttcttgaagaacaaaatcaattgctatccaaatcggaaagagatccagttttcttcgatttgaaggtgttggaaaactccacaacaacaccctccactgcaggtccttcatccacgccaaatcctagtagtaacaccacaccaactcatcctacatccgaaaaggatacaaaggatatgagaagcagcagatacagtgaccttatcaaggatttgggccttccgcaatccgcattttccatacaagatttattgatgagaattttccaagacctgaataactattccgaatgcctcataccaattgatgagggaaatgcagtagacataaagatttttccgctgttgagaccaccgacaacttgtgtctcattagaagatgtgcccctgtcgtctgtaaatttgaagaagattattgatgtcaactgggatccaaccatgatgagtatagtcccttacattgatggcttaaacagcattgccaaaatttctaaactaagcaacagtgatcctggcctagtgatagagtgcatacgtcacttaatatactataagtgtgttacattatcagatattttccaattttctaacatatacgctccttcttcattaattaggaattttttgactgatccactaatggctagtgactgtcaatcttatgttacgttcccagaagtgtctaaaatatcgaacttgcccttaaacaaaagtctgggttcaggtgaccaagactcaccatcattttctgtacgaagaaaatccaaatcatctagcataccgtcaaacccggattctagaactacatcttttagttctaccagtagagtttctcaaaactcctccttaaattcctctttttcatcaatttataaagactggaggcaatcacaaacctcctgctcgagttcaaatattcatgtcatcaacaatcgtaaccgattcctaccaacaagatcatgcctatttgacctttataggtcactttcacaaggtcaaacgctgaaaacatggtatgagtcgaaatatatgattttaaaagaaaataacattgatataagaaggttcataacgtttggcctggaaaaacgtatcatttacaggtgctactcttttcctgtaatgataaatgcaggttcacgtgaaccaaaagaaatgacaccaataataacaaaagatttagtgaataatgataagttacttgaaaaaagaaatcacaatcatttgctttcagccacagggtctagaaatacggcacaatccggcaacttgaaaccagaaagaccatcaaaggtttcatttgaaatgcaaagggtaagttcgttggcaacaggcaaaagtactatgccgaaactcagcgacgaagaagaaggtattcttgaagagtctattaggaatgccgaaacatttgataaaatttgcgttttactgagcaagcctaaattagaagtcgaaagctacctaaacgaattaggagaatttaaggtaattaatagctga

SEQ ID NO: 2866 - DNA, 1848 bp, Artificial Sequence
  Description of Artificial Sequence: Synthetic polynucleotide
atgttaagctatttccaagggtttgtgcccatacacacaatattttactccgtgttccatcctacagaaggttctaagattaaatacgagtttccgccaaataatttgaaaaatcatggtattaatttcaacacatttaaaaactacatcataccgaagcctatattatgccacaagttgatcacttttaagtatggtacatataggattgtatgttatcctgtgacaatcaattctccaatatatgctaggaatttttttagttttaattttgtatttgtattcccatatgattgtgagacgtctccctacgaaccagctattactaggttgggcaaaatgttcaaagttcttgaagaacaaaatcaattgttatccaaaagtgaaagagatccagttttcttcgatttgaaggtgttggaaaactccacaacaacaccctccactgcaggtccttcttccacgccaaatcctagtagtaacaccacaccaactcatcctacatccgaaaaggatacaaaggatatgagaagcagcagatacagtgaccttatcaaggatttgggccttccgcaatccgcattttccatacaagatttattgatgagaattttccaagacttgaataactattccgaatgcctcataccaattgatgagggaaatgcagtagacataaagatttttccgttattgagaccaccgacaacttgtgtctctttagaagatgtgcccttatcttctgtaaatttgaagaagattattgatgtcaactgggatccaaccatgatgagtatagtcccttacattgatggcttaaacagcattgccaaaatttctaaattaagcaacagtgatcctggcttggtgatagagtgcatacgtcacttaatatactataagtgtgttacattaagtgatattttccaattttctaacatatacgctccttcttctttaattaggaattttttgactgatccattaatggctagtgactgtcaatcttatgttacgttcccagaagtgtctaaaataagcaacttgcccttaaacaaaagtttgggttctggtgaccaagactctccatctttttctgtaagaagaaaatccaaatcttctagcataccgtctaacccggattctagaactacatcttttagttctaccagtagagtttctcaaaactcctccttaaattcctctttttcttccatttataaagactggaggcaatctcaaacctcctgcagcagtagtaatattcatgtcatcaacaatcgtaacagattcttaccaacaagatcttgcttatttgacctttataggagtctttctcaaggtcaaacgttgaaaacatggtatgagagtaaatatatgattttaaaagaaaataacattgatataagaaggttcataacgtttggccttgaaaaacgtatcatttacaggtgctactcttttcctgtaatgataaatgcaggttctcgtgaaccaaaagaaatgacaccaataataacaaaagatttagtgaataatgataagttacttgaaaaaagaaatcacaatcatttgctttctgccacagggtctagaaatacggcacaatccggcaacttgaaaccagaaagaccatctaaggtttcttttgaaatgcaaagggtaagttctttggcaacaggcaaaagtactatgccgaaactcagcgacgaagaagaaggtattcttgaagagtctattaggaatgccgaaacatttgataaaatttgcgttttattaagcaagcctaaattagaagtcgaaagctacttgaacgaattaggagaatttaaggtaattaatagctga

SEQ ID NO: 2867 - DNA, 3003 bp, Saccharomyces cerevisiae
atgccagcggaaaaccaaaatacgggtcaagatagaagctccaacagcatcagtaaaaatggcaactctcaggttggatgtcacactgttcctaatgaggaactgaacatcactgtagctgtgcgatgcagaggaaggaatgaaagggaaattagtatgaaaagctccgttgtggtaaatgttccagatattacaggttctaaagaaatttccattaacacgacgggagataccggtataactgctcaaatgaatgccaagagatacacagtggacaaagtcttcggtcccggcgcttcccaggatctaatttttgatgaagtggcgggcccattattccaggatttcattaaaggttacaattgcaccgtactggtatatggtatgacgtcaacaggtaaaacatatacaatgacgggcgacgaaaagttatataatggtgaattgagcgatgcagcaggaattataccgagggttcttttgaagttgtttgacacattggaactacaacagaacgattacgtagtaaaatgttcgttcattgaactctacaacgaagaattgaaggacctcttggacagcaatagcaacggctctagtaatactggctttgacggccaatttatgaaaaaattgaggatttttgattcaagcacagcaaataataccactagcaacagtgctagtagttccaggagtaattctaggaacagttctccgaggtcattaaatgatctaacacctaaagctgctctattaagaaaaaggttaaggacaaaatcactgccgaataccatcaagcaacagtatcaacaacaacaggcagtgaattccaggaacaactcttcctctaactctggctctaccactaataatgcttctagtaacaccaacacaaataacggtcaaagaagttcgatggctccaaatgaccaaactaatggtatatacatccagaatttgcaagaatttcacataacaaatgctatggaggggctaaacctattacaaaaaggcttaaagcataggcaagtagcgtccactaaaatgaacgatttttccagtagatctcataccatttttacaatcactttgtataagaagcatcaggatgaactatttagaatttccaaaatgaatcttgtggatttagctggttcagaaaacatcaacagatccggagcattaaatcaacgtgccaaagaagctggttcaatcaaccaaagtctattgacgctgggcagggtcataaacgcactcgtagataaaagcggccatatacctttccgtgaatcgaaattgacccgcctgcttcaagattccctgggtggtaatacgaaaaccgcactaattgctactatatcgcctgcaaaggtaacttctgaagaaacctgcagtacattagagtatgcttcgaaggctaaaaacattaagaacaagccgcaactgggttcatttataatgaaggatattttggttaaaaatataactatggaattagcaaagattaaatccgatttactctctacaaagtccaaagaaggaatatatatgagccaagatcactacaaaaatttgaacagtgatttagaaagttataaaaatgaagttcaagaatgtaaaagagaaattgaaagtttgacatcgaaaaatgcattgctagtaaaagataaattgaagtcaaaagaaactattcaatctcaaaattgccaaatagaatcattgaaaactaccatagatcatttaagggcacaactagataaacagcataaaactgaaattgaaatatccgattttaataacaaactacagaagttgactgaggtaatgcaaatggccctacatgattacaaaaaaagagaacttgaccttaatcaaaagtttgaaatgcatattactaaagaaattaaaaaattgaaatctacactgtttttacaattaaacactatgcaacaggaaagtattcttcaagagactaatatccaaccaaatcttgatatgatcaaaaatgaagtactgactcttatgagaaccatgcaagaaaaagctgaactaatgtacaaagactgtgtgaagaaaattttaaacgaatctcctaaattcttcaatgttgttattgagaaaatcgacataataagagtagatttccaaaaattttataaaaatatagccgagaatctttctgatattagcgaagaaaataacaacatgaaacagtacttaaaaaaccattttttcaagaataaccatcaagaattactgaatcgtcatgtggattctacttatgaaaatattgagaagagaacaaacgagtttgttgagaactttaaaaaggtcctaaatgaccaccttgacgaaaataaaaaactaataatgcagaatctgacaactgcaaccagcgcggttattgatcaagaaatggatctgtttgaacccaagcgcgttaaatgggaaaattcatttgatctgataaatgattgtgactccatgaataacgaattctataatagcatggcagcgacgctatcgcaaatcaagagtactgttgatacatcatcaaattcgatgaatgagtctatttcagtcatgaaaggacaagtggaagaatcggagaacgctatatcccttttgaagaacaataccaaatttaatgatcaatttgagcagcttattaacaagcataacatgttgaaagataacattaaaaattcgataacatcaacacactctcatataactaatgtggatgatatctataatacgattgaaaacataatgaaaaactatggtaacaaggaaaacgctaccaaagacgaaatgatcgagaacatattgaaggaaataccaaatctaagtaagaaaatgccgttaaggttatcaaacataaatagcaattcagtgcaaagtgtaatatcgcccaaaaagcatgcaattgaagatgaaaacaaatccagtgaaaatgtggacaatgagggctcgagaaaaatgttaaagattgaatag

SEQ ID NO: 2868 - DNA, 3003 bp, Artificial Sequence
  Description of Artificial Sequence: Synthetic polynucleotide
atgccagcggaaaaccaaaatacgggtcaagatagaagctccaacagcatcagtaaaaatggcaactctcaggttggatgtcacactgttcctaatgaggaattgaacatcactgtagctgtgcgctgcagaggaaggaatgaaagggaaattagtatgaaaagctccgttgtggtaaatgttccagatattacaggttctaaagaaatttccattaacacgacgggagataccggtataactgctcaaatgaatgccaagagatacacagtggacaaagtcttcggtcccggcgcttcccaggatttgatttttgatgaagtggcgggcccattattccaggatttcattaaaggttacaattgcaccgtattggtatatggtatgacgagtacaggtaaaacatatacaatgacgggcgacgaaaagttatataatggtgaattgagcgatgcagcaggaattataccgagggttcttttgaagttgtttgacacattggaattacaacagaacgattacgtagtaaaatgttctttcattgaactctacaacgaagaattgaaggacctcttggacagcaatagcaacggctctagtaatactggctttgacggccaatttatgaaaaaattgaggatttttgattctagcacagcaaataataccactagcaacagtgctagtagttccaggagtaattctaggaacagttctccgaggtctttaaatgatttaacacctaaagctgctttattaagaaaaaggttaaggacaaaatctttaccgaataccatcaagcaacagtatcaacaacaacaggcagtgaattccaggaacaactcttcctctaactctggctctaccactaataatgcttctagtaacaccaacacaaataacggtcaaagaagttctatggctccaaatgaccaaactaatggtatatacatccagaatttgcaagaatttcacataacaaatgctatggaggggttgaacttattacaaaaaggcttaaagcataggcaagtagcgtccactaaaatgaacgatttttccagtagatctcataccatttttacaatcactttgtataagaagcatcaggatgaattatttagaatttccaaaatgaatcttgtggatttagctggttctgaaaacatcaacagatccggagcattaaatcaacgtgccaaagaagctggttctatcaaccaaagtttattgacgttgggcagggtcataaacgcactcgtagataaaagcggccatatacctttccgtgaaagtaaattgacccgcttacttcaagattccttgggtggtaatacgaaaaccgcattgattgctactatatctcctgcaaaggtaacttctgaagaaacctgcagtacattagagtatgcttccaaggctaaaaacattaagaacaagccgcaattgggttcttttataatgaaggatattttggttaaaaatataactatggaattagcaaagattaaatccgatttactctctacaaagtccaaagaaggaatatatatgagccaagatcactacaaaaatttgaacagtgatttagaaagttataaaaatgaagttcaagaatgtaaaagagaaattgaaagtttgacaagtaaaaatgcattgttagtaaaagataaattgaagagtaaagaaactattcaatctcaaaattgccaaatagaatctttgaaaactaccatagatcatttaagggcacaattggataaacagcataaaactgaaattgaaatatccgattttaataacaaattacagaagttgactgaggtaatgcaaatggccttgcatgattacaaaaaaagagaacttgaccttaatcaaaagtttgaaatgcatattactaaagaaattaaaaaattgaaatctacattatttttacaattaaacactatgcaacaggaaagtattcttcaagagactaatatccaaccaaatcttgatatgatcaaaaatgaagtattgactcttatgagaaccatgcaagaaaaagctgaattgatgtacaaagactgtgtgaagaaaattttaaacgaatctcctaaattcttcaatgttgttattgagaaaatcgacataataagagtagatttccaaaaattttataaaaatatagccgagaatctttctgatattagcgaagaaaataacaacatgaaacagtacttaaaaaaccattttttcaagaataaccatcaagaattattgaatcgtcatgtggattctacttatgaaaatattgagaagagaacaaacgagtttgttgagaactttaaaaaggtcttgaatgaccaccttgacgaaaataaaaaattgataatgcagaatttgacaactgcaaccagcgcggttattgatcaagaaatggatttatttgaacccaagcgcgttaaatgggaaaattcttttgatttgataaatgattgtgactccatgaataacgaattctataatagcatggcagcgacgttatctcaaatcaagagtactgttgatacatcttccaattctatgaatgagtctatttctgtcatgaaaggacaagtggaagaaagtgagaacgctatatcccttttgaagaacaataccaaatttaatgatcaatttgagcagcttattaacaagcataacatgttgaaagataacattaaaaattctataacatctacacactctcatataactaatgtggatgatatctataatacgattgaaaacataatgaaaaactatggtaacaaggaaaacgctaccaaagacgaaatgatcgagaacatattgaaggaaataccaaatttgagtaagaaaatgccgttaaggttatctaacataaatagcaattctgtgcaaagtgtaatatctcccaaaaagcatgcaattgaagatgaaaacaaatccagtgaaaatgtggacaatgagggctccagaaaaatgttaaagattgaatga

SEQ ID NO: 2869 - DNA, 1908 bp, Saccharomyces cerevisiae
atgaagttagaaaatactctatttacactcggtgccctagggagcatctctgctgctttggtcatcccaaatcttgaaaatgccgccgaccaccacgaactgattaacaaggaagatcaccacgagagacccagaaaagtggaattcactaaggacgatgatgaggagccatctgactctgaagataaagaacatggaaagttccataagaagggccgcaagggccaagacaaggagtctccggaattcaacggtaaacgtgcaagtggctctcatgggagcgcccacgagggaggaaagggcatgaagcctaagcatgaaagttccaatgatgatgataatgatgataagaagaagaagcctcaccataagggtggctgccacgaaaataaggtggaggagaagaagatgaaaggtaagaaagtcaagggcaagaagcaccacgaaaagacgttggagaaagggaggcaccacaacaggctggctcctctcgtgtccactgcacaattcaacccagacgcgatctccaagatcatccccaaccgctacattatagtcttcaagagaggtgcccctcaagaagagatcgatttccacaaggaaaacgtccagcaggcacaacttcaatccgtagagaacttatctgccgaagacgctttcttcatttctactaaagacacctccttgtccacctctgaggctggcggtatccaggactcattcaacatcgataatcttttctccggttacatcggttacttcacccaagagattgtcgacttgatacgtcaaaacccattagtagactttgttgagagagactctattgtcgaggctacagaatttgacactcaaaatagcgccccatgggggttggcccgtatttcccacagagagcgcctcaacctggggtccttcaacaagtatctctacgatgatgatgccggtcgcggtgtcacgtcctatgttattgacacgggtgtcaacatcaaccacaaggacttcgaaaagagagccatttgggggaaaaccatcccacttaacgacgaagatctcgacggtaacggccacggtacccactgtgccggtactatcgcttccaaacactacggtgtcgctaaaaatgccaacgttgttgcggtgaaagtcttgagatcaaacgggtctggtaccatgtctgatgtcgtcaaaggtgtcgaatatgccgcaaaggcgcaccaaaaagaagcccaagaaaagaaaaaggggttcaaaggttccacagccaatatgtcgcttggtggtggcaagtccccagctttggacttggctgttaatgcagccgttgaagtcggtattcactttgccgtggctgctggtaacgaaaaccaagacgcttgtaatacctccccagcttctgctgacaaggccatcaccgtcggagcttccacgttgagcgatgacagagcctacttttccaactggggtaagtgtgtcgacgttttcgccccaggtttaaacattttgtccacctacattggaagtgatgacgccaccgccactttatcgggtacctcaatggcttcccctcacgttgctggtttgttgacctactttttgtctttgcaaccaggttctgatagtgaatttttcgaattgggccaggattctttgactcctcagcaattgaaaaagaagctaattcattacagtacaaaggacattttgttcgatatccctgaagacactccaaatgttttaatctacaacggtggtggtcaagatttgtccgctttctggaatgataccaaaaagtcccattcatctggtttcaagcaagaattgaacatggatgaattcattggatcaaagaccgatttaatctttgatcaagtgagagatattcttgataaattgaatattatttaa

SEQ ID NO: 2870 - DNA, 1908 bp, Artificial Sequence
  Description of Artificial Sequence: Synthetic polynucleotide
atgaagttagaaaatactttatttacactcggtgccttggggagcatctctgctgctttggtcatcccaaatcttgaaaatgccgccgaccaccacgaattgattaacaaggaagatcaccacgagagacccagaaaagtggaattcactaaggacgatgatgaggagccatctgactctgaagataaagaacatggaaagttccataagaagggccgcaagggccaagacaaggagtctccggaattcaacggtaaacgtgcaagtggctctcatgggagcgcccacgagggaggaaagggcatgaagcctaagcatgaaagttccaatgatgatgataatgatgataagaagaagaagcctcaccataagggtggctgccacgaaaataaggtggaggagaagaagatgaaaggtaagaaagtcaagggcaagaagcaccacgaaaagacgttggagaaagggaggcaccacaacaggttggctcctctcgtgtccactgcacaattcaacccagacgcgatctccaagatcatccccaaccgctacattatagtcttcaagagaggtgcccctcaagaagagatcgatttccacaaggaaaacgtccagcaggcacaacttcaatccgtagagaacttatctgccgaagacgctttcttcatttctactaaagacacctccttgtccacctctgaggctggcggtatccaggactctttcaacatcgataatcttttctccggttacatcggttacttcacccaagagattgtcgacttgatacgtcaaaacccattagtagactttgttgagagagactctattgtcgaggctacagaatttgacactcaaaatagcgccccatgggggttggcccgtatttcccacagagagcgcctcaacttggggtccttcaacaagtatctctacgatgatgatgccggtcgcggtgtcacgtcctatgttattgacacgggtgtcaacatcaaccacaaggacttcgaaaagagagccatttgggggaaaaccatcccacttaacgacgaagatctcgacggtaacggccacggtacccactgtgccggtactatcgcttccaaacactacggtgtcgctaaaaatgccaacgttgttgcggtgaaagtcttgagatctaacgggtctggtaccatgtctgatgtcgtcaaaggtgtcgaatatgccgcaaaggcgcaccaaaaagaagcccaagaaaagaaaaaggggttcaaaggttccacagccaatatgtctcttggtggtggcaagtccccagctttggacttggctgttaatgcagccgttgaagtcggtattcactttgccgtggctgctggtaacgaaaaccaagacgcttgtaatacctccccagcttctgctgacaaggccatcaccgtcggagcttccacgttgagcgatgacagagcctacttttccaactggggtaagtgtgtcgacgttttcgccccaggtttaaacattttgtccacctacattggaagtgatgacgccaccgccactttatctggtacctccatggcttcccctcacgttgctggtttgttgacctactttttgtctttgcaaccaggttctgatagtgaatttttcgaattgggccaggattctttgactcctcagcaattgaaaaagaagttgattcattacagtacaaaggacattttgttcgatatccctgaagacactccaaatgttttaatctacaacggtggtggtcaagatttgtccgctttctggaatgataccaaaaagtcccattcttctggtttcaagcaagaattgaacatggatgaattcattggatccaagaccgatttaatctttgatcaagtgagagatattcttgataaattgaatattatttga

SEQ ID NO: 2871 - DNA, 225 bp, Saccharomyces cerevisiae
atggcgcctccaaccaccatccgcactagggaccaagcgctcgcaccgttagcaacgcttgactcacaaaccaactgccggctgaaagagcttgtgcaatgggagtgccaattcaaaggagccgaatacgtctgctcgccttttaagaggctttttgaacactgcattgcacccgacaaatcagccactaactacgaggtcacggacacatataccaatagttaa

SEQ ID NO: 2872 - DNA, 225 bp, Artificial Sequence
  Description of Artificial Sequence: Synthetic polynucleotide
atggcgcctccaaccaccatccgcactagggaccaagcgctcgcaccgttagcaacgcttgactctcaaaccaactgcaggttgaaagagcttgtgcaatgggagtgccaattcaaaggagccgaatacgtctgctctccttttaagaggctttttgaacactgcattgcacccgacaaaagtgccactaactacgaggtcacggacacatataccaatagttga

SEQ ID NO: 2873 - DNA, 309 bp, Saccharomyces cerevisiae
atgagtctttctttccttctcttttccccttttctccccccctgtttctcgtccatctctatctgtctatctgtcttatctactgttagtttttttttcgctttcacgataccgcattacgtactgcgctgcggaagtgtggatgagtggcatatacactcttctgcagaggattttcgtacacaacggtgtgtgtgtgctgtgaagctgtctgcttccttacttggctgtttgcttgcttgtgcgtcatggtcacttttgttagaagtgagccgcataaaatggcatgtcggcacagcctacagttaa

SEQ ID NO: 2874 - DNA, 309 bp, Artificial Sequence
  Description of Artificial Sequence: Synthetic polynucleotide
atgagtctttctttccttctcttttccccttttctccccccctgtttctcttccatctctatctgtttgtctgtcttatctactgttagtttttttttcgctttcacgataccgcattacgtattgcgctgcggaagtgtggatgagtggcatatacactcttctgcagaggattttcgtacacaaagatgtgtgtgtgctgtgaagttatctgcttccttacttggctgtttgcttgcttgtgcgtcttggagtcttttgttagaagtgagccgcataaaatggcatgtcggcacagcctacagttga

SEQ ID NO: 2875 - DNA, 1674 bp, Saccharomyces cerevisiae
atgaaggttgattacgagcaattgtgcaaactctacgatgacacgtgccgcacaaagaatgtgcagttcagttacggtacggccggattcagaacgctggccaagaatttggatacggtgatgttcagtactggtatactggcggttctcaggtcgctgaagcttcagggtcagtatgtgggggtgatgatcacggcgtcgcacaacccataccaggacaacggggtcaagatcgtggaaccagacggatcgatgcttttggccacatgggagccatatgccatgcagttggccaatgcggcctcttttgccactaattttgaagaatttcgtgttgagttggccaagctgattgaacacgaaaagattgatttgaatacaaccgtcgtgcctcacatcgtggttgggagagactctagggaaagtagtccatacttgctgcgctgcttgacttcctccatggccagcgtcttccacgcgcaagttttggacctaggctgtgtcactacgcctcaattgcattacattactgatttgtccaacaggcggaaactggaaggagacacagcgccagttgccacagaacaggactactattcgttctttataggagccttcaacgagctcttcgccacgtatcagctggagaagaggctgtctgtcccaaaattgttcatagacacagccaatggtatcggtggtccacagttgaaaaaactactggcctccgaagattgggacgtgccagcggagcaagttgaggtaatcaacgacaggtccgatgttccagaactgttgaattttgaatgcggtgcggattatgtgaagactaaccagagattacccaagggtctttctccatcctcgtttgattcgctatattgctcctttgatggtgacgcagacagggttgtgttctactatgtcgactcaggatcaaaatttcatttgttggatggtgacaaaatttccactttgtttgcaaagttcttgtctaaacaactagaattggcacacctagaacattctttgaagattggtgttgtgcaaactgcctatgcaaacggcagttccaccgcttacataaaaaatacgttgcactgtcccgtgtcttgcactaagacaggtgttaaacacttgcatcatgaagctgccactcagtacgatattggcatttatttcgaagcaaatggacatggtacgattatattcagcgaaaaatttcatcgaactatcaaatctgaattatccaagtccaagttaaatggtgatacgttagctttgagaactttgaagtgtttctctgaattgattaatcagaccgtgggagatgctatttcagacatgcttgctgtccttgctactttggcgattttgaaaatgtcgccaatggattgggatgaagagtatactgatttgcccaacaagctggttaagtgcatcgttcctgataggtcaattttccaaaccacggaccaggaaagaaaattgctcaatccagtggggttgcaagacaagatagatcttgtggtagccaagtatcccatgggaagaagctttgtcagagccagtggtacggaggatgcggtgagggtttatgcggaatgtaaggactcctctaagttaggtcaattttgtgacgaagtggtggagcacgttaaggcatctgcttga

SEQ ID NO: 2876 - DNA, 1674 bp, Artificial Sequence
  Description of Artificial Sequence: Synthetic polynucleotide
atgaaggttgattacgagcaattgtgcaaactctacgatgacacgtgccgcacaaagaatgtgcagttcagttacggtacggccggattcagaacgttggccaagaatttggatacggtgatgttcagtactggtatattggcggttctcaggtccttgaagcttcagggtcagtatgtgggggtgatgatcacggcgtcccacaacccataccaggacaacggggtcaagatcgtggaaccagacggatccatgcttttggccacatgggagccatatgccatgcagttggccaatgcggcctcttttgccactaattttgaagaatttcgtgttgagttggccaagttgattgaacacgaaaagattgatttgaatacaaccgtcgtgcctcacatcgtggttgggagagactctagggaaagtagtccatacttgttacgctgcttgacttcctccatggccagcgtcttccacgcgcaagttttggacttgggctgtgtcactacgcctcaattgcattacattactgatttgtccaacaggagaaaattagaaggagacacagcgccagttgccacagaacaggactactattctttctttataggagccttcaacgagctcttcgccacgtatcagttggagaagaggttatctgtcccaaaattgttcatagacacagccaatggtatcggtggtccacagttgaaaaaattattagcctccgaagattgggacgtgccagcggagcaagttgaggtaatcaacgacaggtccgatgttccagaattattgaattttgaatgcggtgcggattatgtgaagactaaccagagattacccaagggtctttctccatcctcttttgattctttgtattgctcctttgatggtgacgcagacagggttgtgttctactatgtcgactctggatctaaatttcatttgttggatggtgacaaaatttccactttgtttgcaaagttcttgtctaaacaattggaattggcacacttggaacattctttgaagattggtgttgtgcaaactgcctatgcaaacggcagttccaccgcttacataaaaaatacgttgcactgtcccgtgtcttgcactaagacaggtgttaaacacttgcatcatgaagctgccactcagtacgatattggcatttatttcgaagcaaatggacatggtacgattatattcagcgaaaaatttcatagaactatcaaatctgaattatccaagtccaagttaaatggtgatacgttagctttgagaactttgaagtgtttctctgaattgattaatcagaccgtgggagatgctatttctgacatgcttgctgtccttgctactttggcgattttgaaaatgtctccaatggattgggatgaagagtatactgatttgcccaacaagttggttaagtgcatcgttcctgataggtctattttccaaaccacggaccaggaaagaaaattgctcaatccagtggggttgcaagacaagatagatcttgtggtagccaagtatcccatgggaagaagctttgtcagagccagtggtacggaggatgcggtgagggtttatgcggaatgtaaggactcctctaagttaggtcaattttgtgacgaagtggtggagcacgttaaggcatctgcttga

SEQ ID NO: 2877 - DNA, 702 bp, Saccharomyces cerevisiae
atggcaaatgatgggattcagaggaatgacaacagaaagggttttaaaactgtacagttctcggcttattctaaagaaattgacgtcataatgaaaaaaatatcattcttggaaagaaacattacccaacaactagatactcttcctcattttccaaaaaccttaccaccaaatcacaaagattgtgtaagtagaaagcacagggccaggcgaggttggagtagtcagctgaaaaacttgctaggcatttactccaaagaggaaatttttactctggataatttagctgcaacactgcatgatcaagttttaaagttacaagctacactttttcccaatgccatactgaaacaggttcatctcgacaatgccaacatagaaaacaagagaattctgaaggaaattacatataaatacctttccaacgaaaactgtaaagaggagaacaaattcggaacattcatcgtaaagagaattttttttggtgacttatcactcggggtttccgtgttaatcaaccgtattgctttcgaatcggccacatcatccattatggtagtgagaagttcatttattgaaagtgatttcttttatgaagattatttgattttcgattgcagagcgaaacgacgaaaaaaattgaagaggaaaattttgtttatttccactaccatgaatttcaattaccaaaccaaagtctaa

SEQ ID NO: 2878 - DNA, 702 bp, Artificial Sequence
  Description of Artificial Sequence: Synthetic polynucleotide
atggcaaatgatgggattcagaggaatgacaacagaaagggttttaaaactgtacagttcagtgcttattctaaagaaattgacgtcataatgaaaaaaatatctttcttggaaagaaacattacccaacaattggatactcttcctcattttccaaaaaccttaccaccaaatcacaaagattgtgtaagtagaaagcacagggccaggagaggttggagtagtcagttgaaaaacttgttgggcatttactccaaagaggaaatttttactttagataatttagctgcaacattgcatgatcaagttttaaagttacaagctacactttttcccaatgccatattgaaacaggttcatctcgacaatgccaacatagaaaacaagagaattttgaaggaaattacatataaatacctttccaacgaaaactgtaaagaggagaacaaattcggaacattcatcgtaaagagaattttttttggtgacttatctctcggggtttccgtgttaatcaaccgtattgctttcgaaagtgccacatcttccattatggtagtgagaagttcttttattgaaagtgatttcttttatgaagattatttgattttcgattgcagagcgaaaaggagaaaaaaattgaagaggaaaattttgtttatttccactaccatgaatttcaattaccaaaccaaagtctga

SEQ ID NO: 2879 - DNA, 1206 bp, Saccharomyces cerevisiae
atggaaaaccaagagaaaccgctttctgtagacgaggagtacgatttatggaaatccaatgttccattaatgtatgactttgttagcgagacacgtttaacatggccatctttaaccgtccaatggctccctactcctgttcaagaattagatggtggctttattaaacaagaattaatcatcggtacgcacacttctggtgaagaagaaaactatttgaaattcgcagaaattaatctaccaaaggaaattcttagtaatgaagacccacaagaagaagcaggagaggagtatcagtcctctctacctgctcctaggtcaaatataaggattaccgctaaatatgagcacgaagaagaaatcactagagcccgatatatgcctcaagaccctaatattgtcgccacaataaatgggcaaggcacagttttcctctattctcgctcagaaggtcttcagtcaacactaaaatttcataaggataacggttatgctttatcatttagcactttggtcaaagggcgattgctttccggctcagatgatcatacagtcgctctctgggaagtggggagtggcggtgaccctacaaaaccagtacgaacttggaatgatttacattctgatattattaatgataataaatggcacaacttcaataaagatctattcggcactgtttcagaagattctctcttaaaaataaatgacgtcagggcaaacaatactacgatcgatactgtgaaatgcccgcaacctttcaacacattagcatttagtcatcattcctcaaacctccttgcggccgcaggtatggactcgtatgtttatctatatgatctaagaaacatgaaggaaccattacaccatatgtcgggtcatgaagatgcagtgaacaatttggaattttcaacccatgttgacggtgtagttgtatccagcgggtcagacaatagattgatgatgtgggatttgaaacaaattggagcagaacaaacacctgatgacgcggaagacggcgttcctgaattgatcatggtccacgcaggtcacagaagttcagtgaatgattttgatttgaaccctcaaataccttggttggtagcaagtgctgaagaagaaaatattttacaagtttggaagtgttcccatagtctacccatcgtgggaggtccaccaaaggtgaacaaggatataataagctaa

SEQ ID NO: 2880 - DNA, 1206 bp, Artificial Sequence
  Description of Artificial Sequence: Synthetic polynucleotide
atggaaaaccaagagaaaccgctttctgtagacgaggagtacgatttatggaaatccaatgttccattaatgtatgactttgttagcgagacacgtttaacatggccatctttaaccgtccaatggctccctactcctgttcaagaattagatggtggctttattaaacaagaattaatcatcggtacgcacacttctggtgaagaagaaaactatttgaaattcgcagaaattaatttaccaaaggaaattcttagtaatgaagacccacaagaagaagcaggagaggagtatcagtcctctttgcctgctcctaggtctaatataaggattaccgctaaatatgagcacgaagaagaaatcactagagccagatatatgcctcaagaccctaatattgtcgccacaataaatgggcaaggcacagttttcctctattctcgcagtgaaggtcttcagagtacattaaaatttcataaggataacggttatgctttatcttttagcactttggtcaaagggagattgctttccggcagtgatgatcatacagtcgctctctgggaagtggggagtggcggtgaccctacaaaaccagtaagaacttggaatgatttacattctgatattattaatgataataaatggcacaacttcaataaagatcttttcggcactgtttctgaagattctctcttaaaaataaatgacgtcagggcaaacaatactacgatcgatactgtgaaatgcccgcaacctttcaacacattagcatttagtcatcattccagtaacctccttgcggccgcaggtatggactcttatgtttatttgtatgatttgagaaacatgaaggaaccattacaccatatgagtggtcatgaagatgcagtgaacaatttggaattttccacccatgttgacggtgtagttgtatccagcgggagtgacaatagattgatgatgtgggatttgaaacaaattggagcagaacaaacacctgatgacgcggaagacggcgttcctgaattgatcatggtccacgcaggtcacagaagttctgtgaatgattttgatttgaaccctcaaataccttggttggtagcaagtgctgaagaagaaaatattttacaagtttggaagtgttcccatagtttacccatcgtgggaggtccaccaaaggtgaacaaggatataataagctga

SEQ ID NO: 2881 - DNA, 3069 bp, Saccharomyces cerevisiae
atgacagggaaagtcaacagagaccttttttttaaactagcttctgatcttcgagaagagcgtctacatgcagctgtcgcattaataaaggacttatccgcattagatttgcccgacgatgcagaagaatggtcttatgtattgaatcgtttaatcaagggtttgtcgtctgacagaaatagcgcgaggttaggattttctttatgtttgacggaagtaatcaatttagctgttaatatgccaccaggtcaacgaccaaaaggtttagaatcaacgaacgagttcttgagcaccttatcaaccattttgaacgttaatgtcaatgagggaacaaaaaaatccatgaagggcaaagatgagcgtggaattttatttgggaagttatttggcttgaaatctctactaaatgaacctttattctcagaaatatttgttaaagatttggaaaaaggaaacaccgagtttttcattcgattcacggaacagctaattgatctggccctgaagaaaaactggatcaaagaaccatgcttttttacccttttccagactatgaaaatgctgctaccttttatggatgaaagttccgctgaaaaaattcttctgatatatgataaatatgacctgactctgacaaatgagggactgtcaacttatttgttgctgaaatatgaaggtgatgaaagtctaattccctcggtgttggatttgaaaaatccaggttggaaggataacgaccctctggcaagaggaaatctgccccttttaacaaaagtattgagaaactcttctgtaattccggatgccaatggaggtttaaaagagacgaaaaaacaaaaaaacacgaattggaaccctaggctgcattttgtttggagtgttctgctaccgttgtttggtaatggaaaattagagaacactagtcatatttcgaagaaaaggaagaaaaccaacaataaaaaggttcagaattcaattcaatttccagagttttggaaaatggccgtggacgaatcatttttcaatgagaaagcttctagtgaaagaaaatatttaggctttctaataatcgacgcggctttcaaggcagttcctggctcgtacatcgggttttgcttcagccaaaacgttatgagaacattgatcaaccaatcaatagattcacaaagagttttaaataagatttcccagttaactttagactccatagtgaaggcttgtgaagaagattctgcaaacagactagtaccttgtttaaatgcaatgttatttggtcctcacggttccataaactttgataagttaacaaaatctggcaccgtttccaaacttattgcaattaaagaattaccttctactgttcttgcccaattactcgatgtgttttttctacagttacaagataaaaagggagttttatctcataccctttttgctcttgattccatccttcatatagttcgtgcacacaaagtcgaaatcaatgacatggacataatgaagcccgtgttgagacccatcgtatatatggctttcttcaaacatacatcagatgatctgaagttagaacagctacacgaattagccaaggaaagactttattccatcctgggagagttgacaataaacaaagaaatacgttgcaaagatcctgaaataaactcatggcaatatctgacattaaagttaatactggacattgaaaattctcatgtaggagatttaatcaatccactggacgaaaatttagaaaatataaaaaacgaagctatatcttgcttgagtaaagtttgcagatcaagaactgctcaatcttggggtctaagcacgttgttatctatgtgcttagtacaattatatgcaggtgacaccgattctatttctgtgatcgaagaactttgcgaattttccaaacacgagaataactcaatggtaggcatcactgaaatcttactatcacttttagcccaaaagaaggccttactcaggaaattgagtttaataatctggcagcagtttattgaagaagttggtttggaagaattgcaaattttattagatattttaaaagcgagagaaaacaagcaaggttttgcccagctattcgaaggagaagaagaatttgaagaaattaaggaagaaaatgatgccagtgaagacgaatcgaaaactggtagtgaaagtgaaagtgaaagtgagagtgatagcgatgatgctgatgaaaaagatgaagaagacgaggcaaatgaagatattttgaatattgataaagaggccactagcgccttagtgaaggcgttaaatttacccgataacatagttaatgataaaggggaagttgacttagaccaactcgaagggctttctgacgacggtggagacgatgaagatgaggagtctatggatgatgaaaaaatgatggaattagatgatcagttatccgaaattttcaaacgtcgtaaggaagcattatcaagcatatctactggaaaccagaggaaatttgaggtaaaacaatctagggaaaacgttatctcgttcaagcatagagttgtcgacatgttagccgtttacgtcaaatattgtgaaaaattgactcttgctaataaaagtgaacattccaacaatttaggaggctcattaagcaagctcgtttattttattatcccaatgctgaaatgtgtcaatgaaactcttgataggccacttgccgacaaaatttctaaattgttgaagggtaaaatattcaagataaaagtaactgcattcaaagacatgaacaaagacatcgagcttatggatttgttgaaaaaaacacacaagctgatgctgacttctaagccaggtcagcatgctgcagtgttttattcaatgtgctcaaccagctcactgtttttgagtaagttatacgttgaaatcggtggtaacgacaagcttgacgaattgattgacttgtatactgcaactaccaaagagtggatgcaaaaaggaaaatgtggacctaacatttttattgatttcatcaattggctatcttcaaaaaagcaaactgtaatggataaggaataa

SEQ ID NO: 2882 - DNA, 3069 bp, Artificial Sequence
  Description of Artificial Sequence: Synthetic polynucleotide
atgacagggaaagtcaacagagaccttttttttaaattggcttctgatcttagagaagagcgtttgcatgcagctgtcgcattaataaaggacttatccgcattagatttgcccgacgatgcagaagaatggtcttatgtattgaatcgtttaatcaagggtttgtcttctgacagaaatagcgcgaggttaggattttctttatgtttgacggaagtaatcaatttagctgttaatatgccaccaggtcaaagaccaaaaggtttagaaagtacgaacgagttcttgagcaccttatctaccattttgaacgttaatgtcaatgagggaacaaaaaaatccatgaagggcaaagatgagcgtggaattttatttgggaagttatttggcttgaaatctttattgaatgaacctttattctctgaaatatttgttaaagatttggaaaaaggaaacaccgagtttttcattagattcacggaacagttgattgatttggccttgaagaaaaactggatcaaagaaccatgcttttttacccttttccagactatgaaaatgttattgccttttatggatgaaagttccgctgaaaaaattcttttgatatatgataaatatgacttgactttgacaaatgagggattatctacttatttgttgttgaaatatgaaggtgatgaaagtttgattccctctgtgttggatttgaaaaatccaggttggaaggataacgaccctttggcaagaggaaatttgccccttttaacaaaagtattgagaaactcttctgtaattccggatgccaatggaggtttaaaagagacgaaaaaacaaaaaaacacgaattggaaccctaggttacattttgtttggagtgttttgttaccgttgtttggtaatggaaaattagagaacactagtcatatttccaagaaaaggaagaaaaccaacaataaaaaggttcagaattctattcaatttccagagttttggaaaatggccgtggacgaaagttttttcaatgagaaagcttctagtgaaagaaaatatttaggctttttaataatcgacgcggctttcaaggcagttcctggctcttacatcgggttttgcttcagccaaaacgttatgagaacattgatcaaccaaagtatagattctcaaagagttttaaataagatttcccagttaactttagactccatagtgaaggcttgtgaagaagattctgcaaacagattggtaccttgtttaaatgcaatgttatttggtcctcacggttccataaactttgataagttaacaaaatctggcaccgtttccaaacttattgcaattaaagaattaccttctactgttcttgcccaattactcgatgtgttttttttgcagttacaagataaaaagggagttttatctcataccctttttgctcttgattccatccttcatatagttcgtgcacacaaagtcgaaatcaatgacatggacataatgaagcccgtgttgagacccatcgtatatatggctttcttcaaacatacatctgatgatttgaagttagaacagttgcacgaattagccaaggaaagactttattccatcttgggagagttgacaataaacaaagaaatacgttgcaaagatcctgaaataaacagttggcaatatttgacattaaagttaatattggacattgaaaattctcatgtaggagatttaatcaatccattggacgaaaatttagaaaatataaaaaacgaagctatatcttgcttgagtaaagtttgcagatctagaactgctcaatcttggggtttaagcacgttgttatctatgtgcttagtacaattatatgcaggtgacaccgattctatttctgtgatcgaagaactttgcgaattttccaaacacgagaataactccatggtaggcatcactgaaatcttattatctcttttagcccaaaagaaggccttactcaggaaattgagtttaataatctggcagcagtttattgaagaagttggtttggaagaattgcaaattttattagatattttaaaagcgagagaaaacaagcaaggttttgcccagttattcgaaggagaagaagaatttgaagaaattaaggaagaaaatgatgccagtgaagacgaaagtaaaactggtagtgaaagtgaaagtgaaagtgagagtgatagcgatgatgctgatgaaaaagatgaagaagacgaggcaaatgaagatattttgaatattgataaagaggccactagcgccttagtgaaggcgttaaatttacccgataacatagttaatgataaaggggaagttgacttagaccaactcgaagggctttctgacgacggtggagacgatgaagatgaggagtctatggatgatgaaaaaatgatggaattagatgatcagttatccgaaattttcaaacgtcgtaaggaagcattatccagcatatctactggaaaccagaggaaatttgaggtaaaacaatctagggaaaacgttatctctttcaagcatagagttgtcgacatgttagccgtttacgtcaaatattgtgaaaaattgactcttgctaataaaagtgaacattccaacaatttaggaggctctttaagcaagctcgtttattttattatcccaatgttgaaatgtgtcaatgaaactcttgataggccacttgccgacaaaatttctaaattgttgaagggtaaaatattcaagataaaagtaactgcattcaaagacatgaacaaagacatcgagcttatggatttgttgaaaaaaacacacaagttgatgttgacttctaagccaggtcagcatgctgcagtgttttattccatgtgctccaccagcagtttatttttgagtaagttatacgttgaaatcggtggtaacgacaagcttgacgaattgattgacttgtatactgcaactaccaaagagtggatgcaaaaaggaaaatgtggacctaacatttttattgatttcatcaattggttatcttctaaaaagcaaactgtaatggataaggaatga

SEQ ID NO: 2883 - DNA, 498 bp, Saccharomyces cerevisiae
atgcctccaaagtttgatcctaatgaagttaaatacttgtacctaagagccgttggtggtgaagtcggtgcctccgctgctttggctccaaagattggtcctttaggtctatcgccaaagaaggttggtgaagatattgctaaggccaccaaagaattcaagggtatcaaggttaccgtccaattaaagatccaaaacagacaagctgctgcctctgttgtcccatctgcttcctctttggtcattactgctttgaaggaaccaccaagagacagaaagaaggacaaaaacgtcaagcacagtggtaacattcaattggatgaaattattgaaattgccagacaaatgagagacaaatccttcggtagaactttggcttccgttactaaggaaatcttaggtactgctcaatctgtcggctgtcgtgttgacttcaagaatccccatgatatcattgaaggcattaatgctggtgaaatcgaaatcccagaaaattag

SEQ ID NO: 2884 - DNA, 498 bp, Artificial Sequence
  Description of Artificial Sequence: Synthetic polynucleotide
atgcctccaaagtttgatcctaatgaagttaaatacttgtacttgagagccgttggtggtgaagtcggtgcctccgctgctttggctccaaagattggtcctttaggtttatctccaaagaaggttggtgaagatattgctaaggccaccaaagaattcaagggtatcaaggttaccgtccaattaaagatccaaaacagacaagctgctgcctctgttgtcccatctgcttcctctttggtcattactgctttgaaggaaccaccaagagacagaaagaaggacaaaaacgtcaagcacagtggtaacattcaattggatgaaattattgaaattgccagacaaatgagagacaaatccttcggtagaactttggcttccgttactaaggaaatcttaggtactgctcaatctgtcggctgtcgtgttgacttcaagaatccccatgatatcattgaaggcattaatgctggtgaaatcgaaatcccagaaaattga

SEQ ID NO: 2885 - DNA, 2202 bp, Saccharomyces cerevisiae
atggaagtagacagtatattaggttccttgagcataactgatgattttgaccaattggttgacgtcacaagtctgtttgatgaattgtgttcaaaactaaaaccagaggctatcgtgaaagatcccaggtttgatttgttcgagggtacacattctttagaggtcaacaactccaaattagactccagtctgatagaattgacagcagaagaaatagaatttgatgtgaacgtggcctacgatccaccgttggcaagtgtagcagccatagcggatagattacttagatgtgttatctcctggctgaatgactaccagactttacccactactgtattaagctgcaggtatacagaaagcttattatcgtcattagttaagggaacaactgccggttcgtcctggtgtacagggaatattttgtatgataaagtactaggaagttgcatacttggcgtttgttatttaacaaaatttgtgcagaaactcttgagtgctggtattgtttttgaagaggaggatttaaattttaataacatggggtttaatacattcgataatttgccggggcaagatgttgttatcaattctctcaccgagagccttcagatattagaggcatattctgatgatagcttacatttaactatgctgaagcatatactaaaaattatcatttgcttagtccacttagaagaccatctgacagactattccacaaagacaagccacctggatgagctaattgaaaacgctaactcggttaatggcatatttccacaattacagctgtctccaccaaagggtgcgttctcaacatatatacaaaagcacaggtctaatcaattccctcccaggaagattacgaagttaccgacggattacagcggctttattacactggcaaatgatgttaaaacaatactccttgtagataaagccgagtctgcgttggagacctaccagtttgccaaattcttcaacaagttggaacaaaggcatgtcattgcaaggatcttattccccttatttttcattagagacgacagaacagttttgggtaaattttcatatacccaattttatttgctacatgtcaaggagttttcagcacaaactccatctgaatttgaatcctctattggtaatgaacttatccaagaaagctctaatatgcttttagaatggtaccaaaactgctcccaaaacacatgtagatatagacaaggttttaacaggcaacttattctatgggattctcttcaagcccagtttgaaagtgtcaattcacaagtttactgttcgtggacatattttatgaaactatcaagtatgatcgaattctctttaaaggggtttgatttggatatttacaaaccctttgaagcatactctatgttttggtatgtttattatttaagtcaccacttagaaacctttttgaaagatagtcaaaatgatattgaatcaaatattaatgccattcattccatgaacaaaaaacttaaaaaattgaaagctggtgaaaagaaggaccaattgaggctaaagtacaggtttgctatggataatgaaatggaacaattacaagctaccaaacaatttttaaactatcttttgaaggaaattaacattaccaaatctttatgtctaatagaggttttccaatttgcaattttaaagtcatttggtttaattgacaacaagaatagtactccgtcaaaattctctaatgaacggttaatccataatttgagattcaagccatttaattcaattggtgttcctgagttaccagaatatgaagtatttcaacaaactttaaaagattttgtcattgaagaaaaaggagctgcatttgatataaagttagaaagggccactaactttatcgaaactgaagtgcgcaatgtcgttagttctattgatgagataatgcaaggaatcaagggaggcgataataacggcgttctagtaacaggaacaagactggttcaagagctctctctggagtactattgtaaactaaaacatacttctaaagcattatcagtcaactcaaaagttatcgtcaacactttgaaaaagaacattaaaaacaaggactcccacgaatacaaggttgaattagttcatacaacagaaggatggaactatttccccatacaaacattgagaataaagcaagaccgctataaataa

SEQ ID NO: 2886 - DNA, 2202 bp, Artificial Sequence
  Description of Artificial Sequence: Synthetic polynucleotide
atggaagtagacagtatattaggttccttgagcataactgatgattttgaccaattggttgacgtcacaagtttatttgatgaattgtgttctaaattgaaaccagaggctatcgtgaaagatcccaggtttgatttgttcgagggtacacattctttagaggtcaacaactccaaattagactccagtttgatagaattgacagcagaagaaatagaatttgatgtgaacgtggcctacgatccaccgttggcaagtgtagcagccatagcggatagattacttagatgtgttatctcctggttaaatgactaccagactttacccactactgtattaagctgcaggtatacagaaagcttattatcttctttagttaagggaacaactgccggttcttcctggtgtacagggaatattttgtatgataaagtattgggaagttgcatacttggcgtttgttatttaacaaaatttgtgcagaaactcttgagtgctggtattgtttttgaagaggaggatttaaattttaataacatggggtttaatacattcgataatttgccggggcaagatgttgttatcaattctctcaccgagagccttcagatattagaggcatattctgatgatagcttacatttaactatgttgaagcatatattgaaaattatcatttgcttagtccacttagaagaccatttaacagactattccacaaagacaagccacttggatgagttgattgaaaacgctaactctgttaatggcatatttccacaattacagctttctccaccaaagggtgcgttcagtacatatatacaaaagcacaggtctaatcaattccctcccaggaagattacgaagttaccgacggattacagcggctttattacattagcaaatgatgttaaaacaatactccttgtagataaagccgagtctgcgttggagacctaccagtttgccaaattcttcaacaagttggaacaaaggcatgtcattgcaaggatcttattccccttatttttcattagagacgacagaacagttttgggtaaattttcttatacccaattttatttgttgcatgtcaaggagttttctgcacaaactccatctgaatttgaatcctctattggtaatgaacttatccaagaaagctctaatatgcttttagaatggtaccaaaactgctcccaaaacacatgtagatatagacaaggttttaacaggcaacttattttatgggattctcttcaagcccagtttgaaagtgtcaattctcaagtttactgttcttggacatattttatgaaattatccagtatgatcgaattctctttaaaggggtttgatttggatatttacaaaccctttgaagcatactctatgttttggtatgtttattatttaagtcaccacttagaaacctttttgaaagatagtcaaaatgatattgaaagtaatattaatgccattcattccatgaacaaaaaacttaaaaaattgaaagctggtgaaaagaaggaccaattgaggttaaagtacaggtttgctatggataatgaaatggaacaattacaagctaccaaacaatttttaaactatcttttgaaggaaattaacattaccaaatctttatgtttgatagaggttttccaatttgcaattttaaagagctttggtttaattgacaacaagaatagtactccgtccaaattctctaatgaaagattaatccataatttgagattcaagccatttaattctattggtgttcctgagttaccagaatatgaagtatttcaacaaactttaaaagattttgtcattgaagaaaaaggagctgcatttgatataaagttagaaagggccactaactttatcgaaactgaagtgcgcaatgtcgttagttctattgatgagataatgcaaggaatcaagggaggcgataataacggcgttttggtaacaggaacaagattggttcaagagctctctttggagtactattgtaaattgaaacatacttctaaagcattaagtgtcaactccaaagttatcgtcaacactttgaaaaagaacattaaaaacaaggactcccacgaatacaaggttgaattagttcatacaacagaaggatggaactatttccccatacaaacattgagaataaagcaagaccgctataaatga

SEQ ID NO: 2887 - DNA, 1530 bp, Saccharomyces cerevisiae
atgatcgctttgaagcccaatgctgttcgaaccttccgacaagtgcagcattgcagctttcgcatttgtcggtatcaatctacgaagtcaaataagtgtctgacgcccttgcaagagtacgacagactggtgaagttggggaagctacgggatgatacatatcagcgtggtatcatctcttccttaggggatttgtatgattcactggttaaatatgtacctccggttgtcaagacacccaatgctgtcgaccaagttggcggttggttgaatggtcttaaatccgtatttagccgtggcaaacctaagaacattggggcgtatgtggatgtatccaaaattggtaactcgatacctcgaggagtttacctatatggagatgttggctgcggaaagacaatgttgatggaccttttttatactacaattcccaatcatttaacaaaaaagagaatacattttcaccagtttatgcaatatgttcacaaaaggtcgcatgaaattgttagagagcaaaatttgaaagaactaggtgatgcaaaaggaaaagagatcgatacggttccatttttggccgcagagattgcaaataattcgcatgttctttgttttgacgagtttcaagtcactgacgtggcagatgcaatgatattgagaaggctgatgactgccttactatccgatgattatggtgtcgtacttttcgcaacctcgaatagacatccagatgagttgtatatcaacggtgttcaaagacaatcatttattccttgtattgaactgataaagcatagaactaaggttatcttcttgaattcgccaacagattaccgtaagattccaagacctgtgtcctcagtttactatttcccatccgatacgagcataaaatacgcatcaaaggaatgtaaaacccgtcgagaaactcatattaaggaatggtataactatttcgcacaggcttcccacaccgatgattccactgattcacacacggtgcataagacattttatgattatccattaactatttgggggagagagttcaaagtccctaagtgtaccccacctcgagtcgcgcagtttactttcaagcagttgtgtggtgagcctttggccgcaggagattacttgacgttggcaaaaaattttgaagcctttatagtgaccgatattccatatttgtccatttacgttcgtgatgaagtgagaagatttattacatttttagatgctgtatatgacagtggcgggaaactggccactacgggtgcagcggatttttcttccttgtttgtggaacctgaacagatacttaatgattttgagttacgcccaacaaccaaagaacctgatagcgtcgatactggtatggtagatgagatggttgagaaacacggtttttcgaaagagattgccaagaaatcgcagatgtttgctcttgatgaagaaagatttgcctttgcccgtgccttaagcaggctgtcacagatgagctccaccgattgggttactaagcctacatactaa

SEQ ID NO: 2888 - DNA, 1530 bp, Artificial Sequence
  Description of Artificial Sequence: Synthetic polynucleotide
atgatcgctttgaagcccaatgctgttagaaccttcagacaagtgcagcattgcagctttcgcatttgtagatatcaatctacgaagagcaataagtgtttgacgcccttgcaagagtacgacagattagtgaagttggggaagttgagagatgatacatatcagcgtggtatcatctcttccttaggggatttgtatgattctttggttaaatatgtacctccggttgtcaagacacccaatgctgtcgaccaagttggcggttggttgaatggtcttaaatccgtatttagccgtggcaaacctaagaacattggggcgtatgtggatgtatccaaaattggtaacagcatacctagaggagtttacttatatggagatgttggctgcggaaagacaatgttgatggaccttttttatactacaattcccaatcatttaacaaaaaagagaatacattttcaccagtttatgcaatatgttcacaaaaggagccatgaaattgttagagagcaaaatttgaaagaattgggtgatgcaaaaggaaaagagatcgatacggttccatttttggccgcagagattgcaaataattctcatgttctttgttttgacgagtttcaagtcactgacgtggcagatgcaatgatattgagaaggttgatgactgccttattatccgatgattatggtgtcgtacttttcgcaacctctaatagacatccagatgagttgtatatcaacggtgttcaaagacaaagttttattccttgtattgaattgataaagcatagaactaaggttatcttcttgaattctccaacagattaccgtaagattccaagacctgtgtcctctgtttactatttcccatccgatacgagcataaaatacgcatccaaggaatgtaaaacccgtagagaaactcatattaaggaatggtataactatttcgcacaggcttcccacaccgatgattccactgattctcacacggtgcataagacattttatgattatccattaactatttgggggagagagttcaaagtccctaagtgtaccccacctcgtgtcgcgcagtttactttcaagcagttgtgtggtgagcctttggccgcaggagattacttgacgttggcaaaaaattttgaagcctttatagtgaccgatattccatatttgtccatttacgttcgtgatgaagtgagaagatttattacatttttagatgctgtatatgacagtggcgggaaattggccactacgggtgcagcggatttttcttccttgtttgtggaacctgaacagatacttaatgattttgagttacgcccaacaaccaaagaacctgatagcgtcgatactggtatggtagatgagatggttgagaaacacggtttttccaaagagattgccaagaaatctcagatgtttgctcttgatgaagaaagatttgcctttgcccgtgccttaagcaggttatctcagatgagctccaccgattgggttactaagcctacatactga

SEQ ID NO: 2889 - DNA, 771 bp, Saccharomyces cerevisiae
atgtctggtaatagagagcaagtctttcctacgcgtatgacgctgggtttgatgaagaccaagttaaaaggtgccaaccaaggttattctttactaaagcgtaagtctgaagccctaacaaagagattcagagatattaccaaaagaattgatgatgctaagcaaaagatggggagagttatgcaaactgctgccttttccttggccgaagtttcctatgcaacaggtgaaaacattggctatcaagtgcaagaaagtgtctctactgcaagattcaaagtgagagcacgtcaagaaaacgttagtggtgtgtatttgtctcaatttgagtcctacatcgaccctgaaattaatgatttcagattaactggtttaggtagaggtggtcaacaggttcaacgagccaaggaaatctattcaagagccgttgaaactttagttgaattagcctctttacagactgcatttattattttggatgaagtgattaaagtgacgaacagaagggttaatgctatcgaacacgttattatcccaagaactgaaaacacaattgcttacattaacagtgagttggatgagttggacagagaagaattttatagattgaaaaaggtccaagaaaagaagcaaaatgagactgcaaaattggatgctgagatgaaattgaagagagatagagcagaacaagatgcttcagaagtagctgctgatgaggaacctcaaggtgaaacattggttgctgatcaagaagacgatgttatattctga

SEQ ID NO: 2890 - DNA, 771 bp, Artificial Sequence
  Description of Artificial Sequence: Synthetic polynucleotide
atgtctggtaatagagagcaagtctttcctacgcgtatgacgttaggtttgatgaagaccaagttaaaaggtgccaaccaaggttattctttattgaagcgtaagtctgaagccttaacaaagagattcagagatattaccaaaagaattgatgatgctaagcaaaagatggggagagttatgcaaactgctgccttttccttggccgaagtttcctatgcaacaggtgaaaacattggctatcaagtgcaagaaagtgtctctactgcaagattcaaagtgagagcacgtcaagaaaacgttagtggtgtgtatttgtctcaatttgagtcctacatcgaccctgaaattaatgatttcagattaactggtttaggtagaggtggtcaacaggttcaaagagccaaggaaatctattctagagccgttgaaactttagttgaattagcctctttacagactgcatttattattttggatgaagtgattaaagtgacgaacagaagggttaatgctatcgaacacgttattatcccaagaactgaaaacacaattgcttacattaacagtgagttggatgagttggacagagaagaattttatagattgaaaaaggtccaagaaaagaagcaaaatgagactgcaaaattggatgctgagatgaaattgaagagagatagagcagaacaagatgcttctgaagtagctgctgatgaggaacctcaaggtgaaacattggttgctgatcaagaagacgatgttatattctga

SEQ ID NO: 2891 - DNA, 1182 bp, Saccharomyces cerevisiae
atgttggtgctagggtctcttagatcggcgctgtcgtgcagttccacagcatcgcttattagtaagagaaacccttgttatccatacggtatactctgtcgaactctatctcagagtgttaaattgtggcaagagaatacttcaaaagatgactccagtttgaacattactccacgattactaaagattatacctaacgatactgatatcgtgactcttgagaagcaggatgaattgattaaaagacgtcgtaaactttcgaaagaagtgacccagatgaagaggctaaaacccgtctcacctggtttgagatggtaccgttcccccatttatccatatttgtacaaaggtcgtccggttagagccctaactgttgttcgaaagaagcacggtggtagaaataattcaggaaaaatcactgtccgtcaccaaggtggtggccatagaaatagaacgaggctgatagactttaacagatgggaaggtggtgcacaaacggtgcaaaggattgagtacgatccgggtagatcctctcatatcgccctattgaagcataatactaccggcgaattgtcttatattattgcttgtgatgggttacgcccaggcgatgtggtcgaatccttcagaagaggtattcctcaaactttactgaatgaaatgggcgggaaagtagaccctgctatcttgagtgttaagactacccaaagaggcaactgtctacctatttccatgatccccataggtactattattcacaacgttggcataacacccgttggacctggaaaattttgtcgctctgctggtacatatgccagagtccttgcgaaattacctgaaaaaaagaaagctattgttagattacaaagcggtgaacatcgttatgtgtctttagaggctgtcgctaccattggcgtggtctccaatattgaccatcaaaacagatctcttggtaaagccggcagatcaagatggttagggataagacccactgttagaggtgttgccatgaataaatgtgaccatcctcacggtggtggccgtggtaaatccaagtctaataaattatcaatgtctccatggggacaactggcaaaggggtacaagactagaaggggtaaaaatcaaaatagaatgaaagtaaaagacagaccaagaggcaaagatgcaagattataa

SEQ ID NO: 2892 - DNA, 1182 bp, Artificial Sequence
  Description of Artificial Sequence: Synthetic polynucleotide
atgttggtgttggggtctcttagatctgcgttaagttgcagttccacagcatctcttattagtaagagaaacccttgttatccatacggtatactctgtagaactttatctcagagtgttaaattgtggcaagagaatacttctaaagatgactccagtttgaacattactccaagattattgaagattatacctaacgatactgatatcgtgactcttgagaagcaggatgaattgattaaaagacgtcgtaaactttctaaagaagtgacccagatgaagaggttgaaacccgtctctcctggtttgagatggtaccgttcccccatttatccatatttgtacaaaggtcgtccggttagagccttaactgttgttagaaagaagcacggtggtagaaataattctggaaaaatcactgtccgtcaccaaggtggtggccatagaaatagaacgaggttgatagactttaacagatgggaaggtggtgcacaaacggtgcaaaggattgagtacgatccgggtagatcctctcatatcgccttattgaagcataatactaccggcgaattgtcttatattattgcttgtgatgggttacgcccaggcgatgtggtcgaatccttcagaagaggtattcctcaaactttattgaatgaaatgggcgggaaagtagaccctgctatcttgagtgttaagactacccaaagaggcaactgtttacctatttccatgatccccataggtactattattcacaacgttggcataacacccgttggacctggaaaattttgtcgctctgctggtacatatgccagagtccttgcgaaattacctgaaaaaaagaaagctattgttagattacaaagcggtgaacatcgttatgtgtctttagaggctgtcgctaccattggcgtggtctccaatattgaccatcaaaacagatctcttggtaaagccggcagatctagatggttagggataagacccactgttagaggtgttgccatgaataaatgtgaccatcctcacggtggtggccgtggtaaatccaagtctaataaattatctatgtctccatggggacaattggcaaaggggtacaagactagaaggggtaaaaatcaaaatagaatgaaagtaaaagacagaccaagaggcaaagatgcaagattatga

SEQ ID NO: 2893 - DNA, 363 bp, Saccharomyces cerevisiae
atggtcaaattaacttcaattgccgctggtgttgccgccatcgctgctactgcttccgcaaccaccactctagctcaatctgacgaaagagtcaacttggttgaattgggtgtctacgtatctgatatcagagctcatttggctcaatactactctttccaagctgctcacccaactgaaacctacccaattgaagttgctgaggccgttttcaactacggtgacttcaccaccatgttgactggtattgccccagaccaagtgaccagaatgatcaccggtgttccatggtactccagcagattaaagccagccatttccagtgctctatccaaggacggtatctacactatcgcaaactag

SEQ ID NO: 2894 - DNA, 363 bp, Artificial Sequence
  Description of Artificial Sequence: Synthetic polynucleotide
atggtcaaattaacttctattgccgctggtgttgccgccatcgctgctactgcttccgcaaccaccactttggctcaatctgacgaaagagtcaacttggttgaattgggtgtctacgtatctgatatcagagctcatttggctcaatactactctttccaagctgctcacccaactgaaacctacccaattgaagttgctgaggccgttttcaactacggtgacttcaccaccatgttgactggtattgccccagaccaagtgaccagaatgatcaccggtgttccatggtactccagcagattaaagccagccatttccagtgctttgtccaaggacggtatctacactatcgcaaactga

SEQ ID NO: 2895 - DNA, 459 bp, Saccharomyces cerevisiae
atgagcttgaggccttgcttcgtatcattgatagatgaatctgataaacctatattgatttacgtccctaatgaggcggagaatgagatgaatgatgtactcaaatataacgtgctttctaacatatcgttagattattttgaaagtgctttggttgaatggcattctttagattccaaacctcttctgaagtcaatttttcaattggaaggtgtctctgtatttgctatgttgattaagcagacgggcctgaagattgtcattggatttgaacaaaaaagcctaagtggagctgatgatgaatttgaagcaatcaatcagattttcgaaaccgtaagaaaaatctatatacgtgtcaaatgtaatcctttacttgttagcggtgacgaaaagtccattataaaaagcttggaaagaaaatttgatgagttgtttatttcaactgaagttgaattataa

SEQ ID NO: 2896 - DNA, 459 bp, Artificial Sequence
  Description of Artificial Sequence: Synthetic polynucleotide
atgagcttgaggccttgcttcgtatctttgatagatgaatctgataaacctatattgatttacgtccctaatgaggcggagaatgagatgaatgatgtactcaaatataacgtgctttctaacatatctttagattattttgaaagtgctttggttgaatggcattctttagattccaaacctcttttgaagtctatttttcaattggaaggtgtctctgtatttgctatgttgattaagcagacgggcttgaagattgtcattggatttgaacaaaaaagcttaagtggagctgatgatgaatttgaagcaatcaatcagattttcgaaaccgtaagaaaaatctatatacgtgtcaaatgtaatcctttacttgttagcggtgacgaaaagtccattataaaaagcttggaaagaaaatttgatgagttgtttatttctactgaagttgaattatga

SEQ ID NO: 2897 - DNA, 1413 bp, Saccharomyces cerevisiae
atgtctctctctcccgttgttgttattggaaccggtttggccgggctggctgctgccaatgaattggttaacaagtataacatccctgtaaccatcctcgaaaaggcttcctcgatcggtgggaactctatcaaggcctccagtggtattaacggtgcttgcaccgagactcaacgtcacttccacatcgaggactccccacgcttatttgaagatgacaccatcaagtctgctaaaggtaaaggtgtccaagaattaatggctaagttggccaatgattctcccctggctattgaatggttgaaaaacgaatttgatttgaaattggacctattggctcaattgggtggccactctgtggcaagaactcacagatcgtctgggaagttgcctccaggtttcgaaattgtttctgccttatctaacaatttgaagaaattagctgagactaaaccagagttagttaagattaacttagacagtaaagtcgtagacatccatgaaaaggatggctccatttctgctgtagtgtacgaggacaagaatggcgaaaagcacatggtgagtgctaacgatgtcgttttttgttctggagggtttggcttttctaaggaaatgcttaaagaatacgcacccgaactggtgaacttgccaacaacaaacgggcaacaaacaactggtgatggtcaaaggcttctgcagaagttaggcgctgatctgattgacatggaccaaattcaagttcatccaactgggttcattgatccaaatgaccgtagctcaagctggaaattcttggctgccgaatccttaagaggtcttggtggtatcctattaaaccctattaccggtagaagatttgtcaacgaattgaccacaagagatgtagtcactgcagctattcaaaaggtttgtcctcaagaggataacagagcactattggttatgggcgaaaaaatgtacacagatttgaagaataatttagatttttacatgttcaagaaacttgtacagaaattgacattatctcaagttgtttctgaatataatttaccaatcactgtcgcccaattatgcgaggaattgcaaacatactcttccttcactaccaaggctgatccgttgggacgtaccgttattctcaacgaatttggctctgacgttactccagaaactgtggtttttattggtgaagtaacaccggttgtccatttcaccatgggtggtgctagaatcaatgtcaaggctcaagtcattggcaagaacgacgaaaggctactaaaaggcctgtacgcggccggtgaagtttctggcggtgttcatggcgccaataggttgggtggttcaagtttgttagaatgcgttgtctttgggagaaccgcagctgaatctattgccaatgaccgcaagtaa

SEQ ID NO: 2898 - DNA, 1413 bp, Artificial Sequence
  Description of Artificial Sequence: Synthetic polynucleotide
atgtctctctctcccgttgttgttattggaaccggtttggccgggttggctgctgccaatgaattggttaacaagtataacatccctgtaaccatcctcgaaaaggcttcctctatcggtgggaactctatcaaggcctccagtggtattaacggtgcttgcaccgagactcaacgtcacttccacatcgaggactccccacgcttatttgaagatgacaccatcaagtctgctaaaggtaaaggtgtccaagaattaatggctaagttggccaatgattctcccttggctattgaatggttgaaaaacgaatttgatttgaaattggacttgttggctcaattgggtggccactctgtggcaagaactcacagatcttctgggaagttgcctccaggtttcgaaattgtttctgccttatctaacaatttgaagaaattagctgagactaaaccagagttagttaagattaacttagacagtaaagtcgtagacatccatgaaaaggatggctccatttctgctgtagtgtacgaggacaagaatggcgaaaagcacatggtgagtgctaacgatgtcgttttttgttctggagggtttggcttttctaaggaaatgcttaaagaatacgcacccgaattagtgaacttgccaacaacaaacgggcaacaaacaactggtgatggtcaaaggcttttacagaagttaggcgctgatttgattgacatggaccaaattcaagttcatccaactgggttcattgatccaaatgaccgtagcagcagctggaaattcttggctgccgaatccttaagaggtcttggtggtatcttattaaaccctattaccggtagaagatttgtcaacgaattgaccacaagagatgtagtcactgcagctattcaaaaggtttgtcctcaagaggataacagagcattattggttatgggcgaaaaaatgtacacagatttgaagaataatttagatttttacatgttcaagaaacttgtacagaaattgacattatctcaagttgtttctgaatataatttaccaatcactgtcgcccaattatgcgaggaattgcaaacatactcttccttcactaccaaggctgatccgttgggacgtaccgttattctcaacgaatttggctctgacgttactccagaaactgtggtttttattggtgaagtaacaccggttgtccatttcaccatgggtggtgctagaatcaatgtcaaggctcaagtcattggcaagaacgacgaaaggcttttgaaaggcctttacgcggccggtgaagtttctggcggtgttcatggcgccaataggttgggtggtagtagtttgttagaatgcgttgtctttgggagaaccgcagctgaatctattgccaatgaccgcaagtga

SEQ ID NO: 2899 - DNA, 1164 bp, Saccharomyces cerevisiae
atgactgaattcgaattgcctccaaaatatatcaccgctgctaacgacttgcggtcagacacattcaccactccaactgcagagatgatggaggccgctttagaggcctctatcggtgacgctgtctacggtgaagatgttgacaccgttaggctcgaacagaccgttgcccgcatggctggcaaagaagcaggtttgttctgtgtctctgggactttgtccaaccagattgccatcagaactcacttgatgcaacctccatactctattctatgtgattacagggctcacgtttacactcacgaagccgctggactggcgatcttgtctcaagcgatggtggttcctgtggttccttccaacggtgactacttgaccttggaagacatcaagtcacactacgtcccagacgacggtgatattcacggtgcccccaccagattgatttctctggaaaacactttacacggtattgtttatccattggaagaactggtccgcatcaaagcttggtgtatggaaaatggtctcaaactacattgtgacggtgccagaatctggaatgccgctgcacaatctggcgtgccattaaagcaatatggggaaatcttcgactccatctccatctgtctatccaagtctatgggtgctcctattgggtccgtcttggttgggaaccttaagtttgtcaagaaggccacccatttcagaaaacaacaaggtggtggtattagacaatctggtatgatggctagaatggctcttgtaaacatcaacaacgattggaagtcccaattgctgtactcgcactctttggctcatgaattagccgaatattgtgaggcaaagggcatcccgctagagtctccagcagacaccaactttgtctttattaacctgaaggccgctagaatggacccagatgtccttgttaagaagggtttgaagtacaacgttaagctaatgggtggtagagtctcgttccactatcaagtcaccagagatactttggaaaaagtcaaattggccatctccgaggccttcgactatgctaaagaacatcctttcgactgtaacggacctacccagatttaccgtagtgaatccaccgaggtcgacgttgatggcaacgctatccgcgaaataaaaacctacaaatactga

SEQ ID NO: 2900 - DNA, 1164 bp, Artificial Sequence
  Description of Artificial Sequence: Synthetic polynucleotide
atgactgaattcgaattgcctccaaaatatatcaccgctgctaacgacttgagaagtgacacattcaccactccaactgcagagatgatggaggccgctttagaggcctctatcggtgacgctgtctacggtgaagatgttgacaccgttaggctcgaacagaccgttgcccgcatggctggcaaagaagcaggtttgttctgtgtctctgggactttgtccaaccagattgccatcagaactcacttgatgcaacctccatactctattctttgtgattacagggctcacgtttacactcacgaagccgctggattagcgatcttgtctcaagcgatggtggttcctgtggttccttccaacggtgactacttgaccttggaagacatcaagtctcactacgtcccagacgacggtgatattcacggtgcccccaccagattgatttctttggaaaacactttacacggtattgtttatccattggaagaattggtccgcatcaaagcttggtgtatggaaaatggtctcaaattgcattgtgacggtgccagaatctggaatgccgctgcacaatctggcgtgccattaaagcaatatggggaaatcttcgactccatctccatctgtttatccaagtctatgggtgctcctattgggtccgtcttggttgggaaccttaagtttgtcaagaaggccacccatttcagaaaacaacaaggtggtggtattagacaatctggtatgatggctagaatggctcttgtaaacatcaacaacgattggaagtcccaattgttgtactctcactctttggctcatgaattagccgaatattgtgaggcaaagggcatcccgttagagtctccagcagacaccaactttgtctttattaacttgaaggccgctagaatggacccagatgtccttgttaagaagggtttgaagtacaacgttaagttgatgggtggtagagtctctttccactatcaagtcaccagagatactttggaaaaagtcaaattggccatctccgaggccttcgactatgctaaagaacatcctttcgactgtaacggacctacccagatttaccgtagtgaatccaccgaggtcgacgttgatggcaacgctatccgcgaaataaaaacctacaaatactga

SEQ ID NO: 2901 - DNA, 501 bp, Saccharomyces cerevisiae
atgagcggtagtaggggcaatagcagcaatagtagcgtcagtaataatagtaataataacaataataatgacgggggcgacgagagattgctgtttctaagaagcgtgggcgaacgcaatgaaattggctttccctctagattcaagtcggcgcattacaagaaaccgacaagaagacacaaatcagcgaggcagttgatctcggacgaaaacaagcggatcaacgccttgttgaccaaggctaacaaagctgcagagagttctactgctgctaggcgacttgtgcccaaagcgacgtactttagcgtggaagcgccaccgtctatcaggcctgccaagaagtactgcgatgttactgggttgaagggcttctacaagtcgcctacgaacaacattcggtatcacaacgcagaaatctatcagttaatcgtaaagccgatggcccccggcgtcgatcaggagtacttaaaattgagaggggccaacttcgttctaaaatag

SEQ ID NO: 2902 - DNA, 501 bp, Artificial Sequence
  Description of Artificial Sequence: Synthetic polynucleotide
atgagcggtagtaggggcaatagcagcaatagtagcgtcagtaataatagtaataataacaataataatgacgggggcgacgagagattgttatttttaagaagcgtgggcgaacgcaatgaaattggctttccctctagattcaagtctgcgcattacaagaaaccgacaagaagacacaaatctgcgaggcagttgatcagtgacgaaaacaagagaatcaacgccttgttgaccaaggctaacaaagctgcagagagttctactgctgctaggagacttgtgcccaaagcgacgtactttagcgtggaagcgccaccgtctatcaggcctgccaagaagtactgcgatgttactgggttgaagggcttctacaagtctcctacgaacaacattcgttatcacaacgcagaaatctatcagttaatcgtaaagccgatggcccccggcgtcgatcaggagtacttaaaattgagaggggccaacttcgttttgaaatga

SEQ ID NO: 2903 - DNA, 2871 bp, Saccharomyces cerevisiae
atgccagtctctgtaataaccacggttttagcatgtctgtggctctcttataggctctataagtttctcactattcctgtgtccagcatcgtctccactttgaagatcaaaactccaccggcaacaaaagtgtctatcgacaaaatagccacggattcagtgaccattcattgggagaacgaacctgtaaaagcggaggacaatggcagtgcggatagaaacttcatttcccactatttgttgtatctgaataacacacaattggctatcttcccaaacaacccaaactccctttacacatgctgctccatcacgggtctcgaggcggagacgcagtaccagttagattttataacgattaacaacaagggctttatcaataagctaccctccatttactgtatgacgaaggcgagagaggcgaatgaagcgttaaagactagaaaatggagaagaaacaccatcacatcgtccacagctatgcagcccagaaactccaagtccgaacccgccccgttgccctctcactactcctctgtttccctgtctactttctcatccaatattactaatagcgccaccagcaataatggttcaaatctacccgcttacacatctttgactacgttgaaggatttggattcgttttccatcgatgatctgaaaaagatactgatttgcgcccaggaggacttacacgatgtgttgtcccaacaaacttcgcttttgcaagattttcaagaatcgaagttagaattagaactagaactggataacttgaaaacacattggtcgcacgaaattgacttgcggaaatccttgaaatccaatatcaagtcattggagaattctaaactattgaccgatttgaaaatcgaaaaattgaacaagaaaatcgacaaatccaaggaaaaaatatcgaaaatgcgcaatgatatgcagaaatggtctcaggaagataccgagctgttgtctaaggataccataaaggagaaatatttcaaattgctaaatgaatccaatgcctctgtggccaatatcaacaaagaaattgagtctttacaaaatgaaatttccaagatggaggagtctaacaagagattgaacgcctccaaaaaatcattgattacttccatagtggtgaatgccaatgtggaaaacgataaacctattgctagcggagaattgtcggctgttttgaagaagctcaatgattttactttagaaaaaaatggatttttaagtaatgctggtgaagagtttctatccaaattgaatgcagactcatcattgattaaaatgattaagcaagagctaagcattgatcaagaattggaggccaactggaaattgcagaggtcaaatttgttgaagaaaattagtgctttagaaaaccaatttaatgaaatgagccttaataatcggaatttgaaaacaaaattaatggttcaaccatataagaataacggtgattcgcttgctgccaccaattcgaataattccgcggaaaaaaacagaagttctggatcgattcaattaccattatccaacaacatgtcaagaacggggtccattgatttaatatcgaataataacaaaagtattaacaacagtaatgctgattctgctcctccgttgaggttgcacaatccagtttcgtactctccttcgaatgaacccatacaaccttcaagcagtctattgagtcaattgacacaggacaccgataatcgatcaatgctctccaatcacatctcatcgaacaacgaaaacaagcaacagccttcttcatattcacatgctttacctacaactgctactgctaatgcaacagcaacagcaacagcaactaatggtcactcaaggtcaaatttatggaccaccgcacaattcgctcaaccttcgcatcaacaagtatctacagaattggatcaagcttttgaatacgataatgcaaaccacttaatcagtggtttgcaaaatatgatctacgacgaaacagactatcctgataacataagcaattattccaagggttttactacagacgaacttgacaattactggactaagcagcaaccccaggtgcgcagcacaaatgaaagtcttttctctacgactggaacacctatgtcatcatataaggctaacccagtaatatctccatattctagttctcatttgcgacaaacctccaacgcaaccaatacgaatcctatgcatccacagagtctactcgccgctacattgaatgatccttcattacaaagttttgtacgcagtggttctttctacagtgctccgcaacctgcaaactccttacagaacaatatcaatggcaatgaaaccgagaacattagtccaaggatatcaagtgacttcaatttattggtgccaaacttgagcccacgactctcaaacgatgtgcccattgttccaggcaataacactactttaacaccttcacactcgaacatattaacaatgaaccatcaaccaacggcggataacattacacgaagatctttccatgcctcttcaccacctttcaactccatatggaattcaaatacaaatcaactttctcctccattggaggagcagtatcacctcgatgtgcctgtgggtccaaaggttcccgctaaagaaccaagccctaagccttctcacaagaggaaccaaagtaacagcagcatttcttctgcatggtccaagtttaagcacaagtctgcatcatcacctgctaatgcggacacggatattcaagattcatcaactccatcaactagtccaagcggtagaagaatgtcaaaactgttgtccaagagcggtatgaataatctatttaacccgcacagtcacgactcatga

SEQ ID NO: 2904 - DNA, 2871 bp, Artificial Sequence
  Description of Artificial Sequence: Synthetic polynucleotide
atgccagtctctgtaataaccacggttttagcatgtttatggctctcttataggctctataagtttctcactattcctgtgtccagcatcgtctccactttgaagatcaaaactccaccggcaacaaaagtgtctatcgacaaaatagccacggattctgtgaccattcattgggagaacgaacctgtaaaagcggaggacaatggcagtgcggatagaaacttcatttcccactatttgttgtatttgaataacacacaattggctatcttcccaaacaacccaaactccctttacacatgctgctccatcacgggtctcgaggcggagacgcagtaccagttagattttataacgattaacaacaagggctttatcaataagttgccctccatttactgtatgacgaaggcgagagaggcgaatgaagcgttaaagactagaaaatggagaagaaacaccatcacatcttccacagctatgcagcccagaaactccaagtccgaacccgccccgttgccctctcactactcctctgtttccttatctactttctcttccaatattactaatagcgccaccagcaataatggtagtaatttgcccgcttacacatctttgactacgttgaaggatttggattctttttccatcgatgatttgaaaaagatattgatttgcgcccaggaggacttacacgatgtgttgtcccaacaaacttctcttttgcaagattttcaagaatccaagttagaattagaattggaattagataacttgaaaacacattggtctcacgaaattgacttgagaaaatccttgaaatccaatatcaagtctttggagaattctaaacttttgaccgatttgaaaatcgaaaaattgaacaagaaaatcgacaaatccaaggaaaaaatatccaaaatgcgcaatgatatgcagaaatggtctcaggaagataccgagttattgtctaaggataccataaaggagaaatatttcaaattgttgaatgaatccaatgcctctgtggccaatatcaacaaagaaattgagtctttacaaaatgaaatttccaagatggaggagtctaacaagagattgaacgcctccaaaaaatctttgattacttccatagtggtgaatgccaatgtggaaaacgataaacctattgctagcggagaattgtctgctgttttgaagaagctcaatgattttactttagaaaaaaatggatttttaagtaatgctggtgaagagtttctttccaaattgaatgcagactcttctttgattaaaatgattaagcaagagttgagcattgatcaagaattggaggccaactggaaattgcagaggtctaatttgttgaagaaaattagtgctttagaaaaccaatttaatgaaatgagccttaataatagaaatttgaaaacaaaattaatggttcaaccatataagaataacggtgattctcttgctgccaccaatagtaataattccgcggaaaaaaacagaagttctggatctattcaattaccattatccaacaacatgagtagaacggggtccattgatttaatatccaataataacaaaagtattaacaacagtaatgctgattctgctcctccgttgaggttgcacaatccagtttcttactctccttccaatgaacccatacaaccttccagcagtttattgagtcaattgacacaggacaccgataatagaagtatgctctccaatcacatctcttccaacaacgaaaacaagcaacagccttcttcttattctcatgctttacctacaactgctactgctaatgcaacagcaacagcaacagcaactaatggtcactctaggtctaatttatggaccaccgcacaattcgctcaaccttctcatcaacaagtatctacagaattggatcaagcttttgaatacgataatgcaaaccacttaatcagtggtttgcaaaatatgatctacgacgaaacagactatcctgataacataagcaattattccaagggttttactacagacgaacttgacaattactggactaagcagcaaccccaggtgcgcagcacaaatgaaagtcttttctctacgactggaacacctatgtcttcttataaggctaacccagtaatatctccatattctagttctcatttgagacaaacctccaacgcaaccaatacgaatcctatgcatccacagagtttactcgccgctacattgaatgatccttctttacaaagttttgtacgcagtggttctttctacagtgctccgcaacctgcaaactccttacagaacaatatcaatggcaatgaaaccgagaacattagtccaaggatatctagtgacttcaatttattggtgccaaacttgagcccaaggctctccaacgatgtgcccattgttccaggcaataacactactttaacaccttctcactccaacatattaacaatgaaccatcaaccaacggcggataacattacaagaagatctttccatgcctcttctccacctttcaactccatatggaatagtaatacaaatcaactttctcctccattggaggagcagtatcacctcgatgtgcctgtgggtccaaaggttcccgctaaagaaccaagccctaagccttctcacaagaggaaccaaagtaacagcagcatttcttctgcatggtccaagtttaagcacaagtctgcatcttctcctgctaatgcggacacggatattcaagattcttctactccatctactagtccaagcggtagaagaatgtccaaacttttgtccaagagcggtatgaataatttatttaacccgcacagtcacgacagttga

SEQ ID NO: 2905 - DNA, 1557 bp, Saccharomyces cerevisiae
atggcgcccatctttagaaattaccggttcgctatcggtgcttttgccgttattatgctcattttgttgattaaaacatcttccatcggtccaccttctattgcacgtacagttactcctaatgctagtattcccaaaactccggaggacatctctatcttgcccgtcaatgatgaaccaggttaccttcaagattcgaagactgaacaaaactatcctgagcttgccgatgctgtgaagtcacaaacaagtcaaacatgcagcgaagaacataagtatgttatcatgatcgatgccggctctaccggttcccgagtacatatatacaagtttgacgtctgtacttccccacctacattacttgatgaaaaattcgacatgttagagcctggtttatcttctttcgataccgattccgttggtgccgctaactcccttgacccattactgaaagtagcaatgaactatgtccctattaaggcaagaagttgtactcccgttgcggtgaaagctactgcaggcctaagactcttgggtgatgccaaatcttcaaaaattttgagcgctgtaagggatcatttggagaaggactatcctttcccagttgtcgaaggtgatggtgtttccatcatgggcggtgatgaagaaggtgtcttcgcctggattactacaaactacctattaggtaatatcggtgctaatggccccaagttacctactgctgccgtttttgacttaggcggagggtctacacaaattgtttttgagcctactttcccaataaatgaaaaaatggtcgatggtgagcataaatttgatttgaagtttggtgatgaaaattacaccttgtaccaattttctcatctaggttacggtttgaaggaaggaagaaataaagttaactctgttcttgtggaaaatgcattaaaagacggcaaaatattgaagggtgataacactaagactcatcaattgtcatctccatgcctaccgcctaaagttaatgccacaaatgaaaaggttacattagaatccaaggaaacttataccattgactttatagggccggacgagccaagtggtgcacaatgtagatttctgactgatgaaattttgaataaagatgctcagtgccagtctccaccatgctctttcaatggggttcaccaaccttctttagttcgtacattcaaagaatcgaacgatatctatattttctcttatttctacgacagaacccgtccattgggtatgcccttgtcctttactttgaatgaattgaacgatttggcaagaatagtgtgtaaaggcgaagaaacttggaatagtgtcttcagtggcattgcggggtccctagatgaattggaaagtgactcgcacttctgtttggacttatcttttcaagtgtccttattacatacgggatatgacattccattacaaagagaattgagaactggaaagaaaattgccaataaagaaatcggttggtgtttaggtgcgtcattaccattgttgaaagctgataactggaaatgtaaaattcaatcagcttga

SEQ ID NO: 2906 - DNA, 1557 bp, Artificial Sequence
  Description of Artificial Sequence: Synthetic polynucleotide
atggcgcccatctttagaaattacagattcgctatcggtgcttttgccgttattatgctcattttgttgattaaaacatcttccatcggtccaccttctattgcacgtacagttactcctaatgctagtattcccaaaactccggaggacatctctatcttgcccgtcaatgatgaaccaggttaccttcaagattctaagactgaacaaaactatcctgagcttgccgatgctgtgaagtctcaaacaagtcaaacatgcagcgaagaacataagtatgttatcatgatcgatgccggctctaccggttccagagtacatatatacaagtttgacgtctgtacttccccacctacattacttgatgaaaaattcgacatgttagagcctggtttatcttctttcgataccgattccgttggtgccgctaactcccttgacccattattgaaagtagcaatgaactatgtccctattaaggcaagaagttgtactcccgttgcggtgaaagctactgcaggcttaagactcttgggtgatgccaaatcttctaaaattttgagcgctgtaagggatcatttggagaaggactatcctttcccagttgtcgaaggtgatggtgtttccatcatgggcggtgatgaagaaggtgtcttcgcctggattactacaaactacttattaggtaatatcggtgctaatggccccaagttacctactgctgccgtttttgacttaggcggagggtctacacaaattgtttttgagcctactttcccaataaatgaaaaaatggtcgatggtgagcataaatttgatttgaagtttggtgatgaaaattacaccttgtaccaattttctcatttaggttacggtttgaaggaaggaagaaataaagttaactctgttcttgtggaaaatgcattaaaagacggcaaaatattgaagggtgataacactaagactcatcaattgtcttctccatgcttaccgcctaaagttaatgccacaaatgaaaaggttacattagaatccaaggaaacttataccattgactttatagggccggacgagccaagtggtgcacaatgtagatttttaactgatgaaattttgaataaagatgctcagtgccagtctccaccatgctctttcaatggggttcaccaaccttctttagttcgtacattcaaagaatctaacgatatctatattttctcttatttctacgacagaacccgtccattgggtatgcccttgtcctttactttgaatgaattgaacgatttggcaagaatagtgtgtaaaggcgaagaaacttggaatagtgtcttcagtggcattgcggggtccttggatgaattggaaagtgactctcacttctgtttggacttatcttttcaagtgtccttattacatacgggatatgacattccattacaaagagaattgagaactggaaagaaaattgccaataaagaaatcggttggtgtttaggtgcgtctttaccattgttgaaagctgataactggaaatgtaaaattcaatctgcttga

SEQ ID NO: 2907 - DNA, 1488 bp, Saccharomyces cerevisiae
atgaaaactgatagattactgattaacgcttccccggagacatgtaccaagggagatgctgagatggatactatggatactattgacagaatgacatcagttaaagttttagcggaaggcaaggtattaagcaacttcgaagaaccgggcttaatgaggtgcggttatcatgatgcaaaaaactgggtcagaagattatcgagcgaaacaattgtcggtgaggacacgagtaatttatacccattttatgttgatactgcatacgatgtaaggcgtttgagaaaggatcttataaatgctaaggttgacttgcaggttgaaaacctgataataatctgcaatattaatgatatttccactgtatttctcatgagagaagtggtggaatggatcttacgcaatttccattcaataactgtatatgtacaagatatttttaaaaagtcaactcagtttgctgttggtgacctctgcaaagacagcaattgcagtaaaaacagagtaaagtattggtcaaaagaatttgttaaaaaacacgattcattctttgacttgatgattacactagggggtgatggaactgtcctttttgcttcatctatattcacgaaagatgttccgccgattgttccatttgcccttggatcattaggatttctaacaaattttgaatttcaaaatttcaaagaaacgttgaaacatatcttaacagatgaggttcgtattaatttacgaatgaggttgcaatgcaaactctaccgtagaaataaaccagaaattgatgccgcaactgggagaaaaatatgttacatcgatttcatctccgaacatcacgtattgaacgaagtaaccatagatagaggtccagctccttgtttatccctattagaactctatggaaacgactcactaatgactaaggttcagggagatggattgattgttgccacgcctacgggatccacggcatactcattgagtgcaggaggctctttaatatcgccaagcgtaaatgccatagcggtgacgcctatatgtcctcatactttgagctttaggcctataattttaccagatagcatggaattaaaagttagagtagatatgaactcaagagggacgtcgtgggtgaattttgacggaaaagatagagttgaattgaaacagggtgactatgttgtgataactgcaagcccctattcggtaccgactatcgagtcatctgccagtgaattttttgaaagtatcagtaaaaatcttaattggaatgaccgcgaagagcagaagccatttgcacatattctctcgccaaaaaatcaagaaaaatatagattagactcatcgaaaaatggaaacgacaccataagtaatcccctcgagagttcatgcataagctcagatgcacaagatgaggagaggaaatccgtaacggaaacagaaacagaaatagttgttgaacggactcgtcaggctcattttgcaatctaa

SEQ ID NO: 2908 - DNA, 1488 bp, Artificial Sequence
  Description of Artificial Sequence: Synthetic polynucleotide
atgaaaactgatagattattgattaacgcttccccggagacatgtaccaagggagatgctgagatggatactatggatactattgacagaatgacatctgttaaagttttagcggaaggcaaggtattaagcaacttcgaagaaccgggcttaatgaggtgcggttatcatgatgcaaaaaactgggtcagaagattatccagcgaaacaattgtcggtgaggacacgagtaatttatacccattttatgttgatactgcatacgatgtaaggcgtttgagaaaggatcttataaatgctaaggttgacttgcaggttgaaaacttgataataatctgcaatattaatgatatttccactgtatttctcatgagagaagtggtggaatggatcttacgcaatttccattccataactgtatatgtacaagatatttttaaaaagtctactcagtttgctgttggtgacctctgcaaagacagcaattgcagtaaaaacagagtaaagtattggtccaaagaatttgttaaaaaacacgattctttctttgacttgatgattacattagggggtgatggaactgtcctttttgcttcttctatattcacgaaagatgttccgccgattgttccatttgcccttggatctttaggatttttaacaaattttgaatttcaaaatttcaaagaaacgttgaaacatatcttaacagatgaggttcgtattaatttaagaatgaggttgcaatgcaaactctaccgtagaaataaaccagaaattgatgccgcaactgggagaaaaatatgttacatcgatttcatctccgaacatcacgtattgaacgaagtaaccatagatagaggtccagctccttgtttatccttattagaactctatggaaacgactctttgatgactaaggttcagggagatggattgattgttgccacgcctacgggatccacggcatactctttgagtgcaggaggctctttaatatctccaagcgtaaatgccatagcggtgacgcctatatgtcctcatactttgagctttaggcctataattttaccagatagcatggaattaaaagttagagtagatatgaactctagagggacgagctgggtgaattttgacggaaaagatagagttgaattgaaacagggtgactatgttgtgataactgcaagcccctattctgtaccgactatcgagtcttctgccagtgaattttttgaaagtatcagtaaaaatcttaattggaatgaccgcgaagagcagaagccatttgcacatattctctctccaaaaaatcaagaaaaatatagattagactcctctaaaaatggaaacgacaccataagtaatcccctcgagagttcctgcataagcagtgatgcacaagatgaggagaggaaatccgtaacggaaacagaaacagaaatagttgttgaaagaactcgtcaggctcattttgcaatctga

SEQ ID NO: 2909 - DNA, 1404 bp, Saccharomyces cerevisiae
atggcaatcgttaatagttggctaatttgtttagtcagtattttttccttcgtggtacgtgtagaggccgctacattttgcaatgcaactcaagcatgtcccgaagataaaccatgttgctcacaatatggtgaatgtggtactggtcaatattgtctgaacaactgtgatgtaagatattcgtttagtcatgattcatgtatgcctgtacctatctgcaagagttcatccactaaattcaaagattattcctctaagttggggaatgctaacactttcttaggaaatgttagtgaggctgattggttgtatactggtgacgttttggattatgatgatgaagaaagtttaattttggcgatgcccaagaacagtggtggtaccgttctttcctccacgagggctgtttggtatggtaaggtcagtgctagaataaagacgtcacatcttgctggtgtggtcactgggttcattctgtattccggcgcaggtgatgaacttgattacgaattcgtcggtgctgatctagaaactgctcaaaccaatttctattgggaaagtgttttgaactacacgaattctgccaatatttccactactgatacatttgaaaactaccatacttacgaattagattggcacgaagattatgtaacatggtccatcgatggtgtcgtcggtagaaccttgtacaagaacgaaacttataacgccaccacccaaaaatatcaatacccacaaaccccatccaaggtggatatttccatttggccaggtggtaattctaccaacgctccaggaaccattgcatggtctggtggtgaaattaattgggacgcatccgatatcagcaacccaggatattattatgctattgtcaatgaagttaatatcacatgttatgatccaccaagcgataccaagaagaatggtacttctgcttatgtgtatacttcgtccagtgaatttttggccaaagacattgctattaccgatgatgaggtcatgatggacagtgatgagggatctggcttggacccacataagggagctaccacatcttccacccaaaagagttcttcctcaactgcaacctcttcctccaaaacgtcatccgatcacagcagttcaactaagaagagtagtaagactagttccaccgcttcatcatcatcatcatcatcttcttcttcttcttcttcttcctctactgctactaagaacggagataaagtcgtatcctccgtatcctcttccgtcacttcccaaactcaaacaacatcttctgtaagcggaagcgcctccagcagtacaagctcaatgagcggtaataacgcaggtgccaacgtagcggcaaactggcgtttgactgttttatgtgtcatcctaggttatgtcttatag

SEQ ID NO: 2910 - DNA, 1404 bp, Artificial Sequence
  Description of Artificial Sequence: Synthetic polynucleotide
atggcaatcgttaatagttggttgatttgtttagtcagtattttttccttcgtggtacgtgtagaggccgctacattttgcaatgcaactcaagcatgtcccgaagataaaccatgttgctctcaatatggtgaatgtggtactggtcaatattgtttgaacaactgtgatgtaagatattcttttagtcatgattcttgtatgcctgtacctatctgcaagagttcttccactaaattcaaagattattcctctaagttggggaatgctaacactttcttaggaaatgttagtgaggctgattggttgtatactggtgacgttttggattatgatgatgaagaaagtttaattttggcgatgcccaagaacagtggtggtaccgttctttcctccacgagggctgtttggtatggtaaggtcagtgctagaataaagacgagtcatcttgctggtgtggtcactgggttcattctttattccggcgcaggtgatgaacttgattacgaattcgtcggtgctgatttggaaactgctcaaaccaatttctattgggaaagtgttttgaactacacgaattctgccaatatttccactactgatacatttgaaaactaccatacttacgaattagattggcacgaagattatgtaacatggtccatcgatggtgtcgtcggtagaaccttgtacaagaacgaaacttataacgccaccacccaaaaatatcaatacccacaaaccccatccaaggtggatatttccatttggccaggtggtaattctaccaacgctccaggaaccattgcatggtctggtggtgaaattaattgggacgcatccgatatcagcaacccaggatattattatgctattgtcaatgaagttaatatcacatgttatgatccaccaagcgataccaagaagaatggtacttctgcttatgtgtatacttcttccagtgaatttttggccaaagacattgctattaccgatgatgaggtcatgatggacagtgatgagggatctggcttggacccacataagggagctaccacatcttccacccaaaagagttcttccagcactgcaacctcttcctccaaaacgtcttccgatcacagcagttctactaagaagagtagtaagactagttccaccgcttcttcttcttcttcttcttcttcttcttcttcttcttcttcctctactgctactaagaacggagataaagtcgtatcctccgtatcctcttccgtcacttcccaaactcaaacaacatcttctgtaagcggaagcgcctccagcagtacaagcagtatgagcggtaataacgcaggtgccaacgtagcggcaaactggcgtttgactgttttatgtgtcatcttgggttatgtcttatga

SEQ ID NO: 2911 - DNA, 342 bp, Saccharomyces cerevisiae
atggctaaagaaagtacgggattcaaaccaggctctgcaaaaaagggtgctacattgtttaaaacgaggtgtcagcagtgtcatacaatagaagagggtggtcctaacaaagttggacctaatttacatggtatttttggtagacattcaggtcaggtaaagggttattcttacacagatgcaaacatcaacaagaacgtcaaatgggatgaggatagtatgtccgagtacttgacgaacccaaagaaatatattcctggtaccaagatggcgtttgccgggttgaagaaggaaaaggacagaaacgatttaattacttatatgacaaaggctgccaaatag

SEQ ID NO: 2912 - DNA, 342 bp, Artificial Sequence
  Description of Artificial Sequence: Synthetic polynucleotide
atggctaaagaaagtacgggattcaaaccaggctctgcaaaaaagggtgctacattgtttaaaacgaggtgtcagcagtgtcatacaatagaagagggtggtcctaacaaagttggacctaatttacatggtatttttggtagacattctggtcaggtaaagggttattcttacacagatgcaaacatcaacaagaacgtcaaatgggatgaggatagtatgtccgagtacttgacgaacccaaagaaatatattcctggtaccaagatggcgtttgccgggttgaagaaggaaaaggacagaaacgatttaattacttatatgacaaaggctgccaaatga

SEQ ID NO: 2913 - DNA, 684 bp, Saccharomyces cerevisiae
atgggagacaattactcgacttacttgcttgatattgaagggacagtgtgcccgatctcgttcgtgaaggagactttattcccttatttcacgaataaagtgccgcaattggttcaacaggatacaagggactccccggtttccaacattctgtcgcagtttcacatcgacaataaggagcagttgcaggcgcatattttggagttggtggccaaggatgtgaaggatccaatcttgaaacagttgcaaggctacgtctgggctcacggatacgaatctgggcagattaaggcgcccgtttatgcagatgctattgactttatcaagaggaagaagcgtgtgtttatctactctagtggatctgtaaaggcacagaaattgctgttcgggtatgttcaggatcccaacgcgcctgcgcatgattcgttggatttgaattcttatatagatggttatttcgacatcaacacttctggaaagaaaaccgaaacacagtcttacgccaacatcttgcgggatatcggtgcgaaggctagcgaggtactgttcttgagcgataatccattggaattggacgcagcggccggcgttggaatagctactgggttagcttcccgacctggtaatgcacctgtccccgatgggcaaaagtaccaggtatacaagaattttgaaactctttaa

SEQ ID NO: 2914 - DNA, 684 bp, Artificial Sequence
  Description of Artificial Sequence: Synthetic polynucleotide
atgggagacaattactccacttacttgcttgatattgaagggacagtgtgcccgatctctttcgtgaaggagactttattcccttatttcacgaataaagtgccgcaattggttcaacaggatacaagggactccccggtttccaacattttatctcagtttcacatcgacaataaggagcagttgcaggcgcatattttggagttggtggccaaggatgtgaaggatccaatcttgaaacagttgcaaggctacgtctgggctcacggatacgaatctgggcagattaaggcgcccgtttatgcagatgctattgactttatcaagaggaagaagcgtgtgtttatctactctagtggatctgtaaaggcacagaaattgttattcgggtatgttcaggatcccaacgcgcctgcgcatgattctttggatttgaattcttatatagatggttatttcgacatcaacacttctggaaagaaaaccgaaacacagtcttacgccaacatcttgagagatatcggtgcgaaggctagcgaggtattattcttgagcgataatccattggaattggacgcagcggccggcgttggaatagctactgggttagcttccagacctggtaatgcacctgtccccgatgggcaaaagtaccaggtatacaagaattttgaaactctttga

SEQ ID NO: 2915 - DNA, 1197 bp, Saccharomyces cerevisiae
atggttagcttaacctttaaaaatttcaagaaggaaaaagttcctttagatctggaaccttcaaacacaattttagagaccaagaccaagcttgctcaatccatttcttgtgaagaatctcaaataaaactgatctactcgggtaaagtgctacaagattccaaaaccgtatcggaatgcgggctaaaagatggggaccaagttgtcttcatggtttctcaaaaaaagtccacgaagaccaaagtaacagaacctccaattgctcctgagagcgccactacccccggaagagaaaattctacagaagcatcccccagtacggatgcttctgcagctcctgcagccactgctcccgaaggctcacaaccgcaagaagaacaaaccgccactacagaacgtactgaatctgcctctacaccgggattcgtggtgggaaccgagaggaacgagaccatcgagagaatcatggaaatgggctaccaaagagaggaagtcgaacgagccttgagagcagcctttaataatccagatagagcggtggaatatctactgatgggtattccagaaaatctgcgtcaaccggaaccacagcaacaaacagccgccgcagcggaacaaccatcgacagccgccaccactgcggaacaaccggctgaagacgacttatttgcacaagctgcccaaggcggtaatgcttcatccggtgcgcttggcacaactggaggagctacagatgctgcgcaaggtggacctccaggttccattggcctcactgtagaagatttactatcgttgagacaggtcgtttcaggtaacccagaagctttagccccattgttggaaaacataagtgctagatatcctcaattacgtgaacatatcatggcaaacccagaagtgtttgtgtccatgttgctagaagccgtgggtgacaatatgcaagatgttatggaaggtgcggatgatatggtggaaggagaggatatagaagttacaggagaggctgctgctgcaggactgggacaaggtgaaggtgaaggttctttccaagttgactatacccccgaagacgatcaagctatttcgcgcctctgtgaattgggctttgaaagagatcttgttatccaggtgtattttgcgtgcgataaaaacgaagaagctgcagcaaatattctattcagcgatcatgccgactga

SEQ ID NO: 2916 - DNA, 1197 bp, Artificial Sequence
  Description of Artificial Sequence: Synthetic polynucleotide
atggttagcttaacctttaaaaatttcaagaaggaaaaagttcctttagatttggaaccttccaacacaattttagagaccaagaccaagcttgctcaatccatttcttgtgaagaatctcaaataaaattaatctactctggtaaagtgttgcaagattccaaaaccgtatctgaatgcgggttgaaagatggggaccaagttgtcttcatggtttctcaaaaaaagtccacgaagaccaaagtaacagaacctccaattgctcctgagagcgccactacccccggaagagaaaattctacagaagcatcccccagtacggatgcttctgcagctcctgcagccactgctcccgaaggctctcaaccgcaagaagaacaaaccgccactacagaacgtactgaatctgcctctacaccgggattcgtggtgggaaccgagaggaacgagaccatcgagagaatcatggaaatgggctaccaaagagaggaagtcgaaagagccttgagagcagcctttaataatccagatagagcggtggaatatttattgatgggtattccagaaaatttacgtcaaccggaaccacagcaacaaacagccgccgcagcggaacaaccatctacagccgccaccactgcggaacaaccggctgaagacgacttatttgcacaagctgcccaaggcggtaatgcttcttccggtgcgcttggcacaactggaggagctacagatgctgcgcaaggtggacctccaggttccattggcctcactgtagaagatttattatctttgagacaggtcgtttctggtaacccagaagctttagccccattgttggaaaacataagtgctagatatcctcaattacgtgaacatatcatggcaaacccagaagtgtttgtgtccatgttgttggaagccgtgggtgacaatatgcaagatgttatggaaggtgcggatgatatggtggaaggagaggatatagaagttacaggagaggctgctgctgcaggacttggacaaggtgaaggtgaaggttctttccaagttgactatacccccgaagacgatcaagctatttctcgcctctgtgaattgggctttgaaagagatcttgttatccaggtgtattttgcgtgcgataaaaacgaagaagctgcagcaaatattcttttcagcgatcatgccgactga

SEQ ID NO: 2917 - DNA, 1503 bp, Saccharomyces cerevisiae
atgaagtataataacagaaaactctcgttcaaccctaccacagtaagtatcgctggaacgttgcttacggtgttctttctcacaagactcgtgctttcgttcttctcgatatcgctattccagctggtaactttccaaggaatcttcaagccctatgttccagattttaaaaatactcccagcgtagagttctacgacctacgaaattaccaaggcaacaaagatggttggcaacagggtgaccgcatcttgttttgcgtgccactgagagatgcttctgagcatcttcccatgttttttaaccatctgaataccatgacatatccgcacaacctgattgatctgtcgtttttggtgagtgactcttcggataacaccatgggcgtgttactatccaatctacagatggcgcaatcgcaacaagacaagtccaaaaggtttggtaacatcgaaatctatgagaaggacttcggccaaatcattggtcagtccttttctgatcgtcacgggtttggcgcccagggccccagaagaaagctgatggccagggctcgtaattggcttgggtccgtggccctgaaaccataccactcctgggtttactggagagacgtggatgtcgaaaccatccccactaccatcatggaggatctaatgcatcacgacaaggacgtcattgtccccaacgtctggagacctttaccagactggctgggaaacattcaaccctacgatttaaattcatggaaggaatcagaagggggtcttcaattggcggattccctagacgaagatgctgtcattgtggaagggtacccagagtacgccacttggagacctcacctggcatacatgagagacccaaacggtaatccagaagacgaaatggaattggacggtattggaggggtctcgattctcgcgaaagctaaagtattcagaacaggctcacactttcctgcattctcctttgaaaagcacgcagagacagaagcattcggtaggctctcccgcaggatgaattacaatgtcatcggcttgccccattatgtcatctggcacatctacgaaccttccagcgacgacttaaagcacatggcttggatggctgaagaggagaagcggaaactagaagaagagagaattcgcgaattttacaacaagatctgggagattggatttgaagatgtcagagaccaatggaacgaagaaagagattcaatcttaaaaaacattgactccactttgaacaataaagtcactgtagactggtctgaagagggagatggctcggagctggtggactcaaagggtgactttgtctcaccaaacaaccaacaacaacaacaacagcaacaacaacaacaacagcagcagcagcaacagcaacagcaacaacagctcgacggcaacccgcaggggaaacctcttgatgacaacgacaagaacaagaaaaaacatcctaaagaagttccattagacttcgaccctgatagaaactag

SEQ ID NO: 2918 - DNA, 1503 bp, Artificial Sequence
  Description of Artificial Sequence: Synthetic polynucleotide
atgaagtataataacagaaaactctctttcaaccctaccacagtaagtatcgctggaacgttgcttacggtgttctttctcacaagactcgtgctttctttcttctctatatctttattccagttggtaactttccaaggaatcttcaagccctatgttccagattttaaaaatactcccagcgtagagttctacgaccttagaaattaccaaggcaacaaagatggttggcaacagggtgaccgcatcttgttttgcgtgccattgagagatgcttctgagcatcttcccatgttttttaaccatttgaataccatgacatatccgcacaacttgattgatttatcttttttggtgagtgactcttctgataacaccatgggcgtgttattatccaatttacagatggcgcaatctcaacaagacaagtccaaaaggtttggtaacatcgaaatctatgagaaggacttcggccaaatcattggtcagtccttttctgatcgtcacgggtttggcgcccagggccccagaagaaagttgatggccagggctcgtaattggcttgggtccgtggccttgaaaccataccactcctgggtttactggagagacgtggatgtcgaaaccatccccactaccatcatggaggatttgatgcatcacgacaaggacgtcattgtccccaacgtctggagacctttaccagactggttaggaaacattcaaccctacgatttaaattcttggaaggaaagtgaagggggtcttcaattggcggattccttggacgaagatgctgtcattgtggaagggtacccagagtacgccacttggagacctcacttggcatacatgagagacccaaacggtaatccagaagacgaaatggaattggacggtattggaggggtctctattctcgcgaaagctaaagtattcagaacaggctctcactttcctgcattctcctttgaaaagcacgcagagacagaagcattcggtaggctctcccgcaggatgaattacaatgtcatcggcttgccccattatgtcatctggcacatctacgaaccttccagcgacgacttaaagcacatggcttggatggctgaagaggagaagagaaaattagaagaagagagaattcgcgaattttacaacaagatctgggagattggatttgaagatgtcagagaccaatggaacgaagaaagagattctatcttaaaaaacattgactccactttgaacaataaagtcactgtagactggtctgaagagggagatggcagtgagttggtggactccaagggtgactttgtctctccaaacaaccaacaacaacaacaacagcaacaacaacaacaacagcagcagcagcaacagcaacagcaacaacagctcgacggcaacccgcaggggaaacctcttgatgacaacgacaagaacaagaaaaaacatcctaaagaagttccattagacttcgaccctgatagaaactga

SEQ ID NO: 2919 - DNA, 501 bp, Saccharomyces cerevisiae
atgtcaagatatggcaaaaaccttgtgcattatataatcgtggaacacgacgatcaacgcggccaaaagccgatcgacgacgacgacgaaaaaaatttttattaccactgttccttcaccttcgaaactttttttcgggcgacggcgtttcttttagctcctgcggtatgtgcggtgcgggaggtcccttgtcgcctcacacggacccgatataacgctacggaatacatcgaggggtatgggtggatgatatcactgcagcaaggtctgggtgttgcagaattttaccggccttggcccctcagcgtccagctacagcgttatactactccaagtcgccgttcccgttttgctgttctcacccctcagagaaaatgccaccagaacgaagccaatggtcaggacttatcgttacttatactgttgagccggatatatccgctgtgctctaataccagccaaacgagaagggtagcggcaagaaagggtaaactttcatga

SEQ ID NO: 2920 - DNA, 501 bp, Artificial Sequence
  Description of Artificial Sequence: Synthetic polynucleotide
atgagtagatatggcaaaaaccttgtgcattatataatcgtggaacacgacgatcaacgcggccaaaagccgatcgacgacgacgacgaaaaaaatttttattaccactgttccttcaccttcgaaactttttttagggcgacggcgtttcttttagctcctgcggtatgtgcggtgagagaggtcccttgtcgcctcacaagaaccagatataacgctacggaatacatcgaggggtatgggtggatgatatctttgcagcaaggtttaggtgttgcagaattttacagaccttggcccctcagcgtccagttacagcgttatactactccaagtcgccgttcccgttttgctgttctcacccctcagagaaaatgccaccagaacgaagccaatggtcaggacttatctttacttatattattgagcagaatatatccgttatgctctaataccagccaaacgagaagggtagcggcaagaaagggtaaactttcttga

SEQ ID NO: 2921 - DNA, 474 bp, Saccharomyces cerevisiae
atgtctgacgaagaacatacctttgaaactgctgacgctggttcctccgccacctacccaatgcaatgttctgccttgagaaagaacggtttcgttgtcatcaagagtagaccatgtaagattgtcgacatgtccacttctaagactggtaagcacggtcacgctaaagtccatttggttgccattgatatcttcactggtaagaagttggaagatttgtctccatctactcacaacatggaagttccagttgtcaagagaaacgaataccaattgttggacattgatgacggtttcttgtctttgatgaacatggacggtgacactaaggatgatgtcaaggctccagaaggtgaattgggtgacagtttgcaaactgcttttgatgaaggtaaggacttgatggttaccatcatctccgctatgggtgaagaagccgccatctccttcaaggaagctgctagaaccgattaa

SEQ ID NO: 2922 - DNA, 474 bp, Artificial Sequence
  Description of Artificial Sequence: Synthetic polynucleotide
atgtctgacgaagaacatacctttgaaactgctgacgctggttcctccgccacctacccaatgcaatgttctgccttgagaaagaacggtttcgttgtcatcaagagtagaccatgtaagattgtcgacatgtccacttctaagactggtaagcacggtcacgctaaagtccatttggttgccattgatatcttcactggtaagaagttggaagatttgtctccatctactcacaacatggaagttccagttgtcaagagaaacgaataccaattgttggacattgatgacggtttcttgtctttgatgaacatggacggtgacactaaggatgatgtcaaggctccagaaggtgaattgggtgacagtttgcaaactgcttttgatgaaggtaaggacttgatggttaccatcatctccgctatgggtgaagaagccgccatctccttcaaggaagctgctagaaccgattga

SEQ ID NO: 2923 - DNA, 420 bp, Saccharomyces cerevisiae
atgaaaaaagaaaaaaaaactccgacgccccttccatcacatcatgtactcttcgctgaaccgggtttttttctttgcaatttttttttcgttctcctaaagcatacacaaataaatccttttttttattttctatttattttgttatttatcatctatatagcaataatatactttgtttttattcgtatttcacacttttctttttccttatgcaggcagtgtaattcattggggaggatgattttcatgtgcgcatatctaccggctgcaagcagccggtcggtggcaaatccggcgcttccccctcaaaaaaaaaaaaaaaaaaaaaaaaagggaactctcagaacgggggaggttgaagagcaggccaagggaaatattagttttgacctatgtgggaaacagaattttcaatga

SEQ ID NO: 2924 - DNA, 420 bp, Artificial Sequence
  Description of Artificial Sequence: Synthetic polynucleotide
atgaaaaaagaaaaaaaaactccgacgccccttccatctcatcatgtactcttcgctgaaccgggtttttttctttgcaatttttttttcgttctcttgaagcatacacaaataaatccttttttttattttttgtttattttgttatttatcatctatatagcaataatatactttgtttttattcgtatttctcacttttctttttccttatgcaggcagtgtaattctttggggaggatgattttcatgtgcgcatatttaccggctgcaagcagcagatctgtggcaaatccggcgcttccccctcaaaaaaaaaaaaaaaaaaaaaaaaagggaactctcagaacgggggaggttgaagagcaggccaagggaaatattagttttgacttatgtgggaaacagaattttcaatga

SEQ ID NO: 2925 - DNA, 2916 bp, Saccharomyces cerevisiae
atggaaggctcaacgggatttgatggagacgctactacttttttcgctccagacgctgtgtttggtgacagagtgcgcagatttcaagagtttttagatactttcacctcatacagagactctgtaaggtccatacaagtttacaacagcaataacgcggccaactacaacgatgatcaagatgacgcagacgaacgagatttgctaggtgatgacgacggtgatgatcttgaaaaggaaaagaaagcagcatcgtccacctcattgaatatactccctcacaggattatcatctcgcttgatgacttgagagaattcgacaggtcgttctggtcgggcattttagtcgaaccagcatacttcatcccgcctgccgaaaaggcgcttactgacctagcagattccatggacgatgttccacatcccaatgcctctgcagtatcgtctcgccatccttggaagctttcgttcaaaggctcatttggtgcacacgcattgtctcctcgtactctaacggcacaacatttaaacaaactggtctctgttgagggtatcgtaactaagacttcgttggtcaggccaaagcttatcagatctgtccactacgcggcaaagactggtagattccattacagagattatacagatgctactacaactctcaccacccgcatcccaacgcctgccatctatccaacggaggacactgaaggtaacaaactaaccaccgaatatgggtatagtacgttcatagaccatcagcgtatcactgtgcaagaaatgcccgaaatggcccccgctggccaacttcccaggtccattgacgtcattctcgatgacgaccttgtggacaagaccaagccaggtgacagagttaacgttgtcggggtattcaagtcgcttggtgctggtggcatgaaccagtccaactctaatacattgatcgggttcaaaactctgatcctaggtaatacggtgtatcctctccacgccagatccacgggtgtcgctgcgagacaaatgttgacagatttcgatataagaaatatcaataaactatccaaaaaaaaggacattttcgatatcttgtctcaatctttagcgccttctatttatggacatgaccatataaagaaagccattttattgatgctcatgggaggtgtggagaaaaatttagaaaatggctcgcatttaagaggtgacatcaatatcctaatggtgggtgatccatccactgccaagtcccaattgctaaggtttgtgttgaatacagcatcactggcaattgctactactggtagaggttcttccggtgtcggtttgaccgcagcggtcactactgatagggaaacaggtgaaagaagactagaggctggtgccatggttcttgctgaccgcggggttgtatgtattgatgaatttgataagatgacagatgtggatagagtcgccattcatgaagtaatggaacaacaaacggtgacgattgccaaagcaggtattcacacaacattaaatgctcgttgtagtgttattgctgccgcaaatcccgtttttgggcagtacgatgtcaatagagatccacaccaaaacattgccctaccggactcgctgttgtctcgttttgatttactatttgttgtgacagacgatatcaatgaaatcagagatagatccattagtgagcatgtcttaagaacacacagatatttgcctccaggttatttagagggtgaacctgtgagagagcgtttgaatttatcattagccgttggggaggatgcagatataaatcctgaagagcattccaactccggggctggtgtagaaaatgaaggagaagatgatgaagaccatgtcttcgaaaagttcaaccccttattacaagcaggtgctaagttagcaaaaaacaaaggtaactataacggtacagaaattccaaagctagtcaccatcccattcttaagaaagtacgttcaatatgccaaggaaagggttattccacagttaacacaagaagccatcaatgttattgtgaaaaattatactgatttaagaaacgatgataataccaaaaaatcgcccattactgcaagaactttggagactttgatcagattagccacagctcacgccaaagtcaggttatccaaaacagtcaacaaggtggatgctaaagtggctgccaatctactaaggtttgcactattgggtgaggatatcggcaatgatatcgatgaagaggaaagtgaatacgaagaagctttgtcgaagaggtctccacagaaatcaccgaaaaaaagacaaagagtcagacaaccagcaagcaactctggatccccaatcaaatctactccaagaaggtcaacggcatcttccgttaatgccacgccatcgtcagcacgcagaatattacgttttcaagatgacgaacagaacgctggtgaagacgataacgatataatgtcaccgcttcctgcggatgaggaagctgaattacaaagaaggcttcaactggggttgagagtgtctccaagacgtagagaacatcttcacgcacctgaggaaggttcgtcgggacctcttaccgaggtcggtactccaagattacctaacgtatcttctgcaggtcaggatgatgagcaacaacagtcagttatttcttttgacaatgtggagcctggtaccatttctactggtagattgtctttaatctcaggtattattgcgcgtctgatgcaaacagaaatatttgaagaagaatcctatcctgtggcctctttgttcgaaagaatcaacgaagaactaccggaggaggaaaaattctccgctcaagaatatttagcaggtttgaagatcatgtcggacagaaataacttaatggttgctgacgataaagtttggagagtctga

SEQ ID NO: 2926 - DNA, 2916 bp, Artificial Sequence
  Description of Artificial Sequence: Synthetic polynucleotide
atggaaggctctacgggatttgatggagacgctactacttttttcgctccagacgctgtgtttggtgacagagtgcgcagatttcaagagtttttagatactttcacctcttacagagactctgtaaggtccatacaagtttacaacagcaataacgcggccaactacaacgatgatcaagatgacgcagacgaaagagatttgttgggtgatgacgacggtgatgatcttgaaaaggaaaagaaagcagcatcttccacctctttgaatatactccctcacaggattatcatctctcttgatgacttgagagaattcgacaggtctttctggtctggcattttagtcgaaccagcatacttcatcccgcctgccgaaaaggcgcttactgacttggcagattccatggacgatgttccacatcccaatgcctctgcagtatcttctcgccatccttggaagctttctttcaaaggctcttttggtgcacacgcattgtctcctcgtactttaacggcacaacatttaaacaaattggtctctgttgagggtatcgtaactaagacttctttggtcaggccaaagcttatcagatctgtccactacgcggcaaagactggtagattccattacagagattatacagatgctactacaactctcaccacccgcatcccaacgcctgccatctatccaacggaggacactgaaggtaacaaattgaccaccgaatatgggtatagtacgttcatagaccatcagcgtatcactgtgcaagaaatgcccgaaatggcccccgctggccaacttcccaggtccattgacgtcattctcgatgacgaccttgtggacaagaccaagccaggtgacagagttaacgttgtcggggtattcaagtctcttggtgctggtggcatgaaccagtccaactctaatacattgatcgggttcaaaactttgatcttgggtaatacggtgtatcctctccacgccagatccacgggtgtcgctgcgagacaaatgttgacagatttcgatataagaaatatcaataaactttccaaaaaaaaggacattttcgatatcttgtctcaatctttagcgccttctatttatggacatgaccatataaagaaagccattttattgatgctcatgggaggtgtggagaaaaatttagaaaatggctctcatttaagaggtgacatcaatatcttgatggtgggtgatccatccactgccaagtcccaattgttgaggtttgtgttgaatacagcatctttggcaattgctactactggtagaggttcttccggtgtcggtttgaccgcagcggtcactactgatagggaaacaggtgaaagaagattggaggctggtgccatggttcttgctgaccgcggggttgtatgtattgatgaatttgataagatgacagatgtggatagagtcgccattcatgaagtaatggaacaacaaacggtgacgattgccaaagcaggtattcacacaacattaaatgctcgttgtagtgttattgctgccgcaaatcccgtttttgggcagtacgatgtcaatagagatccacaccaaaacattgccttaccggactctttgttgtctcgttttgatttactttttgttgtgacagacgatatcaatgaaatcagagatagatccattagtgagcatgtcttaagaacacacagatatttgcctccaggttatttagagggtgaacctgtgagagagcgtttgaatttatctttagccgttggggaggatgcagatataaatcctgaagagcattccaactccggggctggtgtagaaaatgaaggagaagatgatgaagaccatgtcttcgaaaagttcaaccccttattacaagcaggtgctaagttagcaaaaaacaaaggtaactataacggtacagaaattccaaagttggtcaccatcccattcttaagaaagtacgttcaatatgccaaggaaagggttattccacagttaacacaagaagccatcaatgttattgtgaaaaattatactgatttaagaaacgatgataataccaaaaaaagtcccattactgcaagaactttggagactttgatcagattagccacagctcacgccaaagtcaggttatccaaaacagtcaacaaggtggatgctaaagtggctgccaatttattgaggtttgcattattgggtgaggatatcggcaatgatatcgatgaagaggaaagtgaatacgaagaagctttgtccaagaggtctccacagaaatctccgaaaaaaagacaaagagtcagacaaccagcaagcaactctggatccccaatcaaatctactccaagaaggtctacggcatcttccgttaatgccacgccatcttctgcacgcagaatattacgttttcaagatgacgaacagaacgctggtgaagacgataacgatataatgtctccgcttcctgcggatgaggaagctgaattacaaagaaggcttcaattagggttgagagtgtctccaagacgtagagaacatcttcacgcacctgaggaaggttcttctggacctcttaccgaggtcggtactccaagattacctaacgtatcttctgcaggtcaggatgatgagcaacaacagtctgttatttcttttgacaatgtggagcctggtaccatttctactggtagattgtctttaatcagtggtattattgcgcgtttaatgcaaacagaaatatttgaagaagaatcctatcctgtggcctctttgttcgaaagaatcaacgaagaattaccggaggaggaaaaattctccgctcaagaatatttagcaggtttgaagatcatgtctgacagaaataacttaatggttgctgacgataaagtttggagagtctga

SEQ ID NO: 2927 - DNA, 3648 bp, Saccharomyces cerevisiae
atgacaaagaaatcatttgtgagcagtcctattgttagggactcgacattgctggtaccaaagtcattaatagcaaagccgtacgtattaccgtttttcccgttatacgctacctttgcccaactatatttccagcaatatgatcgttacatcaaaggacctgagtggacttttgtctacttggggacattggtatccttgaacatcctagtcatgttaatgcctgcttggaatgtcaagatcaaggcgaaattcaactacagtactactaaaaatgtcaatgaagctactcacattctcatctacaccactccaaataatggttctgatggtatcgttgaaattcagagagtaactgaagcgggctctttgcagacttttttccaatttcaaaagaaaagattcttgtggcatgaaaatgagcaggtattttcttcaccaaagttccttgttgatgaatccccaaagatcggtgatttccaaaaatgtaagggccattccggtgacctaactcatttgaagagactatatggtgagaatagttttgatattcctattccaacatttatggaattattcaaagagcacgctgttgcgccattgtttgttttccaagttttctgtgttgccttatggctattggatgagttctggtattattctttgtttaacttattcatgattatctccatggaggcagctgcagtatttcaaagattaactgccttgaaggaatttagaactatgggtatcaaaccttataccattaacgtgtttagaaacaaaaaatgggtagcattgcaaaccaatgaattgttacctatggatttagtgtctataacaagaaccgccgaggagagcgcaattccttgcgatttgatcttgctcgatggctccgctattgttaatgaagcaatgctttcaggtgaatctactcccttgttaaaggaatccattaaattacgtcctagtgaagataatttacaactggacggtgttgacaagattgctgtgttacatggtggtacaaaggcattacaagtaacacctcctgaacataaatcggatatccctcctccacctgatggaggtgccttagccatcgtcaccaaaactggctttgaaacatctcagggttctttagttcgagttatgatttactccgctgaacgtgtttccgtcgataataaggaagcgttgatgttcattcttttcttgttgattttcgctgttattgcatcctggtacgtttgggttgagggtacaaaaatgggtagaattcaatccaaattgatcttggactgtatattaattattacatctgttgttcctcctgagttaccaatggaattgaccatggctgtcaacagttctctggccgcccttgccaagttctatgtctattgtactgaaccatttagaattccatttgctggtagaattgatgtttgttgtttcgataaaactggtactttgaccggcgaagatcttgtgtttgaaggtctagctggtatctctgcggactccgaaaacattcgtcacttgtacagcgctgccgaagcaccagaaagtacaattcttgtcattggtgctgctcacgctttagttaaattggaagatggtgatattgttggtgacccaatggaaaaggcgaccttaaaggctgttggttgggctgtcgaaagaaaaaacagtaactatagagagggcaccggaaaattggatattatccgtagatttcaattttcttctgctttaaaaaggtctgcttctattgcttctcacaacgatgccttgtttgctgctgtcaaaggtgcacctgaaacgattcgtgaaaggctttctgacattcccaagaattatgacgaaatctataaatcctttacacgctctggttcaagagttttggctttggcttctaagtcgttgccaaaaatgtctcagtctaaaattgatgatctaaaccgtgatgatgttgaatctgaattaacctttaatgggtttttgattttccattgtcctctgaaggatgacgctattgaaaccattaaaatgttaaatgaatcctcccatcgttctattatgattactggtgataatccattaactgctgttcatgtggctaaagaagttggcatagtttttggcgaaactttaatcttagacagagcaggtaaatctgacgacaatcagttgctgttccgtgatgttgaagagacagtttccatcccatttgatccatcaaaagacacttttgatcattctaaattatttgatagatatgatattgctgttactggatatgctttgaatgccttggaagggcattctcaattaagggatctattacgtcacacctgggtttacgcacgtgtttcaccatcccaaaaggagttcttgctgaatacactaaaggatatgggatatcaaactttaatgtgcggtgatggtactaatgatgttggtgctttgaaacaagctcatgttggtattgcattgttgaatggtaccgaagaaggtttgaaaaaattgggtgaacaacgcagattggaaggtatgaaaatgatgtatataaagcaaactgaatttatggctagatggaatcaaccacagccacctgttcctgaaccgattgcacacttattcccacctggtccaaaaaatcctcattatctgaaagctttagaaagcaaaggtaccgtcattacgccagaaatcagaaaagcagttgaagaagcaaattccaaacctgttgaagtcatcaaaccaaatggactatcggaaaaaaaacctgctgacttagcttctttgttgttgaactctgctggtgatgcccaaggtgatgaagcaccagctctaaagttaggagatgcatcttgcgctgccccttttacctcgaaactggccaatgtttctgctgttactaacattatacgtcaaggccgttgtgctttagttaacacaattcaaatgtacaaaatcttggccttgaattgtttaatcagtgcctactctttgtccatcatttacatggctggtgtcaaatttggtgatggtcaagccactgtctccggtttgttactatcggtttgtttcttgagtatttcccgtggtaaacctttagaaaaactatccaagcaaaggccacagtccggaattttcaatgtttacattatgggatctattttgtctcaatttgccgttcatattgccactttagtttacatcactacagagatttataaattggaacccagagagccacaagttgatcttgaaaaggaatttgctccatcattattgaatacgggtattttcatcattcagttggtacaacaagtctctacatttgctgtcaattatcaaggtgagccattcagagaaaacattaggagtaacaaaggtatgtattatggtttattgggtgtgacaggtttggcacttgcaagtgctactgaatttttacctgagctaaacgaagccatgaagtttgtgccaatgactgatgactttaagattaagttgaccctaacattattgctcgatttctttggtagttggggtgtcgagcattttttcaagtttttcttcatggacgacaaaccatcagacatttctgtgcaacaggtcaagattgcctctaaatga

SEQ ID NO: 2928 - DNA, 3648 bp, Artificial Sequence
  Description of Artificial Sequence: Synthetic polynucleotide
atgacaaagaaaagttttgtgagcagtcctattgttagggactctacattgttagtaccaaagtctttaatagcaaagccgtacgtattaccgtttttcccgttatacgctacctttgcccaattatatttccagcaatatgatcgttacatcaaaggacctgagtggacttttgtctacttggggacattggtatccttgaacatcctcgtcatgttaatgcctgcttggaatgtcaagatcaaggcgaaattcaactacagtactactaaaaatgtcaatgaagctactcacattctcatctacaccactccaaataatggttctgatggtatcgttgaaattcagagagtaactgaagcgggctctttgcagacttttttccaatttcaaaagaaaagattcttgtggcatgaaaatgagcaggtattttcttctccaaagttccttgttgatgaatccccaaagatcggtgatttccaaaaatgtaagggccattccggtgacttgactcatttgaagagattatatggtgagaatagttttgatattcctattccaacatttatggaattattcaaagagcacgctgttgcgccattgtttgttttccaagttttctgtgttgccttatggttattggatgagttctggtattattctttgtttaacttattcatgattatctccatggaggcagctgcagtatttcaaagattaactgccttgaaggaatttagaactatgggtatcaaaccttataccattaacgtgtttagaaacaaaaaatgggtagcattgcaaaccaatgaattgttacctatggatttagtgtctataacaagaaccgccgaggagagcgcaattccttgcgatttgatcttgctcgatggctccgctattgttaatgaagcaatgctttctggtgaatctactcccttgttaaaggaatccattaaattacgtcctagtgaagataatttacaattggacggtgttgacaagattgctgtgttacatggtggtacaaaggcattacaagtaacacctcctgaacataaatctgatatccctcctccacctgatggaggtgccttagccatcgtcaccaaaactggctttgaaacatctcagggttctttagttcgtgttatgatttactccgctgaacgtgtttccgtcgataataaggaagcgttgatgttcattcttttcttgttgattttcgctgttattgcatcctggtacgtttgggttgagggtacaaaaatgggtagaattcaatccaaattgatcttggactgtatattaattattacatctgttgttcctcctgagttaccaatggaattgaccatggctgtcaacagttctttggccgcccttgccaagttctatgtctattgtactgaaccatttagaattccatttgctggtagaattgatgtttgttgtttcgataaaactggtactttgaccggcgaagatcttgtgtttgaaggtttagctggtatctctgcggactccgaaaacattcgtcacttgtacagcgctgccgaagcaccagaaagtacaattcttgtcattggtgctgctcacgctttagttaaattggaagatggtgatattgttggtgacccaatggaaaaggcgaccttaaaggctgttggttgggctgtcgaaagaaaaaacagtaactatagagagggcaccggaaaattggatattatccgtagatttcaattttcttctgctttaaaaaggtctgcttctattgcttctcacaacgatgccttgtttgctgctgtcaaaggtgcacctgaaacgattcgtgaaaggctttctgacattcccaagaattatgacgaaatctataaatcctttacacgctctggttccagagttttggctttggcttctaagtctttgccaaaaatgtctcagtctaaaattgatgatttgaaccgtgatgatgttgaatctgaattaacctttaatgggtttttgattttccattgtcctttgaaggatgacgctattgaaaccattaaaatgttaaatgaatcctcccatcgttctattatgattactggtgataatccattaactgctgttcatgtggctaaagaagttggcatagtttttggcgaaactttaatcttagacagagcaggtaaatctgacgacaatcagttgttattccgtgatgttgaagagacagtttccatcccatttgatccatctaaagacacttttgatcattctaaattatttgatagatatgatattgctgttactggatatgctttgaatgccttggaagggcattctcaattaagggatttattacgtcacacctgggtttacgcacgtgtttctccatcccaaaaggagttcttgttgaatacattgaaggatatgggatatcaaactttaatgtgcggtgatggtactaatgatgttggtgctttgaaacaagctcatgttggtattgcattgttgaatggtaccgaagaaggtttgaaaaaattgggtgaacaacgcagattggaaggtatgaaaatgatgtatataaagcaaactgaatttatggctagatggaatcaaccacagccacctgttcctgaaccgattgcacacttattcccacctggtccaaaaaatcctcattatttgaaagctttagaaagcaaaggtaccgtcattacgccagaaatcagaaaagcagttgaagaagcaaattccaaacctgttgaagtcatcaaaccaaatggattatctgaaaaaaaacctgctgacttagcttctttgttgttgaactctgctggtgatgcccaaggtgatgaagcaccagctttgaagttaggagatgcatcttgcgctgccccttttacctccaaattggccaatgtttctgctgttactaacattatacgtcaaggccgttgtgctttagttaacacaattcaaatgtacaaaatcttggccttgaattgtttaatcagtgcctactctttgtccatcatttacatggctggtgtcaaatttggtgatggtcaagccactgtctccggtttgttattaagtgtttgtttcttgagtatttcccgtggtaaacctttagaaaaactttccaagcaaaggccacagtccggaattttcaatgtttacattatgggatctattttgtctcaatttgccgttcatattgccactttagtttacatcactacagagatttataaattggaacccagagagccacaagttgatcttgaaaaggaatttgctccatctttattgaatacgggtattttcatcattcagttggtacaacaagtctctacatttgctgtcaattatcaaggtgagccattcagagaaaacattaggagtaacaaaggtatgtattatggtttattgggtgtgacaggtttggcacttgcaagtgctactgaatttttacctgagttgaacgaagccatgaagtttgtgccaatgactgatgactttaagattaagttgaccttaacattattgctcgatttctttggtagttggggtgtcgagcattttttcaagtttttcttcatggacgacaaaccatctgacatttctgtgcaacaggtcaagattgcctctaaatga

SEQ ID NO: 2929 - DNA, 1935 bp, Saccharomyces cerevisiae
atgttaccatcatggaaagcctttaaagcacataatatacttcgtattctgacccgtttccagtcaaccaaaattccagatgcagttatcggtattgatttaggtactaccaattctgcggtagctattatggaaggtaaagttccgagaattatcgaaaatgcagaaggctcaagaactactccgtctgtagtggctttcactaaagacggagaacgtttagttggtgagccagccaaacgacaatccgtcataaactcagaaaacactttgtttgctactaagcgtttaatcggccgccgtttcgaggacgctgaagtccaaagagatattaatcaggttcctttcaaaatcgtcaagcattctaatggagatgcctgggtagaggctagaaacagaacgtactcccccgcccaaataggaggttttatcttaaataaaatgaaggaaacagcggaggcttacttagcgaagagcgtcaaaaatgctgttgtcaccgttcctgcttacttcaatgatgcccaaagacaagctactaaagacgcaggacaaattattgggcttaatgtattacgtgttgtcaacgaaccaacagctgctgccctagcttacggtctagataaatcagagccaaaagtcattgctgttttcgacttgggcggtggtactttcgatatttcaatcctggacatcgataacggtatctttgaggttaaatctaccaatggtgacacccatttgggtggcgaagattttgacatttatttgttgcaagaaattatttctcatttcaagaaagaaaccggtatcgatttgagtaatgaccgtatggctgtccaaagaataagagaagccgctgaaaaggctaaaatcgaactgtcttctacactctctacagaaataaacttgcctttcataactgctgatgctgcaggcccaaagcatattcgtatgcccttttctagggttcagcttgagaatataaccgccccattgattgatagaacggttgatcctgtcaaaaaagcactgaaagacgcaagaattaccgcctcagatatatcggatgttttattagttggtggtatgtcaaggatgcccaaggttgcagatactgtaaagaaattattcggtaaggatgcatcaaaagctgttaaccctgatgaagcagtcgctttaggggccgctatacaggctgcggtcttgtctggtgaagttaccgatgttttgttgctagatgtcactcccctatcattgggtattgaaactttaggaggagtttttacaaaattaatcccaagaaattctacaattcccaataagaaatctcaaattttttcaactgcggcatcaggtcaaacatcggtggaagttaaagttttccaaggtgagagggagttagtcaaggataacaaattaataggtaattttactcttgcgggcattcctccagctccaaaaggtaccccacaaattgaagtcacttttgatatcgatgcgaacggcatcatcaacgtttcagcaaaagatctcgccagccacaaagactcttccatcactgttgccggagcgtctgggctatctgatacggagattgatcgaatggttaatgaagcggaaagatataaaaatcaggatagagccagaaggaatgccatcgaaaccgctaacaaagctgaccagctagctaatgacacagaaaattccattaaggaattcgaaggtaagctagataaaactgattctcaaagactaaaagatcaaatttcatccttaagggaattggtttctcggagtcaagctggagatgaggttaatgatgacgatgttggaacaaaaattgacaatttgcgaacttcatcgatgaaactttttgaacagttatacaagaacagtgacaatcctgaaactaagaacgggagagaaaataaataa

SEQ ID NO: 2930 - DNA, 1935 bp, Artificial Sequence
  Description of Artificial Sequence: Synthetic polynucleotide
atgttaccatcttggaaagcctttaaagcacataatatacttcgtattttgacccgtttccagtctaccaaaattccagatgcagttatcggtattgatttaggtactaccaattctgcggtagctattatggaaggtaaagttccgagaattatcgaaaatgcagaaggctccagaactactccgtctgtagtggctttcactaaagacggagaacgtttagttggtgagccagccaaaagacaatccgtcataaactctgaaaacactttgtttgctactaagcgtttaatcggccgccgtttcgaggacgctgaagtccaaagagatattaatcaggttcctttcaaaatcgtcaagcattctaatggagatgcctgggtagaggctagaaacagaacgtactcccccgcccaaataggaggttttatcttaaataaaatgaaggaaacagcggaggcttacttagcgaagagcgtcaaaaatgctgttgtcaccgttcctgcttacttcaatgatgcccaaagacaagctactaaagacgcaggacaaattattgggcttaatgtattacgtgttgtcaacgaaccaacagctgctgccttagcttacggtttggataaaagtgagccaaaagtcattgctgttttcgacttgggcggtggtactttcgatatttccatcttggacatcgataacggtatctttgaggttaaatctaccaatggtgacacccatttgggtggcgaagattttgacatttatttgttgcaagaaattatttctcatttcaagaaagaaaccggtatcgatttgagtaatgaccgtatggctgtccaaagaataagagaagccgctgaaaaggctaaaatcgaattatcttctacactctctacagaaataaacttgcctttcataactgctgatgctgcaggcccaaagcatattcgtatgcccttttctagggttcagcttgagaatataaccgccccattgattgatagaacggttgatcctgtcaaaaaagcattgaaagacgcaagaattaccgcctctgatatatctgatgttttattagttggtggtatgtctaggatgcccaaggttgcagatactgtaaagaaattattcggtaaggatgcatccaaagctgttaaccctgatgaagcagtcgctttaggggccgctatacaggctgcggtcttgtctggtgaagttaccgatgttttgttgttggatgtcactcccttatctttgggtattgaaactttaggaggagtttttacaaaattaatcccaagaaattctacaattcccaataagaaatctcaaattttttccactgcggcatctggtcaaacatctgtggaagttaaagttttccaaggtgagagggagttagtcaaggataacaaattaataggtaattttactcttgcgggcattcctccagctccaaaaggtaccccacaaattgaagtcacttttgatatcgatgcgaacggcatcatcaacgtttctgcaaaagatctcgccagccacaaagactcttccatcactgttgccggagcgtctgggttatctgatacggagattgatagaatggttaatgaagcggaaagatataaaaatcaggatagagccagaaggaatgccatcgaaaccgctaacaaagctgaccagttagctaatgacacagaaaattccattaaggaattcgaaggtaagttggataaaactgattctcaaagattgaaagatcaaatttcttccttaagggaattggtttctagaagtcaagctggagatgaggttaatgatgacgatgttggaacaaaaattgacaatttgagaacttcttctatgaaactttttgaacagttatacaagaacagtgacaatcctgaaactaagaacgggagagaaaataaatga

SEQ ID NO: 2931 - DNA, 939 bp, Saccharomyces cerevisiae
atgcctcgtctcttggccacgcagtctcatgttgtacatggatatgtgggaaataaggctgcaacgtttcccttacagtgtctaggctgggatgtggattgttgtaacagtgttcagttttccaaccataccggatatggtttagataaagtgtttgggactataacgagggaaacagatttgaaggaactcttatcaggtctttttgataatttttcccaagactaccaagccttactttcaggctacttgcccaataagaattccgttcgatgtatgggaacatactacgctaaatttaaagaggcgaatccagaaatgatatggcttatggatcctgttatgggtgacgaaggacaattatatgttagtgaggatgtcataccagaatatagaaagctggctttgtctccaaaacagctagtcgatataataactccgaatcaatttgagctggagatactttatgggggggaaatcaagactaaagaacatttgaagaaggccttaaagaaattacaccaaactatcccagtgatcattgtcacatcctgtgactgtaagatgtttgatgacaaagattttatttattgcgtagcttcaatggagggtaaaacccccattgtttacagagtgccgtttattgattcgtatttcactggggttggtgatttgttttctgctttgttattggatcgagtgtataagatcttatcgaaccctacaacaacattaaaatttgaagaccaagtcaataatgttcttaatgttattcagaaggttttgaaaattactaggagctatgcttcaggaaaaatgaaagcaaaaatgggttccgccttggaaatgaaagaaatggaattgcgtcttattgaatcaagagatatatatgaaacaatcaacattcatcaaacagattatatttacgcaaggttgtga

SEQ ID NO: 2932 - DNA, 939 bp, Artificial Sequence
  Description of Artificial Sequence: Synthetic polynucleotide
atgcctcgtctcttggccacgcagtctcatgttgtacatggatatgtgggaaataaggctgcaacgtttcccttacagtgtttgggctgggatgtggattgttgtaacagtgttcagttttccaaccataccggatatggtttagataaagtgtttgggactataacgagggaaacagatttgaaggaactcttatctggtctttttgataatttttcccaagactaccaagccttactttctggctacttgcccaataagaattccgttcgttgtatgggaacatactacgctaaatttaaagaggcgaatccagaaatgatatggcttatggatcctgttatgggtgacgaaggacaattatatgttagtgaggatgtcataccagaatatagaaagttggctttgtctccaaaacagttggtcgatataataactccgaatcaatttgagttagagatactttatgggggggaaatcaagactaaagaacatttgaagaaggccttaaagaaattacaccaaactatcccagtgatcattgtcacatcctgtgactgtaagatgtttgatgacaaagattttatttattgcgtagcttccatggagggtaaaacccccattgtttacagagtgccgtttattgattcttatttcactggggttggtgatttgttttctgctttgttattggatagagtgtataagatcttatctaaccctacaacaacattaaaatttgaagaccaagtcaataatgttcttaatgttattcagaaggttttgaaaattactaggagctatgcttctggaaaaatgaaagcaaaaatgggttccgccttggaaatgaaagaaatggaattgcgtcttattgaatctagagatatatatgaaacaatcaacattcatcaaacagattatatttacgcaaggttgtga

SEQ ID NO: 2933 - DNA, 462 bp, Saccharomyces cerevisiae
atgaaaataacaataacaagccttctattttttcttgtcatgatcgtcgagctcgcaagtgcgggcacactacttcataatggtgcaaatttgccctcattacgtgataacaccactctaactgatgctcgtaatgtgttaaagtacttacaagtgcttggttttccaagcaacaaaatagcggctacagatactgttggaacttttatcatatttagcaatcgtacggaagctaacactaccgctatgacgaagacagtgtcatactgttatcgtaactacgggcatagtttctacttcactcattacaaatacgactattttcctagcgggattagttatatggcaaaacttggcgatgccaccgtcaaccatacggacttacctcactttaggaacaacaaacggctaacaacgcaagaactcaatgccttccaacatccaattgtcgagtttcagtaa

SEQ ID NO: 2934 - DNA, 462 bp, Artificial Sequence
  Description of Artificial Sequence: Synthetic polynucleotide
atgaaaataacaataacaagccttttattttttcttgtcatgatcgtcgagctcgcaagtgcgggcacattgcttcataatggtgcaaatttgccctctttacgtgataacaccactttaactgatgctcgtaatgtgttaaagtacttacaagtgcttggttttccaagcaacaaaatagcggctacagatactgttggaacttttatcatatttagcaatcgtacggaagctaacactaccgctatgacgaagacagtgtcttactgttatcgtaactacgggcatagtttctacttcactcattacaaatacgactattttcctagcgggattagttatatggcaaaacttggcgatgccaccgtcaaccatacggacttacctcactttaggaacaacaaaagattgacaacgcaagaactcaatgccttccaacatccaattgtcgagtttcagtga

SEQ ID NO: 2935 - DNA, 483 bp, Saccharomyces cerevisiae
atgactgaattgtgtcctgtctacgcccctttctttggtgccattggttgtgcctctgcaattatcttcacctcattaggtgctgcttacggtactgctaagtctggtgttggtatctgtgccacttgtgtgttgagaccagacctattattcaagaacattgttcctgttattatggctggtatcattgccatttacggtttagttgtttccgttttggtttgttattcgttgggtcaaaagcaagctttgtacaccggtttcatccaattgggtgccggtctatcagtcggtttgagtggtctagctgctggtttcgctattggtattgtcggtgatgcaggtgttagaggttcctctcaacaaccaagattattcgtcggtatgattttgattttgatttttgctgaagttttgggtctatacggtttgattgttgctttgttgttgaactccagggctactcaagatgttgtctgttaa

SEQ ID NO: 2936 - DNA, 483 bp, Artificial Sequence
  Description of Artificial Sequence: Synthetic polynucleotide
atgactgaattgtgtcctgtctacgcccctttctttggtgccattggttgtgcctctgcaattatcttcaccagtttaggtgctgcttacggtactgctaagtctggtgttggtatctgtgccacttgtgtgttgagaccagacttattattcaagaacattgttcctgttattatggctggtatcattgccatttacggtttagttgtttccgttttggtttgttattctttgggtcaaaagcaagctttgtacaccggtttcatccaattgggtgccggtttaagtgtcggtttgagtggtttagctgctggtttcgctattggtattgtcggtgatgcaggtgttagaggttcctctcaacaaccaagattattcgtcggtatgattttgattttgatttttgctgaagttttgggtttatacggtttgattgttgctttgttgttgaactccagggctactcaagatgttgtctgttga

SEQ ID NO: 2937 - DNA, 381 bp, Saccharomyces cerevisiae
atgtctgccccaaacccaaaggctttcccattagccgatgctgcattaacccaacaaatcttggatgtcgttcaacaggctgctaacttgagacaattgaagaaaggtgccaacgaagctaccaaaactttgaaccgtggtatctccgaattcatcattatggctgctgactgtgaacctattgaaatcctattgcatttaccattactatgtgaagacaagaatgttccatatgtctttgttccatctagagttgctttaggtagagcttgtggtgtttctagaccagttattgctgcttctattaccaccaacgatgcttctgctatcaagacccaaatctacgctgtcaaggacaagattgaaactttattaatttaa

SEQ ID NO: 2938 - DNA, 381 bp, Artificial Sequence
  Description of Artificial Sequence: Synthetic polynucleotide
atgtctgccccaaacccaaaggctttcccattagccgatgctgcattaacccaacaaatcttggatgtcgttcaacaggctgctaacttgagacaattgaagaaaggtgccaacgaagctaccaaaactttgaaccgtggtatctccgaattcatcattatggctgctgactgtgaacctattgaaatcttgttgcatttaccattattatgtgaagacaagaatgttccatatgtctttgttccatctagagttgctttaggtagagcttgtggtgtttctagaccagttattgctgcttctattaccaccaacgatgcttctgctatcaagacccaaatctacgctgtcaaggacaagattgaaactttattaatttga

SEQ ID NO: 2939 - DNA, 3567 bp, Saccharomyces cerevisiae
atggcaagacaagatgaaacggactgcaaaaaattggatagcaattcggcctttttacctttatgcataacatcttatagatcaaaagatgaggctgagaagctggtaagttgtcttcatcacgaaggaagttactttttatgttttagctatggattgtataccggaacgtccaacgaattgaaagcgaaggttgagttcgctttagatggaccgttcgttgttaactacgcaactgtaccgatgttcatgtcagcttccttctgtcacctgctaatgtttaacgacggttccattaagggattcaaatgcgaaaataacaaatttgaaattatctacgactctaatgtggctccgaaactggatactatttctttattaacttccagctggttaaatgcttcctttgagggtgttttatacacttgcaataaaaacatatcatatgatagtgatttgcatacgttatgtacgacaatttactcctttgacttcagagaaggaatagtcgaaagattttatgccaccgatggcgaagaaattatctcctttgattttattagcagggaggatttgcttgacgacgccacatgcacaggtaaatcacacgtttattttctttgcctacttaagagttgctatagtgaaaacctgtttttaaaggaatacaatcttgctggaaagcatggaagtaggaaatttgatttaaacgagtaccgccaatacaatcttttgccgatatgtgataatgaattttgttatatgaaggtagtttgcggccataccattgtagtgttgactactaactacactcaaataataaatataaaagcaagtgggcttacaaacggggcttttttcaataataaaggtctcccaaatgtagaaaactaccaatttctaaaagattcttatgatgtgatatatgaaagatcagtcattctcttgacaatttctgacgtgtatgctaacaaatacactgccaagatacacactaggtcgttacatagagaccacgtcctgaaagaactacaatggacaaaagaaagagtgttcaagcctcctaaacatgatctatgcgatgttattttgcagctcccacgtgaaaagtatatagcggtgacaagaataaatggagtaaattttatatcgaaagatcatcgaggttcaaaattagaaaaggtgaaaagcggtcccgcttatacaaacaaagtttacctggcatcacaagttattggaaacaaggggacagatattgattcactgcttttgggtggaagttttaactcaagaagaggatttttagaaaagaaaattttggtatatgacaaaaccctgttcaagttagtgacttcctccaaagcgctagtagagaatgtaactgatttttgggttacagatttagcacttaatggtggtgacgaatttgcatatgaatcaggtgggttgatttataagaacggaatatttttaatggatgagccttatgattacggtctatttgtttctaggacgggaaaagttttgaaagccggtatggatggttctaccggagaatttaggcaggtcgatttcttgcagtcgaaccacaactcttccaccatgttttgttatcccgtacagaactccaagctcaggatttcgatacttgaggcaaaatctggttttctacgtaaaaaagaagaattttttatccatgggctcaattctaaagagagtattgtgagctgtttctcagatggtgccgagaaatacctttttgtcatttacttggacggtgtgttttcggtatggaatgccaatcaaaagaaagtggctacatcacatccagactattctttcatagcctatgatcaattgataaaaatatcttggctaagcaaaaagcataaacacgactcgatttatgtcatcgcatcatcatacactggctgcgtaagagtctacaaatcagaatcaaattttttgagagtggatttagagattcattcgttatacgatcagaaattagaactgttggatacgattccttccttacctttggttttcctttacaacgataaggaaataattttgttaaatcttcaaaacatgtcttatggttgcatacagttaggcttagttccaagacgaatgagaattcgacccggtaaagcactgttctctctttgtgttttagattatgattctcgaataagcatctttgagtttggtagcacgttttaccgtgaaggtttcactaagcagatgacttcattaaaacctcaattagaaaatcatatcttttacctccctagcattcccgtagagctctatactgttccaaataacctcaatcaggccgtggtgtgtttggtcgatagcaatagtaggcagtataagttgatgctattcaattatgcttcaatgaaggcagtttccacattcagtttctcggatgaaaagtatttacatgccgttgtgaagccactgtggccagaacaaaactcaatctacttatcacagagacccttttatggtaataagtttgttgtatgcttaggagttggtgaaaaacgtacaaaattctggctgtttgaaattagaaacaataacattacccaattgtacgcgaattatctcgaagattgtatattctcggtgttcatatactatgagtgcaacttggttttattttctggtgatagtggcatagcagcatataaaataaacatgctaaaagagggcgcggaaattttagaggcctattccttcccagcactttcatcgattaaccatataggtcttccagcttatatgagtggtgattatctggttcaatttgagatcttgagagattttttgagaacccgctttccaattaggacgtccatagtatatccatcagagtaccctgaatgtccctacttgggttttaagcggttgggaagcattacacaagtggcgactaaaataattcctaagaagctaagagaacctaaaaacgattgtttagcgagtgataagaactatctattaggtcgattatcagacctttcttgtgcaacgttgaaatattccaatagatcttatgttgccaccattggtattgataataccttgacaatatacgaagattctaaattatcagttgataagggcgggttggctatgccatacctcaaaattcggttacctaataagataatctcactggcggccatcccagatggatttcaaaaccttcaaatatgtccaaatttcaatagtcaaaggttggaaggcgtcatacctctatttttactttgcggtactgagggccaaatttatataatatcggaattcattggtgagctgtggatgagaacgttgcatgattacaaaaagatcaagctcgaatgtaaaagagcttttcgaaggtctgagaaaagcatgcgaaatgttactaaacaatattccgtgagtaaagagactggaataaatgaaagcggctttgatgagctagctagaaattcaaagagaagacatatagatcattcaccatacaagaccatagattttttcgatcctgtaaaactaaaaaggtga

SEQ ID NO: 2940 - DNA, 3567 bp, Artificial Sequence
  Description of Artificial Sequence: Synthetic polynucleotide
atggcaagacaagatgaaacggactgcaaaaaattggatagcaattctgcctttttacctttatgcataacatcttatagaagtaaagatgaggctgagaagttggtaagttgtcttcatcacgaaggaagttactttttatgttttagctatggattgtataccggaacgtccaacgaattgaaagcgaaggttgagttcgctttagatggaccgttcgttgttaactacgcaactgtaccgatgttcatgtctgcttccttctgtcacttattgatgtttaacgacggttccattaagggattcaaatgcgaaaataacaaatttgaaattatctacgactctaatgtggctccgaaattggatactatttctttattaacttccagctggttaaatgcttcctttgagggtgttttatacacttgcaataaaaacatatcttatgatagtgatttgcatacgttatgtacgacaatttactcctttgacttcagagaaggaatagtcgaaagattttatgccaccgatggcgaagaaattatctcctttgattttattagcagggaggatttgcttgacgacgccacatgcacaggtaaatctcacgtttattttctttgcttgcttaagagttgctatagtgaaaacttgtttttaaaggaatacaatcttgctggaaagcatggaagtaggaaatttgatttaaacgagtaccgccaatacaatcttttgccgatatgtgataatgaattttgttatatgaaggtagtttgcggccataccattgtagtgttgactactaactacactcaaataataaatataaaagcaagtgggcttacaaacggggcttttttcaataataaaggtctcccaaatgtagaaaactaccaatttttgaaagattcttatgatgtgatatatgaaagatctgtcattctcttgacaatttctgacgtgtatgctaacaaatacactgccaagatacacactaggtctttacatagagaccacgtcttgaaagaattacaatggacaaaagaaagagtgttcaagcctcctaaacatgatttatgcgatgttattttgcagctcccacgtgaaaagtatatagcggtgacaagaataaatggagtaaattttatatccaaagatcatagaggttccaaattagaaaaggtgaaaagcggtcccgcttatacaaacaaagtttacttggcatctcaagttattggaaacaaggggacagatattgattctttacttttgggtggaagttttaactctagaagaggatttttagaaaagaaaattttggtatatgacaaaacccttttcaagttagtgacttcctccaaagcgttggtagagaatgtaactgatttttgggttacagatttagcacttaatggtggtgacgaatttgcatatgaaagtggtgggttgatttataagaacggaatatttttaatggatgagccttatgattacggtttatttgtttctaggacgggaaaagttttgaaagccggtatggatggttctaccggagaatttaggcaggtcgatttcttgcagtccaaccacaactcttccaccatgttttgttatcccgtacagaactccaagctcaggatttctatacttgaggcaaaatctggttttttacgtaaaaaagaagaattttttatccatgggctcaattctaaagagagtattgtgagctgtttcagtgatggtgccgagaaatacctttttgtcatttacttggacggtgtgtttagcgtatggaatgccaatcaaaagaaagtggctacatctcatccagactattctttcatagcctatgatcaattgataaaaatatcttggttaagcaaaaagcataaacacgacagtatttatgtcatcgcatcttcctacactggctgcgtaagagtctacaaaagtgaaagtaattttttgagagtggatttagagattcattctttatacgatcagaaattagaattattggatacgattccttccttacctttggttttcctttacaacgataaggaaataattttgttaaatcttcaaaacatgtcttatggttgcatacagttaggcttagttccaagaagaatgagaattcgtcccggtaaagcattattctctctttgtgttttagattatgattctagaataagcatctttgagtttggtagcacgttttaccgtgaaggtttcactaagcagatgacttctttaaaacctcaattagaaaatcatatcttttacctccctagcattcccgtagagctctatactgttccaaataacctcaatcaggccgtggtgtgtttggtcgatagcaatagtaggcagtataagttgatgcttttcaattatgcttccatgaaggcagtttccacattcagtttcagtgatgaaaagtatttacatgccgttgtgaagccattatggccagaacaaaactctatctacttatctcagagacccttttatggtaataagtttgttgtatgcttaggagttggtgaaaaacgtacaaaattctggttatttgaaattagaaacaataacattacccaattgtacgcgaattatctcgaagattgtatattctctgtgttcatatactatgagtgcaacttggttttattttctggtgatagtggcatagcagcatataaaataaacatgttgaaagagggcgcggaaattttagaggcctattccttcccagcactttcttccattaaccatataggtcttccagcttatatgagtggtgattatttggttcaatttgagatcttgagagattttttgagaacccgctttccaattaggacgtccatagtatatccaagtgagtaccctgaatgtccctacttgggttttaagagattgggaagcattacacaagtggcgactaaaataattcctaagaagttgagagaacctaaaaacgattgtttagcgagtgataagaactatcttttaggtagattaagtgacctttcttgtgcaacgttgaaatattccaatagatcttatgttgccaccattggtattgataataccttgacaatatacgaagattctaaattaagtgttgataagggcgggttggctatgccatacctcaaaattagattacctaataagataatctctttagcggccatcccagatggatttcaaaaccttcaaatatgtccaaatttcaatagtcaaaggttggaaggcgtcatacctttatttttactttgcggtactgagggccaaatttatataatatctgaattcattggtgagttatggatgagaacgttgcatgattacaaaaagatcaagctcgaatgtaaaagagcttttagaaggtctgagaaaagcatgagaaatgttactaaacaatattccgtgagtaaagagactggaataaatgaaagcggctttgatgagttggctagaaattctaagagaagacatatagatcattctccatacaagaccatagattttttcgatcctgtaaaattgaaaaggtga

SEQ ID NO: 2941 - DNA, 648 bp, Saccharomyces cerevisiae
atgttaggaataagatcatctgtcaagacctgcttcaagccaatgtctttaacttccaaaagactgatttctcaatctttgctggctagcaaatccacgtacaggaccccaaattttgatgacgttttaaaggaaaataacgatgctgataaaggccgttcttatgcttactttatggtcggtgctatgggtcttttgtcatctgcaggtgccaaatcaaccgtagaaacctttatttcatctatgaccgctactgccgatgttttggctatggctaaagttgaagttaatttagcggctatcccattgggtaaaaacgtggttgtcaaatggcaaggtaagcctgtgttcattagacacagaactcctcatgaaattcaggaagccaacagtgtggatatgtccgctttgaaggacccacagaccgatgctgacagagtcaaagaccctcaatggttaattatgctgggtatttgtactcacttaggttgtgttccaattggtgaagccggtgattttggtggttggttctgtccttgccatggttcacattatgatatttccggtagaatcagaaagggacctgcccccttaaacttagaaattcctgcttatgaattcgatggtgataaggtcattgttggttag

SEQ ID NO: 2942 - DNA, 648 bp, Artificial Sequence
  Description of Artificial Sequence: Synthetic polynucleotide
atgttaggaataagatcttctgtcaagacctgcttcaagccaatgtctttaacttccaaaagattgatttctcaatctttgttggctagcaaatccacgtacaggaccccaaattttgatgacgttttaaaggaaaataacgatgctgataaaggccgttcttatgcttactttatggtcggtgctatgggtcttttgtcttctgcaggtgccaaatctaccgtagaaacctttatttcttctatgaccgctactgccgatgttttggctatggctaaagttgaagttaatttagcggctatcccattgggtaaaaacgtggttgtcaaatggcaaggtaagcctgtgttcattagacacagaactcctcatgaaattcaggaagccaacagtgtggatatgtccgctttgaaggacccacagaccgatgctgacagagtcaaagaccctcaatggttaattatgttgggtatttgtactcacttaggttgtgttccaattggtgaagccggtgattttggtggttggttctgtccttgccatggttctcattatgatatttccggtagaatcagaaagggacctgcccccttaaacttagaaattcctgcttatgaattcgatggtgataaggtcattgttggttga

SEQ ID NO: 2943 - DNA, 2049 bp, Saccharomyces cerevisiae
atggatagcttcaattatattcatggaaaatataaaaaaaatgggacgggaggcgacagaagtataaatccatcctcacattcatcgtctggcaagaatatcattctttgttttgatggaacaagagaaaattttggacctcagccattcactaatattttaaaattgtacaaccttcttgagaacggtgatagttctgaacaaatttgttattaccaacctggaattggttcagttggatttgacgctgttgttgatgtcagaagacggttaactatttctcacttacaaaatttattagattctatgttcgcattcagtttagacaatcacatatgttctgcatatctttttttgatgaagtattttgaaccaggagatagaatttatatgtttggcttttctagaggagcttttattgcaagagttcttgctggaatgattgaaagagtcggacttttgagtaaaggtttggaagaaatggttaaaatggcatggcaaatctatgaaaaatgggaatacgattcgcagcctaatgaattacagtacacaagtaccttggctgaagaattcaagaaaacattctctagggattacgaggtaaagatacattttcaaggcttattcgattctgtgaactcagttggaatattaagggacaggttgtttccttgcacccagagaagcaatatcgttgagcatgttcgacattgcgtatccttggatgaaagacgtggaaaattcaagcagttatgtttcactccgatgccgtacattccgaaactattttcattgacatattgtaatcatataactgaccagtgttcgccggtgccaacttctaatgcattaatgcgtgatctaaccccggaaaatcctttgataaaatacactttaaaaagtggcgcacattctattagtaatccttctccactcattcctgataaccctggaaggttgttatcgagcaaaagcgaggaaactacagagttgctgttggacctgaactcattcttagaaggtaattcatacgcgagagatacagaatgttcaacaagaggaattgaagccattttccaacttcaatctatccaaggcagcggtacatcaagtagaatgactatgacacccgacttgattgaaaaatggtttccaggtgatcattctgacgttggtggaggttgggcgcctgactgtgagacagaagagaacttgtcaaatttaacgctgcgatggattttagcagaggcaatcaaatttggtgttaaattcaaacctggtgcaatacatgatttcgctaccaaacacacttcgattggatctttattcgcagacacacatgattaccttagtttcaactcaccaaagaaatgttccctactaggagtgagtgataatgaggatggagcccgagaggataaatctggcagaaatgagagaatggaagattgtctaaaaaatataaaagagactagattgagcttgaaagatgaaaaagaaaaagtgaaggatgcttttactcttaaatgtggacatgcaaataaatttatgagattggtgtggtgggtattggaactgctccccattggaatacgaatggaaaataaagaaggaaagtggcaaaattttcatacacctaacctcggaagatctcgttatgtacccgaatatgtcagtttacattggtcagtctattggagaattaagtttgatcgtaggtatagaccggacaatatgccggaatatgtaaggcaattgttccaagatttggaaggtattgatttaaaaagtaataaagtttcaaataaatatgataagcaagataatagcaacgggagtgaaatcaatgggggcttttttgataatgaggaagggcaggaactccacatgggtcaaaaagcaagttattttgcaacgacatacaattcaagattatttgacagtaaatactcccaattaaaaaagaaattcatggactgggatagtaattcctggacagatattccagatgatttaaaaatatacctacagcaagatgaatcgctttag

SEQ ID NO: 2944 - DNA, 2049 bp, Artificial Sequence
  Description of Artificial Sequence: Synthetic polynucleotide
atggatagcttcaattatattcatggaaaatataaaaaaaatgggacgggaggcgacagaagtataaatccatcctctcattcttcttctggcaagaatatcattctttgttttgatggaacaagagaaaattttggacctcagccattcactaatattttaaaattgtacaaccttcttgagaacggtgatagttctgaacaaatttgttattaccaacctggaattggttctgttggatttgacgctgttgttgatgtcagaagaagattaactatttctcacttacaaaatttattagattctatgttcgcattcagtttagacaatcacatatgttctgcatatctttttttgatgaagtattttgaaccaggagatagaatttatatgtttggcttttctagaggagcttttattgcaagagttcttgctggaatgattgaaagagtcggacttttgagtaaaggtttggaagaaatggttaaaatggcatggcaaatctatgaaaaatgggaatacgattctcagcctaatgaattacagtacacaagtaccttggctgaagaattcaagaaaacattctctagggattacgaggtaaagatacattttcaaggcttattcgattctgtgaactctgttggaatattaagggacaggttgtttccttgcacccagagaagcaatatcgttgagcatgttcgccattgcgtatccttggatgaaagacgtggaaaattcaagcagttatgtttcactccgatgccgtacattccgaaattattttctttgacatattgtaatcatataactgaccagtgttctccggtgccaacttctaatgcattaatgcgtgatttgaccccggaaaatcctttgataaaatacactttaaaaagtggcgcacattctattagtaatccttctccactcattcctgataaccctggaaggttgttatccagcaaaagcgaggaaactacagagttgttgttggacttgaactctttcttagaaggtaattcttacgcgagagatacagaatgttctacaagaggaattgaagccattttccaacttcaatctatccaaggcagcggtacatctagtagaatgactatgacacccgacttgattgaaaaatggtttccaggtgatcattctgacgttggtggaggttgggcgcctgactgtgagacagaagagaacttgagcaatttaacgcttcgttggattttagcagaggcaatcaaatttggtgttaaattcaaacctggtgcaatacatgatttcgctaccaaacacacttctattggatctttattcgcagacacacatgattaccttagtttcaactctccaaagaaatgttccttattaggagtgagtgataatgaggatggagccagagaggataaatctggcagaaatgagagaatggaagattgtttgaaaaatataaaagagactagattgagcttgaaagatgaaaaagaaaaagtgaaggatgcttttactcttaaatgtggacatgcaaataaatttatgagattggtgtggtgggtattggaattactccccattggaataagaatggaaaataaagaaggaaagtggcaaaattttcatacacctaacctcggaagatctcgttatgtacccgaatatgtcagtttacattggtctgtctattggagaattaagtttgatcgtaggtatagaccggacaatatgccggaatatgtaaggcaattgttccaagatttggaaggtattgatttaaaaagtaataaagtttctaataaatatgataagcaagataatagcaacgggagtgaaatcaatgggggcttttttgataatgaggaagggcaggaactccacatgggtcaaaaagcaagttattttgcaacgacatacaattctagattatttgacagtaaatactcccaattaaaaaagaaattcatggactgggatagtaattcctggacagatattccagatgatttaaaaatatacttacagcaagatgaatctctttga

SEQ ID NO: 2945 - DNA, 4380 bp, Saccharomyces cerevisiae
atgagtgatagggaattcgtcacggtagatcccgtcactatcataatcaaagaatgcattaatttatcgacagcgatgcggaaatactctaaatttacctctcaatctggagtggccgctttgctggggggaggaagtgaaatatttagcaatcaagatgactacttggctcacacattcaacaatttgaataccaacaagcacaatgatccatttttatctggattcattcagttaagacttatgttgaataaactgaaaaatctagataatatagattcactaaccatattgcagccatttttattaattgtgagtacaagttccatttctggttacatcacttccctggccctggactctttgcagaaattctttaccttgaatatcatcaatgaatcatcgcaaaactatattggtgcacacagggcgacggtaaatgctctaacacattgtaggtttgaaggatctcaacaactttctgatgattcagttcttttgaaagtcgtgtttttactgcgttcaatcgtcgactcaccttacggagatttattatcaaactctatcatatatgacgtattgcaaacgattctttcattggcttgtaataacagaaggagcgaagtccttaggaatgctgcacaatcaacaatgatagccgttaccgtaaagattttctcaaaactaaagactattgagcctgttaatgtgaatcaaatatacatcaatgatgaaagttacacaaatgatgtattgaaggccgatacaattggcacaaatgtagaatccaaagaagaaggaagtcaagaagatcccatcggcatgaaagtgaataatgaggaagctattagcgaggacgatggcattgaagaagagcatattcattcagagaagagcacaaatggcgccgaacaactagatattgtgcaaaaaacaacaagatcaaattccaggatccaagcgtatgctgatgataactatggattgcccgtggttaggcaatatttaaacttattactatcattgattgcgccagaaaatgaattaaaacattcatactccactagaatatttggcctagagttaattcaaacggcattagaaatttcaggtgatcgattgcagctatacccacggctttttacactgatatcagatcctattttcaaaagcattttgtttatcatacagaacactacaaaattatcactacttcaagctacattgcagctatttactactctagttgttatattgggcaacaacttacaattacagatcgagctcactctaacaagaatattttctattcttttagatgatggtaccgcaaataactcgagttctgaaaataagaacaagccatcaataataaaggaacttctaattgagcaaatatccatcttatggactaggtcgccatctttttttacttctacttttatcaatttcgattgtaatctcgatagggcagacgtttccataaactttttgaaggctttgactaaattggccttaccagaatccgccttaactaccacagaaagtgtaccacccatttgccttgagggattggtctccctagtcgatgatatgttcgatcacatgaaggacattgacagagaagaatttggcaggcaaaagaatgaaatggaaatcttaaaaaagagggaccgtaaaacagagtttattgaatgtaccaatgcattcaatgaaaagcccaaaaagggtattccgatgttaatagaaaaaggtttcattgcttccgactccgataaagatattgcggagtttcttttcaataataacaaccgtatgaataaaaaaacaatcggtttgctactttgccatccggacaaagtaagcttgttgaatgaatatattcgtttgtttgatttttcagggttaagggtcgatgaagctattagaattttgttgacgaaatttaggttgcctggtgaatcgcaacaaattgaaagaatcatcgaagccttctcgtctgcgtattgtgaaaatcaagattacgatccatccaaaatcagtgacaacgcggaggatgacatttctactgttcaaccagacgctgattctgttttcattttaagttattcaattattatgttgaacactgacctacataaccctcaagtgaaggaacacatgtcatttgaagattactctggtaacttaaagggatgctgtaatcacaaagacttcccattctggtatttggatagaatttactgttcaatcagagataaagaaattgttatgcctgaagagcaccacggcaacgaaaagtggtttgaagatgcttggaataacttgatatcttcaactactgttataactgaaataaaaaaagacacacaatctgtcatggataaattaacacccttggagcttttgaactttgatagagcaatttttaaacaagttggcccaagtattgtcagtactttattcaacatttacgtagttgcatctgatgaccatatatctaccagaatgataacaagtttggacaaatgttcctatatttccgcattttttgacttcaaagatctctttaatgatatactaaactccattgctaagggcactactttgattaattcaagccatgacgatgaactttcaactttagcttttgaatatggcccaatgccactggtgcaaattaaattcgaagacactaacactgagatcccggttagtacagatgctgttagatttggtagatcatttaagggtcaactaaatacagttgtttttttccggattattcgcaggaacaaagatcctaaaattttctccaaggaattatggttaaacattgttaatattatactaacattgtacgaagacttgattttgtctcctgatattttccctgatttacaaaaaagactgaaattaagcaacttgcctaagccatctcctgaaatttctattaacaagagcaaagaaagcaaaggtctcttatcaacatttgcttcttatttaaaaggtgatgaagaacccacagaagaggaaatcaaatcctcaaaaaaagcgatggagtgcataaagtcgagtaatattgccgcctctgtctttggaaatgaatcaaatataacagcggatttaataaaaactttactagactccgccaaaactgagaaaaacgcagataattccaggtattttgaagcagaacttttatttatcatcgaattgactattgcattatttctattttgcaaagaggagaaagaattaggaaagttcatacttcaaaaagttttccaactttctcacacgaaaggcctcacgaaaaggactgttcgtagaatgctaacatacaaaattttgttaatttcgttatgtgcggatcagacggagtacttgtccaaattaataaacgatgagctgttaaaaaagggggatatttttacccaaaaattttttgcaactaatcaaggtaaggaatttttgaagagactattttcattgaccgaatcagagttttatagaggatttttactaggaaatgagaatttttggaaatttttaagaaaagttacagcaatgaaagagcagagcgagagcatttttgaatatttaaatgaatcgatcaagacagacagcaatattttgacaaatgagaacttcatgtgggtcctaggactattagatgaaatttcatcaatgggtgccgttggaaatcactgggaaatagaatacaagaaattgacagaaagtggtcataaaattgataaggagaatccatacaagaaatcgatcgaattatcattgaaatccattcaactaacatcacacttgctggaagataataacgatctgcgtaaaaacgagatattcgctattattcaagctttggcacatcaatgcatcaatccgtgtaagcagataagtgaatttgcagtggtaacgctagagcagacgctcatcaataaaatcgaaattccaactaatgagatggaatcggtagaagaattaattgagggcggattactaccgttgctaaattcgagtgaaacacaggaagaccagaaaatcctcatttcatccatattaacaataatttcaaatgtttatttgcattatttgaaactagggaagacaagcaacgaaacgtttttgaaaattttgagtattttcaataaatttgtagaggactcagatattgaaaaaaagctacagcaattaatacttgataagaagagtattgagaagggcaacggttcatcatctcatggatctgcacatgaacaaacaccagagtcaaacgacgttgaaattgaggctactgcgccaattgatgacaatacagacgatgataacaaaccgaagttatctgatgtagaaaaggattaa

SEQ ID NO: 2946 - DNA, 4380 bp, Artificial Sequence
  Description of Artificial Sequence: Synthetic polynucleotide
atgagtgatagggaattcgtcacggtagatcccgtcactatcataatcaaagaatgcattaatttatctacagcgatgagaaaatactctaaatttacctctcaatctggagtggccgctttgttggggggaggaagtgaaatatttagcaatcaagatgactacttggctcacacattcaacaatttgaataccaacaagcacaatgatccatttttatctggattcattcagttaagacttatgttgaataaattgaaaaatttggataatatagattctttaaccatattgcagccatttttattaattgtgagtacaagttccatttctggttacatcacttccttggccttggactctttgcagaaattctttaccttgaatatcatcaatgaaagttctcaaaactatattggtgcacacagggcgacggtaaatgctttaacacattgtaggtttgaaggatctcaacaactttctgatgattctgttcttttgaaagtcgtgtttttattacgttccatcgtcgactctccttacggagatttattatctaactctatcatatatgacgtattgcaaacgattctttctttggcttgtaataacagaaggagcgaagtccttaggaatgctgcacaaagtacaatgatagccgttaccgtaaagattttctccaaattgaagactattgagcctgttaatgtgaatcaaatatacatcaatgatgaaagttacacaaatgatgtattgaaggccgatacaattggcacaaatgtagaatccaaagaagaaggaagtcaagaagatcccatcggcatgaaagtgaataatgaggaagctattagcgaggacgatggcattgaagaagagcatattcattctgagaagagcacaaatggcgccgaacaattggatattgtgcaaaaaacaacaagatctaattccaggatccaagcgtatgctgatgataactatggattgcccgtggttaggcaatatttaaacttattattatctttgattgcgccagaaaatgaattaaaacattcttactccactagaatatttggcttagagttaattcaaacggcattagaaatttctggtgatagattgcagttatacccaaggctttttacattaatatctgatcctattttcaaaagcattttgtttatcatacagaacactacaaaattaagtttacttcaagctacattgcagttatttactactttggttgttatattgggcaacaacttacaattacagatcgagctcactttgacaagaatattttctattcttttagatgatggtaccgcaaataacagtagttctgaaaataagaacaagccaagtataataaaggaacttttgattgagcaaatatccatcttatggactaggtctccatctttttttacttctacttttatcaatttcgattgtaatctcgatagggcagacgtttccataaactttttgaaggctttgactaaattggccttaccagaatccgccttaactaccacagaaagtgtaccacccatttgccttgagggattggtctccttggtcgatgatatgttcgatcacatgaaggacattgacagagaagaatttggcaggcaaaagaatgaaatggaaatcttaaaaaagagggaccgtaaaacagagtttattgaatgtaccaatgcattcaatgaaaagcccaaaaagggtattccgatgttaatagaaaaaggtttcattgcttccgactccgataaagatattgcggagtttcttttcaataataacaaccgtatgaataaaaaaacaatcggtttgttactttgccatccggacaaagtaagcttgttgaatgaatatattcgtttgtttgatttttctgggttaagggtcgatgaagctattagaattttgttgacgaaatttaggttgcctggtgaatctcaacaaattgaaagaatcatcgaagccttcagttctgcgtattgtgaaaatcaagattacgatccatccaaaatcagtgacaacgcggaggatgacatttctactgttcaaccagacgctgattctgttttcattttaagttattctattattatgttgaacactgacttgcataaccctcaagtgaaggaacacatgagttttgaagattactctggtaacttaaagggatgctgtaatcacaaagacttcccattctggtatttggatagaatttactgttctatcagagataaagaaattgttatgcctgaagagcaccacggcaacgaaaagtggtttgaagatgcttggaataacttgatatcttctactactgttataactgaaataaaaaaagacacacaatctgtcatggataaattaacacccttggagcttttgaactttgatagagcaatttttaaacaagttggcccaagtattgtcagtactttattcaacatttacgtagttgcatctgatgaccatatatctaccagaatgataacaagtttggacaaatgttcctatatttccgcattttttgacttcaaagatctctttaatgatatattaaactccattgctaagggcactactttgattaatagtagccatgacgatgaactttctactttagcttttgaatatggcccaatgccattggtgcaaattaaattcgaagacactaacactgagatcccggttagtacagatgctgttagatttggtagatcttttaagggtcaattgaatacagttgtttttttcagaattattcgcaggaacaaagatcctaaaattttctccaaggaattatggttaaacattgttaatattatattaacattgtacgaagacttgattttgtctcctgatattttccctgatttacaaaaaagattgaaattaagcaacttgcctaagccatctcctgaaatttctattaacaagagcaaagaaagcaaaggtctcttatctacatttgcttcttatttaaaaggtgatgaagaacccacagaagaggaaatcaaatcctctaaaaaagcgatggagtgcataaagagtagtaatattgccgcctctgtctttggaaatgaaagtaatataacagcggatttaataaaaactttattagactccgccaaaactgagaaaaacgcagataattccaggtattttgaagcagaacttttatttatcatcgaattgactattgcattatttttgttttgcaaagaggagaaagaattaggaaagttcatacttcaaaaagttttccaactttctcacacgaaaggcctcacgaaaaggactgttcgtagaatgttaacatacaaaattttgttaatttctttatgtgcggatcagacggagtacttgtccaaattaataaacgatgagttattaaaaaagggggatatttttacccaaaaattttttgcaactaatcaaggtaaggaatttttgaagagattattttctttgaccgaaagtgagttttatagaggatttttattaggaaatgagaatttttggaaatttttaagaaaagttacagcaatgaaagagcagagcgagagcatttttgaatatttaaatgaaagtatcaagacagacagcaatattttgacaaatgagaacttcatgtgggtccttggattattagatgaaatttcttctatgggtgccgttggaaatcactgggaaatagaatacaagaaattgacagaaagtggtcataaaattgataaggagaatccatacaagaaatctatcgaattatctttgaaatccattcaattgacaagtcacttgttggaagataataacgatttacgtaaaaacgagatattcgctattattcaagctttggcacatcaatgcatcaatccgtgtaagcagataagtgaatttgcagtggtaacgttggagcagacgctcatcaataaaatcgaaattccaactaatgagatggaaagtgtagaagaattaattgagggcggattattaccgttgttgaatagtagtgaaacacaggaagaccagaaaatcctcatttcttccatattaacaataatttctaatgtttatttgcattatttgaaattggggaagacaagcaacgaaacgtttttgaaaattttgagtattttcaataaatttgtagaggacagtgatattgaaaaaaagttacagcaattaatacttgataagaagagtattgagaagggcaacggttcttcttctcatggatctgcacatgaacaaacaccagagagcaacgacgttgaaattgaggctactgcgccaattgatgacaatacagacgatgataacaaaccgaagttatctgatgtagaaaaggattga

SEQ ID NO: 2947 - DNA, 804 bp, Saccharomyces cerevisiae
atgtcgaaagctacatataaggaacgtgctgctactcatcctagtcctgttgctgccaagctatttaatatcatgcacgaaaagcaaacaaacttgtgtgcttcattggatgttcgtaccaccaaggaattactggagttagttgaagcattaggtcccaaaatttgtttactaaaaacacatgtggatatcttgactgatttttccatggagggcacagttaagccgctaaaggcattatccgccaagtacaattttttactcttcgaagacagaaaatttgctgacattggtaatacagtcaaattgcagtactctgcgggtgtatacagaatagcagaatgggcagacattacgaatgcacacggtgtggtgggcccaggtattgttagcggtttgaagcaggcggcggaagaagtaacaaaggaacctagaggccttttgatgttagcagaattgtcatgcaagggctccctagctactggagaatatactaagggtactgttgacattgcgaagagcgacaaagattttgttatcggctttattgctcaaagagacatgggtggaagagatgaaggttacgattggttgattatgacacccggtgtgggtttagatgacaagggagacgcattgggtcaacagtatagaaccgtggatgatgtggtctctacaggatctgacattattattgttggaagaggactatttgcaaagggaagggatgctaaggtagagggtgaacgttacagaaaagcaggctgggaagcatatttgagaagatgcggccagcaaaactaa

SEQ ID NO: 2948 - DNA, 804 bp, Artificial Sequence
  Description of Artificial Sequence: Synthetic polynucleotide
atgtccaaagctacatataaggaacgtgctgctactcatcctagtcctgttgctgccaagttatttaatatcatgcacgaaaagcaaacaaacttgtgtgcttctttggatgttcgtaccaccaaggaattattggagttagttgaagcattaggtcccaaaatttgtttattgaaaacacatgtggatatcttgactgatttttccatggagggcacagttaagccgttgaaggcattatccgccaagtacaattttttactcttcgaagacagaaaatttgctgacattggtaatacagtcaaattgcagtactctgcgggtgtatacagaatagcagaatgggcagacattacgaatgcacacggtgtggtgggcccaggtattgttagcggtttgaagcaggcggcggaagaagtaacaaaggaacctagaggccttttgatgttagcagaattgtcttgcaagggctccttggctactggagaatatactaagggtactgttgacattgcgaagagcgacaaagattttgttatcggctttattgctcaaagagacatgggtggaagagatgaaggttacgattggttgattatgacacccggtgtgggtttagatgacaagggagacgcattgggtcaacagtatagaaccgtggatgatgtggtctctacaggatctgacattattattgttggaagaggattatttgcaaagggaagggatgctaaggtagagggtgaacgttacagaaaagcaggctgggaagcatatttgagaagatgcggccagcaaaactga

SEQ ID NO: 2949 - DNA, 264 bp, Saccharomyces cerevisiae
atggacgcattgaactccaaagaacaacaagagttccaaaaagtagtggaacaaaagcaaatgaaggatttcatgcgtttgtactctaatctggtagaaagatgtttcacagactgtgtcaatgacttcacaacatcaaagctaaccaataaggaacaaacatgcatcatgaagtgctcagaaaagttcttgaagcatagcgaacgtgtagggcagcgtttccaagaacaaaacgctgccttgggacaaggcttgggccgataa

SEQ ID NO: 2950 - DNA, 264 bp, Artificial Sequence
  Description of Artificial Sequence: Synthetic polynucleotide
atggacgcattgaactccaaagaacaacaagagttccaaaaagtagtggaacaaaagcaaatgaaggatttcatgcgtttgtactctaatttggtagaaagatgtttcacagactgtgtcaatgacttcacaacatccaagttgaccaataaggaacaaacatgcatcatgaagtgcagtgaaaagttcttgaagcatagcgaacgtgtagggcagcgtttccaagaacaaaacgctgccttgggacaaggcttgggccgttga

SEQ ID NO: 2951 - DNA, 1683 bp, Saccharomyces cerevisiae
atgaccacgaccgctacccaacacttcgctcaacttttacaaaaatatggcatcgacacagtctttggaattgtgggcatccctattgtccaactagcggatacgatggttgccaacggtatcaaattcattccatgcaggaacgaacaggctgcctcatatgcagcctctgcttatggttatattagtgataagcccggcgtgttacttattgtcgggggccccggtttaatccacgcactggctggtatatacaactcaatgagtaataggtggcctcttctagtaattgcagggagttcttctcaaagtgatatacataaaggcgggtttcaagagttggatcaagttagtcttttgtccccatttttgaagtttaccggaaagttaacccctgacaatattgacatgattactcagaaggctttgaattactgtatacaaggcactgcaggggtttcttacatagacgtccctgcagattttattgagtatgaaaaacccttagaaggaaacgaccgtacaggaaatgaattaccgatgatattaactccaaacatatgtggccctgatccgtcgaagatcaaaaaagtcgtacagcttattttgcaacataaaaataaaaatattctgattgttattggaaagggtgcggtaaaaaactcacacgaaatccgcagactagtaaatacgttcaatctaccatttttacccaccccaatggctaagggaattgtcccagactcttctccactgaacgtttcatctgcaagatctcaagcattgaaaatagcggatattgttcttgttctcggggcaagattaaactggatattgcattttggtacttcacccaaatggaactcagaatccatattcatccagttcgattccaatcccgaaaccttgggggataacaatgtctcacctggtgctgacctttccatatggggagatataggcttgagcgtaaccgctttagttgaggaattgactcgccaagattcctgctggaagtatagtggtgttaagcaagaaatacgagagaaaattcaactgaatcaaactcgtctattgaggaaagagaagactagaggggcacaattgaattacaaccaggtttatggaacattgaggcctcttatcgatgattacaggacaatacttgtgacggagggagcaaatactatggatattgcgcgtatttcattccctacagacgctccaaggcgccgtttagacgcagggaccaacgcgactatggggattgggctcggatatgctcttgcatgcaaggcatctcatccggaactcgatgtggtgctgattcagggtgattccgcatttggattctctgccatggaaattgaaacggcagtaaggtgtcagctggcattggtcatcgttgtgatgaacaatagcggtatttaccatggagaaaaggatatagagggtgatttacctccaacggcactaagcaagaactgccgttacgatctcgtaggcaaaggactgggtgccaatgatttttttgtcaacacaataagcgaactgagcagatgcttccaacaagccgtgcagctttctcggactaaaagagaaacaagtgtcatcaacgttatcattgagcctggcgaacaaaagcaaattgcctttgcctggcagaataaaccgcgtttatag

SEQ ID NO: 2952 - DNA, 1683 bp, Artificial Sequence
  Description of Artificial Sequence: Synthetic polynucleotide
atgaccacgaccgctacccaacacttcgctcaacttttacaaaaatatggcatcgacacagtctttggaattgtgggcatccctattgtccaattggcggatacgatggttgccaacggtatcaaattcattccatgcaggaacgaacaggctgcctcttatgcagcctctgcttatggttatattagtgataagcccggcgtgttacttattgtcgggggccccggtttaatccacgcattggctggtatatacaactccatgagtaataggtggcctcttttggtaattgcagggagttcttctcaaagtgatatacataaaggcgggtttcaagagttggatcaagttagtcttttgtccccatttttgaagtttaccggaaagttaacccctgacaatattgacatgattactcagaaggctttgaattactgtatacaaggcactgcaggggtttcttacatagacgtccctgcagattttattgagtatgaaaaacccttagaaggaaacgaccgtacaggaaatgaattaccgatgatattaactccaaacatatgtggccctgatccgtccaagatcaaaaaagtcgtacagcttattttgcaacataaaaataaaaatattttaattgttattggaaagggtgcggtaaaaaactctcacgaaatccgcagattggtaaatacgttcaatttaccatttttacccaccccaatggctaagggaattgtcccagactcttctccattgaacgtttcttctgcaagatctcaagcattgaaaatagcggatattgttcttgttctcggggcaagattaaactggatattgcattttggtacttctcccaaatggaactctgaatccatattcatccagttcgattccaatcccgaaaccttgggggataacaatgtctctcctggtgctgacctttccatatggggagatataggcttgagcgtaaccgctttagttgaggaattgactcgccaagattcctgctggaagtatagtggtgttaagcaagaaataagagagaaaattcaattgaatcaaactcgtttattgaggaaagagaagactagaggggcacaattgaattacaaccaggtttatggaacattgaggcctcttatcgatgattacaggacaatacttgtgacggagggagcaaatactatggatattgcgcgtatttctttccctacagacgctccaaggcgccgtttagacgcagggaccaacgcgactatggggattgggctcggatatgctcttgcatgcaaggcatctcatccggaactcgatgtggtgttgattcagggtgattccgcatttggattctctgccatggaaattgaaacggcagtaaggtgtcagttagcattggtcatcgttgtgatgaacaatagcggtatttaccatggagaaaaggatatagagggtgatttacctccaacggcattaagcaagaactgccgttacgatctcgtaggcaaaggattaggtgccaatgatttttttgtcaacacaataagcgaattgagcagatgcttccaacaagccgtgcagctttctagaactaaaagagaaacaagtgtcatcaacgttatcattgagcctggcgaacaaaagcaaattgcctttgcctggcagaataaaccgcgtttatga

SEQ ID NO: 2953 - DNA, 804 bp, Saccharomyces cerevisiae
atggccttgaacgataatcctatacccaagtcagttcctctacacccaaaatcaggtaagtacttccataatttacatgcccgagacttatcaaatatatatcaacaatgctacaaacaaattgatgagaccataaatcaattagtggattctacatctccttccaccatcggcattgaagagcaggtcgcagatattactagcacctacaaactcctctcgacatacgaatcggaatccaactcatttgacgaacatattaaagatttaaaaaaaaatttcaaacaatcctcagatgcctgtccgcaaatcgacctttctacctgggataaatatcgtaccggagaactcaccgctcccaaattatctgaattatatctaaatatgcccacaccagagcctgcaaccatggttaataacacagatacactcaagatactaaaagtgttgccgtacatatggaatgatccaacttgtgtaataccggatctgcaaaaccccgcagacgaagacgatctacaaatagaaggtggtaaaattgaattgacttgtcctatcacctgcaaaccttacgaagcaccattgatatcaagaaaatgtaatcacgtcttcgatagagacggcattcaaaactatttacaaggatacacgacaagagattgcccgcaagcagcgtgttctcaagtcgtttcaatgagggattttgtaagagaccctattatggaactaaggtgtaagatcgccaagatgaaagaatctcaggaacaggataaaagaagtagtcaagccatcgatgttttatga

SEQ ID NO: 2954 - DNA, 804 bp, Artificial Sequence
  Description of Artificial Sequence: Synthetic polynucleotide
atggccttgaacgataatcctatacccaagtctgttcctttacacccaaaatctggtaagtacttccataatttacatgccagagacttatccaatatatatcaacaatgctacaaacaaattgatgagaccataaatcaattagtggattctacatctccttccaccatcggcattgaagagcaggtcgcagatattactagcacctacaaactcctctccacatacgaaagtgaatccaactcttttgacgaacatattaaagatttaaaaaaaaatttcaaacaatccagtgatgcctgtccgcaaatcgacctttctacctgggataaatatcgtaccggagaactcaccgctcccaaattatctgaattatatttgaatatgcccacaccagagcctgcaaccatggttaataacacagatacactcaagatattgaaagtgttgccgtacatatggaatgatccaacttgtgtaataccggatttgcaaaaccccgcagacgaagacgatttgcaaatagaaggtggtaaaattgaattgacttgtcctatcacctgcaaaccttacgaagcaccattgatatctagaaaatgtaatcacgtcttcgatagagacggcattcaaaactatttacaaggatacacgacaagagattgcccgcaagcagcgtgttctcaagtcgtttctatgagggattttgtaagagaccctattatggaattgaggtgtaagatcgccaagatgaaagaatctcaggaacaggataaaagaagtagtcaagccatcgatgttttatga

SEQ ID NO: 2955 - DNA, 840 bp, Saccharomyces cerevisiae
atggataaagaggtaagtgaattggtagtgttgcagctaatacacactttaatttccaacaagaatgaagaactggttaggaacgggggaggaatcaacatgattgggaataatcttcgaatatcgctagtcaagttgactaacgaaatacaaaacaatttgctaatcaacgagctgacaaatttaagaaggcaaagcaacgtggcaaatggaaacaggaaactgggcatcaacgatatcctgaccatagttaagaatttattcccagagtacagaacaacactaaacgatggacaacttagtctacacggtttggaaatgcatgatatcgagaagctccttgacgaaaagtacgatcgattcaagaaaacgcaggtcgaacaaataaggatgatggaggatgagatattgaagaacggtataaagaccggtgcatcgcaactgcaaccacatgcaaatgctggcaaaagtggatctgctggtaccagtgctactataactacgactacgccacacatggcgcattcaatggacccaaaaagagaaaaactattgaaattatacagagataccgttctgaataaattggaaagtaaaactgggaattttcagaagctattcaagagtcccgatggtagcattatcaagaatgagataaattacgaagacataaagaacgaaacgcccggcagcgttcatgaactgcagctgattcttcaaaagagcataacggacggtgtaatgcgaaaggtcattggtacggacgactggaaattggctagacaagtgcagtttgaattggatgatacggtgcagttcatgagaagagcactagagtaa

SEQ ID NO: 2956 - DNA, 840 bp, Artificial Sequence
  Description of Artificial Sequence: Synthetic polynucleotide
atggataaagaggtaagtgaattggtagtgttgcagttgatacacactttaatttccaacaagaatgaagaattggttaggaacgggggaggaatcaacatgattgggaataatcttagaatatctttggtcaagttgactaacgaaatacaaaacaatttgttgatcaacgagttgacaaatttaagaaggcaaagcaacgtggcaaatggaaacaggaaattgggcatcaacgatatcttgaccatagttaagaatttattcccagagtacagaacaacattgaacgatggacaacttagtttacacggtttggaaatgcatgatatcgagaagctccttgacgaaaagtacgatagattcaagaaaacgcaggtcgaacaaataaggatgatggaggatgagatattgaagaacggtataaagaccggtgcatctcaattacaaccacatgcaaatgctggcaaaagtggatctgctggtaccagtgctactataactacgactacgccacacatggcgcattctatggacccaaaaagagaaaaacttttgaaattatacagagataccgttttgaataaattggaaagtaaaactgggaattttcagaagcttttcaagagtcccgatggtagcattatcaagaatgagataaattacgaagacataaagaacgaaacgcccggcagcgttcatgaattacagttgattcttcaaaagagcataacggacggtgtaatgagaaaggtcattggtacggacgactggaaattggctagacaagtgcagtttgaattggatgatacggtgcagttcatgagaagagcattagagtga

SEQ ID NO: 2957 - DNA, 132 bp, Saccharomyces cerevisiae
atgttgatgagcacgttaccaggtggtgttatcttagtttttattctagtcggtttggcttgtatcgccatcatttctaccattatctacagaaaatggcaagctagacaaagaggtttacaaagattctaa

SEQ ID NO: 2958 - DNA, 132 bp, Artificial Sequence
  Description of Artificial Sequence: Synthetic polynucleotide
atgttgatgagcacgttaccaggtggtgttatcttagtttttattttagtcggtttggcttgtatcgccatcatttctaccattatctacagaaaatggcaagctagacaaagaggtttacaaagattctga

SEQ ID NO: 2959 - DNA, 1014 bp, Saccharomyces cerevisiae
atgccgaccaagtcaacttttagtcgctggaagaaggcggacctaattgacctggccaacaagctggaaattgacggcttccccaattatgccaagaagagtgatatgatcgattacctcgaatcgcacttgaatcatcttgagaaacctgtggattttaaagacgactacccggaactaaggtccttttatgagtcgatgacagtggaccagtcaaaggatgaacggaacgaatacggatccggatctggaaacgggtctgggtctggatcctgtgacaccgccacaaatgattccgatctggagaaagcgtacatcaaggaggatgatgatgagaaaccgcaatcaggcgatgaaacaagcgcgacaaagccgctttccagcaggaatgcaaattcaaacgccaaaacgaacttcaatttgttggattttagcacagataacgactcgtccacctctgcgtttactaagttcaagtttaactttcaggaatacctctccgatattagataccaaacgcagaaattgaatgaaaatgttcaggactatctttccactatttccgccgtcgatacgattttttccttgttggaattctcttttctggtgagaaacatattagccgccgggcagccaacttcttcttcttcgctcgcatcgtcgctggaagccgccgttgccgcccataataaatatcaatacacgctcgatttctgtttaccaatactcacgtggctgctcttctttaggggtattccaacgttagtgtcatactacatcaacttcatccgctacgacctgaacatcgagttggacccgatgactttcaatctcacgaaattcttgatttctttggcaatcttcaaaacttgtaataataaaaacatagatttccattcttttcgatgtgttaaccaactatggacacaactctgtacagtgaaccgttcccttggtatggtacctctagtattctccatggttagttgtctcctcactctatacgtattatag

SEQ ID NO: 2960 - DNA, 1014 bp, Artificial Sequence
  Description of Artificial Sequence: Synthetic polynucleotide
atgccgaccaagtctacttttagtcgctggaagaaggcggacttgattgacttggccaacaagttggaaattgacggcttccccaattatgccaagaagagtgatatgatcgattacctcgaatctcacttgaatcatcttgagaaacctgtggattttaaagacgactacccggaattgaggtccttttatgagtccatgacagtggaccagtccaaggatgaaagaaacgaatacggatccggatctggaaacgggtctgggtctggatcctgtgacaccgccacaaatgattccgatttagagaaagcgtacatcaaggaggatgatgatgagaaaccgcaaagtggcgatgaaacaagcgcgacaaagccgctttccagcaggaatgcaaatagcaacgccaaaacgaacttcaatttgttggattttagcacagataacgactcttccacctctgcgtttactaagttcaagtttaactttcaggaatacctctccgatattagataccaaacgcagaaattgaatgaaaatgttcaggactatctttccactatttccgccgtcgatacgattttttccttgttggaattctcttttttagtgagaaacatattagccgccgggcagccaacttcttcttcttctctcgcatcttctttggaagccgccgttgccgcccataataaatatcaatacacgctcgatttctgtttaccaatactcacgtggttgctcttctttaggggtattccaacgttagtgtcttactacatcaacttcatccgctacgacttgaacatcgagttggacccgatgactttcaatctcacgaaattcttgatttctttggcaatcttcaaaacttgtaataataaaaacatagatttccattcttttagatgtgttaaccaattatggacacaactctgtacagtgaaccgttcccttggtatggtacctttggtattctccatggttagttgtctcctcactttgtacgtattatga

SEQ ID NO: 2961 - DNA, 1482 bp, Saccharomyces cerevisiae
atgcttcttttcgagcaacctgttgaccttgaaaaaaataatgaagatgatacgaacataaaacctttcgcaatatcacgacattttttattgaaacttttgctttgcggtataatactcattgagttgcttttatattcgaagtgcccaaaacctattgataatgggccccggacaattgcgaatagatcaaatacttacttcaacggcacacatgatttcaagacgttaacgatattgatatctatcgatgggttccatccgagattgatagatgcaaaatacacgccatttctttacaacttgcacaatttgcggtccccgtacgatatgaatatcacgactgcaccgtatatgatcccaagttttcccactcagacatttcccaaccactggagcatggtaacgggaaaatatcccattgagcacggtattgtttccaatatattctgggataatttcacgagtagcgaatttagaccaaataacctcgacgcaagaatttggagcaacacggctgaccctatttggcaactactgcaaactgaatcgcaaggcgaatataaagtggccacgcatatgtggcctggaagtgaggttgtgtatgaggaccacggggatgtacctagggaaagaatgccattttattttgggaaattcaatcaatgggaaaaacttcaagataaattagctcaaattttccgatacatagatatgcctcagcttaaagataggccagaattggtcataagttatatacccaatgttgattcgtacggacacagttttggatacgatttacgagataagcggctacaaaagctgatcggtgaagtcgatggattctttctcgatttgattgaaggcctgcaaaaaagaaacttgttgaaaattagcaatgttatgattgttagtgaccatggcatgagcaatgtcaacgcgaatgacggtgagcatgttgttgtgtgggaaagggtgttcccggccgacgcaatgagcgcatttatttcgcatctttataacgagggccccatgatgatggtatgtttgaaaaaccctcgagacaagcaatggatttgtgacttgattgaagctcagttagagaaagcatatggagatgaaatatcgaggaagtttcacgtgatcctgaaagaagatttcgacccgagctggaaatatttccaatacgataacagaaagcacagatatgacgatagggtcggcgatatctggattctcgcagatgaatactacgccattgtaaaagaaatgggtgatgtgcctatcggcattatgggcacacatggatacaactttaacaactgtagtgatatggcatctatattcattggaatgggtccgatgttcaacaatgaagtcgtacctccatttgaaaacatcgaagtatacaatatgctgatcaaggcaagtgcgcttttgggagaagaaaagacaaagaaggagaagagtttattacaataa

SEQ ID NO: 2962 - DNA, 1482 bp, Artificial Sequence
  Description of Artificial Sequence: Synthetic polynucleotide
atgcttcttttcgagcaacctgttgaccttgaaaaaaataatgaagatgatacgaacataaaacctttcgcaatatctagacattttttattgaaacttttgctttgcggtataatactcattgagttgcttttatattccaagtgcccaaaacctattgataatgggcccagaacaattgcgaatagatctaatacttacttcaacggcacacatgatttcaagacgttaacgatattgatatctatcgatgggttccatccgagattgatagatgcaaaatacacgccatttctttacaacttgcacaatttgcgttccccgtacgatatgaatatcacgactgcaccgtatatgatcccaagttttcccactcagacatttcccaaccactggagcatggtaacgggaaaatatcccattgagcacggtattgtttccaatatattctgggataatttcacgagtagcgaatttagaccaaataacctcgacgcaagaatttggagcaacacggctgaccctatttggcaattattacaaactgaatctcaaggcgaatataaagtggccacgcatatgtggcctggaagtgaggttgtgtatgaggaccacggggatgtacctagggaaagaatgccattttattttgggaaattcaatcaatgggaaaaacttcaagataaattagctcaaattttcaggtacatagatatgcctcagcttaaagataggccagaattggtcataagttatatacccaatgttgattcttacggacacagttttggatacgatttaagagataagagattacaaaagttaatcggtgaagtcgatggattctttctcgatttgattgaaggcttacaaaaaagaaacttgttgaaaattagcaatgttatgattgttagtgaccatggcatgagcaatgtcaacgcgaatgacggtgagcatgttgttgtgtgggaaagggtgttcccggccgacgcaatgagcgcatttatttctcatctttataacgagggccccatgatgatggtatgtttgaaaaaccctagagacaagcaatggatttgtgacttgattgaagctcagttagagaaagcatatggagatgaaatatctaggaagtttcacgtgatcttgaaagaagatttcgacccgagctggaaatatttccaatacgataacagaaagcacagatatgacgatagggtcggcgatatctggattctcgcagatgaatactacgccattgtaaaagaaatgggtgatgtgcctatcggcattatgggcacacatggatacaactttaacaactgtagtgatatggcatctatattcattggaatgggtccgatgttcaacaatgaagtcgtacctccatttgaaaacatcgaagtatacaatatgttgatcaaggcaagtgcgcttttgggagaagaaaagacaaagaaggagaagagtttattacaatga

SEQ ID NO: 2963 - DNA, 1656 bp, Saccharomyces cerevisiae
atgtcacaatttgttggtttcggagtacaagtggagctaaaagatgggaagctcattcaggggaaaattgccaaagcaacctcaaaaggattgactttaaatgacgttcaattcggcgatggtggtaaatctcaagctttcaaagtgagggcgtcaaggctaaaggacttaaaggttctaactgttgcctctcaatccgggaaaaggaagcagcaaagacaacagcagcaacaaaacgattataatcaaaatcgcggtgaacatattgattggcaagatgatgatgttagtaagataaaacaacaggaagatttcgatttccaaagaaatttgggcatgtttaacaaaaaagacgtcttcgcacaattaaagcaaaatgacgatatattaccggagaatagattacagggacataacagaaagcaaacccaattgcagcaaaataattatcaaaatgatgaattggttattccagatgcaaagaaagattcatggaacaagatttcttcaagaaatgagcaaagcacacaccaatctcagccgcaacaagatgctcaagatgatctggttttggaagatgatgaacatgaatacgatgtcgatgatatcgatgatcccaaatacctaccaataactcagtctttgaatattacacatttaattcactctgcaactaactctccatccataaatgataaaacgaaaggtacagttataaatgataaggatcaggtactagctaaattaggccagatgatcatcagccagtcaagatccaactcaacatccttgccagctgcaaataaacaaacaaccatcagatcaaagaacactaagcagaacattcctatggctacaccagtacaactactagaaatggagagcatcacgtccgaatttttcagtattaactcggcagggctactagaaaattttgctgtaaacgcatcgttcttcttaaagcagaaactaggtggccgtgcacgtttacgtttacaaaattctaatccggaacctttagtagtaatactagcctcagattccaacagatctggtgcgaaagctctggcgttgggtagacatctttgccaaacggggcatatccgtgtcataacattatttacatgttctcaaaatgaactacaggattccatggtcaaaaagcaaacagatatttacaagaagtgtggcggaaaaattgttaatagtgtatcgtcgctggaatctgctatggaaacattaaatagccctgtagaaatagtcatcgatgccatgcagggatatgactgtacattgagcgatctggcggggacgtcggaagttattgaaagcagaattaaaagcatgatatcatggtgtaacaaacagcgaggatctactaaagtgtggtctttggatattccaaatgggtttgatgcgggatccggcatgccagatattttcttttcagacaggattgaagcaacaggaattatttgttctggctggcctttgattgccatcaacaacttaattgcaaatttgccaagtctagaagatgctgttttgattgatataggtataccacagggcgcctattcacagagaacttctttgcgtaagttccaaaactgtgatcttttcgtcactgacgggtccctgctattagatttgtaa

SEQ ID NO: 2964 - DNA, 1656 bp, Artificial Sequence
  Description of Artificial Sequence: Synthetic polynucleotide
atgtctcaatttgttggtttcggagtacaagtggagttgaaagatgggaagctcattcaggggaaaattgccaaagcaacctccaaaggattgactttaaatgacgttcaattcggcgatggtggtaaatctcaagctttcaaagtgagggcgtccaggttaaaggacttaaaggttttaactgttgcctctcaatccgggaaaaggaagcagcaaagacaacagcagcaacaaaacgattataatcaaaatcgcggtgaacatattgattggcaagatgatgatgttagtaagataaaacaacaggaagatttcgatttccaaagaaatttgggcatgtttaacaaaaaagacgtcttcgcacaattaaagcaaaatgacgatatattaccggagaatagattacagggacataacagaaagcaaacccaattgcagcaaaataattatcaaaatgatgaattggttattccagatgcaaagaaagattcttggaacaagatttcttctagaaatgagcaaagcacacaccaatctcagccgcaacaagatgctcaagatgatttggttttggaagatgatgaacatgaatacgatgtcgatgatatcgatgatcccaaatacttgccaataactcagtctttgaatattacacatttaattcactctgcaactaactctccatccataaatgataaaacgaaaggtacagttataaatgataaggatcaggtattggctaaattaggccagatgatcatcagccagtctagatccaactccacatccttgccagctgcaaataaacaaacaaccatcagatccaagaacactaagcagaacattcctatggctacaccagtacaattattggaaatggagagcatcacgtccgaatttttcagtattaactctgcagggttgttggaaaattttgctgtaaacgcatctttcttcttaaagcagaaattgggtggccgtgcacgtttacgtttacaaaattctaatccggaacctttagtagtaatattggcctctgattccaacagatctggtgcgaaagctttggcgttgggtagacatctttgccaaacggggcatatccgtgtcataacattatttacatgttctcaaaatgaattacaggattccatggtcaaaaagcaaacagatatttacaagaagtgtggcggaaaaattgttaatagtgtatcttctttggaatctgctatggaaacattaaatagccctgtagaaatagtcatcgatgccatgcagggatatgactgtacattgagcgatttggcggggacgagtgaagttattgaaagcagaattaaaagcatgatatcttggtgtaacaaacagaggggatctactaaagtgtggtctttggatattccaaatgggtttgatgcgggatccggcatgccagatattttcttttctgacaggattgaagcaacaggaattatttgttctggctggcctttgattgccatcaacaacttaattgcaaatttgccaagtttagaagatgctgttttgattgatataggtataccacagggcgcctattctcagagaacttctttgcgtaagttccaaaactgtgatcttttcgtcactgacgggtccttattattagatttgtga

SEQ ID NO: 2965 - DNA, 306 bp, Saccharomyces cerevisiae
atgacagcactattctgccttgaattgagaactaatatatttctaataatgaatgattgtattattatcaattactggaaagggttcattttttctttccactcgtatttttttccttttcgttttgagtcctccttaagggctcattacccgggaaagagaaattattcagatttttctgttataccgttaccttattatatagatgttcgcagttttcatatttgtgagagccaacacattattgcattaccgctacagatcccacttccttaccgtatgcttatacgtatgtatccagtttag

SEQ ID NO: 2966 - DNA, 306 bp, Artificial Sequence
  Description of Artificial Sequence: Synthetic polynucleotide
atgacagcattattctgccttgaattgagaactaatatatttttaataatgaatgattgtattattatcaattactggaaagggttcattttttctttccactcctatttttttccttttcgttttgagtcctccttaagggctcattacccgggaaagagaaattattctgatttttctgttataccgttaccttattatatagatgttcgcagttttcatatttgtgagagccaacacattattgcattaccgttgcagatcccacttccttaccgtatgcttatacgtatgtatccagtttga

SEQ ID NO: 2967 - DNA, 1737 bp, Saccharomyces cerevisiae
atgggttcatgttgtagttgcttgaaagattcttcagacgaggccagtgtctcaccaattgccgataatgaaagagaagcggtgactttattactagggtatttggaggataaagaccaattagacttttactctggtggtccactaaaggccctaactactttggtgtattcagataatctaaatttgcaaaggagcgccgctctggcattcgcagaaattactgaaaaatacgtccgtcaggtctctagagaggtactggaacccatcttaatattattacaaagccaagatccacagattcaagtggccgcttgtgcagccttgggtaatttggccgttaataatgaaaataaattattaattgtggaaatgggaggcttagagccattaataaaccaaatgatgggtgacaatgtagaagttcaatgtaatgctgttggatgcattaccaatttagccacaagggatgacaataaacataagattgctacttctggtgctttaattccattgactaagctagctaaatccaaacatataagagttcagagaaatgctacaggtgcattattaaatatgacacattctgaggaaaatagaaaagaattggttaatgcaggtgctgtgcctgtattggtatctttactgtcgtccaccgatcctgatgttcagtactattgtactactgctttatcaaatatagcagtggatgaagccaatcgcaagaagttggctcaaactgagccaagattggtttccaaattggttagtctgatggattctccatcttcaagggtaaaatgtcaagctactttggctttacgaaacctagcgtccgatacaagctaccaattagaaattgtaagggctggtgggttgcctcatttggtaaagttgattcaaagtgattctataccactggttttggctagtgtggcatgcattagaaacatttctattcaccctctaaatgaaggtttaattgttgatgcaggtttcttaaaaccattagtaagattgttggactataaggattcagaagaaattcaatgtcacgccgtatctactttgagaaatttggctgcatcatctgaaaaaaacagaaaagagttcttcgaaagtggtgctgtcgaaaaatgtaaggaactggctctagattcacctgttagtgttcaaagtgaaatttccgcatgttttgctattttagccctagcagatgtctccaaattggatctactggaagcaaatatcttagatgctttaatccctatgactttttcccagaaccaagaagtttctggtaatgctgctgctgctttggcaaatctatgttcaagagtgaataattatacaaaaattattgaagcatgggatcgtccgaatgaaggcattcgtggatttctgattagatttttgaaaagtgactatgctacctttgaacacattgcgctatggacaattttacaattgctagaaagtcataatgataaagtggaagatttggttaaaaatgatgacgacatcattaacggagtgagaaaaatggcagatgtgacctttgagcgtttacaaagatcaggaattgatgttaaaaatccggggagcaacaacaatccaagctcgaatgataacaacagtaataacaatgacacaggatctgaacatcaacctgtagaggatgcaagtttggaattgtataatattactcaacagattttacaatttttacattga

SEQ ID NO: 2968 - DNA, 1737 bp, Artificial Sequence
  Description of Artificial Sequence: Synthetic polynucleotide
atgggttcttgttgtagttgcttgaaagattcttctgacgaggccagtgtctctccaattgccgataatgaaagagaagcggtgactttattattagggtatttggaggataaagaccaattagacttttactctggtggtccattgaaggccttaactactttggtgtattctgataatttgaatttgcaaaggagcgccgctttggcattcgcagaaattactgaaaaatacgtccgtcaggtctctagagaggtattggaacccatcttaatattattacaaagccaagatccacagattcaagtggccgcttgtgcagccttgggtaatttggccgttaataatgaaaataaattattaattgtggaaatgggaggcttagagccattaataaaccaaatgatgggtgacaatgtagaagttcaatgtaatgctgttggatgcattaccaatttagccacaagggatgacaataaacataagattgctacttctggtgctttaattccattgactaagttggctaaatccaaacatataagagttcagagaaatgctacaggtgcattattaaatatgacacattctgaggaaaatagaaaagaattggttaatgcaggtgctgtgcctgtattggtatctttattatcttccaccgatcctgatgttcagtactattgtactactgctttatccaatatagcagtggatgaagccaatcgcaagaagttggctcaaactgagccaagattggtttccaaattggttagtttaatggattctccatcttccagggtaaaatgtcaagctactttggctttaagaaacttggcgtccgatacaagctaccaattagaaattgtaagggctggtgggttgcctcatttggtaaagttgattcaaagtgattctataccattagttttggctagtgtggcatgcattagaaacatttctattcaccctttaaatgaaggtttaattgttgatgcaggtttcttaaaaccattagtaagattgttggactataaggattctgaagaaattcaatgtcacgccgtatctactttgagaaatttggctgcatcttctgaaaaaaacagaaaagagttcttcgaaagtggtgctgtcgaaaaatgtaaggaattggctttagattctcctgttagtgttcaaagtgaaatttccgcatgttttgctattttagccttggcagatgtctccaaattggatttattggaagcaaatatcttagatgctttaatccctatgactttttcccagaaccaagaagtttctggtaatgctgctgctgctttggcaaatttatgttccagagtgaataattatacaaaaattattgaagcatgggatcgtccgaatgaaggcattcgtggatttttgattagatttttgaaaagtgactatgctacctttgaacacattgcgctttggacaattttacaattgttggaaagtcataatgataaagtggaagatttggttaaaaatgatgacgacatcattaacggagtgagaaaaatggcagatgtgacctttgagcgtttacaaagatctggaattgatgttaaaaatccggggagcaacaacaatccaagcagtaatgataacaacagtaataacaatgacacaggatctgaacatcaacctgtagaggatgcaagtttggaattgtataatattactcaacagattttacaatttttacattga

SEQ ID NO: 2969 - DNA, 657 bp, Saccharomyces cerevisiae
atgagtagctctaaaagaaggatcgagacagatgttatgaaactgttgatgagtgatcatcaagtggatttaatcaatgatagcatgcaagagtttcatgtaaagttcttgggaccaaaggatacaccctacgaaaatggggtttggaggttacatgtagagttgccggataattacccatacaagtcgccaagcatagggttcgttaacaagatattccatcctaacattgatatcgcatcggggtccatatgtttggacgtaattaactctacatggtcgcctttatatgatctgataaatatagtggagtggatgataccaggtttattaaaggagcctaatggtagcgatcccttgaataacgaagctgccacattgcaattacgagataaaaaactgtatgaggaaaaaatcaaagagtatatagacaagtatgctacaaaggaaaagtaccaacaaatgtttggcggagataatgatagcgatgacagtgatagcggcggtgatttacaagaagaggacagtgattctgatgaagatatggatggcactggtgtttccagtggcgatgatagcgtagatgagttaagcgaggatctaagtgacatagatgtcagtgatgacgatgactacgacgaagtcgcaaatcaataa

SEQ ID NO: 2970 - DNA, 657 bp, Artificial Sequence
  Description of Artificial Sequence: Synthetic polynucleotide
atgagtagctctaaaagaaggatcgagacagatgttatgaaacttttgatgagtgatcatcaagtggatttaatcaatgatagcatgcaagagtttcatgtaaagttcttgggaccaaaggatacaccctacgaaaatggggtttggaggttacatgtagagttgccggataattacccatacaagtctccaagcatagggttcgttaacaagatattccatcctaacattgatatcgcatctgggtccatatgtttggacgtaattaactctacatggtctcctttatatgatttgataaatatagtggagtggatgataccaggtttattaaaggagcctaatggtagcgatcccttgaataacgaagctgccacattgcaattaagagataaaaaactttatgaggaaaaaatcaaagagtatatagacaagtatgctacaaaggaaaagtaccaacaaatgtttggcggagataatgatagcgatgacagtgatagcggcggtgatttacaagaagaggacagtgattctgatgaagatatggatggcactggtgtttccagtggcgatgatagcgtagatgagttaagcgaggatttgagtgacatagatgtcagtgatgacgatgactacgacgaagtcgcaaatcaatga

SEQ ID NO: 2971 - DNA, 2115 bp, Saccharomyces cerevisiae
atgtacaacattccagataatgtcaaaggggctgtagaatttgatccatggttgaaaccgtttgccgatgtactttctgaaagaagatacctagctgacaagtggttgtacgacataactcatgctacgcctgatggttcgtatcagtcactcagtaagtttgctagagattcatacaagtcatatgggttgcatgccaatccggaaaccaaagaaatcacttacaaagagtgggcacccaatgcggaacgtgcatttctagtgggagatttcaataactgggataccacatctcatgagctcaagaacaaggacgaatttggaaattttacaatcacacttcatcctttacctaacggcgatttcgccatccctcatgattcgaagattaaagtcatgtttattttgccagatggttccaagatctttcgtttacctgcgtggatcacaagggctacacagccttctaaggaaacttctaaacagttcgggcccgcatatgaaggtaggttttggaatccagagaacccctacaaatttgtacatccaaggccaaagtttagtgaatctgtagattccttaaggatttatgaagcccacgtcggtatttcgagtccagaaccaaagataaccacatataaagaatttactgagaaggtcttacccagaatcaaatatcttggctacgatgcaattcaattaatggctattatggaacatgcttattatgcatcatttggctaccaagtgaccaatttttttgcggcgagctcccgtttcggcacccctgaggaattaaaggagctgattgatactgcacattctatgggcatcctagttttattggatgtagttcatagccatgcttctaaaaacgtcgaggatgggttgaacatgtttgacggttctgatcatcagtatttccattctataagctccggtaggggtgagcatccgctgtgggattcccgtctttttaattacggaaaatttgaagtgcagcgattcttattagcaaacctggcattttatgttgacgtttatcagtttgatgggtttagattcgatggtgtcacatcaatgttatacgttcatcatggtgttggtgccggtgggtcttttagcggtgactataacgaatatctttctcgtgacaggtccttcgtcgatcatgaagccttagcttatttaatgttagccaatgatttggttcacgaaatgttgccaaatctggctgtaactgttgcagaagatgtctctggttatccaactttatgtttaccccgctccataggtggtactggtttcgactacagattagcaatggctttgcctgatatgtggatcaaactaatcaaggagaagaaagatgatgaatgggagatgggaagtattgtatacactttaactaatagacgatatggtgaaaaagtggttgcttattgtgagtcgcacgaccaagctttagttggtgataagacattagcgttttggttgatggatgccgctatgtacaccgatatgactgtattgaaggaaccatccatcgttattgaccgtggtattgctctacacaagatgattaggctgatcactcactcgctgggaggcgaggcttatttgaacttcgaaggtaatgagttcggtcatccagaatggttggatttccctaatgttaacaatggcgatagctacaagtatgctcgtaggcagtttaatttggctgatgatcccttactgcgttaccagaatttaaatgagtttgatagatcaatgcaattatgtgagaaaaggcataagtggctgaacacgaaacaggcttatgtttcattaaaacatgaaggtgacaaaatgattgtgtttgaaagaaataatctgttgtttattttcaacttccatcctacaaacagctacagcgattatagagttggtgtcgaaaaagctggtacttatcacatcgtgttgaactcagatcgtgctgaatttggtggacataacagaatcaacgaaagttccgaattctttaccaccgatttggaatggaacaacaggaagaacttcctccaagtttatattcctagtagagtcgctttggtgcttgccttaaaagaatga

SEQ ID NO: 2972 - DNA, 2115 bp, Artificial Sequence
  Description of Artificial Sequence: Synthetic polynucleotide
atgtacaacattccagataatgtcaaaggggctgtagaatttgatccatggttgaaaccgtttgccgatgtactttctgaaagaagatacttggctgacaagtggttgtacgacataactcatgctacgcctgatggttcttatcagagcctcagtaagtttgctagagattcttacaagagttatgggttgcatgccaatccggaaaccaaagaaatcacttacaaagagtgggcacccaatgcggaacgtgcatttttagtgggagatttcaataactgggataccacatctcatgagctcaagaacaaggacgaatttggaaattttacaatcacacttcatcctttacctaacggcgatttcgccatccctcatgattctaagattaaagtcatgtttattttgccagatggttccaagatctttcgtttacctgcgtggatcacaagggctacacagccttctaaggaaacttctaaacagttcgggcccgcatatgaaggtaggttttggaatccagagaacccctacaaatttgtacatccaaggccaaagtttagtgaatctgtagattccttaaggatttatgaagcccacgtcggtatttccagtccagaaccaaagataaccacatataaagaatttactgagaaggtcttacccagaatcaaatatcttggctacgatgcaattcaattaatggctattatggaacatgcttattatgcaagttttggctaccaagtgaccaatttttttgcggcgagctcccgtttcggcacccctgaggaattaaaggagttgattgatactgcacattctatgggcatcttggttttattggatgtagttcatagccatgcttctaaaaacgtcgaggatgggttgaacatgtttgacggttctgatcatcagtatttccattctataagctccggtaggggtgagcatccgttatgggattcccgtctttttaattacggaaaatttgaagtgcagagattcttattagcaaacttggcattttatgttgacgtttatcagtttgatgggtttagattcgatggtgtcacatctatgttatacgttcatcatggtgttggtgccggtgggtcttttagcggtgactataacgaatatctttctcgtgacaggtccttcgtcgatcatgaagccttagcttatttaatgttagccaatgatttggttcacgaaatgttgccaaatttggctgtaactgttgcagaagatgtctctggttatccaactttatgtttaccccgctccataggtggtactggtttcgactacagattagcaatggctttgcctgatatgtggatcaaattaatcaaggagaagaaagatgatgaatgggagatgggaagtattgtatacactttaactaatagaagatatggtgaaaaagtggttgcttattgtgagtctcacgaccaagctttagttggtgataagacattagcgttttggttgatggatgccgctatgtacaccgatatgactgtattgaaggaaccatccatcgttattgaccgtggtattgctttacacaagatgattaggttgatcactcactctttgggaggcgaggcttatttgaacttcgaaggtaatgagttcggtcatccagaatggttggatttccctaatgttaacaatggcgatagctacaagtatgctcgtaggcagtttaatttggctgatgatcccttattacgttaccagaatttaaatgagtttgatagaagtatgcaattatgtgagaaaaggcataagtggttgaacacgaaacaggcttatgtttctttaaaacatgaaggtgacaaaatgattgtgtttgaaagaaataatttattgtttattttcaacttccatcctacaaacagctacagcgattatagagttggtgtcgaaaaagctggtacttatcacatcgtgttgaacagtgatcgtgctgaatttggtggacataacagaatcaacgaaagttccgaattctttaccaccgatttggaatggaacaacaggaagaacttcctccaagtttatattcctagtagagtcgctttggtgcttgccttaaaagaatga

SEQ ID NO: 2973 - DNA, 408 bp, Saccharomyces cerevisiae
atgaacaccttacttaaaaaatatagaaaacaacgttatgcctggcttcggttccttctgttttccaaaattgaaggttctctgccagttgccctcagaattttattgagtttgcaaccattctgctgtaacatttacaggaaatattatcaagaaaataagaaagtgaagagcacgtccggaaacacagcacttaaaataatagaaaagctcgaaagcctcgtctctaacctccgtttgaaatactcccaaatgttttcattactttttttacattcatacaactgtctgcaatcactcgcaactgagactttccggattattaaaaagagagaaaaaaatttactatcgctacttatacctggttcctgcatcgagatcgctcgacatttcgtgctgaaggaataa

SEQ ID NO: 2974 - DNA, 408 bp, Artificial Sequence
  Description of Artificial Sequence: Synthetic polynucleotide
atgaacaccttacttaaaaaatatagaaaacaacgttatgcctggcttcgtttccttttattttccaaaattgaaggttctttaccagttgccctcagaattttattgagtttgcaaccattctgctgtaacatttacaggaaatattatcaagaaaataagaaagtgaagagcacgtccggaaacacagcacttaaaataatagaaaagctcgaaagcctcgtctctaacctccgtttgaaatactcccaaatgttttctttactttttttacattcttacaactgtttgcaatctctcgcaactgagactttcagaattattaaaaagagagaaaaaaatttattaagtttacttatacctggttcctgcatcgagatcgctagacatttcgtgttgaaggaatga

SEQ ID NO: 2975 - DNA, 846 bp, Saccharomyces cerevisiae
atgtccgaatatcagccaagtttatttgctttaaatccaatgggtttctcaccattggatggttctaaatcaaccaacgaaaatgtatctgcttccacttctactgccaaaccaatggttggccaattgatttttgataaattcatcaagactgaagaggatccaattatcaaacaggataccccttcgaaccttgattttgattttgctcttccacaaacggcaactgcacctgatgccaagaccgttttgccaattccggagctagatgacgctgtagtggaatctttcttttcgtcaagcactgattcaactccaatgtttgagtatgaaaacctagaagacaactctaaagaatggacatccttgtttgacaatgacattccagttaccactgacgatgtttcattggctgataaggcaattgaatccactgaagaagtttctctggtaccatccaatctggaagtctcgacaacttcattcttacccactcctgttctagaagatgctaaactgactcaaacaagaaaggttaagaaaccaaattcagtcgttaagaagtcacatcatgttggaaaggatgacgaatcgagactggatcatctaggtgttgttgcttacaaccgcaaacagcgttcgattccactttctccaattgtgcccgaatccagtgatcctgctgctctaaaacgtgctagaaacactgaagccgccaggcgttctcgtgcgagaaagttgcaaagaatgaaacaacttgaagacaaggttgaagaattgctttcgaaaaattatcacttggaaaatgaggttgccagattaaagaaattagttggcgaacgctga

SEQ ID NO: 2976 - DNA, 846 bp, Artificial Sequence
  Description of Artificial Sequence: Synthetic polynucleotide
atgtccgaatatcagccaagtttatttgctttaaatccaatgggtttctctccattggatggttctaaatctaccaacgaaaatgtatctgcttccacttctactgccaaaccaatggttggccaattgatttttgataaattcatcaagactgaagaggatccaattatcaaacaggataccccttccaaccttgattttgattttgctcttccacaaacggcaactgcacctgatgccaagaccgttttgccaattccggagttagatgacgctgtagtggaatctttcttttcttctagcactgattctactccaatgtttgagtatgaaaacttggaagacaactctaaagaatggacatccttgtttgacaatgacattccagttaccactgacgatgtttctttggctgataaggcaattgaatccactgaagaagtttctttagtaccatccaatttggaagtctctacaacttctttcttacccactcctgttttggaagatgctaaattaactcaaacaagaaaggttaagaaaccaaattctgtcgttaagaagagtcatcatgttggaaaggatgacgaatctagattagatcatttaggtgttgttgcttacaaccgcaaacagcgttctattccactttctccaattgtgcccgaatccagtgatcctgctgctttgaaacgtgctagaaacactgaagccgccaggcgttctcgtgcgagaaagttgcaaagaatgaaacaacttgaagacaaggttgaagaattgctttctaaaaattatcacttggaaaatgaggttgccagattaaagaaattagttggcgaacgctga

SEQ ID NO: 2977 - DNA, 381 bp, Saccharomyces cerevisiae
atgctcatgcactttattccccgaagatcttcgaaagcagttcaatttaattggctggagattggcgtttggagaggcggtgtgtatgtcaagaaaggcattgtcaacgcccggacaaataattctaatttttacaagatgccggtggtgttcggcattgtaaaaggtatgggtgctttgtgcgtccacgcatggggtatggggtatgggggcatcatcgattgttctccggtaacggaacacggcaatatttctgttctacagcttgaatacatgccgtggatctgtttatcaaagataatgtcatgtagcgtggcaagtcgacacagcaacgtgtggataatggatgagacgatagcgccactggttggttgtttgtaa

SEQ ID NO: 2978 - DNA, 381 bp, Artificial Sequence
  Description of Artificial Sequence: Synthetic polynucleotide
atgctcatgcactttattcccagaagatcttctaaagcagttcaatttaattggttggagattggcgtttggagaggcggtgtgtatgtcaagaaaggcattgtcaacgccagaacaaataattctaatttttacaagatgccggtggtgttcggcattgtaaaaggtatgggtgctttgtgcgtccacgcatggggtatggggtatgggggcatcatcgattgttctccggtaacggaacacggcaatatttctgttttacagcttgaatacatgccgtggatctgtttatccaagataatgtcctgtagcgtggcaagtagacacagcaacgtgtggataatggatgagacgatagcgccattagttggttgtttgtga

SEQ ID NO: 2979 - DNA, 2001 bp, Saccharomyces cerevisiae
atggatatcgagcctactttcaaagggtacattgaagatgaagatgacgctttgcttattcttcaagcaactttggatggcaagttaaagcatataccaagaaggccttatgaaatagaaagaccttatttgatcgtatcaggtagtatattcgtttttattgaagagatatcgggcatcaagagatggactgatggcgtttcttggtctccatcaagaatatcaggcaagtttctaatatacaaggaactagacaaggaaaacgccgggtctaatgctaatgctacttcgagtggcagtactgattccgccgtcattacggatggaacttctggcgcgagaaataacccttcttcgtcgaaaatcaagctacctcctttgaagaatcaccagtttgatttgccacctactatgggccattcaagttttgagtcagagcaagacacctccatttctccatcaaaccgttcgaacttacctttaaagtatactggcctggtgaagaagacaatatctgtgaagctgaagagacctccattcaactcgattgaaaatttacatattgtctcttattattctgtaaaagatataaaacaaaattgtctagtgactcctaaagcttctccttttttgaaagatgttagaccttcacaggaactaattgtcgcgatgggaaatacaaccttaggcaacgtgaaaaacaattccactaccaccggtaatggtcctaataatataaacaataaaagcaactcttccactcccctgaatactgttatttccacgaataacaatagtgctaatataaatgctgctggcagtaatcaatttactagtgcaaacaaaaattattattataaaaatgatgaaagctctggatacccaatcactcaatttgctcccgcattaccatcaacaactttgatgtatacggcgaatccaccttatatcactcaatctcctgataacactaacgctactggtatgaatacacatgttaataataacaataataatagtaataacagtagtaatagtaataatagtaacaataataataataataataataataataataataacaataataataatattaataatattaataatgtcaatactaatgcagggaacggtaacaatccaaatagattccataacgcctcttttgcttataacaccaccggtgactttattaatccgcaacaacaaggacaaatttcttatccattttattatacaacaattccgataaacaatcctaactattataccacacaacctccaaaccctgtaacaaacgcttcaacgaacgagaatcaaggctattccacctcctcaactcaacacccttattatgggcatcctactgaaagtcaatcagcatcagcagccgcaggcgctactggcactcctggtacagccgagaatgtccttcccgtatccagtatgcagccactactccatcaagccaataataatagtgcaagctctgctacctctacagctccttatccggtgtattctatgaatgtgaatgttccttattacaattcttctgcttctgcatacaagagggcacaagaaaatactacttcaaatacgaatgcagaaccttctggtgctacaagcactaactcaggcaccatgctatcaaatcctgcatacgctaattctcagtacactccatcgcaagtgtattaccagggattcccccaatatgccatggcaagtgctcaaaatccgtctatgtatcaacaccagcaccaacatcctttgcccactgtatatccaatagcgacgcctcaacaaaatataatgagctctggtcacactttgagcactattggatctgatcctcaacatcatcactatcaacaagagcccaacgaccacaaaaacttcgctatgggtcacgcgaacaataatatcttaaacatcaccaataatgatacgatgaacaacctcaatacaaacacttcaactactacacaataa

SEQ ID NO: 2980 - DNA, 2001 bp, Artificial Sequence
  Description of Artificial Sequence: Synthetic polynucleotide
atggatatcgagcctactttcaaagggtacattgaagatgaagatgacgctttgcttattcttcaagcaactttggatggcaagttaaagcatataccaagaaggccttatgaaatagaaagaccttatttgatcgtatctggtagtatattcgtttttattgaagagatatctggcatcaagagatggactgatggcgtttcttggtctccatctagaatatctggcaagtttttaatatacaaggaattagacaaggaaaacgccgggtctaatgctaatgctacttctagtggcagtactgattccgccgtcattacggatggaacttctggcgcgagaaataacccttcttcttctaaaatcaagttacctcctttgaagaatcaccagtttgatttgccacctactatgggccattctagttttgagagtgagcaagacacctccatttctccatctaaccgttctaacttacctttaaagtatactggcttggtgaagaagacaatatctgtgaagttgaagagacctccattcaactctattgaaaatttacatattgtctcttattattctgtaaaagatataaaacaaaattgtttggtgactcctaaagcttctccttttttgaaagatgttagaccttctcaggaattgattgtcgcgatgggaaatacaaccttaggcaacgtgaaaaacaattccactaccaccggtaatggtcctaataatataaacaataaaagcaactcttccactcccttgaatactgttatttccacgaataacaatagtgctaatataaatgctgctggcagtaatcaatttactagtgcaaacaaaaattattattataaaaatgatgaaagctctggatacccaatcactcaatttgctcccgcattaccatctacaactttgatgtatacggcgaatccaccttatatcactcaatctcctgataacactaacgctactggtatgaatacacatgttaataataacaataataatagtaataacagtagtaatagtaataatagtaacaataataataataataataataataataataataacaataataataatattaataatattaataatgtcaatactaatgcagggaacggtaacaatccaaatagattccataacgcctcttttgcttataacaccaccggtgactttattaatccgcaacaacaaggacaaatttcttatccattttattatacaacaattccgataaacaatcctaactattataccacacaacctccaaaccctgtaacaaacgcttccacgaacgagaatcaaggctattccacctccagcactcaacacccttattatgggcatcctactgaaagtcaaagtgcatctgcagccgcaggcgctactggcactcctggtacagccgagaatgtccttcccgtatccagtatgcagccattgctccatcaagccaataataatagtgcaagctctgctacctctacagctccttatccggtgtattctatgaatgtgaatgttccttattacaattcttctgcttctgcatacaagagggcacaagaaaatactacttccaatacgaatgcagaaccttctggtgctacaagcactaacagtggcaccatgctttctaatcctgcatacgctaattctcagtacactccatctcaagtgtattaccagggattcccccaatatgccatggcaagtgctcaaaatccgtctatgtatcaacaccagcaccaacatcctttgcccactgtatatccaatagcgacgcctcaacaaaatataatgagctctggtcacactttgagcactattggatctgatcctcaacatcatcactatcaacaagagcccaacgaccacaaaaacttcgctatgggtcacgcgaacaataatatcttaaacatcaccaataatgatacgatgaacaacctcaatacaaacacttctactactacacaatga

SEQ ID NO: 2981 - DNA, 1008 bp, Saccharomyces cerevisiae
atgaataatggagacaataaaacgacattagaaaactcaaaaaatgcgtcactagctaatggaaattatgcgattcccacaaaactaaataggctgaaaaagaatgctgaccctagagttgctgcaatttcaggtgctttatctggtgcactatccgcaatgctggtctgtccttttgacgttgcgaaaacaagattacaagcacaaggtctccaaaacatgacacaccaaagtcaacattataaggggttttttggtacatttgctactattttcaaggatgaaggtgctgctgggctttataaaggtctacagccgacggttttaggttatattcctactttgatgatttacttttccgtctatgatttctgtagaaaatattcggtcgatattttcccacatagtccgtttctctcaaacgcttcttctgcaattactgcaggtgccatctctacagttgcgacaaatccgatttgggtagtaaaaacaagacttatgctgcaaacaggtatcggtaaatattccacccattataagggtaccatagacacatttagaaagatcattcaacaagagggtgctaaggctctttatgccggcttagtaccagccctgctggggatgctgaacgttgctatacagtttcctttatatgaaaatttaaaaataaggttcggatattcagaatcgactgacgtatcgacagatgtgacgagctcaaactttcaaaaattaatattggcctctatgctatctaaaatggtagcatctaccgtgacttatcctcacgaaatacttcgaactcgaatgcaactgaaatccgatcttccaaatactgttcaacgccatctccttccattgattaaaattacgtataggcaagagggcttcgccggcttttactctgggtttgcaactaatttggtaaggacagtacctgctgctgtggtaacactagtatcgtttgaatattctaaaaagtatttaactactttttttcaataa

SEQ ID NO: 2982 - DNA, 1008 bp, Artificial Sequence
  Description of Artificial Sequence: Synthetic polynucleotide
atgaataatggagacaataaaacgacattagaaaactccaaaaatgcgtctttggctaatggaaattatgcgattcccacaaaattgaataggttgaaaaagaatgctgaccctagagttgctgcaatttctggtgctttatctggtgcattgtccgcaatgcttgtctgtccttttgacgttgcgaaaacaagattacaagcacaaggtctccaaaacatgacacaccaaagtcaacattataaggggttttttggtacatttgctactattttcaaggatgaaggtgctgctgggctttataaaggtttacagccgacggttttaggttatattcctactttgatgatttacttttccgtctatgatttctgtagaaaatattctgtcgatattttcccacatagtccgtttctctccaacgcttcttctgcaattactgcaggtgccatctctacagttgcgacaaatccgatttgggtagtaaaaacaagacttatgttacaaacaggtatcggtaaatattccacccattataagggtaccatagacacatttagaaagatcattcaacaagagggtgctaaggctctttatgccggcttagtaccagccttattagggatgttgaacgttgctatacagtttcctttatatgaaaatttaaaaataaggttcggatattctgaatctactgacgtatctacagatgtgacgagcagtaactttcaaaaattaatattggcctctatgctttctaaaatggtagcatctaccgtgacttatcctcacgaaatacttagaactagaatgcaattgaaatccgatcttccaaatactgttcaacgccatctccttccattgattaaaattacgtataggcaagagggcttcgccggcttttactctgggtttgcaactaatttggtaaggacagtacctgctgctgtggtaacattggtatcctttgaatattctaaaaagtatttaactactttttttcaatga

SEQ ID NO: 2983 - DNA, 849 bp, Saccharomyces cerevisiae
atggtagcagacttaactaaaggtatactgaaatggaaatcaagaatagaatttgatgccgttggaagcagttcctattacgaagagttaaagggcttacctccccttgcatcccataaaaaattaacacaggctgctatcttcaatagcacgaagtatgagttattacaagtaaaaaaagacattctgtccatctatgaagttgtaagtagggacattgacgaggaacgcaatcagatgcagcaaattgaacttcaacttaaaaagtcgttaaaaaaggtagaacatagttacaaaaacgtcttaaagcaaagggcttctactaattgtatcaatggaaatgatcgtctattggccaatgcggaaaaaaaaattggctcgttaaatgaagaactcgcatgtgtcaatgatattgtttcagatattgttaacaatttgaccgcattgaatgcaaacctcccgaagaaggcacaattattgaaagatgactcaataaatgtggcacattatccacttctttttgatttcctgcataaatcttgcccgaagagtattatcgctactagtgaagctagcattcacgaaaatgcctcgccctctcctcttttagaacacgatgaattaccagcagagagcataaatagtttttacggggagaacgagctacagagtgattctttagctccacttcaaactcatgacgataacatatctagttgcaaaaaaatactacccccaaaattcaacacaacaagtggcccttcaattgaaactaattttgaaaatattagcgcagatggcctcacatacaccaaatgttctttaaaaaactcaatatctttgacttaa

SEQ ID NO: 2984 - DNA, 849 bp, Artificial Sequence
  Description of Artificial Sequence: Synthetic polynucleotide
atggtagcagacttaactaaaggtatattgaaatggaaatctagaatagaatttgatgccgttggaagcagttcctattacgaagagttaaagggcttacctccccttgcatcccataaaaaattaacacaggctgctatcttcaatagcacgaagtatgagttattacaagtaaaaaaagacattttatccatctatgaagttgtaagtagggacattgacgaggaacgcaatcagatgcagcaaattgaacttcaacttaaaaagtctttaaaaaaggtagaacatagttacaaaaacgtcttaaagcaaagggcttctactaattgtatcaatggaaatgatcgtttattggccaatgcggaaaaaaaaattggctctttaaatgaagaactcgcatgtgtcaatgatattgtttctgatattgttaacaatttgaccgcattgaatgcaaacctcccgaagaaggcacaattattgaaagatgacagtataaatgtggcacattatccacttctttttgatttcttacataaatcttgcccgaagagtattatcgctactagtgaagctagcattcacgaaaatgcctctccctctcctcttttagaacacgatgaattaccagcagagagcataaatagtttttacggggagaacgagttacagagtgattctttagctccacttcaaactcatgacgataacatatctagttgcaaaaaaatattgcccccaaaattcaacacaacaagtggcccttctattgaaactaattttgaaaatattagcgcagatggcctcacatacaccaaatgttctttaaaaaacagcatatctttgacttga

SEQ ID NO: 2985 - DNA, 1029 bp, Saccharomyces cerevisiae
atgtggaactcactaaaagcattcgctctagtgttcggaggttgttgctccaatgttattacatttgaaaccttaatgagcaacgaaacaggcagcattaataatctcattactttttgtcaatttttatttgttacatgtcagggactccccgaatttctggatgttcatcaacctttcccttacttcaagcctctgaaaactccacttcacgtttatgtcattactgtcgttttattttatatttcatctacgacgaataataacgtatttaaatacaacatatccattccgattcatatcgttttcagatgcttcggaaccgtaataaccatgtttacatgctggttattaaatggtaggaaatatacaaagattcagattttatcaacactatttttaaccattggagctataattgcctcattattcaaagatgctgattttcggtaccaagatttgaaactgcaagcgtggaaaattggaagtgaccaatctgtagatctcacttttatttttggcatttgtatactagtactttcatcattcacatcatctttactttcagcatacaatgaacgtacgtatcaaaaatatggaaagcattggaaggagaatatcttttacagtcattttttatcattacctctctttctatttagtcgaaagcagttaattcacgaatatcgagtgatgagaaagtctgaaagaatattgtgttcaaattttggagggaagattctagtcccgcgagaagaaactctccttcttttcaatgtgttaacacaatatttttgcgtcaagggtgttaatatcctcgccagtaaaacaaacgctctgacactttccataacattacttgtaagaaaatttataagtcttttactgagcgtccgacttttcgataataacttgtcatatactggctacatcggggtctacctagtcttttttggtgcctttatatactcgctgggatcaattcaccccaggcaaaatgacaagggggcgataaagaaaagtaaatga

SEQ ID NO: 2986 - DNA, 1029 bp, Artificial Sequence
  Description of Artificial Sequence: Synthetic polynucleotide
atgtggaactctttgaaagcattcgctttggtgttcggaggttgttgctccaatgttattacatttgaaaccttaatgagcaacgaaacaggcagcattaataatctcattactttttgtcaatttttatttgttacatgtcagggactccccgaatttttggatgttcatcaacctttcccttacttcaagcctttgaaaactccacttcacgtttatgtcattactgtcgttttattttatatttcttctacgacgaataataacgtatttaaatacaacatatccattccgattcatatcgttttcagatgcttcggaaccgtaataaccatgtttacatgctggttattaaatggtaggaaatatacaaagattcagattttatctacattatttttaaccattggagctataattgcctctttattcaaagatgctgattttagataccaagatttgaaattacaagcgtggaaaattggaagtgaccaatctgtagatctcacttttatttttggcatttgtatattagtactttcttctttcacatcttctttactttctgcatacaatgaacgtacgtatcaaaaatatggaaagcattggaaggagaatatcttttacagtcattttttatctttacctctctttttgtttagtaggaagcagttaattcacgaatatagagtgatgagaaagtctgaaagaatattgtgttctaattttggagggaagattttagtcccgagagaagaaactctccttcttttcaatgtgttaacacaatatttttgcgtcaagggtgttaatatcctcgccagtaaaacaaacgctttaacactttccataacattacttgtaagaaaatttataagtcttttattaagcgtcagacttttcgataataacttgagttatactggctacatcggggtctacttagtcttttttggtgcctttatatactctttgggatctattcaccccaggcaaaatgacaagggggcgataaagaaaagtaaatga

SEQ ID NO: 2987 - DNA, 336 bp, Saccharomyces cerevisiae
atggaacaaaggaacaacgtctttcaagcaaaatataatgaatacaaacaaattttggaagaattgcaaacaaaaatcatagaattaggtcatgacaaagatgaacacactatagtcataaaaacactgaaagacgctgagccgacgagaaaatgttacaggatgataggtggcgcacttgttgaaagtgatgttcaaacgagtttgcctattcttgaaactaagaaggaaaacatagaaggtacaataagtaaaatgaaagaaaccttaatacaaactgcaaaagagtttgaaaaatggaaaaaagacaataagattcaagtcgttaaaaactaa

SEQ ID NO: 2988 - DNA, 336 bp, Artificial Sequence
  Description of Artificial Sequence: Synthetic polynucleotide
atggaacaaaggaacaacgtctttcaagcaaaatataatgaatacaaacaaattttggaagaattgcaaacaaaaatcatagaattaggtcatgacaaagatgaacacactatagtcataaaaacattaaaagacgctgagccgacgagaaaatgttacaggatgataggtggcgcacttgttgaaagtgatgttcaaacgagtttgcctattcttgaaactaagaaggaaaacatagaaggtacaataagtaaaatgaaagaaaccttaatacaaactgcaaaagagtttgaaaaatggaaaaaagacaataagattcaagtcgttaaaaactga

SEQ ID NO: 2989 - DNA, 1293 bp, Saccharomyces cerevisiae
atgcggaccgattggaattttttcttttgtatccttctgcaggccattttcgttgtgggcacacaaacttcaagaacgcttgttctttacgaccaatctacggaacctttagaggagtactcagtctatttaaaagatctagaacaaaggaattacaaacttgaatatttagatattaacagtacttccactactgtggatttgtatgacaaagagcaaagattgtttgataacatcatcgtttttcctaccaaaggaggcaagaatttagcgagacaaatcccagttaagcagttgattaaattttttgaaaatgaaggtaacattttatgcatgagttctccaggtgctgttccgaataccattcgtttatttttgaatgaattaggtatctatccaagtccaaaaggacacgttattcgtgactatttttcgccctcctcagaagagctagtggtttcttctaaccatcttctgaacaaatatgtgtacaacgccagaaaaagcgaggattttgtttttggggaaagttcagctgctttattagaaaatcgtgaacaaatcgtcccaattttaaacgctccaagaacatcctttactgagtccaaaggcaaatgcaactcttggaccagcggatctcaaggctttcttgtagttggtttccagaacttaaacaatgctcgtttagtatggatcggcagtagtgatttcttaaagaacaaaaatcaggactctaatcaggagtttgcaaaagaattactaaaatggacatttaatgaaaaatctgtaatcaaaagtgtgcatgcggttcattcacatgcggatggtactagttatgacgaagagccctacaaaatcaaggacaaagttatttattctgtaggcttttcggaatggaatggagaagaatggctaccacatatcgctgatgatatccaatttgaactaagacaagtggatccgtactaccgtctaacattgtcgccaagcggaaacgattctgaaactcagtattacaccaccggtgaattcatccttccagaccgccatggagtgtttacattcctcactgactatcgtaagattggcctgtcgttcactactgacaaagacgttaaagctatccgtcaccttgctaatgatgaatacccaagaagttgggaaatcagcaattcttgggtttatattagcgccatttgtggcgtcattgttgcgtggatattttttgttgtttctttcgttacgacttcctctgttggcaagaaacttgaaacattcaaaaaaacaaactaa

SEQ ID NO: 2990 - DNA, 1293 bp, Artificial Sequence
  Description of Artificial Sequence: Synthetic polynucleotide
atgagaaccgattggaattttttcttttgtatccttttacaggccattttcgttgtgggcacacaaacttccagaacgcttgttctttacgaccaatctacggaacctttagaggagtactctgtctatttaaaagatttggaacaaaggaattacaaacttgaatatttagatattaacagtacttccactactgtggatttgtatgacaaagagcaaagattgtttgataacatcatcgtttttcctaccaaaggaggcaagaatttagcgagacaaatcccagttaagcagttgattaaattttttgaaaatgaaggtaacattttatgcatgagttctccaggtgctgttccgaataccattcgtttatttttgaatgaattaggtatctatccaagtccaaaaggacacgttattcgtgactatttttctccctccagtgaagagttggtggtttcttctaaccatcttttgaacaaatatgtgtacaacgccagaaaaagcgaggattttgtttttggggaaagttctgctgctttattagaaaatcgtgaacaaatcgtcccaattttaaacgctccaagaacatcctttactgagtccaaaggcaaatgcaactcttggaccagcggatctcaaggctttcttgtagttggtttccagaacttaaacaatgctcgtttagtatggatcggcagtagtgatttcttaaagaacaaaaatcaggactctaatcaggagtttgcaaaagaattattgaaatggacatttaatgaaaaatctgtaatcaaaagtgtgcatgcggttcattctcatgcggatggtactagttatgacgaagagccctacaaaatcaaggacaaagttatttattctgtaggcttttctgaatggaatggagaagaatggttaccacatatcgctgatgatatccaatttgaattgagacaagtggatccgtactaccgtttaacattgtctccaagcggaaacgattctgaaactcagtattacaccaccggtgaattcatccttccagaccgccatggagtgtttacattcctcactgactatcgtaagattggcctttctttcactactgacaaagacgttaaagctatccgtcaccttgctaatgatgaatacccaagaagttgggaaatcagcaattcttgggtttatattagcgccatttgtggcgtcattgttgcgtggatattttttgttgtttctttcgttacgacttcctctgttggcaagaaacttgaaacattcaaaaaaacaaactga

SEQ ID NO: 2991 - DNA, 678 bp, Saccharomyces cerevisiae
atgaggttttctatgttaatcgggtttaatttattaactgccttgagcagcttctgtgctgccatatcagctaataatagcgacaatgtcgaacatgaacaggaagttgcggaggcggtagcgccaccttctattaatatagaggtgaaatatgatgtcgttgggaaggaatcagaaaatcatgattctttccttgagttttacgcggaggataccgctaccttagcctataatgttactaattgggaagatactaatatcacaatttttggtgtcaacggaacaattgttacatatccacatggttatcctgtggcggacattacaggtgcgagtattgggccttacgaaatggaggtcaacggaacttcaaaattcgggcaagacgttacgttaaatttaccggaaggacaatactttttaatcccatttttattagcttctaggttcgatgaaatcgtgagaattgcggcaccaccaaccctattcgaaattgttagcccacctatttcctttttcaacccacaatttttatcagttcaggtcatctttctagccatcatcggaggtgtaagttattactacatgaagtctaaaacaaatcaaagaccttccaagaagagtgccactgtcaaaaaagttgatgaatcatggttgccagaaacctataaaaaataa

SEQ ID NO: 2992 - DNA, 678 bp, Artificial Sequence
  Description of Artificial Sequence: Synthetic polynucleotide
atgaggttttctatgttaatcgggtttaatttattaactgccttgagcagcttctgtgctgccatatctgctaataatagcgacaatgtcgaacatgaacaggaagttgcggaggcggtagcgccaccttctattaatatagaggtgaaatatgatgtcgttgggaaggaaagtgaaaatcatgattctttccttgagttttacgcggaggataccgctaccttagcctataatgttactaattgggaagatactaatatcacaatttttggtgtcaacggaacaattgttacatatccacatggttatcctgtggcggacattacaggtgcgagtattgggccttacgaaatggaggtcaacggaacttctaaattcgggcaagacgttacgttaaatttaccggaaggacaatactttttaatcccatttttattagcttctaggttcgatgaaatcgtgagaattgcggcaccaccaacccttttcgaaattgttagcccacctatttcctttttcaacccacaatttttaagtgttcaggtcatctttttggccatcatcggaggtgtaagttattactacatgaagtctaaaacaaatcaaagaccttccaagaagagtgccactgtcaaaaaagttgatgaaagttggttgccagaaacctataaaaaatga

SEQ ID NO: 2993 - DNA, 2289 bp, Saccharomyces cerevisiae
atgttggcactccggagatttatattaaaccaaaggtctttgagatcgtgtaccataccgattctagtcggagccttgatcattattctcgtgctattccaactagttacccaccgaaatgatgcgcttatacgatcaagcaatgtaaacagtacaaacaagaaaacattgaaagatgcagatcctaaggttcttattgaagccttcggctctcctgaggtcgacccagtggatacaattccagtatcgccactagaattagttccattttatgaccagtctatagatactaaaaggagttctagttggctaatcaataagaagggctattataagcatttcaacgaattaagcttaactgatagatgtaaattttatttccggacactgtatacgctagacgatgaatggactaatagtgtgaagaaactggagtacagcataaatgataatgaaggagttgacgaaggtaaagatgcgaatggaaatccaatggatgagaaatccgagagattgtatcgccggaaatatgatatgttccaggcatttgagagaataagagcctatgatagatgttttatgcaggccaatccagttaatattcaagaaatttttccgaaaagtgataagatgtcgaaagagagggttcaatcaaaattaatcaaaaccttaaatgctactttccctaattatgatccagacaattttaagaaatacgatcaattcgaattcgagcacaaaatgtttccgtttataaataactttaccacagagacttttcatgagatggttccaaaaatcacatcaccttttggaaaagtattagagcaaggcttcttacccaagttcgatcataaaactggtaaagtgcaggagtatttcaaatatgaatacgatccatcaaaaaccttctgggccaattggagggatatgagcgccaaagtagccggtcgtggtattgtattgagtttaggttccaaccaatttccattagctgtcaaatttattgcttctttgagatttgaagggaatactttaccgatccaagtggtctatagaggcgatgagctgtcgcaagaactagtggacaaacttatatatgctgctagaagtcctgatttcaaaccagtagaaaataattacgataattctaccaatgttccacaagaaatttggttcctagatgtttctaataccatccaccctaagtggcgaggtgacttcggtagttataaaagtaaatggctagtggttctactcaatcttttgcaagaatttgtctttttagatattgatgctattagttatgaaaaaattgataactacttcaagaccactgaataccagaagacaggaactgtattttacagggaaagggcgctaagagaaaacgtgaatgaaagatgtattgctagatatgaaactctattgcctagaaaccttgaatctaaaaatttccaaaactcacttcttatcgatcctgatcatgctctcaacgaatgtgacaatactttaactacagaagagtacatattcaaagctttttttcatcatagaaggcagcaccagttagaagctggtttatttgctgtcgacaaatcaaaacacacgatccccctagtgcttgctgctatgattcatttggccaaaaatacagcccactgcacacatggtgataaagagaatttctggttagggttcttggccgcaggtcacacttatgcactgcagggagtgtattccggagctattggtgattatgtaaagaaaaccgacttgaacggaaagaggcaagaagctgcagtcgaaatatgttccgggcaaatagcacatatgtctactgataagaaaactttactttgggttaacggtggaggtaccttttgtaaacacgataatgctgctaaagatgattggaaaaaagatggcgactttaagaaattcaaagatcaattcaagacttttgaagaaatggaaaaatattattacataactccaatcagcagcaaatatgtcatcttacctgatccaaaatctgatgattggcatagggcctctgcaggtgcttgtggtggttatatatggtgtgccacacataaaaccctcctaaagccatatagttataaccacagaaccactcacggcgaattaataactctagatgaggagcagcgcctacatattgatgctgtcaacactgtttggtcacatgctaataaagataacaccagatcattcactgaagaagagatcaaggaattagaaaattctagacacgaacaaagctag

SEQ ID NO: 2994 - DNA, 2289 bp, Artificial Sequence
  Description of Artificial Sequence: Synthetic polynucleotide
atgttggcactcagaagatttatattaaaccaaaggtctttgagatcttgtaccataccgattttagtcggagccttgatcattattctcgtgcttttccaattggttacccacagaaatgatgcgcttataagaagcagcaatgtaaacagtacaaacaagaaaacattgaaagatgcagatcctaaggttcttattgaagccttcggctctcctgaggtcgacccagtggatacaattccagtatctccattggaattagttccattttatgaccagtctatagatactaaaaggagttctagttggttgatcaataagaagggctattataagcatttcaacgaattaagcttaactgatagatgtaaattttatttcagaacattatatacgcttgacgatgaatggactaatagtgtgaagaaattagagtacagcataaatgataatgaaggagttgacgaaggtaaagatgcgaatggaaatccaatggatgagaaatccgagagattgtatcgccgtaaatatgatatgttccaggcatttgagagaataagagcctatgatagatgttttatgcaggccaatccagttaatattcaagaaatttttccgaaaagtgataagatgtccaaagagagggttcaaagtaaattaatcaaaaccttaaatgctactttccctaattatgatccagacaattttaagaaatacgatcaattcgaattcgagcacaaaatgtttccgtttataaataactttaccacagagacttttcatgagatggttccaaaaatcacatctccttttggaaaagtattagagcaaggcttcttacccaagttcgatcataaaactggtaaagtgcaggagtatttcaaatatgaatacgatccatctaaaaccttctgggccaattggagggatatgagcgccaaagtagccggtcgtggtattgtattgagtttaggttccaaccaatttccattagctgtcaaatttattgcttctttgagatttgaagggaatactttaccgatccaagtggtctatagaggcgatgagttatctcaagaattagtggacaaacttatatatgctgctagaagtcctgatttcaaaccagtagaaaataattacgataattctaccaatgttccacaagaaatttggttcttggatgtttctaataccatccaccctaagtggagaggtgacttcggtagttataaaagtaaatggttggtggttttactcaatcttttgcaagaatttgtctttttagatattgatgctattagttatgaaaaaattgataactacttcaagaccactgaataccagaagacaggaactgtattttacagggaaagggcgttaagagaaaacgtgaatgaaagatgtattgctagatatgaaactttattgcctagaaaccttgaatctaaaaatttccaaaactctcttcttatcgatcctgatcatgctctcaacgaatgtgacaatactttaactacagaagagtacatattcaaagctttttttcatcatagaaggcagcaccagttagaagctggtttatttgctgtcgacaaatctaaacacacgatccccttagtgcttgctgctatgattcatttggccaaaaatacagcccactgcacacatggtgataaagagaatttctggttagggttcttggccgcaggtcacacttatgcattacagggagtgtattccggagctattggtgattatgtaaagaaaaccgacttgaacggaaagaggcaagaagctgcagtcgaaatatgttccgggcaaatagcacatatgtctactgataagaaaactttactttgggttaacggtggaggtaccttttgtaaacacgataatgctgctaaagatgattggaaaaaagatggcgactttaagaaattcaaagatcaattcaagacttttgaagaaatggaaaaatattattacataactccaatcagcagcaaatatgtcatcttacctgatccaaaatctgatgattggcatagggcctctgcaggtgcttgtggtggttatatatggtgtgccacacataaaaccctcttgaagccatatagttataaccacagaaccactcacggcgaattaataactttagatgaggagcagcgcttgcatattgatgctgtcaacactgtttggtctcatgctaataaagataacaccagatctttcactgaagaagagatcaaggaattagaaaattctagacacgaacaaagctga

SEQ ID NO: 2995 - DNA, 696 bp, Saccharomyces cerevisiae
atgacatccgttagaaaaagaaagatgaacagatcttctgttgggaaagcaaccaggagaaacaaagacaaacaaagaaagattaacatccagtctaatccgattattgcagcaaattgggactattcactgacaatggcacaaaactataagaaattagggctaagggctaaattacaaacaccagcaggaggcaaagaggccgatttaagtaaagtagttaaaagaattccattaacgaagcctgtgttggatgaagatgaagatgaagatgaaggtgaggacgagcaaaatgattataatgcggctaccgtggagctcgatgaaaatgagataccagaaggtggggcaaggatacagcgtgataagaatggtgatgttgtaagagttgtttacggtaagaaaaagaactttgatgctgatgaggatgttaacgaaataaaagctagggatactaccgaggagaccgaagtggttaagaaattagaagaacttgcgtctagaccagttatcagaaaggaacgtagccaaagtgaaagggaagaagaatggttggaaaaattatataagaaacacggtgatgattataaaaaaatgtttttcgataagaagctgaacatctaccagcaatctgagggtgacttgaaaagaaggttattaaggtggaaaaaaagaaacggtattgcatcaaaataa

SEQ ID NO: 2996 - DNA, 696 bp, Artificial Sequence
  Description of Artificial Sequence: Synthetic polynucleotide
atgacatccgttagaaaaagaaagatgaacagatcttctgttgggaaagcaaccaggagaaacaaagacaaacaaagaaagattaacatccagtctaatccgattattgcagcaaattgggactattctttaacaatggcacaaaactataagaaattagggttaagggctaaattacaaacaccagcaggaggcaaagaggccgatttaagtaaagtagttaaaagaattccattaacgaagcctgtgttggatgaagatgaagatgaagatgaaggtgaggacgagcaaaatgattataatgcggctaccgtggagctcgatgaaaatgagataccagaaggtggggcaaggatacagcgtgataagaatggtgatgttgtaagagttgtttacggtaagaaaaagaactttgatgctgatgaggatgttaacgaaataaaagctagggatactaccgaggagaccgaagtggttaagaaattagaagaacttgcgtctagaccagttatcagaaaggaacgtagccaaagtgaaagggaagaagaatggttggaaaaattatataagaaacacggtgatgattataaaaaaatgtttttcgataagaagttgaacatctaccagcaatctgagggtgacttgaaaagaaggttattaaggtggaaaaaaagaaacggtattgcatccaaatga

SEQ ID NO: 2997 - DNA, 1290 bp, Saccharomyces cerevisiae
atgtccaacaagctgttcaggttagatgcaggctaccaacaatacgactggggtaaaatcggctcttcttcagctgtcgctcaatttgctgcccattctgacccctctgttcaaattgaacaagataaaccatatgcagagttatggatgggtacccacagcaagatgccttcctacaaccatgagtctaaggaatccctgagagatatcatctccaagaacccctctgccatgttaggtaaggacattattgataagttccacgccacaaatgaattgcccttccttttcaaagttttgtccattgaaaaagtcttgtctattcaagcacatcccgacaaagccttgggtaaaatattgcacgctcaagatcctaagaactatcctgatgataatcacaaacctgaaatggccatcgctgtgactgactttgaaggtttctgcgggttcaaacctttgcaagagattgcagatgaattgaaacgtattcctgaattacgcaacattgttggtgaagaaacttccaggaattttattgagaacattcaaccttctgctcagaaaggttccccagaagatgagcaaaacaaaaagctattgcaagctgttttcagcagggtcatgaacgcttcggatgacaaaatcaagattcaagctcgctccttggtcgaaagatcaaagaattctccatcagactttaacaaacctgatttaccagaattaattcaaagactgaataaacagttccctgatgacgtgggtttgttttgtggatgtttattgttgaatcactgcagattgaatgctggtgaagccatctttttaagagctaaggatcctcacgcctatataagcggtgatattatggaatgtatggctgcttctgacaacgtagttagagcaggcttcactccaaaattcaaggatgttaaaaacttggtctccatgttaacctatacatatgatcctgtggaaaagcaaaaaatgcagcctttaaagttcgacaggtcctctggtaacggtaagtcagttttatataaccctccaatcgaagaatttgctgtattggagactacttttgatgagaaacttggtcaaaggcattttgaaggtgttgatggtccaagtatcttaatcactacaaaaggtaatggttacattaaagcagatggccaaaaattgaaagctgaacccggttttgtctttttcatcgctccacatttgcctgttgatttggaagctgaagatgaggcgtttactacctatagagcctttgtggaaccaaattag

SEQ ID NO: 2998 - DNA, 1290 bp, Artificial Sequence
  Description of Artificial Sequence: Synthetic polynucleotide
atgtccaacaagcttttcaggttagatgcaggctaccaacaatacgactggggtaaaatcggctcttcttctgctgtcgctcaatttgctgcccattctgacccctctgttcaaattgaacaagataaaccatatgcagagttatggatgggtacccacagcaagatgccttcctacaaccatgagtctaaggaatccttgagagatatcatctccaagaacccctctgccatgttaggtaaggacattattgataagttccacgccacaaatgaattgcccttccttttcaaagttttgtccattgaaaaagtcttgtctattcaagcacatcccgacaaagccttgggtaaaatattgcacgctcaagatcctaagaactatcctgatgataatcacaaacctgaaatggccatcgctgtgactgactttgaaggtttctgcgggttcaaacctttgcaagagattgcagatgaattgaaacgtattcctgaattacgcaacattgttggtgaagaaacttccaggaattttattgagaacattcaaccttctgctcagaaaggttccccagaagatgagcaaaacaaaaagttgttgcaagctgttttcagcagggtcatgaacgcttctgatgacaaaatcaagattcaagctcgctccttggtcgaaagatccaagaattctccatctgactttaacaaacctgatttaccagaattaattcaaagattgaataaacagttccctgatgacgtgggtttgttttgtggatgtttattgttgaatcactgcagattgaatgctggtgaagccatctttttaagagctaaggatcctcacgcctatataagcggtgatattatggaatgtatggctgcttctgacaacgtagttagagcaggcttcactccaaaattcaaggatgttaaaaacttggtctccatgttaacctatacatatgatcctgtggaaaagcaaaaaatgcagcctttaaagttcgacaggtcctctggtaacggtaagtctgttttatataaccctccaatcgaagaatttgctgtattggagactacttttgatgagaaacttggtcaaaggcattttgaaggtgttgatggtccaagtatcttaatcactacaaaaggtaatggttacattaaagcagatggccaaaaattgaaagctgaacccggttttgtctttttcatcgctccacatttgcctgttgatttggaagctgaagatgaggcgtttactacctatagagcctttgtggaaccaaattga

SEQ ID NO: 2999 - DNA, 696 bp, Saccharomyces cerevisiae
atgaatgggttggtattaggcgctacaggtttatgcggaggcgggtttctgaggcacgcacaggaggcaccccagttctctaaggtatacgcgatcttgagaagggaattgccctttccggccactgataaagttgtggccatagtagaaagggataattcaaagtggtcacaattgatcaccaatgaaatgaatccgcaggtgctattcaccgcactggcaacgacaagggcagctgcaggcggtttggacaagcaatacaagatcgatcatgatttaaacttacaattggcccaggctgccaaggaaaaaggatgtgaaacgatcgttctcgtttcttccgctggtgctcatccggactccaggttcggctacatgaagatgaagggcgagattgaacgcgatgttatcgctcttgattttaagcacattataattttgcgcccaggccctctccttggtgaacggacaaattctaaacaaagcggatttggcggcaatctgactgctgctttgggcactcgcgtgtaccgttctagattccagaggttgctaggctatccagtttatggcgatgaggtaggaaaagttggtgttcatttggcgttgaatacttctgggaaagacaaggttcagtttgtctccagcaaggacattcttgacatctcagcttctctggagaagattgctacctaa

SEQ ID NO: 3000 - DNA, 696 bp, Artificial Sequence
  Description of Artificial Sequence: Synthetic polynucleotide
atgaatgggttggtattaggcgctacaggtttatgcggaggcgggtttttaaggcacgcacaggaggcaccccagttctctaaggtatacgcgatcttgagaagggaattgccctttccggccactgataaagttgtggccatagtagaaagggataattctaagtggtctcaattgatcaccaatgaaatgaatccgcaggtgcttttcaccgcattggcaacgacaagggcagctgcaggcggtttggacaagcaatacaagatcgatcatgatttaaacttacaattggcccaggctgccaaggaaaaaggatgtgaaacgatcgttctcgtttcttccgctggtgctcatccggactccaggttcggctacatgaagatgaagggcgagattgaacgcgatgttatcgctcttgattttaagcacattataattttgcgcccaggccctctccttggtgaaagaacaaattctaaacaaagcggatttggcggcaatttaactgctgctttgggcactcgcgtgtaccgttctagattccagaggttgttgggctatccagtttatggcgatgaggtaggaaaagttggtgttcatttggcgttgaatacttctgggaaagacaaggttcagtttgtctccagcaaggacattcttgacatctctgcttctttggagaagattgctacctga

SEQ ID NO: 3001 - DNA, 1893 bp, Saccharomyces cerevisiae
atgctcatagaaaacactaatgatcggtttggtatcgtcatagatgcagggtcttcgggttcgagaatccatgtgtttaagtggcaggacacggaatcgcttcttcatgcaacaaaccaggactcacagtccatattacaatcagtacctcatattcatcaagaaaaagactggacttttaagctgaatccaggcttgtcgagttttgaaaaaaaacctcaagatgcgtacaaatctcacatcaagccgttactagattttgctaagaatattatccctgaatcacattggtcgagttgtcccgtttttattcaagcaaccgcgggcatgcgccttttacctcaagacatacaatcttccattttggatggtttgtgtcaggggctcaaacaccctgcagaatttttggttgaggattgctcagcacaaattcaagtcattgatggtgaaaccgaaggtttatatggctggcttggcttaaactatctatatggacactttaatgactataatccagaggtctctgaccattttacatttgggtttatggacatgggcggtgcctctactcagattgcgtttgcaccgcatgattcaggagaaatagctagacatagagatgacatcgccaccatcttcttgaggagtgttaacggagatttgcagaaatgggacgtttttgttagtacgtggttagggtttggtgccaatcaggctagaagaaggtacttggctcagttgatcaatacccttccagaaaacacaaatgattacgaaaatgatgacttctctacaaggaacttgaatgatccatgtatgccgcgaggaagcagcacggattttgaatttaaagataccatatttcacatcgcgggttctgggaattacgaacaatgtacaaaatctatttatccgttacttttaaagaacatgccttgtgatgacgagccgtgcttgtttaatggtgttcatgctcctcgaatagactttgccaatgacaaatttataggtacttctgagtactggtacactgccaacgacgtattcaaacttgggggcgaatacaactttgacaaatttagcaaaagcctaagggagttttgcaattccaattggacgcaaatattagcgaacagtgataaaggcgtgtataattctattccggagaattttttgaaagatgcatgctttaagggcaattgggtccttaatatacttcatgaagggtttgatatgcctcgaatagatgtcgacgcagaaaatgtcaatgacaggcccttatttcaaagtgtggaaaaagtcgaagaacgagagttatcgtggacactaggcagaattttactttatgcctcaggtagcatattggcaggtaatgatgacttcatggtgggtattgcgcccagtgaaagaagaactaagctcactggtaagaaattcatacctggcaagttactggagtctgatcaactacgcaagcaaagttccagcctttctaataaaggatttttgatgtggttcgcaattatttgttgcatattttacttgatctttcataggtcacacataatcagaagacgtttttccggtctgtacaacattaccaaggactttaagacaggcataaggagaaggttgaaatttctaaggagatcagatccattttccagattggaggaaggtgaacttggaacagacgtagatggcttcaaagatgtgtacaggatgaagagtagcagtatgtttgatcttggtaagagttcagccacaatgcaaagggagcacgaaccacaaaggacagcaagtcagtccgctaatctcgctccgtcaaacttacgacctgcgttttctatggctgatttttccaaatttaaggacagtaggctatatgattga

SEQ ID NO: 3002 - DNA, 1893 bp, Artificial Sequence
  Description of Artificial Sequence: Synthetic polynucleotide
atgctcatagaaaacactaatgatagatttggtatcgtcatagatgcagggtcttctggttccagaatccatgtgtttaagtggcaggacacggaatctcttcttcatgcaacaaaccaggactctcagtccatattacaaagtgtacctcatattcatcaagaaaaagactggacttttaagttgaatccaggcttgagcagttttgaaaaaaaacctcaagatgcgtacaaatctcacatcaagccgttattagattttgctaagaatattatccctgaaagtcattggtctagttgtcccgtttttattcaagcaaccgcgggcatgcgccttttacctcaagacatacaatcttccattttggatggtttgtgtcaggggctcaaacaccctgcagaatttttggttgaggattgctctgcacaaattcaagtcattgatggtgaaaccgaaggtttatatggctggcttggcttaaactatttgtatggacactttaatgactataatccagaggtctctgaccattttacatttgggtttatggacatgggcggtgcctctactcagattgcgtttgcaccgcatgattctggagaaatagctagacatagagatgacatcgccaccatcttcttgaggagtgttaacggagatttgcagaaatgggacgtttttgttagtacgtggttagggtttggtgccaatcaggctagaagaaggtacttggctcagttgatcaatacccttccagaaaacacaaatgattacgaaaatgatgacttctctacaaggaacttgaatgatccatgtatgccgagaggaagcagcacggattttgaatttaaagataccatatttcacatcgcgggttctgggaattacgaacaatgtacaaaatctatttatccgttacttttaaagaacatgccttgtgatgacgagccgtgcttgtttaatggtgttcatgctcctagaatagactttgccaatgacaaatttataggtacttctgagtactggtacactgccaacgacgtattcaaacttgggggcgaatacaactttgacaaatttagcaaaagcttgagggagttttgcaattccaattggacgcaaatattagcgaacagtgataaaggcgtgtataattctattccggagaattttttgaaagatgcatgctttaagggcaattgggtccttaatatacttcatgaagggtttgatatgcctagaatagatgtcgacgcagaaaatgtcaatgacaggcccttatttcaaagtgtggaaaaagtcgaagaaagagagttatcttggacattaggcagaattttactttatgcctctggtagcatattggcaggtaatgatgacttcatggtgggtattgcgcccagtgaaagaagaactaagctcactggtaagaaattcatacctggcaagttattggagtctgatcaattgcgcaagcaaagttccagcctttctaataaaggatttttgatgtggttcgcaattatttgttgcatattttacttgatctttcataggtctcacataatcagaagacgtttttccggtttatacaacattaccaaggactttaagacaggcataaggagaaggttgaaatttttaaggagaagtgatccattttccagattggaggaaggtgaacttggaacagacgtagatggcttcaaagatgtgtacaggatgaagagtagcagtatgtttgatcttggtaagagttctgccacaatgcaaagggagcacgaaccacaaaggacagcaagtcagtccgctaatctcgctccgtctaacttaagacctgcgttttctatggctgatttttccaaatttaaggacagtaggttatatgattga

SEQ ID NO: 3003 - DNA, 1563 bp, Saccharomyces cerevisiae
atgagagtcagaaagcgccaatctagaagaacatctaccaagttgaaggaaggtattaagaagaaggcttctgcccatagaaaaaaggaaaagaagatggctaagaaggacgttacttggagatcaaggtctaagaaagaccctggtattccttctaactttccttataaggctaagatcttagaagaaatagaagccaaaaaaatgaaggacttagaggaaagagagcttgccaaacaacaacgattggaggctaggaaagctgccaaggaacaaggcgttgatgcaatggatgaagacatgatagaagacgatgaaaatggattagcagctttggttgagtctgctcagcaagcagctgctgaatatgagggcacaccctctaatgatgcagatgttcgtgatgatgaattggacgtcattgattataacattgatttctacggtgaagatgtagaaggcgagtcagaacttgaaaaatctaggaaagcttatgacaagattttcaaatccgttattgatgcttctgatgtcatcctatatgttttggatgccagagatccagagagtacaagatcaagaaaggtggaagaagccgtcttacaaagtcagggtaaaaggctgattttaatactgaacaaagttgatttaattcccccacatgtattggaacaatggttaaattacttaaagtctagttttcctacaatcccattaagagcttcttctggtgcagtcaacggaacttctttcaacagaaagctaagccaaaccactactgcaagtgcactgctagagtcgctgaaaacttactctaataacagcaatttgaagagatctattgtagtgggtgttatcggttatccaaatgttggtaaatcatctgttatcaacgctcttttggcgcgccgtggaggtcaatcaaaggcttgcccagtcggtaatgaagcaggtgttactacctctctgagagagatcaaaatcgacaacaagttgaagattctagattctcctggtatatgtttcccaagcgaaaataagaaaagatcgaaagttgaacatgaagctgaattagctcttctaaatgctctaccggcaaaacacattgttgatccgtatccagctgtcttaatgttggtaaagagactagctaaatcagatgaaatgacagagagctttaaaaagctgtatgaaattcctcctattcctgctaatgatgcagatacgtttacaaaacatttcttaattcacgtcgctcgtaaaagaggtagattagggaaaggcggtattccaaatcttgccagtgctggtctttcggtacttaatgactggagggatggtaaaattcttggttgggttttaccaaatacatcggcagctgcatctcaacaagataaacaaaatctaagtactataaacactggcactaaacaagctccaattgcagcaaatgaatccaccattgtatccgagtggtccaaagaatttgatttggatggattatttagctctcttgacaaggccatagatgctagcaaagatcaagatacaatgatggaataa

SEQ ID NO: 3004 - DNA, 1563 bp, Artificial Sequence
  Description of Artificial Sequence: Synthetic polynucleotide
atgagagtcagaaagcgccaatctagaagaacatctaccaagttgaaggaaggtattaagaagaaggcttctgcccatagaaaaaaggaaaagaagatggctaagaaggacgttacttggagaagtaggtctaagaaagaccctggtattccttctaactttccttataaggctaagatcttagaagaaatagaagccaaaaaaatgaaggacttagaggaaagagagcttgccaaacaacaaagattggaggctaggaaagctgccaaggaacaaggcgttgatgcaatggatgaagacatgatagaagacgatgaaaatggattagcagctttggttgagtctgctcagcaagcagctgctgaatatgagggcacaccctctaatgatgcagatgttcgtgatgatgaattggacgtcattgattataacattgatttctacggtgaagatgtagaaggcgagagtgaacttgaaaaatctaggaaagcttatgacaagattttcaaatccgttattgatgcttctgatgtcatcttatatgttttggatgccagagatccagagagtacaagatctagaaaggtggaagaagccgtcttacaaagtcagggtaaaaggttgattttaatattaaacaaagttgatttaattcccccacatgtattggaacaatggttaaattacttaaagtctagttttcctacaatcccattaagagcttcttctggtgcagtcaacggaacttctttcaacagaaagttgagccaaaccactactgcaagtgcattattggagtctttgaaaacttactctaataacagcaatttgaagagatctattgtagtgggtgttatcggttatccaaatgttggtaaatcttctgttatcaacgctcttttggcgcgccgtggaggtcaatccaaggcttgcccagtcggtaatgaagcaggtgttactacctctttgagagagatcaaaatcgacaacaagttgaagattttagattctcctggtatatgtttcccaagcgaaaataagaaaagaagtaaagttgaacatgaagctgaattagctcttttgaatgctttaccggcaaaacacattgttgatccgtatccagctgtcttaatgttggtaaagagattggctaaatctgatgaaatgacagagagctttaaaaagctttatgaaattcctcctattcctgctaatgatgcagatacgtttacaaaacatttcttaattcacgtcgctcgtaaaagaggtagattagggaaaggcggtattccaaatcttgccagtgctggtctttctgtacttaatgactggagggatggtaaaattcttggttgggttttaccaaatacaagtgcagctgcatctcaacaagataaacaaaatttgagtactataaacactggcactaaacaagctccaattgcagcaaatgaatccaccattgtatccgagtggtccaaagaatttgatttggatggattatttagctctcttgacaaggccatagatgctagcaaagatcaagatacaatgatggaatga

SEQ ID NO: 3005 - DNA, 1557 bp, Saccharomyces cerevisiae
atgacttatgaaattggggacagactcaagattggtggatatttttgcaccatcaaattcataggtgttattaagccgtggccttcggtaaaagcttatggggtggaatgggacgatcacagccggggaaaacattctggaacaatagatgacatacactattttgacgttcaaattcctaattcaggatcatttttgaaggagtctaagattaaatctccaggtgtacgcagaattacgttttacgaagcattgtcagaaaagtatggaggctcgagtaataacattaatgacctatctataggtaacaaaagggttgagggtttgggattcgatgaactaaatgcgagaaataagaattataagaagttaagaaaaatagctttgcgagattccgatgtcgctatattgtttcaaaatcaagatgagttaaaccgtgtaatacaaaattgtgtgaacgtcaaggaccttgatttatcgcttaatctattcacgaatatcaactctttatgtgagttcatagaacctttgaagaacttggagagccttaatatatctcaaaataaacttttaagcggttgggacaacttgaaagaatatgacctatcacacatcaaaactttacgtctgtcttcctgtggtttaagttataaacatattggtaagctgctcaaaagcttcaggacactgaaaatgttggatttaagctataacaacttgaccagtgcgggaatccaaaattttgagaatgaaataccgtgtactttggaggaactgaatattagcggaaataatcttatatcgtttccattgtttccaaaaaatttgacattgaaaggtttaaatgtctccaataatcaaatttctagagcaccaagtattgctatttattctgttgaatccttggatataacagataacaaatttaaggaaagaagtttgatagatgatttgaataagacatttccctctttgaaaaatatccatctgagtggcaacgaattcaactacaacggaaattatattaacgtcgaagaacaggctactttttatgaagtactggctaggtttgatcgtgtgatggtattgaatggatcaatatgtgatgtaaaaacaagaagagaggctgagatgttttttgtttccaaggtaatgaataacgaattgagctatgacaccaatctgccgcgttggtcaagcctcataaagtcgtatgaaatcgatatgagtaagctaagtttcaacaatgaaagagaaacacggcaatctcttgtcttaaaaataaagataagagctggcaagaagccgagtagtgatttagattattgggtccttcccagttttacagtaaggtacgttaagagtgtaatatgtcgaaagctaaactttgacatactgaatgttaagttatttcatgaaaattctgaagggatgataaacgaaataaagtataattttcgccccatttcagattttaatgttgtgaacggagatattattcatgtttcgtctccagtaaataacaagagcattcagaaggttaacagcccatcgtaa

SEQ ID NO: 3006 - DNA, 1557 bp, Artificial Sequence
  Description of Artificial Sequence: Synthetic polynucleotide
atgacttatgaaattggggacagactcaagattggtggatatttttgcaccatcaaattcataggtgttattaagccgtggccttctgtaaaagcttatggggtggaatgggacgatcacagcagaggaaaacattctggaacaatagatgacatacactattttgacgttcaaattcctaattctggaagttttttgaaggagtctaagattaaatctccaggtgtacgcagaattacgttttacgaagcattgagtgaaaagtatggaggctccagtaataacattaatgacttgtctataggtaacaaaagggttgagggtttgggattcgatgaattgaatgcgagaaataagaattataagaagttaagaaaaatagctttgagagattccgatgtcgctatattgtttcaaaatcaagatgagttaaaccgtgtaatacaaaattgtgtgaacgtcaaggaccttgatttatctcttaatttattcacgaatatcaactctttatgtgagttcatagaacctttgaagaacttggagagccttaatatatctcaaaataaacttttaagcggttgggacaacttgaaagaatatgacttatcccacatcaaaactttacgtttatcttcctgtggtttaagttataaacatattggtaagttactcaaaagcttcaggacattaaaaatgttggatttaagctataacaacttgaccagtgcgggaatccaaaattttgagaatgaaataccgtgtactttggaggaattgaatattagcggaaataatcttatatcctttccattgtttccaaaaaatttgacattgaaaggtttaaatgtctccaataatcaaatttctagagcaccaagtattgctatttattctgttgaatccttggatataacagataacaaatttaaggaaagaagtttgatagatgatttgaataagacatttccctctttgaaaaatatccatttgagtggcaacgaattcaactacaacggaaattatattaacgtcgaagaacaggctactttttatgaagtattggctaggtttgatcgtgtgatggtattgaatggatccatatgtgatgtaaaaacaagaagagaggctgagatgttttttgtttccaaggtaatgaataacgaattgagctatgacaccaatttaccgcgttggtctagcctcataaagagttatgaaatcgatatgagtaagttgagtttcaacaatgaaagagaaacaagacaatctcttgtcttaaaaataaagataagagctggcaagaagccgagtagtgatttagattattgggtccttcccagttttacagtaaggtacgttaagagtgtaatatgtagaaagttgaactttgacatattgaatgttaagttatttcatgaaaattctgaagggatgataaacgaaataaagtataattttcgccccatttctgattttaatgttgtgaacggagatattattcatgtttcttctccagtaaataacaagagcattcagaaggttaacagcccatcttga

SEQ ID NO: 3007 - DNA, 546 bp, Saccharomyces cerevisiae
atgtttaagaaattcacaagagaagatgtccattcacgttcaaaggtcaaatcttcaattcaaagaacgttaaaggccaaattggtcaagcagtaccccaaaatagaagatgttattgatgaattaattcctaagaagagtcaaatcgagttgattaaatgtgaagataagatccaattgtattccgtcgatggtgaagttcttttttttcaaaaattcgatgaactgattccaagcctgaaattagtacacaaatttccagaggcttatcccactgttcaggttgatagaggtgctattaaattcgttctctcaggtgctaatatcatgtgccctggcctaacttctgcgggtgccgacttaccacctgctcctggttacgagaaaggtacgattgtagtcatcaatgccgaaaataaagagaatgcattggctattggtgaattgatgatgggtactgaagaaattaaatcagtgaacaaaggtcattccatagaattgattcaccatttgggcgaccccttatggaacttcagcgttgagtaa

SEQ ID NO: 3008 - DNA, 546 bp, Artificial Sequence
  Description of Artificial Sequence: Synthetic polynucleotide
atgtttaagaaattcacaagagaagatgtccattctcgttccaaggtcaaatcttccattcaaagaacgttaaaggccaaattggtcaagcagtaccccaaaatagaagatgttattgatgaattaattcctaagaagagtcaaatcgagttgattaaatgtgaagataagatccaattgtattccgtcgatggtgaagttcttttttttcaaaaattcgatgaattgattccaagcttgaaattagtacacaaatttccagaggcttatcccactgttcaggttgatagaggtgctattaaattcgttctctctggtgctaatatcatgtgccctggcttaacttctgcgggtgccgacttaccacctgctcctggttacgagaaaggtacgattgtagtcatcaatgccgaaaataaagagaatgcattggctattggtgaattgatgatgggtactgaagaaattaaatctgtgaacaaaggtcattccatagaattgattcaccatttgggcgaccccttatggaacttcagcgttgagtga

SEQ ID NO: 3009 - DNA, 4011 bp, Saccharomyces cerevisiae
atgaggtcctcgaagtctccttttaaaaggaagtctcacagtcgtgagacatcacacgatgaaaacacatcgtttttccacaagagaacaatatccggtagcagtgctcaccattctagaaacgtcagtcaaggtgcagtaccctcttccgcaccacctgtttctggtggaaattattcgcataagagaaacgtgtcgagagcttcaaattcctctcaaacttcgaattttttagccgaacaatatgaaagggataggaaagccataattaattgctgcttttccagacccgaccataagacaggtgaaccgccgaataattatattacacatgtccggattatagaagattcaaaattccctagttcaagacctcctccagattcaaaattggagaacaaaaagaaaagactccttattttgagtgccaagcccaacaatgccaagctaatacaaattcataaagcaagagaaaactcagacggctcttttcaaattggtagaacttggcagttgaccgaactagtaagagtagagaaggacctggagatatctgaaggcttcattcttaccatgagtaaaaaatactactgggaaacgaattctgcgaaggaaagaactgttttcattaaatctctaattactctatacattcaaacattcgaaggtcatgtccctgaattggtcaattgggatttatcccttttttatcttgacgagaggagttatcaaagagcagtcatcacaaatcgccccggttccgtatctccaataaagtcacctacaagtaatttcacgacaaacactacccaatcggtgggctctgtccccttttcagcacctactgagaggacaagaaggtctgaaacagaaagcgttaatccagtgtcaacgcctgcaagcgtggaatatcatgcaggaatgaaatctctaaataaggccccctattcttccaattcgacattgaatgaagtgaataaaagatacgagttagagcaacaacagcaacaagaagaggctgaactgagacgattagaagagcaaaaaagacttcagttacaaaaggaaaatgagatgaaaagattagaagaggaaagaagaataaagcaggaggagaggaaaaggcaaatggaattggaacaccaacgacaactcgaagaagaggaacgaaaacgtcaaatggaactggaggctaaaaagcaaatggagttgaaacgtcaacggcaattcgaagaagagcaacgcctaaaaaaagagagagaactattggaaatacagagaaaacaaagagaacaagaaacagctgagagattaaaaaaagaagagcaagaagcgcttgctaaaaaggaggaggaagaaaaaagtaaaagaaacaaagtagacaatgaaagttatactcaagaaataaatggtaaggttgataaccttttggaggacttaaacgcagttttggcggaagaaacagaaaccacccctactatgcaaaatggtacttacgtgcccgagagaagtacagctagagctcatgaccaattaaaaaaaccactaaatattgccaaagttgagtcactcggtggaagcgatttgaatgactcgatcagtttgagtgacgagatagcaggtttgaatacatctaacttatcaggagaggaccaagatgagaagaacgatctttcgttcgagaagggagatgaggttaggtatagcaataattttgaaggtgaagctcctcacgtgtaccatgaagtgtcaattattcaagaagaagcacctgccgtttcgcagaaattaatccttccggaagagaataacgaatctgaagcgctgattgaatctaaagaggagataaaaacgatggaaaatattgacgatgaggttttattagaaatattaacagatatcaattggtccattgaagacgatgctgatagtatgattgaaaggattgacttaagattggcggaaacggaatacttattcaaccaaaatttattatctttgcaaaaaattgggcctaatatccgcccctacgaagacaaggtcaatgacgaatgtcatcgcataatccccactctctctttattcttgatggaaatgagcaatttttctaatgatatcgaaaacgtagagagccaagataacggattacaagttgaaagtgctaacaagaaacttctatggaacacacttgatgaacttttgaaaactgtatctcttgatgaaatttccctaaatcagttattagaatgtccaataagagagaagaacttgccatggatggaaaaccaattgaatttattattaaaagcatttcaagcaataggcagcgatggaaatgaagtagaatataatctaagagaaatttccggactaaagcagaggctacagttttatgagaaagttaccaagatatttcttaacagaattgtggaggaaatgcagaagaaattctcaaatatacgtggacaagatatctcacacgatcaaatgattagaattttgacgactttattgatattttctcctttaatactgttctgtaaagaaatttcacaaaaatcgtatcaagcaattgtggaaaattggaacgtcagtattcaaccagtatacatggagttatggactaagaaaatatcacaattacaaggcattgacacaaatgatgaaaaaatgaatgagctgagcttaagccagttactaaatgaatgggacacatttagaaaagagagaaaaacaaatgatatcaacccggttttcaagaatagtttttctcttcttaccgagtgccttcaaaccatgaggcaagaatgtattgtttatcaaaattttgtcgaagtgttctttcatatatcttcaaagcataatttcgaagaatacattaaacatttcaatgatccagatgctcctccaatattattagatactgtgaaagtaatgcaatctgatagagaagcagccgttattgaaacccagttggtctcaagaatattccaacctattgtcactaggctgtcctcatattttgtagaattagtgaaagccgaaccaacggtagccccagccttaactttttacttggagaatgaaattaaaagcttagaatcatccaaccatgaatttttattgtctgcagtgactagaatgtacacacaaataaaacaagtgtggtctgataatgtagaagagcaggttttgcacttcgaaagaatttctaacgcaaccaccaatggagaaattcttccaggtatacttgatttaccagtaggcttgaagaattcagaagatttgttccaatttgctaagaggtctatggatattaaagataccgatgaaggctacgagtccatcgaattaatgaattcgagcttcaggaagctaagcatagctgccacacgatcgataactcacaaagaagttaattcaagcattaatccaaacctttcagatactgctgctttaaataatgactatatggaaactatttctctcctagtgaacagtaactggctaactgaaatgctttccatgttaaacttcaataaggatggtatatttgatacgtcattgcaaaacgttaagaaagttttcgatgtggaaaaagaatcttatgcttcctttctactccgcgatactatgcctaaactaacagcctttgtttatggtgtgagcaacatcattgaaaataccaacaatgtgaacatgaccaatccttcaagatgggccgcatatagcaggcagaacctagagaacattcttttagcatacacttcccatgaaattgaaactctagtaaaaaggctgcacactcatatggtaaatgacttcggttaccaccaagaaaatgccataaacaacgtcctatgcgataagttgtggtcgtgcattcaaggtcaaaccgtctcactatacttgaaactatacactgtaattgataaacactatagagggacaaacatacgcttcacgaagaacgatatcataagtgcgttcgaggaatacaagaatgcctaa

SEQ ID NO: 3010 - DNA, 4011 bp, Artificial Sequence
  Description of Artificial Sequence: Synthetic polynucleotide
atgaggtcctccaagtctccttttaaaaggaagtctcacagtcgtgagacaagtcacgatgaaaacacatcttttttccacaagagaacaatatccggtagcagtgctcaccattctagaaacgtcagtcaaggtgcagtaccctcttccgcaccacctgtttctggtggaaattattctcataagagaaacgtgtccagagcttctaattcctctcaaacttccaattttttagccgaacaatatgaaagggataggaaagccataattaattgctgcttttccagacccgaccataagacaggtgaaccgccgaataattatattacacatgtcagaattatagaagattctaaattccctagtagtagacctcctccagattctaaattggagaacaaaaagaaaagactccttattttgagtgccaagcccaacaatgccaagttaatacaaattcataaagcaagagaaaacagcgacggctcttttcaaattggtagaacttggcagttgaccgaattggtaagagtagagaaggacttggagatatctgaaggcttcattcttaccatgagtaaaaaatactactgggaaacgaattctgcgaaggaaagaactgttttcattaaatctttgattactttgtacattcaaacattcgaaggtcatgtccctgaattggtcaattgggatttatcccttttttatcttgacgagaggagttatcaaagagcagtcatcacaaatcgccccggttccgtatctccaataaagtctcctacaagtaatttcacgacaaacactacccaatctgtgggctctgtccccttttctgcacctactgagaggacaagaaggtctgaaacagaaagcgttaatccagtgagtacgcctgcaagcgtggaatatcatgcaggaatgaaatctttgaataaggccccctattcttccaattctacattgaatgaagtgaataaaagatacgagttagagcaacaacagcaacaagaagaggctgaattgagaagattagaagagcaaaaaagacttcagttacaaaaggaaaatgagatgaaaagattagaagaggaaagaagaataaagcaggaggagaggaaaaggcaaatggaattggaacaccaaagacaactcgaagaagaggaaagaaaacgtcaaatggaattagaggctaaaaagcaaatggagttgaaacgtcaaagacaattcgaagaagagcaacgcttaaaaaaagagagagaattattggaaatacagagaaaacaaagagaacaagaaacagctgagagattaaaaaaagaagagcaagaagcgcttgctaaaaaggaggaggaagaaaaaagtaaaagaaacaaagtagacaatgaaagttatactcaagaaataaatggtaaggttgataaccttttggaggacttaaacgcagttttggcggaagaaacagaaaccacccctactatgcaaaatggtacttacgtgcccgagagaagtacagctagagctcatgaccaattaaaaaaaccattgaatattgccaaagttgagtctctcggtggaagcgatttgaatgactctatcagtttgagtgacgagatagcaggtttgaatacatctaacttatctggagaggaccaagatgagaagaacgatctttctttcgagaagggagatgaggttaggtatagcaataattttgaaggtgaagctcctcacgtgtaccatgaagtgtccattattcaagaagaagcacctgccgtttctcagaaattaatccttccggaagagaataacgaatctgaagcgttaattgaatctaaagaggagataaaaacgatggaaaatattgacgatgaggttttattagaaatattaacagatatcaattggtccattgaagacgatgctgatagtatgattgaaaggattgacttaagattggcggaaacggaatacttattcaaccaaaatttattatctttgcaaaaaattgggcctaatatccgcccctacgaagacaaggtcaatgacgaatgtcatcgcataatccccactctctctttattcttgatggaaatgagcaatttttctaatgatatcgaaaacgtagagagccaagataacggattacaagttgaaagtgctaacaagaaacttttatggaacacacttgatgaacttttgaaaactgtatctcttgatgaaatttccttgaatcagttattagaatgtccaataagagagaagaacttgccatggatggaaaaccaattgaatttattattaaaagcatttcaagcaataggcagcgatggaaatgaagtagaatataatttaagagaaatttccggattgaagcagaggttacagttttatgagaaagttaccaagatatttcttaacagaattgtggaggaaatgcagaagaaattcagtaatatacgtggacaagatatcagccacgatcaaatgattagaattttgacgactttattgatattttctcctttaatattattctgtaaagaaatttctcaaaaaagttatcaagcaattgtggaaaattggaacgtcagtattcaaccagtatacatggagttatggactaagaaaatatctcaattacaaggcattgacacaaatgatgaaaaaatgaatgagttgagcttaagccagttattgaatgaatgggacacatttagaaaagagagaaaaacaaatgatatcaacccggttttcaagaatagtttttctcttcttaccgagtgccttcaaaccatgaggcaagaatgtattgtttatcaaaattttgtcgaagtgttctttcatatatcttccaagcataatttcgaagaatacattaaacatttcaatgatccagatgctcctccaatattattagatactgtgaaagtaatgcaatctgatagagaagcagccgttattgaaacccagttggtctctagaatattccaacctattgtcactaggctttccagctattttgtagaattagtgaaagccgaaccaacggtagccccagccttaactttttacttggagaatgaaattaaaagcttagaatcttccaaccatgaatttttattgtctgcagtgactagaatgtacacacaaataaaacaagtgtggtctgataatgtagaagagcaggttttgcacttcgaaagaatttctaacgcaaccaccaatggagaaattcttccaggtatacttgatttaccagtaggcttgaagaattctgaagatttgttccaatttgctaagaggtctatggatattaaagataccgatgaaggctacgagtccatcgaattaatgaatagtagcttcaggaagttgagcatagctgccacaagaagtataactcacaaagaagttaatagtagcattaatccaaacctttctgatactgctgctttaaataatgactatatggaaactatttctctcttggtgaacagtaactggttgactgaaatgctttccatgttaaacttcaataaggatggtatatttgatacgtctttgcaaaacgttaagaaagttttcgatgtggaaaaagaatcttatgcttcctttttactccgcgatactatgcctaaattaacagcctttgtttatggtgtgagcaacatcattgaaaataccaacaatgtgaacatgaccaatccttccagatgggccgcatatagcaggcagaacttggagaacattcttttagcatacacttcccatgaaattgaaactttggtaaaaaggttacacactcatatggtaaatgacttcggttaccaccaagaaaatgccataaacaacgtcttatgcgataagttgtggtcctgcattcaaggtcaaaccgtctctttgtacttgaaactttacactgtaattgataaacactatagagggacaaacatacgcttcacgaagaacgatatcataagtgcgttcgaggaatacaagaatgcctga

SEQ ID NO: 3011 - DNA, 378 bp, Saccharomyces cerevisiae
atgtctctcgactttaacactttggcccaaaacttcacccagttttactataatcaatttgataccgatagaagccaattgggtaacttgtacagaaatgaatctatgctaacattcgagactagtcaattgcaaggtgcaaaggacattgttgagaaattagtatctttgccatttcaaaaggtccaacatcgtatcactactttggatgcgcaacctgcttccccaaatggcgatgtcttagtcatgatcactggtgatctgttgattgacgaagaacaaaatccacagcgtttctctcaagtgttccatttgattcctgatggaaactcttactacgtgtttaacgatatcttccgtttgaattactctgcttaa

SEQ ID NO: 3012 - DNA, 378 bp, Artificial Sequence
  Description of Artificial Sequence: Synthetic polynucleotide
atgtctctcgactttaacactttggcccaaaacttcacccagttttactataatcaatttgataccgatagaagccaattgggtaacttgtacagaaatgaatctatgttaacattcgagactagtcaattgcaaggtgcaaaggacattgttgagaaattagtatctttgccatttcaaaaggtccaacatcgtatcactactttggatgcgcaacctgcttccccaaatggcgatgtcttagtcatgatcactggtgatttattgattgacgaagaacaaaatccacagcgtttctctcaagtgttccatttgattcctgatggaaactcttactacgtgtttaacgatatcttccgtttgaattactctgcttga

SEQ ID NO: 3013 - DNA, 705 bp, Saccharomyces cerevisiae
atgtcagatcttcaaaagttacagaggttctcaacctgtgatatttcggacggattgttgaatgtttataacattccaacgggtggttatttccctaatctaacagcaatttctccaccgcaaaatagctccatagtaggcactgcatacacagtactgtttgcacccattgatgatccaagacctgccgtgaactatatagactctgtccctcccaactcaatactcgtcctcgcactggagccccatttgcaaagtcagttccacccatttattaaaattacgcaagcgatgtacggggggctgatgagtaccagagcacaatatttgaaatcgaatgggacagtagtctttggacgcataagagatgtggatgaacaccggactttaaaccatcccgtttttgcttacggtgttggatcttgcgctccaaaggctgtcgttaaagccgtaggcactaacgtacagttgaaaatcttaacgagtgatggcgtaacccaaacaatatgtcctggtgattatattgcaggtgacaataatggaatagtacgcattcctgttcaagagactgacatttcaaaattagttacctatatcgaaaagtcaattgaagtggatttacttgtctctgaagatattaagaatggtattcccgccaaacaagctcaaaatgatcgaagatcagtattaaagaaatacatttaa

SEQ ID NO: 3014 - DNA, 705 bp, Artificial Sequence
  Description of Artificial Sequence: Synthetic polynucleotide
atgagtgatcttcaaaagttacagaggttctccacctgtgatatttctgacggattgttgaatgtttataacattccaacgggtggttatttccctaatttgacagcaatttctccaccgcaaaatagctccatagtaggcactgcatacacagtattatttgcacccattgatgatccaagacctgccgtgaactatatagactctgtccctcccaacagcatactcgtcctcgcattagagccccatttgcaaagtcagttccacccatttattaaaattacgcaagcgatgtacggggggttgatgagtaccagagcacaatatttgaaatctaatgggacagtagtctttggacgcataagagatgtggatgaacacagaactttaaaccatcccgtttttgcttacggtgttggatcttgcgctccaaaggctgtcgttaaagccgtaggcactaacgtacagttgaaaatcttaacgagtgatggcgtaacccaaacaatatgtcctggtgattatattgcaggtgacaataatggaatagtacgcattcctgttcaagagactgacatttccaaattagttacctatatcgaaaagtctattgaagtggatttacttgtctctgaagatattaagaatggtattcccgccaaacaagctcaaaatgatagaagatctgtattaaagaaatacatttga

SEQ ID NO: 3015 - DNA, 765 bp, Saccharomyces cerevisiae
atggcttacactaagatcgctttattcgctgctattgctgctttggcttccgctcaaacccaagatcaaattaacgaattgaacgttattttgaacgatgtcaaatctcacttgcaagagtacattagcttagcttctgattcttcctctggattttccttaagcagtatgccagctggtgttttggatatcggtatggctttagcttccgccactgacgactcctacactactttgtactctgaggttgactttgctggtgttagcaagatgttgaccatggttccatggtactcctctagattggaaccagctttgaagtctttgaatggtgatgcttcttcttctgctgccccaagctcttctgctgctccaacttcttctgctgccccaagctcatctgctgccccaacttcttctgctgcctcaagctcttctgaagctaagtcttcttctgctgccccaagctcttctgaagctaagtcttcttctgctgccccaagctcttctgaagctaagtcttcttctgctgccccaagctcttctgaagctaagtcttcttctgctgctccaagctccactgaagctaagataacttctgctgctccaagctccactggtgccaagacctctgccatctctcaaattaccgatggtcaaatccaagctaccaaggctgtttctgagcaaactgaaaacggtgctgctaaggcctttgttggtatgggtgctggtgttgtcgcagctgccgctatgttgttataa

SEQ ID NO: 3016 - DNA, 765 bp, Artificial Sequence
  Description of Artificial Sequence: Synthetic polynucleotide
atggcttacactaagatcgctttattcgctgctattgctgctttggcttccgctcaaacccaagatcaaattaacgaattgaacgttattttgaacgatgtcaaatctcacttgcaagagtacattagcttagcttctgattcttcctctggattttccttaagcagtatgccagctggtgttttggatatcggtatggctttagcttccgccactgacgactcctacactactttgtactctgaggttgactttgctggtgttagcaagatgttgaccatggttccatggtactcctctagattggaaccagctttgaagtctttgaatggtgatgcttcttcttctgctgccccaagctcttctgctgctccaacttcttctgctgccccaagctcttctgctgccccaacttcttctgctgcctccagctcttctgaagctaagtcttcttctgctgccccaagctcttctgaagctaagtcttcttctgctgccccaagctcttctgaagctaagtcttcttctgctgccccaagctcttctgaagctaagtcttcttctgctgctccaagctccactgaagctaagataacttctgctgctccaagctccactggtgccaagacctctgccatctctcaaattaccgatggtcaaatccaagctaccaaggctgtttctgagcaaactgaaaacggtgctgctaaggcctttgttggtatgggtgctggtgttgtcgcagctgccgctatgttgttatga

SEQ ID NO: 3017 - DNA, 597 bp, Saccharomyces cerevisiae
atggatattattctgggcatccgtgtacaggattctgtcattctagcgtcttctaaggcagtcacaagaggtatttctgttttaaaagattctgatgataaaacgagacaattatcgccacatacattgatgagttttgccggtgaagctggtgacaccgttcaattcgccgagtacattcaagccaatatccaattatactccattagagaagattatgagctctctccacaagcagtatctagttttgttaggcaagaattagccaagtcaattaggtcgagaagaccataccaagtcaacgtattgattggaggctatgacaaaaagaagaacaaaccggaactatatcaaattgactacttgggtactaaagtcgaattaccctatggtgctcatggttactcggggttttacacattctctttactagatcatcattatagacctgatatgactactgaggagggtttagatttattaaaactatgtgtacaagagcttgaaaaaagaatgccaatggacttcaagggcgtcattgttaaaatcgtggataaagatggcataagacaagtagatgacttccaggcacagtga

SEQ ID NO: 3018 - DNA, 597 bp, Artificial Sequence
  Description of Artificial Sequence: Synthetic polynucleotide
atggatattattttgggcatccgtgtacaggattctgtcattttggcgtcttctaaggcagtcacaagaggtatttctgttttaaaagattctgatgataaaacgagacaattatctccacatacattgatgagttttgccggtgaagctggtgacaccgttcaattcgccgagtacattcaagccaatatccaattatactccattagagaagattatgagctctctccacaagcagtatctagttttgttaggcaagaattagccaagtctattaggagcagaagaccataccaagtcaacgtattgattggaggctatgacaaaaagaagaacaaaccggaattgtatcaaattgactacttgggtactaaagtcgaattaccctatggtgctcatggttactctgggttttacacattctctttattagatcatcattatagacctgatatgactactgaggagggtttagatttattaaaattatgtgtacaagagcttgaaaaaagaatgccaatggacttcaagggcgtcattgttaaaatcgtggataaagatggcataagacaagtagatgacttccaggcacagtga

SEQ ID NO: 3019 - DNA, 3438 bp, Saccharomyces cerevisiae
atgtctgatatatcgaaactcataggagctattgtgggatctgatgaccccgttatcattgaatttgtgctgaatatcataaataaatccggcaatttacaagagtttatacgaaatattcaaaaattggatgccggtatatcctacgaagacagtattaagatgtataatgcatttttaggaaagcaggaagaagaaaaggtacgaaataaagttaaaagttcaccgttaagtcaaaaaattaatcaggtactgaaagatgacgttaatttggacgaccctgttgtgactgaattcgtcctgagcattttgaataaatctaaatcaataactgagttccaggaacaactgaacttgatgcaaagcggactcgataatgaaacaattttcaagatatatcaaattgcatcaccaccagtaatgaaagaagaagtctcagttcttccaagcaccaagataccagcaaagatagaagcaaagattgaagaagaggtacaaaaaatagaaagtttagaccccagccctgtccttcacaaagtttatgaaggtaaagtgagaaacataactacttttgggtgtttcgtccaaatttttgggacgcgaatgaagaattgtgatggcttagttcatatttcagaaatgtcagaccaaagaacattagatccacatgatgtggtgagacaaggccaacatatctttgtcgaagtgataaaaatacaaaataatggaaaaatatcgctctccatgaaaaatattgatcaacatagtggagaaatccggaaaagaaatactgaaagtgtcgaagatagaggtaggtccaacgatgctcatacaagcagaaatatgaaaaacaaaattaaaaggcgtgctttgacttcaccagaaagatgggaaattcgccaactaattgccagcggtgctgcttccatcgatgactatcctgaattgaaggatgaaatacccataaatacttcctatttgaccgcgaaaagagatgacggcagtatcgttaacggtaatacagagaaagtggactcaaaattggaagaacaacaacgagacgagacggatgaaattgatgtcgagctgaatacagatgatgggcccaaatttttaaaggatcagcaagtcaagggggccaagaaatatgaaatgcctaaaattacaaaagtcccgagaggatttatgaatcgttcagcaatcaacggctctaatgcaatacgagatcatagagaagaaaagttaaggaaaaaaagagagattgaacaacagattaggaaacaacagtcgtttgatgatcctacgaaaaacaaaaaagattccaggaacgaaattcaaatgttgaaaaaccagctgattgttactgaatgggaaaaaaatagaatgaatgaatctatctcgtatggcaaaagaacttccttaccaatcagtgcacagcgtcaaactttgcctgtatacgcgatgaggtctgaattgatacaggctgtgcgtgacaatcaatttctggtcattgttggtgagacaggttcgggtaaaaccactcaaattactcagtatttagatgaagaagggtttagtaactatgggatgatcggatgtacccaacctcgtagggttgccgctgtatccgttgctaaaagagtggctgaagaagttggctgcaaagttggccatgacgttggctataccattagatttgaagatgttactggcccagataccagaataaaatatatgactgatggtatgttacagagagaggcgttgttagatcccgagatgtcaaaatattcagttatcatgttagatgaagctcacgaaagaactgtggcaactgatgttttatttgcgttgttaaagaaagcggctattaaaaggccagaattaaaagtaatagttacatcggctactttgaactctgctaaattttctgagtactttttaaattgtccgattatcaatatacctggtaaaacttttcccgtggaagtactctactcacagacgccccaaatggattacatagaggcagctttggattgtgtaatagacatccatattaatgaaggcccaggcgatattttagtctttttgactggacaggaagaaatagactcatgctgtgaaattttatatgatagggtgaaaactttaggtgacagcatcggcgaattactgattttgcccgtttattctgctttgccaagtgaaatccaatcgaaaatttttgaacccactccaaagggcagtcgaaaagtcgtatttgccacaaatattgcggaaacttcaatcactattgatggaatttattatgtcgtggaccctggatttgcaaaaatcaacatttataatgcaagagcaggtatcgagcagttgatagtgtctccaatctctcaggcacaggcaaatcaaagaaaaggtagagctggaagaacaggccctggaaaatgctatcgactttatacagaatccgcattttacaatgaaatgttagaaaacacggttccagaaattcaaaggcagaatctttctcatactattttgatgctaaaggccatgggaattaatgatttattgaaatttgacttcatggatccccctcccaaaaatttaatgcttaacgcactgacagaattataccacctgcagtcactagatgacgagggaaaactaacaaatttaggtaaagagatgtccttatttccaatggatcccactctatcacgctctttattgtcatctgttgataatcagtgctcggatgaaattgttactataatctcaatgttgtcagtacagaacgttttttatcgtccaaaagataggcaattggaagcagatagcaagaaggcaaagtttcatcatccatacggtgaccatttaacattattgaacgtttatactagatggcagcaggcaaattactcggagcagtattgcaaaacaaactttctgcattttagacatttgaaaagagcaagagatgttaaaagccaaattagcatgatatttaaaaagataggcttaaagttaataagctgtcatagtgatcctgatttaattcgtaaaactttcgtgtcagggttcttcatgaacgctgctaagcgagactcacaggtaggttataaaaccatcaatggtggtacagaggttggaatacatccctcgagttcattgtacggaaaagagtatgaatacgtaatgtatcatagtatcgtattaactagccgggaatacatgtcgcaggtaacatccattgagccccaatggcttctcgaagtagcgcctcatttttataaagctggagatgctgaaagccagtctaggaagaaagcgaaaatcattcctttgcataacaagtttgccaaggatcaaaattcatggagactaagctcaataaggcagtcaagggaaagggcattaggtatcaagaggtaa

SEQ ID NO: 3020 - DNA, 3438 bp, Artificial Sequence
  Description of Artificial Sequence: Synthetic polynucleotide
atgtctgatatatccaaactcataggagctattgtgggatctgatgaccccgttatcattgaatttgtgttgaatatcataaataaatccggcaatttacaagagtttataagaaatattcaaaaattggatgccggtatatcctacgaagacagtattaagatgtataatgcatttttaggaaagcaggaagaagaaaaggtaagaaataaagttaaaagttctccgttaagtcaaaaaattaatcaggtattgaaagatgacgttaatttggacgaccctgttgtgactgaattcgtcttgagcattttgaataaatctaaatctataactgagttccaggaacaattgaacttgatgcaaagcggactcgataatgaaacaattttcaagatatatcaaattgcatctccaccagtaatgaaagaagaagtctctgttcttccaagcaccaagataccagcaaagatagaagcaaagattgaagaagaggtacaaaaaatagaaagtttagaccccagccctgtccttcacaaagtttatgaaggtaaagtgagaaacataactacttttgggtgtttcgtccaaatttttgggacgagaatgaagaattgtgatggcttagttcatatttctgaaatgtctgaccaaagaacattagatccacatgatgtggtgagacaaggccaacatatctttgtcgaagtgataaaaatacaaaataatggaaaaatatctctctccatgaaaaatattgatcaacatagtggagaaatcagaaaaagaaatactgaaagtgtcgaagatagaggtaggtccaacgatgctcatacaagcagaaatatgaaaaacaaaattaaaaggcgtgctttgacttctccagaaagatgggaaattcgccaattgattgccagcggtgctgcttccatcgatgactatcctgaattgaaggatgaaatacccataaatacttcctatttgaccgcgaaaagagatgacggcagtatcgttaacggtaatacagagaaagtggactctaaattggaagaacaacaaagagacgagacggatgaaattgatgtcgagttgaatacagatgatgggcccaaatttttaaaggatcagcaagtcaagggggccaagaaatatgaaatgcctaaaattacaaaagtcccgagaggatttatgaatcgttctgcaatcaacggctctaatgcaataagagatcatagagaagaaaagttaaggaaaaaaagagagattgaacaacagattaggaaacaacagtcttttgatgatcctacgaaaaacaaaaaagattccaggaacgaaattcaaatgttgaaaaaccagttgattgttactgaatgggaaaaaaatagaatgaatgaatctatcagttatggcaaaagaacttccttaccaatcagtgcacagcgtcaaactttgcctgtatacgcgatgaggtctgaattgatacaggctgtgcgtgacaatcaatttttagtcattgttggtgagacaggttctggtaaaaccactcaaattactcagtatttagatgaagaagggtttagtaactatgggatgatcggatgtacccaacctcgtagggttgccgctgtatccgttgctaaaagagtggctgaagaagttggctgcaaagttggccatgacgttggctataccattagatttgaagatgttactggcccagataccagaataaaatatatgactgatggtatgttacagagagaggcgttgttagatcccgagatgtccaaatattctgttatcatgttagatgaagctcacgaaagaactgtggcaactgatgttttatttgcgttgttaaagaaagcggctattaaaaggccagaattaaaagtaatagttacatctgctactttgaactctgctaaattttctgagtactttttaaattgtccgattatcaatatacctggtaaaacttttcccgtggaagtactctactctcagacgccccaaatggattacatagaggcagctttggattgtgtaatagacatccatattaatgaaggcccaggcgatattttagtctttttgactggacaggaagaaatagacagctgctgtgaaattttatatgatagggtgaaaactttaggtgacagcatcggcgaattattgattttgcccgtttattctgctttgccaagtgaaatccaaagtaaaatttttgaacccactccaaagggcagtagaaaagtcgtatttgccacaaatattgcggaaacttctatcactattgatggaatttattatgtcgtggaccctggatttgcaaaaatcaacatttataatgcaagagcaggtatcgagcagttgatagtgtctccaatctctcaggcacaggcaaatcaaagaaaaggtagagctggaagaacaggccctggaaaatgctatagactttatacagaatccgcattttacaatgaaatgttagaaaacacggttccagaaattcaaaggcagaatctttctcatactattttgatgttgaaggccatgggaattaatgatttattgaaatttgacttcatggatccccctcccaaaaatttaatgcttaacgcattaacagaattataccacttgcagtccttggatgacgagggaaaattaacaaatttaggtaaagagatgtccttatttccaatggatcccactttatctcgctctttattgtcttctgttgataatcagtgctctgatgaaattgttactataatctctatgttgagtgtacagaacgttttttatcgtccaaaagataggcaattggaagcagatagcaagaaggcaaagtttcatcatccatacggtgaccatttaacattattgaacgtttatactagatggcagcaggcaaattactctgagcagtattgcaaaacaaactttttacattttagacatttgaaaagagcaagagatgttaaaagccaaattagcatgatatttaaaaagataggcttaaagttaataagctgtcatagtgatcctgatttaattcgtaaaactttcgtgagcgggttcttcatgaacgctgctaagagagactctcaggtaggttataaaaccatcaatggtggtacagaggttggaatacatcccagtagttctttgtacggaaaagagtatgaatacgtaatgtatcatagtatcgtattaactagcagagaatacatgtctcaggtaacatccattgagccccaatggcttctcgaagtagcgcctcatttttataaagctggagatgctgaaagccagtctaggaagaaagcgaaaatcattcctttgcataacaagtttgccaaggatcaaaattcttggagattgagcagtataaggcagtctagggaaagggcattaggtatcaagaggtga

SEQ ID NO: 3021 - DNA, 1620 bp, Saccharomyces cerevisiae
atgttattaccattaacaaagctaaaaccgagagcaaaagttgctgttgtagggggtggcgtttctggactatgttttacttattttttaagcaagttgagaccggatgttgaaatcacactgttcgaatcgcagaacagaactgggggttggatatattcttgtaacacaagagatatgagtgggaacccaattatgttggagaagggacccagaacattgaggggcgtatcagacgggaccgttctgattatggatacccttaaagacttgggcaaggaagcagttattcaaagcattgataaaggttgcattgcagacaaaaagtttctactagaccccagtgataaactcgtgcaggttcctaattcgatatctacaacagtaaaatttctgctgaatccgttgggaaaaggactcatcacgggtatgatgggagaatggttcagaaaaaaatctccacatcctggccaagacgaaagtgtcgaatccatttgtgacagaaggtttgggaataactacatatcaaacaatatgatcagtgccttactaagaggtatctatggggatgacgtttccctattaagtgccaagagaacgtttaagaaaatatactacaatgaactaaagcacggatctaacacacaagctatgattgataatatgcgcggaaagtcaagaagtaaaaaaactgagaacctgcaccaatctttaactggctgccttaacgactactcaaatgcgtttggaaaagacaggtcaaagttattagacttatccaacacgctaaagaaatatcccatgttgggtcttgctgggggactagaaacgtttcccaagatagtcagaaatgctttgaacgaatttaaaaacgtcaaaatagttactgggaacccggttacgcaaataatgaaacgccctgctaacgaaacgacaatcggattgaaagcgaaatctggcgaccaatacgaaacatttgaccatttaagacttacgataacacctcccaaaatcgctaaattgctaccgaaggatcaaaattcattatccaagttattagatgagatacaatcaaacacaataattttagttaattattatttgccaaacaaagatgtaatagatgccgatctacaaggctttggatacttggttcccaaatccaataagaatccagggaaattgcttggtgtaattttcgattctgttatcgaaaggaatttcaaaccactttttgacaaactctccacaaacccaaacgccctcaacaaatatacaaaagtgactgcgatgataggaggttgtatgctcaatgaacacggtgttcctgtagtgccatccagggaggtaaccattaatgcagtcaaagatgcgctgaacaaccacctcggcatcagtaacaaggatctggaagctggtcagtgggaattcactatcgccgatagatgtctgccaagatttcatgtaggttatgacgcatggcaagaaagagctgaaaggaagttgcaagaatcttacggccaaacagtttctgtggggggaatgggattttctagaagtcccggtgtccctgacgttattgtagacggctttaacgacgccttacagctaagcaaataa

SEQ ID NO: 3022 - DNA, 1620 bp, Artificial Sequence
  Description of Artificial Sequence: Synthetic polynucleotide
atgttattaccattaacaaagttgaaaccgagagcaaaagttgctgttgtagggggtggcgtttctggattatgttttacttattttttaagcaagttgagaccggatgttgaaatcacattgttcgaatctcagaacagaactgggggttggatatattcttgtaacacaagagatatgagtgggaacccaattatgttggagaagggacccagaacattgaggggcgtaagtgacgggaccgttttgattatggatacccttaaagacttgggcaaggaagcagttattcaaagcattgataaaggttgcattgcagacaaaaagtttttattagaccccagtgataaactcgtgcaggttcctaattctatatctacaacagtaaaatttttattgaatccgttgggaaaaggactcatcacgggtatgatgggagaatggttcagaaaaaaatctccacatcctggccaagacgaaagtgtcgaatccatttgtgacagaaggtttgggaataactacataagcaacaatatgatcagtgccttattaagaggtatctatggggatgacgtttccttattaagtgccaagagaacgtttaagaaaatatactacaatgaattgaagcacggatctaacacacaagctatgattgataatatgcgcggaaagtctagaagtaaaaaaactgagaacttgcaccaatctttaactggctgccttaacgactactctaatgcgtttggaaaagacaggtctaagttattagacttatccaacacgttgaagaaatatcccatgttgggtcttgctgggggattagaaacgtttcccaagatagtcagaaatgctttgaacgaatttaaaaacgtcaaaatagttactgggaacccggttacgcaaataatgaaacgccctgctaacgaaacgacaatcggattgaaagcgaaatctggcgaccaatacgaaacatttgaccatttaagacttacgataacacctcccaaaatcgctaaattgttaccgaaggatcaaaattctttatccaagttattagatgagatacaaagtaacacaataattttagttaattattatttgccaaacaaagatgtaatagatgccgatttgcaaggctttggatacttggttcccaaatccaataagaatccagggaaattgcttggtgtaattttcgattctgttatcgaaaggaatttcaaaccactttttgacaaactctccacaaacccaaacgccctcaacaaatatacaaaagtgactgcgatgataggaggttgtatgctcaatgaacacggtgttcctgtagtgccatccagggaggtaaccattaatgcagtcaaagatgcgttgaacaaccacctcggcatcagtaacaaggatttggaagctggtcagtgggaattcactatcgccgatagatgtttgccaagatttcatgtaggttatgacgcatggcaagaaagagctgaaaggaagttgcaagaatcttacggccaaacagtttctgtggggggaatgggattttctagaagtcccggtgtccctgacgttattgtagacggctttaacgacgccttacagttgagcaaatga

SEQ ID NO: 3023 - DNA, 462 bp, Saccharomyces cerevisiae
atgttttgtacctgggatagctgggacaccgggacttctagaaaatcccattccccccacagaaactgtttggccgtaagattcttgcaacttcctttcagctctttcttgccatgcgtcataacctacatgaaatcttggcagacatctatcggcgatagtgaattcccactgaccagcttccagatccttgttactgatgccgaggtggttgttcagcgcatctttgactgcattaatggttacctccctggatggcactacaggaacaccgtgttcattgagcatacaacctcctatcatcgcagtcacttttgtatatttgttgagggcgtttgggtttgtggagagtttgtcaaaaagtggtttgaaattcctttcgataacagaatcgaaaattacaccaagcaatttccctggattcttattggatttgggaaccaagtatccaaagccttgtag

SEQ ID NO: 3024 - DNA, 462 bp, Artificial Sequence
  Description of Artificial Sequence: Synthetic polynucleotide
atgttttgtacctgggatagctgggacaccgggacttctagaaaatcccattccccccacagaaactgtttggccgtaagattcttgcaacttcctttcagctctttcttgccatgcgtcataacctacatgaaatcttggcagacatctatcggcgatagtgaattcccattgaccagcttccagatccttgttactgatgccgaggtggttgttcagcgcatctttgactgcattaatggttacctccctggatggcactacaggaacaccgtgttcattgagcatacaacctcctatcatcgcagtcacttttgtatatttgttgagggcgtttgggtttgtggagagtttgtcaaaaagtggtttgaaattcctttcgataacagaatcgaaaattacaccaagcaatttccctggattcttattggatttgggaaccaagtatccaaagccttgtga

SEQ ID NO: 3025 - DNA, 2235 bp, Saccharomyces cerevisiae
atggccgctccagattatgcacttaccgatttaattgaatcggatcctcgtttcgaaagtttgaagacaagattagccggttacaccaaaggctctgatgaatatattgaagagctatactctcaattaccactgaccagctatcccaggtacaaaacatttttaaagaaacaggcggttgccatttcgaatccggataatgaagctggttttagctcgatttataggagttctctttcttctgaaaatctagtgagctgtgtggataaaaacttaagaactgcatacgatcacttcatgttttctgcaaggagatggcctcaacgtgactgtttaggttcaaggccaattgataaagccacaggcacctgggaggaaacattccgtttcgagtcgtactccacggtatctaaaagatgtcataatatcggaagtggtatattgtctttggtaaacacgaaaaggaaacgtcctttggaagccaatgattttgttgttgctatcttatcacacaacaaccctgaatggatcctaacagatttggcctgtcaggcctattctctaactaacacggctttgtacgaaacattaggtccaaacacctccgagtacatattgaatttaaccgaggcccccattctgatttttgcaaaatcaaatatgtatcatgtattgaagatggtgcctgatatgaaatttgttaatactttggtttgtatggatgaattaactcatgacgagctccgtatgctaaatgaatcgttgctacccgttaagtgcaactctctcaatgaaaaaatcacatttttttcattggagcaggtagaacaagttggttgctttaacaaaattcctgcaattccacctaccccagattccttgtatactatttcgtttacttctggtactacaggtttacctaaaggtgtggaaatgtctcacagaaacattgcgtctgggatagcatttgctttttctaccttcagaataccgccagataaaagaaaccaacagttatatgatatgtgttttttgccattggctcatatttttgaaagaatggttattgcgtatgatctagccatcgggtttggaataggcttcttacataaaccagacccaactgtattggtagaggatttgaagattttgaaaccttacgcggttgccctggttcctagaatattaacacggtttgaagccggtataaaaaacgctttggataaatcgactgtccagaggaacgtagcaaatactatattggattctaaatcggccagatttaccgcaagaggtggtccagataaatcgattatgaattttctagtttatcatcgcgtattgattgataaaatcagagactctttaggtttgtccaataactcgtttataattaccggatcagctcccatatctaaagataccttactatttttaagaagtgccttggatattggtataagacagggctacggcttaactgaaacttttgctggtgtctgtttaagcgaaccgtttgaaaaagatgtcggatcttgtggtgccataggtatttctgcagaatgtagattgaagtctgttccagaaatgggttaccatgccgacaaggatttaaaaggtgaactgcaaattcgtggcccacaggtttttgaaagatattttaaaaatccgaatgaaacttcaaaagccgttgaccaagatggttggttttccacgggagatgttgcatttatcgatggaaaaggtcgcatcagcgtcattgatcgagtcaagaactttttcaagctagcacatggtgaatatattgctccagagaaaatcgaaaatatttatttatcatcatgcccctatatcacgcaaatatttgtctttggagatcctttaaagacatttttagttggcatcgttggtgttgatgttgatgcagcgcaaccgattttagctgcaaagcacccagaggtgaaaacgtggactaaggaagtgctagtagaaaacttaaatcgtaataaaaagctaaggaaggaatttttaaacaaaattaataaatgcaccgatgggctacaaggattcgaaaaattgcataacatcaaagtcggacttgagcctttaactctcgaggatgatgttgtgacgccaacttttaaaataaagcgtgccaaagcatcaaaattcttcaaagatacattagaccaactatacgccgaaggttcactagtcaagacagaaaagctttag

SEQ ID NO: 3026 - DNA, 2235 bp, Artificial Sequence
  Description of Artificial Sequence: Synthetic polynucleotide
atggccgctccagattatgcacttaccgatttaattgaaagtgatcctcgtttcgaaagtttgaagacaagattagccggttacaccaaaggctctgatgaatatattgaagagttatactctcaattaccattgaccagctatcccaggtacaaaacatttttaaagaaacaggcggttgccatttctaatccggataatgaagctggttttagctctatttataggagttctctttcttctgaaaatttggtgagctgtgtggataaaaacttaagaactgcatacgatcacttcatgttttctgcaaggagatggcctcaacgtgactgtttaggttctaggccaattgataaagccacaggcacctgggaggaaacattccgtttcgagagttactccacggtatctaaaagatgtcataatatcggaagtggtatattgtctttggtaaacacgaaaaggaaacgtcctttggaagccaatgattttgttgttgctatcttatcccacaacaaccctgaatggatcttaacagatttggcctgtcaggcctattctttgactaacacggctttgtacgaaacattaggtccaaacacctccgagtacatattgaatttaaccgaggcccccattttaatttttgcaaaatctaatatgtatcatgtattgaagatggtgcctgatatgaaatttgttaatactttggtttgtatggatgaattaactcatgacgagctccgtatgttgaatgaatctttgttgcccgttaagtgcaactctctcaatgaaaaaatcacatttttttctttggagcaggtagaacaagttggttgctttaacaaaattcctgcaattccacctaccccagattccttgtatactatttcctttacttctggtactacaggtttacctaaaggtgtggaaatgtctcacagaaacattgcgtctgggatagcatttgctttttctaccttcagaataccgccagataaaagaaaccaacagttatatgatatgtgttttttgccattggctcatatttttgaaagaatggttattgcgtatgatttggccatcgggtttggaataggcttcttacataaaccagacccaactgtattggtagaggatttgaagattttgaaaccttacgcggttgccttagttcctagaatattaacaagatttgaagccggtataaaaaacgctttggataaatctactgtccagaggaacgtagcaaatactatattggattctaaaagtgccagatttaccgcaagaggtggtccagataaatccattatgaattttttggtttatcatcgcgtattgattgataaaatcagagactctttaggtttgtccaataactcttttataattaccggatctgctcccatatctaaagataccttactttttttaagaagtgccttggatattggtataagacagggctacggcttaactgaaacttttgctggtgtctgtttaagcgaaccgtttgaaaaagatgtcggatcttgtggtgccataggtatttctgcagaatgtagattgaagtctgttccagaaatgggttaccatgccgacaaggatttaaaaggtgaattacaaattcgtggcccacaggtttttgaaagatattttaaaaatccgaatgaaacttctaaagccgttgaccaagatggttggttttccacgggagatgttgcatttatcgatggaaaaggtcgcatcagcgtcattgatagggtcaagaactttttcaagttagcacatggtgaatatattgctccagagaaaatcgaaaatatttatttatctagttgcccctatatcacgcaaatatttgtctttggagatcctttaaagacatttttagttggcatcgttggtgttgatgttgatgcagcgcaaccgattttagctgcaaagcacccagaggtgaaaacgtggactaaggaagtgttagtagaaaacttaaatcgtaataaaaagttaaggaaggaatttttaaacaaaattaataaatgcaccgatgggttgcaaggattcgaaaaattgcataacatcaaagtcggacttgagcctttaactctcgaggatgatgttgtgacgccaacttttaaaataaagcgtgccaaagcatccaaattcttcaaagatacattagaccaattgtacgccgaaggttctttggtcaagacagaaaagctttga

SEQ ID NO: 3027 - DNA, 1035 bp, Saccharomyces cerevisiae
atgagtgcgggtatcggagaatcacgtacagagttgcttacatggttgaatggcctccttaacttgaattacaaaaaaattgaggaatgtgggacgggagcagcatattgtcaaataatggattcaatttatggagacttgccgatgaacagggtaaaattcaatgccacggccgaatatgagtttcaaaccaactataaaattttacagagttgctttagcagacatggaattgagaaaacagtgtacgttgataagttaatcagatgtaaatttcaagataatttagagttcttgcagtggttaaagaaacattggattcgacataaagatgaaagcgtgtatgatccagatgcaaggcgcaagtatcgtcccattataacgaataatagtgcaaccaaaccccgtacagtatccaaccctaccactgcaaagaggtcatcaagcacaggcactgggagtgccatgtcaggaggattagcaacaagacattcttcgctgggaataaacggtagcagaaaaaccagtgttacccaaggtcagttggtagcgatacaagcggaattaactaaatcgcaggaaacgatcggttcattgaatgaagagatagaacaatacaaaggaacagtaagtactttagagattgaaagagaattttacttcaacaaactacgcgacatagaaatcctggtccataccactcaagatttaataaatgaaggtgtttataaatttaatgatgagaccatcaccggccatggtaatggaaatgggggagcattattacggttcgtcaagaaggtggaaagtattttatatgctactgcagaaggatttgaaatgaatgatggtgaggatgaattgaatgataaaaatctgggtgaacatggaactgtgccgaatcagggcggctatgcgaacagcaatggcgaggtcaatggtaacgaaggtagtaaccatgatgtgataatgcagaacgacgaaggtgaggttggcgtgagcaacaacttgatcatcgacgaggaaactttttaa

SEQ ID NO: 3028 - DNA, 1035 bp, Artificial Sequence
  Description of Artificial Sequence: Synthetic polynucleotide
atgagtgcgggtatcggagaatcccgtacagagttgcttacatggttgaatggcctccttaacttgaattacaaaaaaattgaggaatgtgggacgggagcagcatattgtcaaataatggattctatttatggagacttgccgatgaacagggtaaaattcaatgccacggccgaatatgagtttcaaaccaactataaaattttacagagttgctttagcagacatggaattgagaaaacagtgtacgttgataagttaatcagatgtaaatttcaagataatttagagttcttgcagtggttaaagaaacattggattagacataaagatgaaagcgtgtatgatccagatgcaaggcgcaagtatcgtcccattataacgaataatagtgcaaccaaaccccgtacagtatccaaccctaccactgcaaagaggagtagtagcacaggcactgggagtgccatgtctggaggattagcaacaagacattcttctttgggaataaacggtagcagaaaaaccagtgttacccaaggtcagttggtagcgatacaagcggaattaactaaatctcaggaaacgatcggttctttgaatgaagagatagaacaatacaaaggaacagtaagtactttagagattgaaagagaattttacttcaacaaattgcgcgacatagaaatcctcgtccataccactcaagatttaataaatgaaggtgtttataaatttaatgatgagaccatcaccggccatggtaatggaaatgggggagcattattaagattcgtcaagaaggtggaaagtattttatatgctactgcagaaggatttgaaatgaatgatggtgaggatgaattgaatgataaaaatttgggtgaacatggaactgtgccgaatcagggcggctatgcgaacagcaatggcgaggtcaatggtaacgaaggtagtaaccatgatgtgataatgcagaacgacgaaggtgaggttggcgtgagcaacaacttgatcatcgacgaggaaactttttga

SEQ ID NO: 3029 - DNA, 2286 bp, Saccharomyces cerevisiae
atgatgatgtggcaacgatatgcaaggggtgcgccacgctcattgacatcactctcatttggtaaagctagccgcatatcaacagtgaagccagtgcttcgctcgcgcatgccagttcaccagcgtttgcagacgttatctggtctggcaaccagaaacacaatacaccgttctacccaaatacgttccttccatatctcatggacaaggttaaatgaaaataggccaaacaaagagggtgagggcaagaacaatggtaataaagataataatagcaataaagaagatggcaaagacaaaagaaatgagtttggttcattatcagaatacttcagatctaaggaatttgctaatacgatgtttttgaccatcggattcacaattatatttactttgctcacaccttccagtaacaactcaggagacgactctaaccgcgtcttgactttccaggatttcaaaacaaaatacctggagaagggtcttgtgtccaagatttacgtcgttaataagtttctcgtagaggccgaattagtcaatacaaagcaagttgtatcgttcaccattggttcagtagatatttttgaggaacagatggaccagatccaggacctcttgaacattcctcctcgggatcgtatccccatcaaatacattgagagatcttctcccttcacatttttgttccccttcctgcccaccatcattctgcttggtggcctttacttcataaccagaaaaataaatagttcaccaccaaatgccaatggtggtggtggaggaggcctcggcggcatgtttaatgttggaaaatccagagcaaagctcttcaataaggaaacagacattaaaatttcatttaaaaatgttgccggttgtgatgaagctaaacaggaaatcatggaatttgttcactttttgaagaacccaggtaagtacactaaattgggtgccaagattccacgaggcgctattctttctggacccccaggtaccggtaagactctcttggccaaggccaccgcaggtgaggcgaacgtgcccttcttgtcagtatcaggttctgagttcgtcgaaatgttcgttggggtgggtgcttcacgtgtaagagacttgtttactcaagcaaggtctatggccccctcgattatctttatagatgaaattgacgctatcggtaaagaaagaggcaaaggcggcgctctcggtggcgctaacgatgaaagagaagctacgctgaatcaattattggtggaaatggacggattcactacttccgaccaagtcgtagtccttgcgggtacaaataggcccgatgtgttggataatgctttgatgagaccgggaaggttcgatagacatatccaaattgattctcctgatgtcaatggtaggcagcaaatatacctggttcacttgaaaagactgaatctggatccccttcttacagatgatatgaataatctttctgggaaattggctacgcttactccaggttttactggtgcagatatcgctaatgcttgtaatgaggctgcattaatcgctgccagacataatgacccatatatcactatccatcactttgagcaagccattgaaagagtcattgcgggactagagaagaaaacaagagtcctttctaaggaagaaaaaaggtcagtggcctatcatgaggcaggacatgccgtttgtggttggtttctaaaatatgcggatccacttctgaaagtaagcatcatcccgcgtggacaaggtgctttaggctatgcccagtacctaccaccggatcaatatttgatatctgaggagcaattcagacatagaatgatcatggctcttggtggccgtgtttctgaggagctacattttccatcggtgactagcggtgctcatgatgatttcaaaaaggttacacagatggcaaatgccatggttacatccctaggaatgtcacccaagattggctacctgtcgtttgatcagaatgatggaaacttcaaagttaacaaacccttcagtaataaaacggcaagaaccattgatttagaagttaaatctatagtagatgatgcacaccgagcttgtacagaattgctaaccaaaaatttggacaaagtcgatcttgtcgcaaaagaattgctacgtaaggaagcaattactagagaagacatgattagattattgggtccaaggccattcaaggaaaggaacgaggcttttgaaaaatatttggatccaaagagcaataccgaaccgcctgaggcacctgcagcaacaaattaa

SEQ ID NO: 3030 - DNA, 2286 bp, Artificial Sequence
  Description of Artificial Sequence: Synthetic polynucleotide
atgatgatgtggcaaagatatgcaaggggtgcgccacgctctttgacatctctcagttttggtaaagctagccgcatatctacagtgaagccagtgcttcgctctcgcatgccagttcaccagcgtttgcagacgttatctggtttggcaaccagaaacacaatacaccgttctacccaaatacgttccttccatatcagttggacaaggttaaatgaaaataggccaaacaaagagggtgagggcaagaacaatggtaataaagataataatagcaataaagaagatggcaaagacaaaagaaatgagtttggttctttatctgaatacttcagatctaaggaatttgctaatacgatgtttttgaccatcggattcacaattatatttactttgctcacaccttccagtaacaactctggagacgactctaaccgcgtcttgactttccaggatttcaaaacaaaatacttggagaagggtcttgtgtccaagatttacgtcgttaataagtttctcgtagaggccgaattagtcaatacaaagcaagttgtatctttcaccattggttctgtagatatttttgaggaacagatggaccagatccaggacctcttgaacattcctcctagagatcgtatccccatcaaatacattgagagatcttctcccttcacatttttgttccccttcttgcccaccatcattttacttggtggcctttacttcataaccagaaaaataaatagttctccaccaaatgccaatggtggtggtggaggaggcctcggcggcatgtttaatgttggaaaatccagagcaaagctcttcaataaggaaacagacattaaaatttcctttaaaaatgttgccggttgtgatgaagctaaacaggaaatcatggaatttgttcactttttgaagaacccaggtaagtacactaaattgggtgccaagattccaagaggcgctattctttctggacccccaggtaccggtaagactctcttggccaaggccaccgcaggtgaggcgaacgtgcccttcttgagtgtatctggttctgagttcgtcgaaatgttcgttggggtgggtgcttctcgtgtaagagacttgtttactcaagcaaggtctatggccccctctattatctttatagatgaaattgacgctatcggtaaagaaagaggcaaaggcggcgctctcggtggcgctaacgatgaaagagaagctacgttgaatcaattattggtggaaatggacggattcactacttccgaccaagtcgtagtccttgcgggtacaaataggcccgatgtgttggataatgctttgatgagaccgggaaggttcgatagacatatccaaattgattctcctgatgtcaatggtaggcagcaaatatacttggttcacttgaaaagattgaatttggatccccttcttacagatgatatgaataatctttctgggaaattggctacgcttactccaggttttactggtgcagatatcgctaatgcttgtaatgaggctgcattaatcgctgccagacataatgacccatatatcactatccatcactttgagcaagccattgaaagagtcattgcgggattggagaagaaaacaagagtcctttctaaggaagaaaaaaggtctgtggcctatcatgaggcaggacatgccgtttgtggttggtttttgaaatatgcggatccacttttgaaagtaagcatcatcccgcgtggacaaggtgctttaggctatgcccagtacttgccaccggatcaatatttgatatctgaggagcaattcagacatagaatgatcatggctcttggtggccgtgtttctgaggagttacattttccatctgtgactagcggtgctcatgatgatttcaaaaaggttacacagatggcaaatgccatggttacatccttgggaatgtctcccaagattggctacttatcttttgatcagaatgatggaaacttcaaagttaacaaacccttcagtaataaaacggcaagaaccattgatttagaagttaaatctatagtagatgatgcacacagagcttgtacagaattgttgaccaaaaatttggacaaagtcgatcttgtcgcaaaagaattgttacgtaaggaagcaattactagagaagacatgattagattattgggtccaaggccattcaaggaaaggaacgaggcttttgaaaaatatttggatccaaagagcaataccgaaccgcctgaggcacctgcagcaacaaattga

SEQ ID NO: 3031 - DNA, 666 bp, Saccharomyces cerevisiae
atggccagcatagacgcattttcggaccttgagcgccggatggacgggttccaaaaggacgtggcccaggtactggcacgtcagcaaaaccacgcgcgccaacagctgcaacagttccaagcggaaatgcgtcaattacataaccaacaccaacatctcatagatgaactgcaacggcttgccacccagcgcaccgctctgcagcaacaaatacatgcggcccaacaagctacaaataccaccagagagcagtggagaagctatcacgagcgtgaatctgagttatctagacggcagtcgaccttagcagcccaatcgcgcgagctggactcgctgctgcaacagcgtggtaaagagtgtgtccaattacgcgcacgttgggctgcgcagtcgggtaacgatgccgcagaggtcgcactgtacgaacggctgttgcagcttcgtgtactacccggagccagcgatgtgcatgacgtacgtttcgtattcggcgatgattcacgctgctggatcgaagtcgcgatgcacggagaccacgtgatcggaaactctcacccggcgctggaccccaagagtcgggcaacacttgagcacgtgcttaccgtccagggcgacctcgcggcatttttagtcgtggcccgcgatatgcttctggcatctttataa

SEQ ID NO: 3032 - DNA, 666 bp, Artificial Sequence
  Description of Artificial Sequence: Synthetic polynucleotide
atggccagcatagacgcattttctgaccttgagcgcaggatggacgggttccaaaaggacgtggcccaggtattggcacgtcagcaaaaccacgcgcgccaacagttacaacagttccaagcggaaatgcgtcaattacataaccaacaccaacatctcatagatgaattacaaaggcttgccacccagcgcaccgctttacagcaacaaatacatgcggcccaacaagctacaaataccaccagagagcagtggagaagctatcacgagcgtgaatctgagttatctagaagacagtctaccttagcagcccaaagtcgcgagttggactctttattacaacagcgtggtaaagagtgtgtccaattacgcgcacgttgggctgcgcagtctggtaacgatgccgcagaggtcgcattgtacgaaagattattgcagcttcgtgtattgcccggagccagcgatgtgcatgacgtacgtttcgtattcggcgatgattctcgctgctggatcgaagtcgcgatgcacggagaccacgtgatcggaaactctcacccggcgttggaccccaagagtagagcaacacttgagcacgtgcttaccgtccagggcgacctcgcggcatttttagtcgtggcccgcgatatgcttttagcatctttatga

SEQ ID NO: 3033 - DNA, 1434 bp, Saccharomyces cerevisiae
atgtacaacagaaaagacagagatgttcacgagaggaaggaagatggtcaatctgagtttgaagcactgaacgggaccaacgcaattatgtccgataatagtaaagcgtattccataaagtttctgaccttcaatacatgggggttaaaatacgtctccaaacaccgtaaagaaagactcagagcaattgctgataaattggcgggccactcaatgcttacgccaatatctgacgagttgttgcccaatggtggagatagtaatgaaaacgaagattacgacgtgattgccttacaagaaatctggtgtgtggaagactggaagtatctagcttctgcgtgtgcctccaagtatccgtatcagcgtttgttccattctggtattctgacggggcctgggttggccatactgtccaaggtcccgatagagtcgacctttctttaccggttcccgataaacggtagaccgagtgcggtgttccgtggcgactggtacgtagggaaatctatagcaatcaccgtattgaacacaggaacccgccccattgcaataatgaacagtcacatgcacgccccatacgccaagcagggtgatgccgcctacttgtgccacagatcttgtcaggcctgggatttcagcaggctcattaagctttacaggcaggccggttatgcggtgattgtggtgggtgacttaaactccagaccgggctcactgccccacaaatttctcacgcaggaggccggcctggtcgactcctgggagcaattgcatgggaagcaagacttggcggtgatcgctcgtctgtctccattgcaacaattgcttaagggctgtaccacgtgcgattcgctgctcaacacatggagggcccaaagacaacccgatgaggcatgcaggttggattatgctcttatcgaccctgatttcttgcaaacagtagacgcaggtgtcaggttcactgaacggatccctcacctggactgcagtgtctctgaccattttgcatactcatgcacccttaacatcgtcccacagggcacagagtcccgtccatccacctccgttaagcgtgcgaagactcatgatagagagctgatcttgcagagatactccaactacgaaaccatgatagaatgcatccacacgtacttgaagacagcccaaagacagaaatttttccgtggcctacatttctgggcctcaatacttctcctaatagcgtcgttggtcgtgacaacgtttactgcaaacaaggcaggctggtcctccatcttctgggtccttttcgctattgctgtctccatctcgggcaccatcgacggtgccatctccttcttgtttggcaggtctgaaatcagagccctcatcgaagtcgaacaagaggttctggacgcggagcaccacctgcaaactttcttgagcgagaaatga

SEQ ID NO: 3034 - DNA, 1434 bp, Artificial Sequence
  Description of Artificial Sequence: Synthetic polynucleotide
atgtacaacagaaaagacagagatgttcacgagaggaaggaagatggtcaatctgagtttgaagcattgaacgggaccaacgcaattatgtccgataatagtaaagcgtattccataaagtttttaaccttcaatacatgggggttaaaatacgtctccaaacaccgtaaagaaagactcagagcaattgctgataaattggcgggccactccatgcttacgccaatatctgacgagttgttgcccaatggtggagatagtaatgaaaacgaagattacgacgtgattgccttacaagaaatctggtgtgtggaagactggaagtatttggcttctgcgtgtgcctccaagtatccgtatcagcgtttgttccattctggtattttaacggggcctgggttggccatattatccaaggtcccgatagagtctacctttctttacagattcccgataaacggtagaccgagtgcggtgttccgtggcgactggtacgtagggaaatctatagcaatcaccgtattgaacacaggaacccgccccattgcaataatgaacagtcacatgcacgccccatacgccaagcagggtgatgccgcctacttgtgccacagatcttgtcaggcctgggatttcagcaggctcattaagctttacaggcaggccggttatgcggtgattgtggtgggtgacttaaactccagaccgggctctttaccccacaaatttctcacgcaggaggccggccttgtcgactcctgggagcaattgcatgggaagcaagacttggcggtgatcgctcgtttatctccattgcaacaattgcttaagggctgtaccacgtgcgattctttactcaacacatggagggcccaaagacaacccgatgaggcatgcaggttggattatgctcttatcgaccctgatttcttgcaaacagtagacgcaggtgtcaggttcactgaaagaatccctcacttagactgcagtgtctctgaccattttgcatactcttgcacccttaacatcgtcccacagggcacagagtcccgtccatccacctccgttaagcgtgcgaagactcatgatagagagttgatcttgcagagatactccaactacgaaaccatgatagaatgcatccacacgtacttgaagacagcccaaagacagaaatttttccgtggcttgcatttctgggcctctatacttctcttaatagcgtctttggtcgtgacaacgtttactgcaaacaaggcaggctggtcctccatcttctgggtccttttcgctattgctgtctccatcagtggcaccatcgacggtgccatctccttcttgtttggcaggtctgaaatcagagccctcatcgaagtcgaacaagaggttttggacgcggagcaccacttgcaaactttcttgagcgagaaatga

SEQ ID NO: 3035 - DNA, 267 bp, Saccharomyces cerevisiae
atggcagcttcagttccaccaggaggtcagcgtatcttgcagaagagaagacaggcacaatccattaaggaaaagcaagcaaaacaaacgcccacttccaccagacaggctggttacggtgggtcttcaagctcaattttgaagttatatacggacgaagccaatggattcagagtcgactcccttgtcgtattgttcctatctgtcggtttcatcttctccgtgattgctttgcatctattgacgaaatttacacacattatataa

SEQ ID NO: 3036 - DNA, 267 bp, Artificial Sequence
  Description of Artificial Sequence: Synthetic polynucleotide
atggcagcttctgttccaccaggaggtcagcgtatcttgcagaagagaagacaggcacaatccattaaggaaaagcaagcaaaacaaacgcccacttccaccagacaggctggttacggtgggtcttctagctctattttgaagttatatacggacgaagccaatggattcagagtcgactcccttgtcgtattgttcttatctgtcggtttcatcttctccgtgattgctttgcatcttttgacgaaatttacacacattatatga

SEQ ID NO: 3037 - DNA, 1350 bp, Saccharomyces cerevisiae
atgggtctctgcgcatcttcagaaaagaacggcagcactcctgacacgcagaccgccagcgctggtagtgacaacgttggcaaagcgaaggtaccaccaaagcaggagccacagaagactgtgagaacagtcaacacagcaaatcaacaagaaaagcaacaacagaggcagcagcagccgtctccgcataatgttaaggaccgcaaggagcaaaacgggagcattaataacgcgatatctcccacggctacggcaaatacaagcggatcgcaacagatcaatatcgactctgccctgagagacaggtcgagtaacgttgcagcacaaccatcattgtcggacgcttcaagtggcagcaacgacaaagaactgaaagtgctactgctgggtgccggtgaaagtggtaagtccacggtattgcagcagttgaagattttacaccagaacgggtttagcgagcaggaaattaaagagtacatccccttgatctatcagaatctattggaaattggcaggaacctcatccaggcgagaacaaggtttaacgtcaacttggaaccggagtgtgaactgacgcaacaagacctgtcgagaaccatgtcctatgaaatgcccaataactacacgggccaattcccggaagatatcgcgggcgtaatatctacgttgtgggccttgccctcaacacaagatttagtcaatgggcctaacgcatcgaagttctatctaatggactcgactccttacttcatggaaaatttcaccaggatcacttcgcccaattacagacccacccagcaggacatattaagatcgagacagatgacgtcagggatttttgacaccgtcattgatatggggtcggatatcaagatgcatatttacgacgtgggtggacagcgttccgaaagaaaaaaatggatacactgcttcgacaatgtcactctggtcatattttgcgtttctctatcggagtacgaccagacgctgatggaggacaagaaccagaacaggtttcaggaatcgctggtgcttttcgataatattgtcaacagtagatggttcgcgcgcacgtctgtcgtactctttctgaataaaatcgacctttttgctgaaaaactaagcaaagtgcctatggaaaattacttcccagactacaccggcgggtcagacatcaacaaggctgctaagtacatactctggaggtttgttcagttaaacagggcgaatctaagcatatatcctcacgtgacacaggccacagacacgtcgaatataagattagtatttgccgccatcaaagaaacaattttggaaaatacattgaaagactctggagtgttacaatga

SEQ ID NO: 3038 - DNA, 1350 bp, Artificial Sequence
  Description of Artificial Sequence: Synthetic polynucleotide
atgggtctctgcgcatcttctgaaaagaacggcagcactcctgacacgcagaccgccagcgctggtagtgacaacgttggcaaagcgaaggtaccaccaaagcaggagccacagaagactgtgagaacagtcaacacagcaaatcaacaagaaaagcaacaacagaggcagcagcagccgtctccgcataatgttaaggaccgcaaggagcaaaacgggagcattaataacgcgatatctcccacggctacggcaaatacaagcggatctcaacagatcaatatcgactctgccttgagagacaggtctagtaacgttgcagcacaaccatctttgagtgacgcttccagtggcagcaacgacaaagaattgaaagtgttgttgttgggtgccggtgaaagtggtaagtccacggtattgcagcagttgaagattttacaccagaacgggtttagcgagcaggaaattaaagagtacatccccttgatctatcagaatttattggaaattggcaggaacctcatccaggcgagaacaaggtttaacgtcaacttggaaccggagtgtgaattgacgcaacaagacctttctagaaccatgtcctatgaaatgcccaataactacacgggccaattcccggaagatatcgcgggcgtaatatctacgttgtgggccttgccctccacacaagatttagtcaatgggcctaacgcatccaagttctatttaatggactctactccttacttcatggaaaatttcaccaggatcacttctcccaattacagacccacccagcaggacatattaagatctagacagatgacgtctgggatttttgacaccgtcattgatatggggtctgatatcaagatgcatatttacgacgtgggtggacagcgttccgaaagaaaaaaatggatacactgcttcgacaatgtcactttggtcatattttgcgtttctttatctgagtacgaccagacgttgatggaggacaagaaccagaacaggtttcaggaatctttggtgcttttcgataatattgtcaacagtagatggttcgcgcgcacgtctgtcgtactctttttgaataaaatcgacctttttgctgaaaaattaagcaaagtgcctatggaaaattacttcccagactacaccggcgggagtgacatcaacaaggctgctaagtacatactctggaggtttgttcagttaaacagggcgaatttgagcatatatcctcacgtgacacaggccacagacacgtccaatataagattagtatttgccgccatcaaagaaacaattttggaaaatacattgaaagactctggagtgttacaatga

SEQ ID NO: 3039 - DNA, 1572 bp, Saccharomyces cerevisiae
atggctagcactgcagtaatgatggacgtggattcttccggggtcaatgacttgcaccattctgagaagaaatatgcggaagaagatcaggttcaggaactattgaaagttttgaatgagatctccaagaccactttaacgctggacccaagatatatatggaggagtttaaaggacttgagctctttaaggaaccaggagcttttgaatgcggaaactttatgtttcacagtgaatgtgctgtaccctgattcttcttcattcaagaagaatctgctgaagttcattacttctaaccataaatcgtccgtaccggggtcagctgagcttagaaactcatatccagcctctttttattccgtaaacactgagaaaaagaccattgaagtgacagctgaaattaattgcttcatgcatctactagtccagttgtttttatgggacagtaaagaattagaacaattggtagagtttaataggaaggttgttatcccaaatttattgtgttattacaatttgcgttccttgaatttaatcaacgctaagttatggttctacatctacttgagtcatgaaacgttagcgcgcagctccgaggagattaacagcgacaaccaaaatataatcttaaggtccacgatgatgaagtttttgaaaatcgcttccctgaagcacgacaacgaaaccaaagccatgctgattaacttgatcttgagagattttttgaataatggcgaggttgatagcgcgtctgatttcatttctaaactagaatatcctcacacagacgtttccagttcattggaggcaagatatttcttctatttatcgaaaattaacgccattcaactggattattccactgcgaacgagtacattattgcagccataagaaaagccccacataattccaagagtttagggttcttacagcaatcaaacaaactgcattgttgtattcaattactcatgggtgatattccagaattatcatttttccatcaatcaaatatgcagaaatctctccttccttattaccatttgaccaaagccgttaaattaggtgacttgaaaaaattcacatctacaatcacaaagtataagcagttgctattgaaggatgacacctatcaactctgtgttagattaagatctaatgttatcaagacaggtatcaggatcatctccttaacgtataaaaaaatttcattaagagatatttgtttgaaactgaatttggattcggagcaaactgtagaatacatggtttcaagggctattagagatggtgttattgaagccaagattaatcacgaggatggctttatcgaaaccacagaattactaaacatttatgatagtgaagatcctcagcaagtatttgatgaaagaatcaaatttgccaaccaattacatgatgaataccttgtttcaatgaggtaccctgaggataaaaagactcaacaaaatgagaaaagtgaaaatggtgaaaatgatgatgatacgctagatggtgatttgatggatgacatgtctgatatctcggatctcgacgatttgggattcttataa

SEQ ID NO: 3040 - DNA, 1572 bp, Artificial Sequence
  Description of Artificial Sequence: Synthetic polynucleotide
atggctagcactgcagtaatgatggacgtggattcttccggggtcaatgacttgcaccattctgagaagaaatatgcggaagaagatcaggttcaggaattattgaaagttttgaatgagatctccaagaccactttaacgcttgacccaagatatatatggaggagtttaaaggacttgagctctttaaggaaccaggagcttttgaatgcggaaactttatgtttcacagtgaatgtgttataccctgattcttcttctttcaagaagaatttattgaagttcattacttctaaccataaatcttccgtaccggggtctgctgagcttagaaacagttatccagcctctttttattccgtaaacactgagaaaaagaccattgaagtgacagctgaaattaattgcttcatgcatttattggtccagttgtttttatgggacagtaaagaattagaacaattggtagagtttaataggaaggttgttatcccaaatttattgtgttattacaatttgcgttccttgaatttaatcaacgctaagttatggttctacatctacttgagtcatgaaacgttagcgcgcagctccgaggagattaacagcgacaaccaaaatataatcttaaggtccacgatgatgaagtttttgaaaatcgcttccttgaagcacgacaacgaaaccaaagccatgttgattaacttgatcttgagagattttttgaataatggcgaggttgatagcgcgtctgatttcatttctaaattagaatatcctcacacagacgtttccagttctttggaggcaagatatttcttctatttatccaaaattaacgccattcaattggattattccactgcgaacgagtacattattgcagccataagaaaagccccacataattccaagagtttagggttcttacagcaaagtaacaaattgcattgttgtattcaattactcatgggtgatattccagaattatcttttttccatcaaagcaatatgcagaaatctctccttccttattaccatttgaccaaagccgttaaattaggtgacttgaaaaaattcacatctacaatcacaaagtataagcagttgttgttgaaggatgacacctatcaactctgtgttagattaagatctaatgttatcaagacaggtatcaggatcatctccttaacgtataaaaaaatttctttaagagatatttgtttgaaattgaatttggattctgagcaaactgtagaatacatggtttccagggctattagagatggtgttattgaagccaagattaatcacgaggatggctttatcgaaaccacagaattattaaacatttatgatagtgaagatcctcagcaagtatttgatgaaagaatcaaatttgccaaccaattacatgatgaataccttgtttctatgaggtaccctgaggataaaaagactcaacaaaatgagaaaagtgaaaatggtgaaaatgatgatgatacgttagatggtgatttgatggatgacatgtctgatatcagtgatctcgacgatttgggattcttatga

SEQ ID NO: 3041 - DNA, 2064 bp, Saccharomyces cerevisiae
atgacaacggaagatccagattcaaatcacttaagttccgaaactggcattaaattggcattggacccgaacttaattacattggcactaagttctaatccaaactctagccttcattcaccaacgtctgatgaacccgtacctgaatctgcaggaaaagcagatactagtattcgactagaaggtgatgagttagagaataaaactaagaaagacaatgataagaacttaaaatttttgaagaataaagattctctagtcagtaatccacacgaaatttatggctccatgccgttggagcaattgatcccaatcatcttaagacagcgtggtccaggctttaaattcgttgatttaaatgaaaaagaattgcaaaatgagattaagcagcttggtagtgatagtagtgacggtcataacagcgagaagaaggacactgatggcgctgatgagaatgtacaaattggagaagatttcatggaagtggattatgaagataaagataatccagtggattcacgaaatgaaacagaccacaaaacgaatgaaaatggcgagaccgatgataatattgaaacggtaatgacacaggaacagtttgttaaaagaaggagggatatgctagagcatataaatctggccatgaacgaatcgtctttggctttggaattcgtttctttgctactgtcgagtgttaaagagtctacaggtatgtcatcaatgtcaccatttcttaggaaagttgttaaaccttctagtttaaacagtgataaaattccatatgttgcacctacaaaaaaagaatatatcgagttggatatattgaataagggatggaagttacaaagtttaaacgaatctaaagatctcctacgcgcaagttttaataaactgagttccatattacagaacgaacatgactattggaataagataatgcagagtattagcaacaaggatgttatttttaagattagggacaggactagtggtcaaaagctgttggcaattaagtatggttacgaagactctggatctacctataagcatgacagaggtattgctaatataaggaataatatagaatcacaaaatttggatttgataccccacagtagttcagtgttcaaaggcactgatttcgtacattcagtaaagaaattcttaagggttcgtatcttcacaaaaatcgaatcagaagatgattacatattgagtggcgaaagtgtgatggatagggatagtgaaagtgaagaagctgaaacgaaagatatcagaaagcaaatccaacttttgaaaaagatcatttttgaaaaagaactgatgtaccaaataaagaaagaatgcgctttgttgatttcctatggtgtcagtattgaaaacgaaaacaaggtaataattgaactacctaacgaaaaatttgaaatcgagttgttgtcccttgacgatgactccattgtcaatcatgaacaagacttaccaaaaatcaacgacaagagagcaaatttaatgcttgttatgttgagactattattagtcgttatattcaagaaaacattacgatcgagaataagctcaccccacggactgatcaatttgaatgttgacgatgatatcttaataatacgtcccattcttggtaaagttcggtttgctaattacaaactgttactaaaaaaaatcataaaggattacgtgctcgatatagttcctggctcaagtataacagaaacggaagttgagagagaacaacctcaagaaaataaaaacattgatgatgaaaatataactaaattaaataaagagatccgtgccttcgataaactattgaatatacctagacgtgaactcaaaataaatctaccattaactgagcacaaaagccctaatctaagtttaatgctcgaaagtcctaactattgtaacgcactcattcacatcaagttttcagctggtacggaagccaacgcagtgtcctttgacacaacattttctgattttaaagaagtagaggacttcctacattttattgtcgctgagtacatccagcaaaagaaggtgtaa

SEQ ID NO: 3042 - DNA, 2064 bp, Artificial Sequence
  Description of Artificial Sequence: Synthetic polynucleotide
atgacaacggaagatccagattctaatcacttaagttccgaaactggcattaaattggcattggacccgaacttaattacattggcattaagttctaatccaaactctagccttcattctccaacgtctgatgaacccgtacctgaatctgcaggaaaagcagatactagtattagattagaaggtgatgagttagagaataaaactaagaaagacaatgataagaacttaaaatttttgaagaataaagattctttggtcagtaatccacacgaaatttatggctccatgccgttggagcaattgatcccaatcatcttaagacagcgtggtccaggctttaaattcgttgatttaaatgaaaaagaattgcaaaatgagattaagcagcttggtagtgatagtagtgacggtcataacagcgagaagaaggacactgatggcgctgatgagaatgtacaaattggagaagatttcatggaagtggattatgaagataaagataatccagtggattctagaaatgaaacagaccacaaaacgaatgaaaatggcgagaccgatgataatattgaaacggtaatgacacaggaacagtttgttaaaagaaggagggatatgttagagcatataaatttggccatgaacgaaagctctttggctttggaattcgtttctttgttgctttccagtgttaaagagtctacaggtatgtcttctatgtctccatttcttaggaaagttgttaaaccttctagtttaaacagtgataaaattccatatgttgcacctacaaaaaaagaatatatcgagttggatatattgaataagggatggaagttacaaagtttaaacgaatctaaagatctcttgcgcgcaagttttaataaattaagttccatattacagaacgaacatgactattggaataagataatgcagagtattagcaacaaggatgttatttttaagattagggacaggactagtggtcaaaagttgttggcaattaagtatggttacgaagactctggatctacctataagcatgacagaggtattgctaatataaggaataatatagaatctcaaaatttggatttgataccccacagtagttctgtgttcaaaggcactgatttcgtacattctgtaaagaaattcttaagggttcgtatcttcacaaaaatcgaaagtgaagatgattacatattgagtggcgaaagtgtgatggatagggatagtgaaagtgaagaagctgaaacgaaagatatcagaaagcaaatccaacttttgaaaaagatcatttttgaaaaagaattgatgtaccaaataaagaaagaatgcgctttgttgatttcctatggtgtcagtattgaaaacgaaaacaaggtaataattgaattacctaacgaaaaatttgaaatcgagttgttgtcccttgacgatgactccattgtcaatcatgaacaagacttaccaaaaatcaacgacaagagagcaaatttaatgcttgttatgttgagattattattagtcgttatattcaagaaaacattaagatctagaataagctctccccacggattgatcaatttgaatgttgacgatgatatcttaataatacgtcccattcttggtaaagttagatttgctaattacaaattattattgaaaaaaatcataaaggattacgtgctcgatatagttcctggctccagtataacagaaacggaagttgagagagaacaacctcaagaaaataaaaacattgatgatgaaaatataactaaattaaataaagagatccgtgccttcgataaacttttgaatatacctagacgtgaactcaaaataaatttaccattaactgagcacaaaagccctaatttgagtttaatgctcgaaagtcctaactattgtaacgcactcattcacatcaagttttctgctggtacggaagccaacgcagtgtcctttgacacaacattttctgattttaaagaagtagaggacttcttacattttattgtcgctgagtacatccagcaaaagaaggtgtga

SEQ ID NO: 3043 - DNA, 861 bp, Saccharomyces cerevisiae
atgacttacacattggcaattttaggctgcggtgttatgggccaagcacttctttccgccatttataatgctccaaaggcggctgatgaaactgctgctgcattttacccttccaaaattatcacatgtaaccatgatgaacctagtgcacaacaagttaccgatctagttgagacattcgacgaatctcctaacggtattaaagtcgaaagcacttacggtcacaacgtgagcgctgtcgaagaagcttctgtagttcttcttggtaccaagccatttttggccgaagaagtgttgaatggtgtgaagagcgtcattgggggaaagctacttatttccctggctgctggctggacaattgaccaattgagtcaatacactagcactgtttgccgtgttatgacgaacacacctgccaagtacggatatggttgtgcggtggtgtcctactcagctgatgtttccaaagagcaaaagccactggtcaacgaattgattagccaagttggtaaatacgttgagcttccagaaaagaacatggatgctgctacggctttagtcggttcaggccccgcttttgttctcttgatgttagaatccttgatggagagtgggttgaaattgggaatcccattacaagagagtaaggagtgtgccatgaaagttctagaaggaacagtgaagatggttgagaaaagcggtgctcatccatccgttttaaagcatcaagtttgcacaccaggtggtacaactattgccgggttgtgcgtaatggaagaaaagggcgtcaagagcggtattatcaatggtgttgaagaggcagcccgtgttgcgtcacaattaggccaaaagaagaaatag

SEQ ID NO: 3044 - DNA, 861 bp, Artificial Sequence
  Description of Artificial Sequence: Synthetic polynucleotide
atgacttacacattggcaattttaggctgcggtgttatgggccaagcacttctttccgccatttataatgctccaaaggcggctgatgaaactgctgctgcattttacccttccaaaattatcacatgtaaccatgatgaacctagtgcacaacaagttaccgatttggttgagacattcgacgaatctcctaacggtattaaagtcgaaagcacttacggtcacaacgtgagcgctgtcgaagaagcttctgtagttcttcttggtaccaagccatttttggccgaagaagtgttgaatggtgtgaagagcgtcattgggggaaagcttcttatttccttggctgctggctggacaattgaccaattgagtcaatacactagcactgtttgccgtgttatgacgaacacacctgccaagtacggatatggttgtgcggtggtgtcctactctgctgatgtttccaaagagcaaaagccattagtcaacgaattgattagccaagttggtaaatacgttgagcttccagaaaagaacatggatgctgctacggctttagtcggttctggccccgcttttgttctcttgatgttagaatccttgatggagagtgggttgaaattgggaatcccattacaagagagtaaggagtgtgccatgaaagttttggaaggaacagtgaagatggttgagaaaagcggtgctcatccatccgttttaaagcatcaagtttgcacaccaggtggtacaactattgccgggttgtgcgtaatggaagaaaagggcgtcaagagcggtattatcaatggtgttgaagaggcagcccgtgttgcgtctcaattaggccaaaagaagaaatga

SEQ ID NO: 3045 - DNA, 2772 bp, Saccharomyces cerevisiae
atgtcaagcggcagtactattgtttcgtctgacaagtcggggcgaacatttaagcatgaggaagaactacccaagttaccattacctaaactctgtgacactttgcagcgtctgaaggagagtttagagccattgtattatgctgatggttactatcaacatcctttagatccagaacaaattgagaagctgtcatccataataagagattttgaagagaatcccgtaagtgagaagctgcaatctaaactacagagctaccatgacactagggattgctaccttgatgaattacacttagacatcaataaccagacctccactagggagattcaggacgatgtcctacccaggaatcccttcttggttctcgcagatgacgctttgccaaacatcactcaagctgataggtcagccgtcctagtgcactctgcggccaggtttatttctgctttgaaacaagatttgttgccaccagatatcaatgccaccaatggcaaaccactgtcaatggctccatttctgaacttgttcggtactactcgtagtcctgtttttcagcgcggtgaggttgaaaattttgatttgaacaaaccttacacagcatctgatttagaagaccctgattattcaagcgatgaggacgataacgacgaacccacccaaaaagactttgatgaccgtaaaagaaaacacgaagaagacatattcactggcaatggtataactataaaaagacatccggatagcaaacacatcttgatcatctccaggggccaatactatacactggaagtacttgattcgacgaataaaattatatacactgctgcagaattaaccacaattttcaaccatataataaaagattcttctggcattgaaaaatcaactgcgttaggtagtttgacctctcactcttttagaaactggaaatatgcaaggaagagactacagaaaaggtatcctaatgaattacatcgcatagactctgctctgttcgtgttagtgctggacgaatcacaagaagaaactaccaatgatggcgatgataccgctgatatcagtcaaatgtttaacaggactatcactgagcgagacaagaaatgtacttccgccaattgtaagagagtgttttacggtacttctataataaatagcaaaggccatcaagtgggttcatgtgtttctcgttggtatgataaattacagttagttgtcactgcagatgcaaaagccacagtgatttgggattccttcacatgtgacgggtcagtcgtgcttcggtttacttctgaaatttatacagaatcagtcttgagattagctagagacgttaacgccggtgacccacagttttcactctggcctaacgtgacacaaatggatcctgaaactaaaaaactgatgacggcgaccataagtgccgacggcggaggcccttctgaaattgaccctaagttggttgtaaataaaatcgattggtctttcagtaacatcctgaacacacatgtccatttgtcagaaaccaaactagctgatctgatttccaagtatgatattgttcgcgcttctattccattgggcagaaggtcagctcaaagattaggagtcaagcccgattcgatggttcaagtagctttacaaatagctcactatgctttgtatggaagaatggtgtttggattagaaccagtatccacacgtggtttcaaaaactcgagatcatcttttattaacattcaaagtcaagcgctgttggaactatgtcaattgtttatttctagctccattgatgggacagataaattagacaaatttatccaaacctgcgaaacacataataacatggttaaacatgcaaagtctggggtaggttatgaaaaacacttcaatgcattgaaatatctcttcaaatttcatgaccattttggtatccacttaagtggtgatgaatcatctgctgcgaaagatcttttcgaaaatccacttgttttacctttctcacagcctgagttgattgttgccaactgtggtaatgctgctaccacgacatttggtataactcctgctgtacctcatggctttggaatagggtacatcattaaagatgatcaagtagatttgaccgtgacatcgcaatttcgacagggtgacaggttaatgtttatgttaagttgggtgttaggcgaaattcgttcctactggaggatgtcacgcggcacttctcataataaaactggcgtgaagatcagtccagtggtcgataaattgtatgaaatggacaatgcagtcaataatcctccgaaacgtaacggccatacagtcaatggctcccgcaaaacatcttcttcatcacaggtaaatttgaacaggtatggcgggtttttcgatttggaaggccacattgacagtaggaatatatctaaaacaccatcgatgaagaatttgcagaaaaccttcaatggcttgaccatgagcgcagacaatgatcattcaagttccgcagtttccgttcccacagaaaaggaaaaattaaatacaggccatgaaattttacagatccaaccgcgggaagtggcaagtaatgggttggaagcagatgatgagacagatattgaaatagttgctggcaatgctgatggcacatcctcttcggcatcttcagctacatctctaaattccaagaaacgtaacgtcatcaactcaagattcgatattgattttgaccgcagtcgtgtgggtagaaaggtggcgaccttagatcaataa

SEQ ID NO: 3046 - DNA, 2772 bp, Artificial Sequence
  Description of Artificial Sequence: Synthetic polynucleotide
atgtctagcggcagtactattgtttcttctgacaagagtgggagaacatttaagcatgaggaagaattgcccaagttaccattacctaaactctgtgacactttgcagcgtttgaaggagagtttagagccattgtattatgctgatggttactatcaacatcctttagatccagaacaaattgagaagttatcttccataataagagattttgaagagaatcccgtaagtgagaagttacaatctaaattacagagctaccatgacactagggattgctaccttgatgaattacacttagacatcaataaccagacctccactagggagattcaggacgatgtcttgcccaggaatcccttcttggttctcgcagatgacgctttgccaaacatcactcaagctgataggtctgccgtcttggtgcactctgcggccaggtttatttctgctttgaaacaagatttgttgccaccagatatcaatgccaccaatggcaaaccattatctatggctccatttttgaacttgttcggtactactcgtagtcctgtttttcagcgcggtgaggttgaaaattttgatttgaacaaaccttacacagcatctgatttagaagaccctgattattctagcgatgaggacgataacgacgaacccacccaaaaagactttgatgaccgtaaaagaaaacacgaagaagacatattcactggcaatggtataactataaaaagacatccggatagcaaacacatcttgatcatctccaggggccaatactatacattagaagtacttgattctacgaataaaattatatacactgctgcagaattaaccacaattttcaaccatataataaaagattcttctggcattgaaaaatctactgcgttaggtagtttgacctctcactcttttagaaactggaaatatgcaaggaagagattacagaaaaggtatcctaatgaattacatcgcatagactctgctttattcgtgttagtgcttgacgaatctcaagaagaaactaccaatgatggcgatgataccgctgatatcagtcaaatgtttaacaggactatcactgagagagacaagaaatgtacttccgccaattgtaagagagtgttttacggtacttctataataaatagcaaaggccatcaagtgggttcttgtgtttctcgttggtatgataaattacagttagttgtcactgcagatgcaaaagccacagtgatttgggattccttcacatgtgacgggtctgtcgtgcttagatttacttctgaaatttatacagaatctgtcttgagattagctagagacgttaacgccggtgacccacagttttctctctggcctaacgtgacacaaatggatcctgaaactaaaaaattaatgacggcgaccataagtgccgacggcggaggcccttctgaaattgaccctaagttggttgtaaataaaatcgattggtctttcagtaacatcttgaacacacatgtccatttgagtgaaaccaaattggctgatttgatttccaagtatgatattgttcgcgcttctattccattgggcagaaggtctgctcaaagattaggagtcaagcccgattctatggttcaagtagctttacaaatagctcactatgctttgtatggaagaatggtgtttggattagaaccagtatccacacgtggtttcaaaaactctagatcttcttttattaacattcaaagtcaagcgttattggaattatgtcaattgtttatttctagctccattgatgggacagataaattagacaaatttatccaaacctgcgaaacacataataacatggttaaacatgcaaagtctggggtaggttatgaaaaacacttcaatgcattgaaatatctcttcaaatttcatgaccattttggtatccacttaagtggtgatgaaagctctgctgcgaaagatcttttcgaaaatccacttgttttacctttctctcagcctgagttgattgttgccaactgtggtaatgctgctaccacgacatttggtataactcctgctgtacctcatggctttggaatagggtacatcattaaagatgatcaagtagatttgaccgtgacatctcaatttagacagggtgacaggttaatgtttatgttaagttgggtgttaggcgaaattcgttcctactggaggatgtctcgcggcacttctcataataaaactggcgtgaagatcagtccagtggtcgataaattgtatgaaatggacaatgcagtcaataatcctccgaaacgtaacggccatacagtcaatggctcccgcaaaacatcttcttcttctcaggtaaatttgaacaggtatggcgggtttttcgatttggaaggccacattgacagtaggaatatatctaaaacaccaagcatgaagaatttgcagaaaaccttcaatggcttgaccatgagcgcagacaatgatcattctagttccgcagtttccgttcccacagaaaaggaaaaattaaatacaggccatgaaattttacagatccaaccgagagaagtggcaagtaatgggttggaagcagatgatgagacagatattgaaatagttgctggcaatgctgatggcacatcctcttctgcatcttctgctacatctttgaattccaagaaacgtaacgtcatcaactctagattcgatattgattttgaccgcagtcgtgtgggtagaaaggtggcgaccttagatcaatga

SEQ ID NO: 3047 - DNA, 1584 bp, Saccharomyces cerevisiae
atgagtgacttacaagaccaagaacctagcattattatcaacggtaatttggaaccagttggtgaaccagatatcgttgaagaaacggaagttgtagctcaagaaacacaagaaacacaagatgctgataagccaaagaagaaagtcgccttcactggcttggaagaagacggggaaactgaagaagaaaaaaggaaaagggaatttgaagaaggtggtggtttgcccgaacaaccattaaaccctgatttttcaaaattaaacccactatccgccgaaattatcaacaggcaagctacaataaacatcggtaccatcggtcatgtcgcccacggtaaatccacagtagttagggctatttcaggtgtccaaacagtccgttttaaggatgaattagaacgtaacattactattaagttaggttacgctaatgctaaaatttataaatgtcaagagcctacatgtcccgaacctgattgttatagatcattcaaatctgataaagaaatcagtcctaaatgtcaaagaccaggttgtccggggcgttacaaattggtccgtcacgtttcttttgttgactgtcccggtcacgatatcttaatgagtactatgttatcaggtgctgctgttatggatgctgcgttactgttgattgcaggtaatgaatcttgtccacaacctcaaacctcagagcatttagctgccattgaaatcatgaaattaaagcacgtcatcatcttacagaataaggtcgatttaatgcgtgaagaaagtgccttagaacaccaaaaatccatcttgaagttcatcagaggtaccattgctgacggtgctcctattgtaccaatatccgctcagttgaagtataacatcgacgcagttaatgaatttattgtcaagactattcccgtaccaccaagagattttatgatttctccaaggttaattgttattcgttcatttgatgttaataagccaggtgctgaaatcgaggacctgaaaggtggtgttgccggtggttctattttgaatggtgttttcaaattaggtgatgaaattgagattagaccaggtattgtcaccaaggatgataagggtaaaattcaatgtaaaccaatcttttctaacattgtctccttatttgccgaacaaaatgacttgaagtttgctgttcccggtggtctgattggtgttggtactaaagttgatcctaccttgtgtagagctgatcgtcttgtcggtcaagtcgtcggtgctaagggtcatttgccaaacatttatactgatatcgaaatcaactactttttgctacgtcgtctattaggtgtcaaaacagatggtcaaaagcaagccaaagtcagaaaattagagccaaatgaagttcttatggtcaacattggttctaccgctacgggggctcgtgtggttgccgttaaagctgatatggcaagattacagttaacgtcgcccgcttgtactgaaattaacgagaagattgctttgtcgagacgtatcgaaaagcattggcgtttgattggttgggcaaccattaaaaagggtactacattggaacccatcgcttaa

SEQ ID NO: 3048 - DNA, 1584 bp, Artificial Sequence
  Description of Artificial Sequence: Synthetic polynucleotide
atgagtgacttacaagaccaagaacctagcattattatcaacggtaatttggaaccagttggtgaaccagatatcgttgaagaaacggaagttgtagctcaagaaacacaagaaacacaagatgctgataagccaaagaagaaagtcgccttcactggcttggaagaagacggggaaactgaagaagaaaaaaggaaaagggaatttgaagaaggtggtggtttgcccgaacaaccattaaaccctgatttttccaaattaaacccattgtccgccgaaattatcaacaggcaagctacaataaacatcggtaccatcggtcatgtcgcccacggtaaatccacagtagttagggctatttctggtgtccaaacagtccgttttaaggatgaattagaacgtaacattactattaagttaggttacgctaatgctaaaatttataaatgtcaagagcctacatgtcccgaacctgattgttatagatctttcaaatctgataaagaaatcagtcctaaatgtcaaagaccaggttgtccggggcgttacaaattggtccgtcacgtttcttttgttgactgtcccggtcacgatatcttaatgagtactatgttatctggtgctgctgttatggatgctgcgttattattgattgcaggtaatgaatcttgtccacaacctcaaacctctgagcatttagctgccattgaaatcatgaaattaaagcacgtcatcatcttacagaataaggtcgatttaatgcgtgaagaaagtgccttagaacaccaaaaatccatcttgaagttcatcagaggtaccattgctgacggtgctcctattgtaccaatatccgctcagttgaagtataacatcgacgcagttaatgaatttattgtcaagactattcccgtaccaccaagagattttatgatttctccaaggttaattgttattcgttcttttgatgttaataagccaggtgctgaaatcgaggacttgaaaggtggtgttgccggtggttctattttgaatggtgttttcaaattaggtgatgaaattgagattagaccaggtattgtcaccaaggatgataagggtaaaattcaatgtaaaccaatcttttctaacattgtctccttatttgccgaacaaaatgacttgaagtttgctgttcccggtggtttgattggtgttggtactaaagttgatcctaccttgtgtagagctgatcgtcttgtcggtcaagtcgtcggtgctaagggtcatttgccaaacatttatactgatatcgaaatcaactactttttgttacgtcgtttattaggtgtcaaaacagatggtcaaaagcaagccaaagtcagaaaattagagccaaatgaagttcttatggtcaacattggttctaccgctacgggggctcgtgtggttgccgttaaagctgatatggcaagattacagttaacgtctcccgcttgtactgaaattaacgagaagattgctttgtccagacgtatcgaaaagcattggcgtttgattggttgggcaaccattaaaaagggtactacattggaacccatcgcttga

SEQ ID NO: 3049 - DNA, 831 bp, Saccharomyces cerevisiae
atggttgaatcagatgaagatttcgcacctcaagaattcccacacacggacacagacgttatcgtaaatgaacacagagacgaaaatgacgggtatgcctcagatgaagttggtggcacattaagcagaagggcctcaagtatattttctataaatacaactccattggccccccctaatgctactgatatccaaaaatttacaagtgacgaacatcatttcagcatgatgaggaatttgcatatggcagattacattactatgctgaatggattttctgggttttactctattgtaagttgtctgagatttacgcttacaggtaaacctcattacgtccagcgtgcccatttctttattttattgggtatgtgtttcgatttccttgacgggagagtagcacgtctgagaaataggtcttccttaatgggtcaagaactggactctttggccgacttggtttcctttggtgtggctccggctgcaattgcttttgccattggatttcaaactacattcgatgtcatgattttatctttctttgtcctttgcggcttagcgagattagcaaggtttaatgtcaccgttgctcaattacccaaagattctagcacaggtaaatctaaatattttgagggattgcctatgccaaccactctagctttggtgttgggtatggcatattgtgtcagaaagggtttaatttttgataacatcccattcggcatttttagagaagaccaaatattggaatttcatccaattattctagtattttttatccatgggtgtggaatgatttcgaagagcttgaaaattccaaagccatag

SEQ ID NO: 3050 - DNA, 831 bp, Artificial Sequence
  Description of Artificial Sequence: Synthetic polynucleotide
atggttgaaagtgatgaagatttcgcacctcaagaattcccacacacggacacagacgttatcgtaaatgaacacagagacgaaaatgacgggtatgcctctgatgaagttggtggcacattaagcagaagggcctccagtatattttctataaatacaactccattggccccccctaatgctactgatatccaaaaatttacaagtgacgaacatcatttcagcatgatgaggaatttgcatatggcagattacattactatgttgaatggattttctgggttttactctattgtaagttgtttgagatttacgcttacaggtaaacctcattacgtccagcgtgcccatttctttattttattgggtatgtgtttcgatttccttgacgggagagtagcacgtttaagaaataggtcttccttaatgggtcaagaattagactctttggccgacttggtttcctttggtgtggctccggctgcaattgcttttgccattggatttcaaactacattcgatgtcatgattttatctttctttgtcctttgcggcttagcgagattagcaaggtttaatgtcaccgttgctcaattacccaaagattctagcacaggtaaatctaaatattttgagggattgcctatgccaaccactttggctttggtgttgggtatggcatattgtgtcagaaagggtttaatttttgataacatcccattcggcatttttagagaagaccaaatattggaatttcatccaattattttagtattttttatccatgggtgtggaatgatttccaagagcttgaaaattccaaagccatga

SEQ ID NO: 3051 - DNA, 1254 bp, Saccharomyces cerevisiae
atggctggcgacaaccctgaaaacaaggatgcttccatgttagatgtcagtgacgcagctagcaacactacgattaatggtaaacatagcgccgattcaactaatgaggcttccctggcgtacactttttctcaaatgaacgtagataatcctaatgaattagagcctcagcatcctttaagacataaatcgagtttaatttttaacgacgatgatgacgatgaaatacctccatattcaaaccatgcggaaaatggttctggggagacctttgattctgatgatgatatcgatgctagcagctcgagtagtatcgacagcaacgaaggcgatatccacgatgcagatatgacaggaaataccttgcaaaaaatggattatcaaccatctcagcagcctgactcacttcaaaatcaaggctttcaacagcaacaagaacagcaacagggcactgtggaaggcaagaaaggaagagctatgatgtttccagttgacatcacttggcaacaggggggtaataaagtgtacgttactgggtcttttacgggatggagaaagatgatcgggttagtaccagtccctggacagcctggacttatgcatgtaaaattacagctgcctccaggtactcatcgtttcagatttattgttgacaatgagttaagattcagtgattatttacctaccgcaaccgaccaaatgggaaacttcgtcaactatatggaagtgagcgcaccgcctgattggggcaatgaacctcagcagcatctggctgaaaaaaaagcgaatcatgtagatgatagcaaattgagtaagagacctatgagcgctcgctcgagaatcgcattggagatagaaaaggaaccagatgacatgggcgatggttacactcgttttcacgatgagacccccgctaaacctaatttagagtacactcaagatatacctgctgtgttcaccgacccaaatgtaatggaacaatattatttgacacttgatcagcagcaaaataatcaccaaaatatggcctggttgactcctccacaactgccacctcatttagaaaacgtcattttgaatagttactcaaacgcgcaaactgataatacgtctggcgcccttcccattccgaaccatgttatattgaaccatctggcgacaagcagtattaagcataatacattatgtgtcgcatccattgttaggtataaacaaaaatacgtgacccaaatactgtatacaccattgcaatag

SEQ ID NO: 3052 - DNA, 1254 bp, Artificial Sequence
  Description of Artificial Sequence: Synthetic polynucleotide
atggctggcgacaaccctgaaaacaaggatgcttccatgttagatgtcagtgacgcagctagcaacactacgattaatggtaaacatagcgccgattctactaatgaggcttccttagcgtacactttttctcaaatgaacgtagataatcctaatgaattagagcctcagcatcctttaagacataaatctagtttaatttttaacgacgatgatgacgatgaaatacctccatattccaaccatgcggaaaatggttctggggagacctttgattctgatgatgatatcgatgctagcagcagtagtagtatcgacagcaacgaaggcgatatccacgatgcagatatgacaggaaataccttgcaaaaaatggattatcaaccatctcagcagcctgactctcttcaaaatcaaggctttcaacagcaacaagaacagcaacagggcactgtggaaggcaagaaaggaagagctatgatgtttccagttgacatcacttggcaacaggggggtaataaagtgtacgttactgggtcttttacgggatggagaaagatgatcgggttagtaccagtccctggacagcctggacttatgcatgtaaaattacagttgcctccaggtactcatcgtttcagatttattgttgacaatgagttaagattcagtgattatttacctaccgcaaccgaccaaatgggaaacttcgtcaactatatggaagtgagcgcaccgcctgattggggcaatgaacctcagcagcatttggctgaaaaaaaagcgaatcatgtagatgatagcaaattgagtaagagacctatgagcgctcgctccagaatcgcattggagatagaaaaggaaccagatgacatgggcgatggttacactcgttttcacgatgagacccccgctaaacctaatttagagtacactcaagatatacctgctgtgttcaccgacccaaatgtaatggaacaatattatttgacacttgatcagcagcaaaataatcaccaaaatatggcctggttgactcctccacaattaccacctcatttagaaaacgtcattttgaatagttactctaacgcgcaaactgataatacgtctggcgcccttcccattccgaaccatgttatattgaaccatttagcgacaagcagtattaagcataatacattatgtgtcgcatccattgttaggtataaacaaaaatacgtgacccaaatactttatacaccattgcaatga

SEQ ID NO: 3053 - DNA, 1185 bp, Saccharomyces cerevisiae
atgaattacctgcgagatagatttcctccggataatgaccaaagaccctttagatgtgaaatttgttcacgaggtttccacagacttgaacataaaaaaaggcacggaagaacgcacactggcgagaagcctcacaaatgtaccgttcagggctgtccgaaaagcttcagccgaagcgatgaactaaaaagacatttgaggacacatactaaaggcgtccaaaggcgcagaataaaatccaagggctcgcgaaaaaccgttgtgaatactgctaccgccgcccctaccaccttcaatgaaaacactggtgtttcgctcacggggataggtcaatctaaagtgccacctattcttatctccgttgctcagaattgcgatgacgtgaatatacgaaatactggaaataataatggcattgtggagacacaggcacctgcaattttagtgcctgtgataaatattccaaatgaccctcatccgattccaagtagcctctccactacttctatcacctccattgcatcagtatatccctctacttctccattccagtacctgaaaagcgggtttcctgaagatcctgcatctacaccgtatgtacattcgtccggaagttctttagccctgggtgaattgtcttcaaactcctctatattttcgaaatctaggaggaatttggccgccatgagtggtcctgattctttgagtagttctaaaaaccaatccagtgcttcgcttctttctcaaacttcacatccatcaaagagcttttcaagaccgccaacagacttaagtcctctgcgaagaatcatgccttctgtaaacacaggagacatggaaatttcaaggacagtatccgtttcgagcagttcatcatcactcacttctgttacgtatgatgacaccgcggctaaagacatgggcatgggaatattttttgataggccacctgtaacacagaaagcttgcaggagcaatcataagtacaaggttaatgctgttagcagagggagacaacatgaaagggcacaatttcatatatctggagatgatgaggacagtaacgttcaccgccaagaatcaagagcatccaacacaagtcccaatgtatcattgcctccgataaagagcattttgcgacaaattgataatttcaacagtgctccttcttacttcagtaaataa

SEQ ID NO: 3054 - DNA, 1185 bp, Artificial Sequence
  Description of Artificial Sequence: Synthetic polynucleotide
atgaattacttaagagatagatttcctccggataatgaccaaagaccctttagatgtgaaatttgttctcgtggtttccacagacttgaacataaaaaaaggcacggaagaacgcacactggcgagaagcctcacaaatgtaccgttcagggctgtccgaaaagcttcagcaggagcgatgaattgaaaagacatttgaggacacatactaaaggcgtccaaaggcgcagaataaaatccaagggcagtagaaaaaccgttgtgaatactgctaccgccgcccctaccaccttcaatgaaaacactggtgtttctctcacggggataggtcaatctaaagtgccacctattcttatctccgttgctcagaattgcgatgacgtgaatataagaaatactggaaataataatggcattgtggagacacaggcacctgcaattttagtgcctgtgataaatattccaaatgaccctcatccgattccaagtagcctctccactacttctatcacctccattgcatctgtatatccctctacttctccattccagtacttgaaaagcgggtttcctgaagatcctgcatctacaccgtatgtacattcttccggaagttctttagcccttggtgaattgtcttccaactcctctatattttccaaatctaggaggaatttggccgccatgagtggtcctgattctttgagtagttctaaaaaccaatccagtgcttctcttctttctcaaacttctcatccatctaagagcttttccagaccgccaacagacttaagtcctttgagaagaatcatgccttctgtaaacacaggagacatggaaatttctaggacagtatccgtttccagcagttcttcttctctcacttctgttacgtatgatgacaccgcggctaaagacatgggcatgggaatattttttgataggccacctgtaacacagaaagcttgcaggagcaatcataagtacaaggttaatgctgttagcagagggagacaacatgaaagggcacaatttcatatatctggagatgatgaggacagtaacgttcaccgccaagaatctagagcatccaacacaagtcccaatgtatctttgcctccgataaagagcattttgagacaaattgataatttcaacagtgctccttcttacttcagtaaatga

SEQ ID NO: 3055 - DNA, 591 bp, Saccharomyces cerevisiae
atgagcaaaatacaggtggcacatagcagccgactagccaaccttattgattataagctgagggttctcactcaagatggccgcgtttacatcgggcaattgatggcatttgataaacatatgaatttagtgttgaatgagtgtatagaagagagggtacccaaaactcaactagataaattaagaccgagaaaagattcaaaagatggaaccactttgaacatcaaggtagaaaaaagagtgttgggactgactatactaagaggagaacagatcttatccacagtggtggaggataagccgctactatccaagaaggaaagactagtgagagataaaaaggaaaagaaacaagcgcaaaagcagacgaaactaagaaaagagaaagagaaaaagccgggaaagatcgctaaacctaacacggccaatgcgaagcatactagtagcaattctagggagattgcccaaccatcgtcgagcagatacaatggtggcaacgataatatcggcgcaaataggtcgaggtttaataatgaagcgccccctcaaacaaggaagtttcagcccccaccaggttttaaaagaaaataa

SEQ ID NO: 3056 - DNA, 591 bp, Artificial Sequence
  Description of Artificial Sequence: Synthetic polynucleotide
atgagcaaaatacaggtggcacatagcagcaggttggccaaccttattgattataagttaagggttctcactcaagatggccgcgtttacatcgggcaattgatggcatttgataaacatatgaatttagtgttgaatgagtgtatagaagagagggtacccaaaactcaattggataaattaagaccgagaaaagattctaaagatggaaccactttgaacatcaaggtagaaaaaagagtgttgggattaactatattaagaggagaacagatcttatccacagtggtggaggataagccgttgttatccaagaaggaaagattagtgagagataaaaaggaaaagaaacaagcgcaaaagcagacgaaattgagaaaagagaaagagaaaaagccgggaaagatcgctaaacctaacacggccaatgcgaagcatactagtagcaattctagggagattgcccaaccatcttctagcagatacaatggtggcaacgataatatcggcgcaaataggagtaggtttaataatgaagcgccccctcaaacaaggaagtttcagcccccaccaggttttaaaagaaaatga

SEQ ID NO: 3057 - DNA, 462 bp, Saccharomyces cerevisiae
atgtctgacgaagcaaaggaaaagcgtgaattagaaagccaaaaggaatcaagtcataataaatccgaaaagtctgtggaacctaagccaaagagaagaagaagaagaaactatgacgattatgacgctgaagtagcaaaagaggagactaaggctaaaaatggtttgacgaagagcgaaaataatggtactgttgaagattctgaatctgatatggacgatgccaagttagacgcattgatgggaaatgagggagaagaagaagaggacgatttggcagaaattgatacctctaatatcatcacatccggaagaagaacacgcggcaaagtaattgactataaaaagactgcagaagaattagacaagaaggaacctagcacaggctctaaagatgatgtaggatatggtgaaaaagaagaagacgatgaagacgaagaagacgatgattttaaagagtag

SEQ ID NO: 3058 - DNA, 462 bp, Artificial Sequence
  Description of Artificial Sequence: Synthetic polynucleotide
atgtctgacgaagcaaaggaaaagcgtgaattagaaagccaaaaggaaagtagtcataataaatccgaaaagtctgtggaacctaagccaaagagaagaagaagaagaaactatgacgattatgacgctgaagtagcaaaagaggagactaaggctaaaaatggtttgacgaagagcgaaaataatggtactgttgaagattctgaatctgatatggacgatgccaagttagacgcattgatgggaaatgagggagaagaagaagaggacgatttggcagaaattgatacctctaatatcatcacatccggaagaagaacacgcggcaaagtaattgactataaaaagactgcagaagaattagacaagaaggaacctagcacaggctctaaagatgatgtaggatatggtgaaaaagaagaagacgatgaagacgaagaagacgatgattttaaagagtga

SEQ ID NO: 3059 - DNA, 672 bp, Saccharomyces cerevisiae
atgagcagcgaggactacgggtatgattacgacctactatttaaaattgtactgatcggtgattccggggtagggaaatccaatctattgtcaagatttacgaagaacgaattcaatatggattcaaagtctacaattggggttgagtttgccaccagaactttggaaattgatggcaagaggatcaaggcgcagatttgggatactgcgggccaggaacgttacagagccattacttctgcttattatagaggagctgtaggtgccttgatcgtttacgatatcagtaaatcaagctcatatgaaaattgtaatcattggttatcagaattaagagaaaatgcagatgacaacgtcgcagtggggcttatcggtaacaagtctgatttggcccatttacgtgctgtacctacggaggagtccaagacttttgcacaggaaaatcagttattattcacagaaacaagtgctttgaacagtgaaaacgtggataaggcttttgaagagttaatcaataccatctatcaaaaggtcagcaagcatcaaatggaccttggtgactccagtgccaacgggaatgccaatggtgcgtccgctcctaatggaccaacgattagtctgacaccaacaccaaacgaaaacaaaaaggcaaatggaaataactgttgttaa

SEQ ID NO: 3060 - DNA, 672 bp, Artificial Sequence
  Description of Artificial Sequence: Synthetic polynucleotide
atgagcagcgaggactacgggtatgattacgacttactttttaaaattgtattgatcggtgattccggggtagggaaatccaatttattgtccagatttacgaagaacgaattcaatatggattctaagtctacaattggggttgagtttgccaccagaactttggaaattgatggcaagaggatcaaggcgcagatttgggatactgcgggccaggaacgttacagagccattacttctgcttattatagaggagctgtaggtgccttgatcgtttacgatatcagtaaaagtagctcttatgaaaattgtaatcattggttatctgaattaagagaaaatgcagatgacaacgtcgcagtggggcttatcggtaacaagtctgatttggcccatttacgtgctgtacctacggaggagtccaagacttttgcacaggaaaatcagttattattcacagaaacaagtgctttgaacagtgaaaacgtggataaggcttttgaagagttaatcaataccatctatcaaaaggtcagcaagcatcaaatggaccttggtgactccagtgccaacgggaatgccaatggtgcgtccgctcctaatggaccaacgattagtttgacaccaacaccaaacgaaaacaaaaaggcaaatggaaataactgttgttga

SEQ ID NO: 3061 - DNA, 2631 bp, Saccharomyces cerevisiae
atgagcctccctgttacacctgtcaagagcaaagtgtgcagtacattatcgatacaacatgagatggaccatgatcaatgccgtgatgtgttgtgcccacgcgaaaacttactagccattaatagaactaataatatagagagtgttgctataccgcgacagagatcgagcaagaacaagaaaccccatgagcatacacaatcgcaggttcgattttccattccagatccaaatgaaatatcacaggactccccactgaaaattgtattccccaagagtggaaatgaaaccgaaagaagaatgtctacttcatcattacttatgaatagccatggtcatttagtcgacatgcactctaaaatactggtcgatgtccctaaagaagtttggaagtttcatcataacaggagaaaaaaatgtgaaagcaggcaccgtaaaactcgttctgatgttaggtccaacacaagtagtagtggaaaagaaccaaaccattctagatcaaaatcattacagtcgatcattgtggatacaatgaacacatatcgtgcaaccgaggttgagaccagtattaatgagaatactagtaatattagccaagtatctccgctgaatttatcatttgacaggcctcctcccttaactcccgaaaagaatttatatctcactcctgaatcgccattgaacagatatcatttaccagttccattagaaatatctctgccgccctacttatctccgcaaaacaaggataaaaagaggagtagcttggtttacgatggggatggctatagccagtttcaagaaggtaacacctcatcgtcaactgaatcttctctagaacagccctcatcgtcgtattcagatgaagatgattctattccatatgcccaccatgatgtgtctttcgagttaaataatgcagatgctgataagcttcttggaattgatgagaacgccaacgtcaatctgaagatacaaaggagaaatctcaaaaacccacaacatattaagagtaaaacagatagggaatgtgaggaaaaaaacactgaaaaaaatgtttcgttaaaaattctgtcaacaccaaataaactgatagacatccccgacttagagcacatgaaatccccaccaagcacaggtttaaatgggacattaaaatttttccagcagtttgaacctagcgaggagccaacttctccaactcgccaagttaaccctgaatcactggacaaactcgatatgtcattcaaatttccctccagtactactaacaataatgtggataaggtacatgaaaatagaaactctggagacacgaacaatgaagatttcctgaaagttgatacttcgcctgtgaatcaatcatttgaatccagaagacagatgttaatagacttgcaaaaatctccgacgaataataatccgaggatacataaacataggagaagcaggagcgttcataatattgatgacatttccttaaatttcgaggcaacctccacaccaccagctccgacctctgctccctcaattcctgttgaacattctaacccatgtacttccattgaaatacctaagagatcacccttacggttcacgtcatctccaaaaacatctgatattcctcctgaagctcaatcacctaaaaatgggtccttcctccaagaaatctcggtaccttcgattcaaattataccagatgaaagtatctctcatacaagagaaccatcaccatcacttattgaatgcccagaggatgaaaacgaagctttttctactgaagttgctgaccattctattgcaataattagtgaaacaaaaagtgttccatcgatagagccattcaaaccgctatcttcattcaattcatttggtcaagaaattcaaaacaaggaaccaactcctttgaaccaaactcctacagacttaattggtaaacaaagaaactgtgtgaatccgcattcaattccatttagtgttttatcttccaatagccaatcgtcacaatcgggtagtagtaaatcttcctacaattctgagttttcttccaatactgccattacggatacaacatctcaaccttctgtgaccattaacaggtcaactttagaacataactttatagaagaaaaacgatcaattaaaaatttaggtcatggtcctccatcccagaagaacaactattcgttccccaggaataagaatactccttcaaatagacacgatttggattttaataccatttacgaaaaaagagatggtaaaatggttgaggttattcttttagatgaggatgaagatgtaggcctcaaaaataacgatatatcacgaacaagagtctgccatgctcaaaaagctaaaaatgagcaacagaagaaacgtctaagccattgcaacgaaattttgggcatgtgtgataaaactgcagatgatgcaaaaagaattatttatcaactggtaaatgagaagcataaattctcagaaaaaggacaacaaacaaagccaaaaaaatcaagagtacttccgccgttgccttttccactgtatgatgaaaaagggaattctttgatcccgaacaagtatcagtccagtattcataacgacattccatctcatcgcaaactaaaataa

SEQ ID NO: 3062 - DNA, 2631 bp, Artificial Sequence
  Description of Artificial Sequence: Synthetic polynucleotide
atgagcctccctgttacacctgtcaagagcaaagtgtgcagtacattatctatacaacatgagatggaccatgatcaatgccgtgatgtgttgtgcccacgcgaaaacttattagccattaatagaactaataatatagagagtgttgctataccgagacagagaagcagcaagaacaagaaaccccatgagcatacacaatctcaggttagattttccattccagatccaaatgaaatatctcaggactccccattgaaaattgtattccccaagagtggaaatgaaaccgaaagaagaatgtctacttcttctttacttatgaatagccatggtcatttagtcgacatgcactctaaaatattggtcgatgtccctaaagaagtttggaagtttcatcataacaggagaaaaaaatgtgaaagcaggcaccgtaaaactcgttctgatgttaggtccaacacaagtagtagtggaaaagaaccaaaccattctagaagtaaatctttacagtctatcattgtggatacaatgaacacatatcgtgcaaccgaggttgagaccagtattaatgagaatactagtaatattagccaagtatctccgttaaatttatcttttgacaggcctcctcccttaactcccgaaaagaatttatatctcactcctgaatctccattgaacagatatcatttaccagttccattagaaatatctttaccgccctacttatctccgcaaaacaaggataaaaagaggagtagcttggtttacgatggggatggctatagccagtttcaagaaggtaacacctcttcttctactgaatcttctttggaacagccctcttcttcttattctgatgaagatgattctattccatatgcccaccatgatgtgtctttcgagttaaataatgcagatgctgataagcttcttggaattgatgagaacgccaacgtcaatttgaagatacaaaggagaaatctcaaaaacccacaacatattaagagtaaaacagatagggaatgtgaggaaaaaaacactgaaaaaaatgtttctttaaaaattttatctacaccaaataaattgatagacatccccgacttagagcacatgaaatccccaccaagcacaggtttaaatgggacattaaaatttttccagcagtttgaacctagcgaggagccaacttctccaactcgccaagttaaccctgaatctttggacaaactcgatatgagtttcaaatttccctccagtactactaacaataatgtggataaggtacatgaaaatagaaactctggagacacgaacaatgaagatttcttgaaagttgatacttctcctgtgaatcaaagttttgaatccagaagacagatgttaatagacttgcaaaaatctccgacgaataataatccgaggatacataaacataggagaagcaggagcgttcataatattgatgacatttccttaaatttcgaggcaacctccacaccaccagctccgacctctgctccctctattcctgttgaacattctaacccatgtacttccattgaaatacctaagagatctcccttaagattcacgtcttctccaaaaacatctgatattcctcctgaagctcaaagtcctaaaaatgggtccttcctccaagaaatctctgtaccttctattcaaattataccagatgaaagtatctctcatacaagagaaccatctccaagtcttattgaatgcccagaggatgaaaacgaagctttttctactgaagttgctgaccattctattgcaataattagtgaaacaaaaagtgttccaagtatagagccattcaaaccgttatcttctttcaattcttttggtcaagaaattcaaaacaaggaaccaactcctttgaaccaaactcctacagacttaattggtaaacaaagaaactgtgtgaatccgcattctattccatttagtgttttatcttccaatagccaatcttctcaatctggtagtagtaaatcttcctacaattctgagttttcttccaatactgccattacggatacaacatctcaaccttctgtgaccattaacaggtctactttagaacataactttatagaagaaaaaagatctattaaaaatttaggtcatggtcctccatcccagaagaacaactattctttccccaggaataagaatactccttccaatagacacgatttggattttaataccatttacgaaaaaagagatggtaaaatggttgaggttattcttttagatgaggatgaagatgtaggcctcaaaaataacgatatatctcgcacaagagtctgccatgctcaaaaagctaaaaatgagcaacagaagaaacgtttgagccattgcaacgaaattttgggcatgtgtgataaaactgcagatgatgcaaaaagaattatttatcaattggtaaatgagaagcataaattctctgaaaaaggacaacaaacaaagccaaaaaaatctagagtacttccgccgttgccttttccattgtatgatgaaaaagggaattctttgatcccgaacaagtatcagtccagtattcataacgacattccatctcatcgcaaattgaaatga

SEQ ID NO: 3063 - DNA, 3231 bp, Saccharomyces cerevisiae
atgcggtctttcataaaagcccataagaagtccacgtcgtttgatgaaagccccaagcgacatagcaacttcagtggcaatactaataatagttctcaaaggtcaagtgatgactccttagactttctaccatctacaccatcacaaatgaattacgatagcattccaccacccgcgaaacactcacctggatttgagtctttccatcgtttggctaacaagacttcaaagttgttcaagaaaacttcaaactcaaacttaaactcgcatttagcttcaactccaaccacaagcacaaatcagactacttcaaattcatttgttctccaaaatccacccacaaaaaatactggacctccgccgccattaccaccgccgctctttccttcctcttctacctcttccttttcacgtcatgacaatgaaagtgaatatactgcatataaaaaaacttctcctgcaaaagattttaatagaaccacagactctctgcctgctattaagggcacaattactcattcgtggggagattccaaggtcgaatcgcacgtaataatattaaacgatcctgcttccccagcatcaaacacatctgaagcgacttcttctaaacaattcaaaacccctatcattggcaatgaaaatctaacttcaactacatcaccatctaacctggaacctgccataagaatattgaacaagaacaagggtaaacagcaggaaaatatcgacgatgctgaggacgggtcatctaagaaggaacatcatgtttataaagcattagcgcttgccaaaaatagaaacagacaagcaagaattcattctcatgatgatataataaatttgggaaaggcttctcaaatggatatgagtctactagccgctgcgttttccggaaattcaaccaccaccattaataatgaccaatcttctaatgaacaaaccgatgagaaaatattagacatcgaaagagtgaccactacttccactttaacctcttccgaaaccacatcaccaataaacaagtcaccttgtttttatagtcaaacactttccctctcaccaaagatacgacacggcgacttacaatcatcaccttcaaaagtgaacaaaaacgatagtcaaaacgagaccttgaacaagaaaaaagtaaggattagtcttaatagaaaagaagaagaaaaggtgtattccctcaacaacaattccgatgaatactctgtcaatgaaaaagaaacccataaagccaacgattgtaatgacgaatcttctgaaaacggtgatggcgataatgatcatgatgatgattatgatgacgatgatgatgacgatgatgatgatgatgagtcggaattttcgtttgaatatgccggcataaacgtaaggacatcatctgtaaagtattactccaaaccggaaccggcggcaaatgtatacatagacgatctatatgaggatgagaactttgatgacgatatgaattgtatagaagatgatgagagtggtaatgagggaaacgaaatatgcggtttatcgactcgattcgaagaaacatccttgaaaagcaataaagtcaaaaagttcaatgatctttttaacttgagcgatgatgatgaggaggaggatggtaaagataacagtaacaatggagatgaaaatgagagtgataatctttatcaaaaacgattagaaaacgggaaagaaacttttaatggtaaccatggcggacaccatgatgatgcatctcttggagaaacggttgacaacaaagagcagtttctaataaacgataatgtcaagaagcctattcaaaaatacaatgaccttttcgatttgtctgatgaggacgataacgacgacaaagagatgtcagaagctgagtcttatatgttttccgatgaagctcctagtatagaaagtggaccagcaaatgcaaaatcaacacgggggatctatagtcaatctaacaaaaatatcatacgtgatggaaagccgaactatagtttctctctcaaaaggaataattcggatgatgaaacggagcacacttctgcaataaaggcttcccttacaggtactactggctctaccaagcctacagtaaagtcgttttcagatatatttaatgttgatgatagtgcaagtgacgctgaaagtgattctgggacaggagggaacaattctaacggcttagtatccaatgattcagaaaggcaggtctccctgcaaagttctttgtatgaaaccaaatcagaatcccatcctcccaatcatcctcattcgcagattcttcaaacaccggctaagattgtaataactccaagcgtttctgatgcgcaatcacaagcccttgcaatcaccgatgatgatggtgaagatgatgatgatgacactagtagcatactaagaactccgtttcaacttattgattcctctcattcacagcagccgcactatgcgagcccacagtatacggctgtactcaatagcccccctcttccgccgccagctaggtctcaatcactaaaatatcatgacttaaattgcgatttagattcagaagtccccagaccaatgagtaatctctttttcattgatgaagctgaggaagacgaatacaatcagaaaagtaagttttttgatttcgaccactacgacatcgatgaaattaatggcattccagaggattttaacttctctgattctgaaagagatgatcttaatcgtcgtacactgaaatctcctttacggggcggctccaagaatagagaagtctctcctttttcatctgtgtcatcgtctttcagaagtacgcatagttttaatgggaaattaacgatcaaccaaggggctaaagaattagctccgatgaaaaataagattgaacttacaaacaagactgtcaccttctttaacagtaataattggaatacttatgactgcaattcactctcccgaaaaacttcatcccaaatgagagatagtaaatatcaaaatcataatgttggtcaaaacgtagaaccttcaagtgttctttcgccacaacatcaaatatcgaatggtttagatggaaaatgcaatgataactacgtaatctcaccaaatttaccgacaactatcacaccaactaattcatttactaaacccacaccggagttctcaaatgactactcattaagccctattcaggagacaccatcttctgttcaaagctcgccaaagagagcgtga

SEQ ID NO: 3064 - DNA, 3231 bp, Artificial Sequence
  Description of Artificial Sequence: Synthetic polynucleotide
atgagatctttcataaaagcccataagaagtccacgtcttttgatgaaagccccaagagacatagcaacttcagtggcaatactaataatagttctcaaaggtctagtgatgactccttagactttttaccatctacaccatctcaaatgaattacgatagcattccaccacccgcgaaacactctcctggatttgagtctttccatcgtttggctaacaagacttctaagttgttcaagaaaacttctaactccaacttaaactctcatttagcttccactccaaccacaagcacaaatcagactacttccaattcttttgttctccaaaatccacccacaaaaaatactggacctccgccgccattaccaccgccgctctttccttcctcttctacctcttccttttctcgtcatgacaatgaaagtgaatatactgcatataaaaaaacttctcctgcaaaagattttaatagaaccacagactctttgcctgctattaagggcacaattactcattcttggggagattccaaggtcgaatctcacgtaataatattaaacgatcctgcttccccagcatctaacacatctgaagcgacttcttctaaacaattcaaaacccctatcattggcaatgaaaatttaacttctactacatctccatctaacttggaacctgccataagaatattgaacaagaacaagggtaaacagcaggaaaatatcgacgatgctgaggacgggagttctaagaaggaacatcatgtttataaagcattagcgcttgccaaaaatagaaacagacaagcaagaattcattctcatgatgatataataaatttgggaaaggcttctcaaatggatatgagtttattagccgctgcgttttccggaaattctaccaccaccattaataatgaccaatcttctaatgaacaaaccgatgagaaaatattagacatcgaaagagtgaccactacttccactttaacctcttccgaaaccacatctccaataaacaagtctccttgtttttatagtcaaacactttccctctctccaaagatacgtcacggcgacttacaatcttctccttccaaagtgaacaaaaacgatagtcaaaacgagaccttgaacaagaaaaaagtaaggattagtcttaatagaaaagaagaagaaaaggtgtattccctcaacaacaattccgatgaatactctgtcaatgaaaaagaaacccataaagccaacgattgtaatgacgaatcttctgaaaacggtgatggcgataatgatcatgatgatgattatgatgacgatgatgatgacgatgatgatgatgatgagagtgaattttcttttgaatatgccggcataaacgtaaggacatcttctgtaaagtattactccaaaccggaaccggcggcaaatgtatacatagacgatttatatgaggatgagaactttgatgacgatatgaattgtatagaagatgatgagagtggtaatgagggaaacgaaatatgcggtttatctactagattcgaagaaacatccttgaaaagcaataaagtcaaaaagttcaatgatctttttaacttgagcgatgatgatgaggaggaggatggtaaagataacagtaacaatggagatgaaaatgagagtgataatctttatcaaaaaagattagaaaacgggaaagaaacttttaatggtaaccatggcggacaccatgatgatgcatctcttggagaaacggttgacaacaaagagcagtttttaataaacgataatgtcaagaagcctattcaaaaatacaatgaccttttcgatttgtctgatgaggacgataacgacgacaaagagatgtctgaagctgagtcttatatgttttccgatgaagctcctagtatagaaagtggaccagcaaatgcaaaatctacaagagggatctatagtcaatctaacaaaaatatcatacgtgatggaaagccgaactatagtttctctctcaaaaggaataattctgatgatgaaacggagcacacttctgcaataaaggcttcccttacaggtactactggctctaccaagcctacagtaaagagcttttctgatatatttaatgttgatgatagtgcaagtgacgctgaaagtgattctgggacaggagggaacaattctaacggcttagtatccaatgattctgaaaggcaggtctccttacaaagttctttgtatgaaaccaaaagtgaatcccatcctcccaatcatcctcattctcagattcttcaaacaccggctaagattgtaataactccaagcgtttctgatgcgcaatctcaagcccttgcaatcaccgatgatgatggtgaagatgatgatgatgacactagtagcatattaagaactccgtttcaacttattgattcctctcattctcagcagccgcactatgcgagcccacagtatacggctgtactcaatagcccccctcttccgccgccagctaggtctcaatctttgaaatatcatgacttaaattgcgatttagattctgaagtccccagaccaatgagtaatctctttttcattgatgaagctgaggaagacgaatacaatcagaaaagtaagttttttgatttcgaccactacgacatcgatgaaattaatggcattccagaggattttaacttctctgattctgaaagagatgatcttaatcgtcgtacattaaaatctcctttaagaggcggctccaagaatagagaagtctctcctttttcttctgtgtcttcttctttcagaagtacgcatagttttaatgggaaattaacgatcaaccaaggggctaaagaattagctccgatgaaaaataagattgaacttacaaacaagactgtcaccttctttaacagtaataattggaatacttatgactgcaatagtctctccagaaaaacttcttcccaaatgagagatagtaaatatcaaaatcataatgttggtcaaaacgtagaaccttctagtgttctttctccacaacatcaaatatccaatggtttagatggaaaatgcaatgataactacgtaatctctccaaatttaccgacaactatcacaccaactaattcttttactaaacccacaccggagttcagtaatgactactctttaagccctattcaggagacaccatcttctgttcaaagctctccaaagagagcgtga

SEQ ID NO: 3065 - DNA, 558 bp, Saccharomyces cerevisiae
atggatgcattcagcttaaagaaggataatcgaaaaaaatttcaagataaacagaaattgaaaagaaaacatgccacacccagtgatagaaagtaccggctattgaaccgccaaaaagaagagaaagctaccacagaggagaaagatcaagaccaagaacagcccgccctgaagtcaaacgaggacaggtactatgaggacccggtactcgaggacccgcattctgcagtcgccaatgcagagttgaacaaggtgctaaaagacgtcctcaaaaatcggctccagcagaacgacgacgccacagccgtcaataatgttgctaataaagatactttgaaaatcaaagacctcaagcagatgaatacggatgagctcaatcgttggctcggacggcagaatacaacatcggctataacagcggctgagcccgaatcattagtcgttcccattcacgtacaaggtgatcatgatcgtgcgggcaagaagatcagtgccccttcgaccgatctaccggaagaactagagaccgatcaggatttccttgatggactgctctaa

SEQ ID NO: 3066 - DNA, 558 bp, Artificial Sequence
  Description of Artificial Sequence: Synthetic polynucleotide
atggatgcattcagcttaaagaaggataatagaaaaaaatttcaagataaacagaaattgaaaagaaaacatgccacacccagtgatagaaagtacagattattgaaccgccaaaaagaagagaaagctaccacagaggagaaagatcaagaccaagaacagcccgccttgaagtctaacgaggacaggtactatgaggacccggtactcgaggacccgcattctgcagtcgccaatgcagagttgaacaaggtgttgaaagacgtcctcaaaaatagactccagcagaacgacgacgccacagccgtcaataatgttgctaataaagatactttgaaaatcaaagacctcaagcagatgaatacggatgagctcaatcgttggctcggaaggcagaatacaacatctgctataacagcggctgagcccgaatctttagtcgttcccattcacgtacaaggtgatcatgatcgtgcgggcaagaagatcagtgccccttctaccgatttaccggaagaattagagaccgatcaggatttccttgatggattactctga

SEQ ID NO: 3067 - DNA, 438 bp, Saccharomyces cerevisiae
atgggttccgagacaaaacattctgcaaaagtcaagattgtcacaagggaaagtcctccttccgccaaggagcacatgcgccccactaaaactcaaatattagttccaccgacgcagagtttgcccaatggcaagaaaccaaacttcggtaagtctacaaaacagcggcgagaacctagggaacgcacctcgaagacgggacacgaggacgataaggcaacgatggtcactgttaacatagatgccttcctacatgataaggcccctaaaaaaaaatcgtgcaaatacaagaagaagaaaacgagacagtaccaggatagggcggcggcgtcgatcgattcgaaaccgcacgtagctggtcatacggcctttgccggtgcttcgttcacaacagatatcccacatgaggcagcgctacccaaacctagttttgtttga

SEQ ID NO: 3068 - DNA, 438 bp, Artificial Sequence
  Description of Artificial Sequence: Synthetic polynucleotide
atgggttccgagacaaaacattctgcaaaagtcaagattgtcacaagggaaagtcctccttccgccaaggagcacatgcgccccactaaaactcaaatattagttccaccgacgcagagtttgcccaatggcaagaaaccaaacttcggtaagtctacaaaacagagaagagaacctagggaacgcacctccaagacgggacacgaggacgataaggcaacgatggtcactgttaacatagatgccttcttacatgataaggcccctaaaaaaaaaagttgcaaatacaagaagaagaaaacgagacagtaccaggatagggcggcggcgtctatcgattctaaaccgcacgtagctggtcatacggcctttgccggtgcttctttcacaacagatatcccacatgaggcagcgttgcccaaacctagttttgtttga

SEQ ID NO: 3069 - DNA, 1833 bp, Saccharomyces cerevisiae
atgccaccagtatctgcgtcaaaggccaagagagatgctaagaaagctgaaagagaggctaagaaagccgctgccggtaaaaccatcagaaagctaggtagaaaaaaggaggctgctgctgaagaatcggaggtagatgcagccgctagagaaatcaagatgatgaagttgcaacaagataaggatggtctttcagatcgtgttgtcactggtgttttgagttcattggagacttcccgtgatatcaagctatcttctgtttctttactgttccacggtaaagttttgatccaagattctggtttagaattaaactacggccgtagatatggtcttctgggagaaaatggttgtggtaagtcaacattcttaaaggctcttgctactagagaatatcctattcctgagcatattgatatttatttattggacgaacctgcggaaccaagtgaattgtcggccttggactacgttgtcactgaagctcaacacgaattgaaaagaatagaagacttagtcgaaaagactatcttggaagatggtcctgagtccgagttattagagcctctatatgaaagaatggactctttggatccagacacctttgaatctagagctgctatcattttgatcggtctaggtttcaacaagaagaccattttgaagaaaaccaaagatatgtctggtggatggaaaatgcgtgttgcgttggcaaaagctcttttcgttaagccaactctattattgttggatgatcctactgcgcatctggatttggaagcttgtgtttggttagaagaatatttgaagagatttgacagaactttagttttggtgtcccactctcaagatttcttgaacggtgtttgtaccaatatgattgacatgagagctcaaaaactaactgcttacggtggtaactatgattcttatcacaagacaagatccgaattggaaaccaatcaaatgaaacaatacaataaacaacaagaggaaatccaacatattaaaaaattcattgcatctgctggtacttatgctaacttggtgaaacaagctaaatctagacaaaaaattttggacaagatggaagcagatggtttagtccaacctgtcgtccctgacaaagttttctcatttagattcccacaagtggaaagattgccaccaccagttttagcattcgatgatatttcatttcattatgagagcaacccatccgaaaacttgtacgaacatttgaactttggtgtcgatatggactcacgtattgcccttgtcggaccaaatggtgttggtaaatccacattgttgaagattatgaccggtgaattgaccccacaatctggccgtgtttctagacatacccatgtcaagttgggtgtctactcgcaacactctcaagatcaactggacttgacaaaatctgctttagaatttgtccgtgacaagtactctaacatctcacaagatttccaattctggagaggccaactaggtcgctacgggctaaccggggaaggtcaaaccgttcaaatggctaccttgtcagaaggtcaacgttctcgtgtcgtctttgctttattagctttagaacaaccaaatgtcctactattagatgaacctaccaatggtttggatatcccaaccatcgactccttggccgacgccatcaacgaatttaacggtggtgtcgtcgtcgtttcgcatgatttcagattattagacaaaattgcccaagatattttcgttgtggaaaacaagaccgctaccagatgggacggatccattttgcaatataagaacaaattggccaagaacgttgttttgtaa

SEQ ID NO: 3070 - DNA, 1833 bp, Artificial Sequence
  Description of Artificial Sequence: Synthetic polynucleotide
atgccaccagtatctgcgtctaaggccaagagagatgctaagaaagctgaaagagaggctaagaaagccgctgccggtaaaaccatcagaaagttgggtagaaaaaaggaggctgctgctgaagaaagtgaggtagatgcagccgctagagaaatcaagatgatgaagttgcaacaagataaggatggtctttctgatcgtgttgtcactggtgttttgagttctttggagacttcccgtgatatcaagttatcttctgtttctttattattccacggtaaagttttgatccaagattctggtttagaattaaactacggccgtagatatggtcttttgggagaaaatggttgtggtaagagtacattcttaaaggctcttgctactagagaatatcctattcctgagcatattgatatttatttattggacgaacctgcggaaccaagtgaattgagtgccttggactacgttgtcactgaagctcaacacgaattgaaaagaatagaagacttagtcgaaaagactatcttggaagatggtcctgagtccgagttattagagcctttatatgaaagaatggactctttggatccagacacctttgaatctagagctgctatcattttgatcggtttaggtttcaacaagaagaccattttgaagaaaaccaaagatatgtctggtggatggaaaatgcgtgttgcgttggcaaaagctcttttcgttaagccaactttattattgttggatgatcctactgcgcatttggatttggaagcttgtgtttggttagaagaatatttgaagagatttgacagaactttagttttggtgtcccactctcaagatttcttgaacggtgtttgtaccaatatgattgacatgagagctcaaaaattaactgcttacggtggtaactatgattcttatcacaagacaagatccgaattggaaaccaatcaaatgaaacaatacaataaacaacaagaggaaatccaacatattaaaaaattcattgcatctgctggtacttatgctaacttggtgaaacaagctaaatctagacaaaaaattttggacaagatggaagcagatggtttagtccaacctgtcgtccctgacaaagttttctcctttagattcccacaagtggaaagattgccaccaccagttttagcattcgatgatatttcctttcattatgagagcaacccatccgaaaacttgtacgaacatttgaactttggtgtcgatatggactctcgtattgcccttgtcggaccaaatggtgttggtaaatccacattgttgaagattatgaccggtgaattgaccccacaatctggccgtgtttctagacatacccatgtcaagttgggtgtctactctcaacactctcaagatcaattggacttgacaaaatctgctttagaatttgtccgtgacaagtactctaacatctctcaagatttccaattctggagaggccaattgggtcgctacgggttaaccggggaaggtcaaaccgttcaaatggctaccttgagtgaaggtcaacgttctcgtgtcgtctttgctttattagctttagaacaaccaaatgtcttgttattagatgaacctaccaatggtttggatatcccaaccatcgactccttggccgacgccatcaacgaatttaacggtggtgtcgtcgtcgtttctcatgatttcagattattagacaaaattgcccaagatattttcgttgtggaaaacaagaccgctaccagatgggacggatccattttgcaatataagaacaaattggccaagaacgttgttttgtga

SEQ ID NO: 3071 - DNA, 966 bp, Saccharomyces cerevisiae
atgactatcgctaaagattacagaacaatttatagaaaccaaatcaaaaagcagatacgactaaatcaggagcatttgcaaagcttgacacatctaggctcacaaatcaatttcgaggtggatcctcccaaattaccggatccggatcctgctcgaaaagtatttttctttgatatcgataacactttgtacagaaaatctacgaaggtacaattgctcatgcaacaatcattatcaaatttctttaaatacgaattggggtttgacgacgatgaggcagaacgcctaatcgaatcgtattatcaagaatatggattatccgtgaaaggtttaataaagaataaacaaattgatgacgtcctacaatataatacattcatcgatgattccttacctttgcaagactatttaaagcctgattggaagttaagggagctgctgatcaatttaaagaaaaagaagctcggcaaatttgacaaactatggctgtttacaaactcgtacaaaaatcatgccatcagatgtgttaaaatattaggtattgctgatctatttgacggcataacctattgccactacgacagacccatcgaggaagaattcatttgcaagccagatccaaaattcttcgaaacagctaaattgcaaagtgggttgtcgagctttgcaaatgcctggtttattgatgacaacgaaagcaatgtgcggagcgcgttgagcatggggatgggccatgttatccatttgatagaggattaccaatatgagtcagaaaatattgttactaaggaccacaaaaataagcaacaattttccatattgaaagatatccttgagattccattgataatggacgttgaagtttaccgtccatcctctattgccataaaggaaatggaagagttggaagaggaaggggaagcagtcaactggtcaaatcaacagatcaatgttcagtcatcatga

SEQ ID NO: 3072 - DNA, 966 bp, Artificial Sequence
  Description of Artificial Sequence: Synthetic polynucleotide
atgactatcgctaaagattacagaacaatttatagaaaccaaatcaaaaagcagataagattgaatcaggagcatttgcaaagcttgacacatttaggctctcaaatcaatttcgaggtggatcctcccaaattaccggatccggatcctgctagaaaagtatttttctttgatatcgataacactttgtacagaaaatctacgaaggtacaattgctcatgcaacaatctttatccaatttctttaaatacgaattggggtttgacgacgatgaggcagaacgcttgatcgaaagttattatcaagaatatggattatccgtgaaaggtttaataaagaataaacaaattgatgacgtcttacaatataatacattcatcgatgattccttacctttgcaagactatttaaagcctgattggaagttaagggagttattgatcaatttaaagaaaaagaagctcggcaaatttgacaaattatggttatttacaaactcttacaaaaatcatgccatcagatgtgttaaaatattaggtattgctgatttatttgacggcataacctattgccactacgacagacccatcgaggaagaattcatttgcaagccagatccaaaattcttcgaaacagctaaattgcaaagtgggttgagtagctttgcaaatgcctggtttattgatgacaacgaaagcaatgtgagaagcgcgttgagcatggggatgggccatgttatccatttgatagaggattaccaatatgagagtgaaaatattgttactaaggaccacaaaaataagcaacaattttccatattgaaagatatccttgagattccattgataatggacgttgaagtttaccgtccatcctctattgccataaaggaaatggaagagttggaagaggaaggggaagcagtcaactggtctaatcaacagatcaatgttcagtcttcttga

SEQ ID NO: 3073 - DNA, 1395 bp, Saccharomyces cerevisiae
atgggaagcgtgaactcatcaccgaatgaagagtttgaaactgtgccagattcacaaatttcagggtttgattctcctttgataccgactagtgtgggaagttactttcgcgatgacgatgacgatgagaaggtgcatcccaactttattagtgatcctgagaacgacagtttgaatagcgacgaagagttttctagcctagagaacagcgatttgaatctttctggtgccaaggcggagtctggagacgattttgatccaatcttaaaaagaaccatcatttccaaaagaaaggcaccaagtaataacgaggatgaggagattgtcaagacacccagaaaattagtcaattacgtacctttaaaaattttcaatctaggtgatagcttcgacgatacgatcactactacagtggccaagctacaagacttgaaaaaagaaatattggattcacctagaagcaacaaaagcatagttattactagtaacactgtagccaaaagtgagttacaaaaaagcataaagttttctgggtctatcccagaaatttatttggatgtggttaccaaggaaaccatatcagataaatataaagattggcatttcatctctaaaaactgccattacgagcaattgatggatttggaaatgaaagatacggcgtattcattcctgtttggtagtagtagatcgcaaggaaaagttcctgaatttgttcacttgaaatgcccaagcatcacgaatttactggtcttatttggcgtcaatcaagaaaagtgtaactcgttaaaaatcaactacgagaaaaaggaaaattctagatatgataatttatgcacaattttccccgttaacaaaatgctcaaattcctaatgtatttttatagtgatgatgataatgatgatgttagagaattctttctgaaagccttcatatgtttaatcttggatagaaaggtttttaacgctatggaatcggaccatagactgtgttttaaggtcctggaattatttaatgaggcacatttcataaattcatatttcgaaattgtggacaagaacgacttttttttacattataggctactacaaatcttccctcatttacaaagcgccttgctcaggagacgctttagtgaaaagcaaggtcggactgaaactatacagcaaaatataatcaaagagtttaacgaattttttgattgtaaaaactataaaaatctactatattttattttaacgatgtatggctcgaaatttattccttttggtcccaaatgtcaagtaacagaatatttcaaagattgtattttggatatttctaatgaaacgacaaatgatgttgaaatttctatcctgaagggaatattaaatttgttttctaaaatcaggtaa

SEQ ID NO: 3074 - DNA, 1395 bp, Artificial Sequence
  Description of Artificial Sequence: Synthetic polynucleotide
atgggaagcgtgaactcttctccgaatgaagagtttgaaactgtgccagattctcaaatttctgggtttgattctcctttgataccgactagtgtgggaagttactttcgcgatgacgatgacgatgagaaggtgcatcccaactttattagtgatcctgagaacgacagtttgaatagcgacgaagagttttctagcttagagaacagcgatttgaatctttctggtgccaaggcggagtctggagacgattttgatccaatcttaaaaagaaccatcatttccaaaagaaaggcaccaagtaataacgaggatgaggagattgtcaagacacccagaaaattagtcaattacgtacctttaaaaattttcaatttgggtgatagcttcgacgatacgatcactactacagtggccaagttacaagacttgaaaaaagaaatattggattctcctagaagcaacaaaagcatagttattactagtaacactgtagccaaaagtgagttacaaaaaagcataaagttttctgggtctatcccagaaatttatttggatgtggttaccaaggaaaccatatctgataaatataaagattggcatttcatctctaaaaactgccattacgagcaattgatggatttggaaatgaaagatacggcgtattctttcttatttggtagtagtagatctcaaggaaaagttcctgaatttgttcacttgaaatgcccaagcatcacgaatttattggtcttatttggcgtcaatcaagaaaagtgtaactctttaaaaatcaactacgagaaaaaggaaaattctagatatgataatttatgcacaattttccccgttaacaaaatgctcaaattcttaatgtatttttatagtgatgatgataatgatgatgttagagaattctttttgaaagccttcatatgtttaatcttggatagaaaggtttttaacgctatggaaagtgaccatagattatgttttaaggtcttggaattatttaatgaggcacatttcataaattcttatttcgaaattgtggacaagaacgacttttttttacattataggcttttacaaatcttccctcatttacaaagcgccttgctcaggagacgctttagtgaaaagcaaggtagaactgaaactatacagcaaaatataatcaaagagtttaacgaattttttgattgtaaaaactataaaaatttattatattttattttaacgatgtatggctctaaatttattccttttggtcccaaatgtcaagtaacagaatatttcaaagattgtattttggatatttctaatgaaacgacaaatgatgttgaaatttctatcttgaagggaatattaaatttgttttctaaaatcaggtga

SEQ ID NO: 3075 - DNA, 381 bp, Saccharomyces cerevisiae
atgtactacttctcaagagtagctgctagaactttttgctgttgtatctttttctgtttagccacagcgtacagcaggccagacagaaatcctagaaagatagaaaagaaggacaaaaagttttttggagcgtcaaagaacaccaatcccgccaacgctatgggcaatttgttcaaagcaccaaccatagaatacgttgtagaggaagttacacgaacacaccagccggaacagtacgatatccccacggacatgagcccactgatgaccattgctgccagtgagtcggcggacaagttcacagacaaattctttgtggaccaatcttccataatgaaggaaaagactagcagcaaaggcaatgccagaacgttgttataa

SEQ ID NO: 3076 - DNA, 381 bp, Artificial Sequence
  Description of Artificial Sequence: Synthetic polynucleotide
atgtactacttcagtagagtagctgctagaactttttgctgttgtatctttttctgtttagccacagcgtacagcaggccagacagaaatcctagaaagatagaaaagaaggacaaaaagttttttggagcgtctaagaacaccaatcccgccaacgctatgggcaatttgttcaaagcaccaaccatagaatacgttgtagaggaagttacaagaacacaccagccggaacagtacgatatccccacggacatgagcccattaatgaccattgctgccagtgagtctgcggacaagttcacagacaaattctttgtggaccaatcttccataatgaaggaaaagactagcagcaaaggcaatgccagaacgttgttatga

SEQ ID NO: 3077 - DNA, 750 bp, Saccharomyces cerevisiae
atgatttatacgtcgtcaaagagcttacaataccttgccgtgcccatctacacaattttcaagaatctgacgatcattctcattgcttatggcgaggtcctcttctttggcggaaaagtcacttctatggagttgacgtcatttattatgatggtcctttcatctgtagtggccacctggggcgatcagcaggccattgcaatcaaagcatcatctttggaggatctcgatcaggaacttgttgagtcaaccatctttgtgttgaatccggggtacctctggatgttcaccaattgtatttcgtctgcattgttcgttttgattatgcggaagagaattcggctgactaactttaaagactatgatactatgttttataacaacgttctggcattgcctttgctgctagtcttttccttcattatggaagattggtccacaaagaatttgtctgtgaacttgtccgccgactcactggcagcaatggtcatcagtgggctcatgtccgtggggatatcgtactgttccggctggtgtgttcgtgtaacttcctctacaacgtattctatggttggtgctttgaacaaattgcccatagcgttggcgggattggtgttctttgacgctccaaaaaactttttgtccttcttttctatctttctaggatttctgtctggcctgctgtacgctgtggctaaacagaaaaagatacaacagcaaaaagttctagcagctactcttgagaagtag

SEQ ID NO: 3078 - DNA, 750 bp, Artificial Sequence
  Description of Artificial Sequence: Synthetic polynucleotide
atgatttatacgtcttccaagagcttacaataccttgccgtgcccatctacacaattttcaagaatttaacgatcattctcattgcttatggcgaggtcctcttctttggcggaaaagtcacttctatggagttgacgtcttttattatgatggtcctttcttctgtagtggccacctggggcgatcagcaggccattgcaatcaaagcatcttctttggaggatctcgatcaggaacttgttgagtctaccatctttgtgttgaatccggggtacctctggatgttcaccaattgtatttcttctgcattgttcgttttgattatgagaaagagaattagattaactaactttaaagactatgatactatgttttataacaacgttttagcattgcctttgttattggtcttttccttcattatggaagattggtccacaaagaatttgtctgtgaacttgtccgccgactctttggcagcaatggtcatcagtgggctcatgtccgtggggatatcttactgttccggctggtgtgttcgtgtaacttcctctacaacgtattctatggttggtgctttgaacaaattgcccatagcgttggcgggattggtgttctttgacgctccaaaaaactttttgtccttcttttctatctttttgggatttttatctggcttattgtacgctgtggctaaacagaaaaagatacaacagcaaaaagttttagcagctactcttgagaagtga

SEQ ID NO: 3079 - DNA, 219 bp, Saccharomyces cerevisiae
atgagcaagcataagcatgaatggacggaatcagtggccaactctgggccggcttcaatcttatcttactgcgcgtcctcgattttgatgacagtaacgaacaaattcgtggttaacctggacaactttaacatgaactttgtgatgttgtttgtacaatcactggtgtgcactgtgacgctatgtatcctacgaattgtaggcgttgctaatttttga

SEQ ID NO: 3080 - DNA, 219 bp, Artificial Sequence
  Description of Artificial Sequence: Synthetic polynucleotide
atgagcaagcataagcatgaatggacggaatctgtggccaactctgggccggcttctatcttatcttactgcgcgtccagtattttgatgacagtaacgaacaaattcgtggttaacttggacaactttaacatgaactttgtgatgttgtttgtacaaagtttagtgtgcactgtgacgttgtgtatcttgagaattgtaggcgttgctaatttttga

SEQ ID NO: 3081 - DNA, 2193 bp, Saccharomyces cerevisiae
atgcaagacgaccccgaaaattcgaagctgtacgacctgctgaatagtcatctggacgtgcatggtcgaagtaatgaagagccgagacaaactggtgacagtaggagccagagtagtggcaacaccggtgaaaacgaggaggatatagcatttgccagtggattaaacggcggcacattcgactcaatgctggaggcactgcccgatgatttatattttacggacttcgtgtctccttttacagcagctgccacgaccagcgtgactactaagacggtcaaggacaccacaccagctaccaatcatatggatgatgatattgcgatgtttgattcacttgccacaactcagcccatcgacatagccgcatccaaccaacaaaatggtgaaattgcacaactttgggactttaacgtggaccaattcaacatgacgcccagcaactcgagcggttcagctactattagtgctcctaacagctttacttccgacataccgcaatacaaccacggttccctcggcaacagcgtctccaaatcctcactgttcccgtataattccagcacgtccaacagcaacatcaaccagccatctatcaataacaactcaaatactaatgcgcagtcccaccattccttcaacatctacaaactacaaaacaacaactcatcttcatccgctatgaacattaccaataataataatagcaacaatagtaatatccagcatccttttctgaagaagagcgattcgataggattatcttcatccaacacaacaaattctgtaagaaaaaactcacttatcaagccaatgtcgtccacgtccctggccaatttcaaaagagctgcctcagtatcttccagtatatccaatatggaaccatcaggacaaaataaaaaacctctgatacaatgtttcaattgtaaaactttcaagacaccgctttggaggagaagcccagaggggaatactctttgcaatgcctgcggtcttttccagaaattacatggtaccatgaggccattatccttaaaatcggacgttatcaaaaagaggatttcaaagaagagagccaaacaaacggacccaaacattgcacaaaatactccaagtgcacctgcaactgcctcaacttcagtaaccactacaaatgctaaacccatacgatcgaggaaaaaatcactacaacaaaactctttatctagagtgatacctgaagaaatcattagagacaacatcggtaatactaataatatccttaatgtaaataggggaggctataacttcaactcagtcccctccccggtcctcatgaacagccaatcgtataatagtagtaacgcaaattttaatggagcaagcaatgcaaatttgaattctaataacttaatgcgtcacaattcgaacactgttactcctaattttagaaggtcttcaagacgaagtagtacttcatcgaacacctcaagttccagtaaatcttcatccagatctgttgttccgatattaccaaaaccttcacctaatagcgctaattcacagcagttcaacatgaacatgaacctaatgaacacaacaaataatgtaagtgcaggaaatagtgtcgcatcctcaccaagaattatatcgtccgcaaactttaactcaaatagtcctctacagcagaatctattatcaaattctttccaacgtcaaggaatgaatataccaagaagaaagatgtcgcgcaatgcatcgtactcctcatcgtttatggctgcgtctttgcaacaactgcacgaacagcaacaagtggacgtgaattccaacacaaacacgaattcgaatagacagaattggaattcaagcaatagcgtttcaacaaattcaagatcatcaaattttgtctctcaaaagccaaattttgatatttttaatactcctgtagattcaccgagtgtctcaagaccttcttcaagaaaatcacatacctcattgttatcacaacaattgcagaactcggagtcgaattcgtttatctcaaatcacaaatttaacaatagattatcaagtgactctacttcacctataaaatatgaagcagatgtgagtgcaggcggaaagatcagtgaggataattccacaaaaggatcttctaaagaaagttcagcaattgctgacgaattggattggttaaaatttggtatatga

SEQ ID NO: 3082 - DNA, 2193 bp, Artificial Sequence
  Description of Artificial Sequence: Synthetic polynucleotide
atgcaagacgaccccgaaaattctaagttgtacgacttattgaatagtcatttggacgtgcatggtagaagtaatgaagagccgagacaaactggtgacagtaggagccagagtagtggcaacaccggtgaaaacgaggaggatatagcatttgccagtggattaaacggcggcacattcgactccatgttagaggcattgcccgatgatttatattttacggacttcgtgtctccttttacagcagctgccacgaccagcgtgactactaagacggtcaaggacaccacaccagctaccaatcatatggatgatgatattgcgatgtttgattctcttgccacaactcagcccatcgacatagccgcatccaaccaacaaaatggtgaaattgcacaactttgggactttaacgtggaccaattcaacatgacgcccagcaactccagcggttctgctactattagtgctcctaacagctttacttccgacataccgcaatacaaccacggttccctcggcaacagcgtctccaaatcctctttattcccgtataattccagcacgtccaacagcaacatcaaccagccatctatcaataacaacagtaatactaatgcgcagtcccaccattccttcaacatctacaaattacaaaacaacaactcttcttcttccgctatgaacattaccaataataataatagcaacaatagtaatatccagcatccttttttgaagaagagcgattctataggattatcttcttccaacacaacaaattctgtaagaaaaaactctcttatcaagccaatgtcttccacgtccttggccaatttcaaaagagctgcctctgtatcttccagtatatccaatatggaaccatctggacaaaataaaaaacctttgatacaatgtttcaattgtaaaactttcaagacaccgctttggaggagaagcccagaggggaatactctttgcaatgcctgcggtcttttccagaaattacatggtaccatgaggccattatccttaaaaagtgacgttatcaaaaagaggatttccaagaagagagccaaacaaacggacccaaacattgcacaaaatactccaagtgcacctgcaactgcctctacttctgtaaccactacaaatgctaaacccataaggagtaggaaaaaatctttacaacaaaactctttatctagagtgatacctgaagaaatcattagagacaacatcggtaatactaataatatccttaatgtaaataggggaggctataacttcaactctgtcccctccccggtcctcatgaacagccaaagttataatagtagtaacgcaaattttaatggagcaagcaatgcaaatttgaattctaataacttaatgcgtcacaatagcaacactgttactcctaattttagaaggtcttctagaagaagtagtacttcttccaacacctctagttccagtaaatcttcttccagatctgttgttccgatattaccaaaaccttctcctaatagcgctaattctcagcagttcaacatgaacatgaacttgatgaacacaacaaataatgtaagtgcaggaaatagtgtcgcatcctctccaagaattatatcttccgcaaactttaacagtaatagtcctttgcagcagaatttattatccaattctttccaacgtcaaggaatgaatataccaagaagaaagatgtctcgcaatgcaagctactcctcttcttttatggctgcgtctttgcaacaattacacgaacagcaacaagtggacgtgaattccaacacaaacacgaatagtaatagacagaattggaatagtagcaatagcgtttctacaaattctagaagtagtaattttgtctctcaaaagccaaattttgatatttttaatactcctgtagattctccgagtgtctctagaccttcttctagaaaatctcatacctctttgttatctcaacaattgcagaacagtgagagcaattcttttatctctaatcacaaatttaacaatagattatccagtgactctacttctcctataaaatatgaagcagatgtgagtgcaggcggaaagatcagtgaggataattccacaaaaggatcttctaaagaaagttctgcaattgctgacgaattggattggttaaaatttggtatatga

SEQ ID NO: 3083 - DNA, 2280 bp, Saccharomyces cerevisiae
atgggtgtctcacaaatatgggaatttttgaagccatatctgcaagattccagaattccgttgagaaagtttgtcatagactttaataaatcgcaaaaaagagctccaagaatcgcgattgacgcatatggatggctatttgagtgtggatttatccaaaatatagatataagcgccagatctagatcaagatcaaggagtcctacccgttctccgcgtgatagtgatatcgacagtagtcaagaatattatggtagcagaagttatacaactacaggaaaagctgtgataaacttcatatctcgattaaaagaactactgagtttaaacgtcgaattcttgcttgtatttgacggagttatgaaaccctctttcaaaaggaaatttaaccacgaacagaacgctactacttgtgatgatgagaaagagtactattcaagctgggaacagcatgttaagaatcatgaagtttatggcaattgtaaaggattgctagcgccatctgaccctgagttcatcagtcttgtacggaaattattagacttgatgaacatttcatatgtaatcgcatgtggggagggagaagcccagtgtgtttggctgcaagtttctggggctgtagatttcattttaagtaacgattcagatactctcgtatttgggggagaaaaaatcctgaaaaattactcgaaattctacgatgattttggcccaagttcaataacttcccacagtcccagtagacatcatgatagtaaagaatcttttgttactgttatagatctacccaaaattaataaagtagcagggaagaagtttgatcgcctgtctctcttatttttcagcgtgctattaggtgccgattacaatcgtggagtcaagggtttgggtaaaaacaaatctttgcagttggctcaatgcgaagatcctaacttttccatggaattttatgacattttcaaagatttcaatttagaagatttgacatcagaaagtctgaggaagtctcggtatagattgtttcaaaaaagattatatttatactgcaaggatcattctgtcgagctatttggaagaaattatcctgttttattgaatcaaggttcatttgaaggctggccatcaactgtcgcaatcatgcactattttcaccccattgtccaaccatattttgatgaagaagttctcagtgataaatacataaatatggctggaaacggacactacagaaacttaaatttcaatgaactgaaatattttttacaaagtttgaatttgcctcaaatttctagcttcgacaagtggtttcatgattctatgcacgagatgtttctattaagagaatttttatcaattgatgagtccgataatataggtaaaggtaatatgaggattaccgaagaaaaaattatgaacatagatggtggaaagttccaaataccatgttttaaaatacggtatacaacattcttgcctaatatacccatttcttctcaatctcctttgaagcgcagtaattctcccagtagaagcaagagtcccacacgacgtcagatggatataatggaacacccaaatagtctttggttacccaaatacttgatacctcaatcgcatccattagtaattcaatattatgagacacagcaacttatacagaaagaaaaagagaagaaaggtaaaaaatcgaataagtctcggctaccacagaagaataacttggatgagtttttaagaaagcatacttcgccgattaaaagtatcggaaaggtaggcgagtcgagaaaggaaatcctggaacctgtgagaaaaaggctttttgtagatacagacgaagatactagtctggaagaaataccggctcccacaagactgaccaccgtcgatgaacacagcgataatgacgatgattcgttgatttttgtagatgagattacaaacagccaaagcgttttagatagttcacccggtaaaagaattcgggatcttacacaggacgaacaggttgacgtttggaaggacgtaatagaaatatcaccaataaaaaagtcaagaactactaatgctgagaaaaatccgcctgagtctggtttaaaatcacgctcaagcatcacaatcaatgctcgccttcaaggtactaagatgttgcctccaaacttgactgctccaaggttagaaagagaacactcctctgtccttgaccaacttgtcacagacgcacaagatacagtcgaccggtttgtagcctgtgacagtgatagcagtagcactattgaatga

SEQ ID NO: 3084 - DNA, 2280 bp, Artificial Sequence
  Description of Artificial Sequence: Synthetic polynucleotide
atgggtgtctctcaaatatgggaatttttgaagccatatttacaagattccagaattccgttgagaaagtttgtcatagactttaataaatctcaaaaaagagctccaagaatcgcgattgacgcatatggatggttatttgagtgtggatttatccaaaatatagatataagcgccagatctagatctagaagtaggagtcctacccgttctccgcgtgatagtgatatcgacagtagtcaagaatattatggtagcagaagttatacaactacaggaaaagctgtgataaacttcatatctagattaaaagaattattaagtttaaacgtcgaattcttgcttgtatttgacggagttatgaaaccctctttcaaaaggaaatttaaccacgaacagaacgctactacttgtgatgatgagaaagagtactattctagctgggaacagcatgttaagaatcatgaagtttatggcaattgtaaaggattgttagcgccatctgaccctgagttcatcagtcttgtaagaaaattattagacttgatgaacatttcttatgtaatcgcatgtggggagggagaagcccagtgtgtttggttacaagtttctggggctgtagatttcattttaagtaacgattctgatactctcgtatttgggggagaaaaaatcttgaaaaattactctaaattctacgatgattttggcccaagtagtataacttcccacagtcccagtagacatcatgatagtaaagaatcttttgttactgttatagatttgcccaaaattaataaagtagcagggaagaagtttgatcgcttatctctcttatttttcagcgtgttattaggtgccgattacaatcgtggagtcaagggtttgggtaaaaacaaatctttgcagttggctcaatgcgaagatcctaacttttccatggaattttatgacattttcaaagatttcaatttagaagatttgacaagtgaaagtttgaggaagtctagatatagattgtttcaaaaaagattatatttatactgcaaggatcattctgtcgagttatttggaagaaattatcctgttttattgaatcaaggttcttttgaaggctggccatctactgtcgcaatcatgcactattttcaccccattgtccaaccatattttgatgaagaagttctcagtgataaatacataaatatggctggaaacggacactacagaaacttaaatttcaatgaattgaaatattttttacaaagtttgaatttgcctcaaatttctagcttcgacaagtggtttcatgattctatgcacgagatgtttttattaagagaatttttatccattgatgagtccgataatataggtaaaggtaatatgaggattaccgaagaaaaaattatgaacatagatggtggaaagttccaaataccatgttttaaaataagatatacaacattcttgcctaatatacccatttcttctcaatctcctttgaagcgcagtaattctcccagtagaagcaagagtcccacaagacgtcagatggatataatggaacacccaaatagtctttggttacccaaatacttgatacctcaatctcatccattagtaattcaatattatgagacacagcaacttatacagaaagaaaaagagaagaaaggtaaaaaatctaataagtctagattaccacagaagaataacttggatgagtttttaagaaagcatacttctccgattaaaagtatcggaaaggtaggcgagagcagaaaggaaatcttggaacctgtgagaaaaaggctttttgtagatacagacgaagatactagtttagaagaaataccggctcccacaagattgaccaccgtcgatgaacacagcgataatgacgatgattctttgatttttgtagatgagattacaaacagccaaagcgttttagatagttctcccggtaaaagaattagagatcttacacaggacgaacaggttgacgtttggaaggacgtaatagaaatatctccaataaaaaagtctagaactactaatgctgagaaaaatccgcctgagtctggtttaaaaagccgcagcagcatcacaatcaatgctcgccttcaaggtactaagatgttgcctccaaacttgactgctccaaggttagaaagagaacactcctctgtccttgaccaacttgtcacagacgcacaagatacagtcgacagatttgtagcctgtgacagtgatagcagtagcactattgaatga

SEQ ID NO: 3085 - DNA, 555 bp, Saccharomyces cerevisiae
atgtcgtcgcttatttcaaaaaccattaagtatgatccagccaaggataaattaatcacattagcatgtggatgtttttggggtacagaacatatgtataggaagtatttgaatgaccgtatagtggattgtaaagtaggttacgctaatggagaagagtctaaaaaggatagcccctctagtgtctcttataagagagtttgtggtggtgacacagattttgcggaggttttacaagtatcctataatcccaaagtgataactttgagagaattaactgatttcttttttagaatccatgatcctactacatctaattcacaaggacctgataaaggtacacagtatcgcagtggattgttcgctcattcagatgctgatttaaaagaattagccaaaataaaggaagaatggcaaccaaaatggggtaataagattgccacagttattgaaccaatcaagaacttttacgatgctgaagaataccaccagttatatttagataagaatccacagggatatgcatgccctactcattatctgagagaaatgtag

SEQ ID NO: 3086 - DNA, 555 bp, Artificial Sequence
  Description of Artificial Sequence: Synthetic polynucleotide
atgtcttctcttatttccaaaaccattaagtatgatccagccaaggataaattaatcacattagcatgtggatgtttttggggtacagaacatatgtataggaagtatttgaatgaccgtatagtggattgtaaagtaggttacgctaatggagaagagtctaaaaaggatagcccctctagtgtctcttataagagagtttgtggtggtgacacagattttgcggaggttttacaagtatcctataatcccaaagtgataactttgagagaattaactgatttcttttttagaatccatgatcctactacatctaattctcaaggacctgataaaggtacacagtatcgcagtggattgttcgctcattctgatgctgatttaaaagaattagccaaaataaaggaagaatggcaaccaaaatggggtaataagattgccacagttattgaaccaatcaagaacttttacgatgctgaagaataccaccagttatatttagataagaatccacagggatatgcatgccctactcattatttaagagaaatgtga

SEQ ID NO: 3087 - DNA, 1350 bp, Saccharomyces cerevisiae
atgtctgctccagctcaaaactacaaaatcgctgatatctctttggctgccttcggtagaaaggaaatcgaattggctgaacatgaaatgccaggtttgatggccatcagaaaggcttacggtgacgtccaacctttgaaaggcgcccgtattgctggttgtttgcacatgaccattcaaactgctgttttaattgaaactttagttgctttgggtgccgaagttacctggtcctcttgtaacatctattcgactcaagatcatgccgccgctgctattgccgcttccggtgttccagtttttgcctggaagggtgaaactgaagaagagtatttgtggtgtattgaacaacaattgtttgccttcaaggacaacaagaaattgaacttgatcttagatgatggtggtgatttaaccactttagttcatgaaaagcaccctgaaatgctggaagactgctttggtctttccgaagaaactaccaccggtgttcaccacttatacagaatggtcaaagaaggcaagttaaaggttcctgccattaacgttaacgactccgtcactaagtccaagtttgacaacttgtacggctgtagagaatccttagtcgacggtattaagagagccactgatgtcatgttggctggtaaggttgccgttgttgctggttacggtgatgtcggtaagggttgtgctgctgccttaagaggaatgggtgctcgtgtcttggttaccgaaattgacccaatcaacgctttacaagctgccatggaaggctaccaagttgttaccatggaagatgcatcccacattggtcaagttttcgttaccaccactggttgtagagatattatcaacggtgaacatttcatcaacatgccagaagatgccattgtttgtaacattggccatttcgatatcgaaattgatgtcgcctggttaaaggctaacgctaaagaatgtattaacatcaaaccacaagtcgaccgttacttgttgtcttctggtagacacgtcatcttgttggctaacggtagattagttaacttgggttgtgctactggtcactcatctttcgttatgtcttgttccttctctaaccaagtcttagctcaaattgctttgttcaagtctaacgataagtctttcagagaaaagcacattgaattccaaaagacaggcccattcgaagttggtgtccacgttttgccaaagatcttggatgaagctgtcgctaagttccacttgggcaacttgggtgttagattgactaaattgagtaaagtccaatctgaatacttgggtattccagaagaaggtccattcaaggccgaccactacagatattga

SEQ ID NO: 3088 - DNA, 1350 bp, Artificial Sequence
  Description of Artificial Sequence: Synthetic polynucleotide
atgtctgctccagctcaaaactacaaaatcgctgatatctctttggctgccttcggtagaaaggaaatcgaattggctgaacatgaaatgccaggtttgatggccatcagaaaggcttacggtgacgtccaacctttgaaaggcgcccgtattgctggttgtttgcacatgaccattcaaactgctgttttaattgaaactttagttgctttgggtgccgaagttacctggtcctcttgtaacatctattctactcaagatcatgccgccgctgctattgccgcttccggtgttccagtttttgcctggaagggtgaaactgaagaagagtatttgtggtgtattgaacaacaattgtttgccttcaaggacaacaagaaattgaacttgatcttagatgatggtggtgatttaaccactttagttcatgaaaagcaccctgaaatgttggaagactgctttggtctttccgaagaaactaccaccggtgttcaccacttatacagaatggtcaaagaaggcaagttaaaggttcctgccattaacgttaacgactccgtcactaagtccaagtttgacaacttgtacggctgtagagaatccttagtcgacggtattaagagagccactgatgtcatgttggctggtaaggttgccgttgttgctggttacggtgatgtcggtaagggttgtgctgctgccttaagaggaatgggtgctcgtgtcttggttaccgaaattgacccaatcaacgctttacaagctgccatggaaggctaccaagttgttaccatggaagatgcatcccacattggtcaagttttcgttaccaccactggttgtagagatattatcaacggtgaacatttcatcaacatgccagaagatgccattgtttgtaacattggccatttcgatatcgaaattgatgtcgcctggttaaaggctaacgctaaagaatgtattaacatcaaaccacaagtcgaccgttacttgttgtcttctggtagacacgtcatcttgttggctaacggtagattagttaacttgggttgtgctactggtcactcttctttcgttatgtcttgttccttctctaaccaagtcttagctcaaattgctttgttcaagtctaacgataagtctttcagagaaaagcacattgaattccaaaagacaggcccattcgaagttggtgtccacgttttgccaaagatcttggatgaagctgtcgctaagttccacttgggcaacttgggtgttagattgactaaattgagtaaagtccaatctgaatacttgggtattccagaagaaggtccattcaaggccgaccactacagatattga

SEQ ID NO: 3089 - DNA, 447 bp, Saccharomyces cerevisiae
atgttcagcctacaagacgtaataactacaaccaagaccaccttggcagcaatgccaaaaggttacttaccaaaatggttacttttcatttccattgtatcagtcttcaattctatccagacttacgtttctggtttagaattgacacgtaaagtctacgaaagaaaacccactgaaacaacccatttgagtgcaagaactttcggtacttggacctttatttcctgtgttatcagattctatggggctatgtacttgaatgaaccacacattttcgaattggtcttcatgtcttatatggttgccctattccacttcggctctgaattattgatctttagaacttgtaagttgggaaagggattcatgggtccattggttgtctcaaccacctctttggtttggatgtacaaacaaagagaatactacactggtgttgcttggtaa

SEQ ID NO: 3090 - DNA, 447 bp, Artificial Sequence
  Description of Artificial Sequence: Synthetic polynucleotide
atgttcagcttacaagacgtaataactacaaccaagaccaccttggcagcaatgccaaaaggttacttaccaaaatggttacttttcatttccattgtaagtgtcttcaattctatccagacttacgtttctggtttagaattgacacgtaaagtctacgaaagaaaacccactgaaacaacccatttgagtgcaagaactttcggtacttggacctttatttcctgtgttatcagattctatggggctatgtacttgaatgaaccacacattttcgaattggtcttcatgtcttatatggttgcccttttccacttcggctctgaattattgatctttagaacttgtaagttgggaaagggattcatgggtccattggttgtctccaccacctctttggtttggatgtacaaacaaagagaatactacactggtgttgcttggtga

SEQ ID NO: 3091 - DNA, 1227 bp, Saccharomyces cerevisiae
atgagtagaggcaaactggaagatatggaacaaaaggaaacatcggaagttgactggataatctgttttgctttaattcaatccaggaatcctacgttgtggaagagggcactttcaagaaagaaaggagatgtcgaagatgtaggtgctctcaagagtgaaaaaaatttaaaaataaatcctcgggaaaactcaaaacatatatacaaatgggttgcgcctttcgaaaatggatttttgaataataaatcactgtttgctcatctggaacctatatacaatttcctttgccagaataagtacaaaagcttcgaagatgcagttggtttaaaggagctgcaatcatttagcaaagatgtatcaactgctgatataaacaactggtttttaccgagatataaaattctgctaaaaatcctgagcttaaaaacaaaagaaattgactttagagggttatcgcaagtgtttcaaacactccaaatcttgttagtttctcattattcgcatcgcatagattctgattcttcttttaagaggacactgatagacgttcatgttttcaatttcatcgccaagtttctgtttaatagaattttattgaagaagaaccaaaacgatccaaaatggcttcaaaacttttacgaccagggagatggcaaacatttatgtgataaagttgactacaagcgcttgtgttcgttgcattttacccttatttactctattattaacattcaactcatcaaaatcaagacaaaccaaacatttgaaccgcagatattaaaatacgtatctgttctgaaattaattgaacacatacttatcatcatcgaaagtctgatacatgtacttattagatttgtatcgaagcataaactaatatgcatcaaccggaaaaaggcgtactgtcgagtatacctcgaaagagaattgagtttgaagaaaacctacttaaagaacttttacagtgtaataagcggtgtcccagaaaaagagttagggggtctattgaaaatactcaagatagttattctatcattgctcgagacatttgaaagcattgaatggcagcacttaaaacctttcctggaaaaatttccggctcatgaaatatcgcttcagaagaaaaggaaatatatacaggcggccttattaattactgccgaaagaaatttgatagcgcgctttcgattgtcaagatggttcaatgagacagaaaacatttaa

SEQ ID NO: 3092 - DNA, 1227 bp, Artificial Sequence
  Description of Artificial Sequence: Synthetic polynucleotide
atgagtagaggcaaattagaagatatggaacaaaaggaaacaagtgaagttgactggataatctgttttgctttaattcaatccaggaatcctacgttgtggaagagggcactttctagaaagaaaggagatgtcgaagatgtaggtgctctcaagagtgaaaaaaatttaaaaataaatcctagagaaaactccaaacatatatacaaatgggttgcgcctttcgaaaatggatttttgaataataaatctttatttgctcatttggaacctatatacaatttcctttgccagaataagtacaaaagcttcgaagatgcagttggtttaaaggagttacaaagttttagcaaagatgtatccactgctgatataaacaactggtttttaccgagatataaaattttattgaaaatcttaagcttaaaaacaaaagaaattgactttagagggttatctcaagtgtttcaaacactccaaatcttgttagtttctcattattctcatcgcatagattctgattcttcttttaagaggacattaatagacgttcatgttttcaatttcatcgccaagtttttgtttaatagaattttattgaagaagaaccaaaacgatccaaaatggcttcaaaacttttacgaccagggagatggcaaacatttatgtgataaagttgactacaagcgcttgtgttctttgcattttacccttatttactctattattaacattcaactcatcaaaatcaagacaaaccaaacatttgaaccgcagatattaaaatacgtatctgttttgaaattaattgaacacatacttatcatcatcgaaagtttgatacatgtacttattagatttgtatccaagcataaattgatatgcatcaacagaaaaaaggcgtactgtagagtatacctcgaaagagaattgagtttgaagaaaacctacttaaagaacttttacagtgtaataagcggtgtcccagaaaaagagttagggggtttattgaaaatactcaagatagttattttatctttgctcgagacatttgaaagcattgaatggcagcacttaaaacctttcttggaaaaatttccggctcatgaaatatctcttcagaagaaaaggaaatatatacaggcggccttattaattactgccgaaagaaatttgatagcgcgctttagattgtccagatggttcaatgagacagaaaacatttga

SEQ ID NO: 3093 - DNA, 1470 bp, Saccharomyces cerevisiae
atggactataagcataattttgctacaagtccagattctttcctagatggaaggcagaacccactcttatatacagattttctatcttcaaacaaggagcttatatacaaacaaccatcgggtcctggtcttgtggattctgcctacaattttcatcaccaaaacagtttgcatgaccgtagcgtgcaagaaaacctgggtccaatgtttcaaccctttggcgtcgacatcagccatcttcccattaccaaccctcccatttttcaaagttctttaccagcgtttgatcagcccgtgtacaaaagacgcatatctatctccaatggtcagattagtcaattaggcgaagacttagaaacggttgaaaatctttacaactgtcagcctccgatcctatcgtctaaggcgcaacagaatcccaatcctcaacaggtggcaaatccaagcgcagccatatacccaagctttagctcgaacgaattgcaaaacgtgccacaaccacacgaacaagctacagtcatacccgaagctgcacctcaaacaggtagcaagaatatctacgctgcaatgaccccgtatgatagcaatataaagcttaacatacccgcagtagcagccacttgtgacattccttctgccacgccttctatcccatctggcgattccacaatgaatcaggcttacatcaacatgcaactccgattacaagctcaaatgcaaactaaggcatggaaaaacgctcaattgaatgtgcatccatgtactccagcctctaattcttccgtttcctcttcttcttcctgccaaaacattaatgatcataatatcgaaaatcaatccgtccattcttcaatttcccatggcgttaatcaccacactgttaataattcctgccaaaatgccgagttgaatatttcaagcagccttccatacgaatcgaaatgccctgatgtcaatttaacacatgccaactcaaaaccacaatacaaggatgccacttctgcactgaaaaacaatattaatagtgagaaagacgtacataccgcgcccttctcctctatgcacactacagcaaccttccaaataaagcaggaagctagaccccaaaaaatagagaacaatactgcaggcttgaaagacggtgctaaagcttggaagcgtgcaaggctactagaacgaaacagaattgccgcttccaagtgtcgacagagaaagaaaatgtcacaattacaacttcaaagggaatttgaccaaataagcaaagaaaacacaatgatgaagaaaaaaattgaaaattacgaaaaattggttcaaaaaatgaagaaaatttcgaggttgcacatgcaagaatgcacaattaatggtggtaataatagttatcaaagccttcaaaacaaggatagtgatgttaacgggtttctgaaaatgattgaagaaatgatacgcagctccagtctatatgatgaataa

SEQ ID NO: 3094 - DNA, 1470 bp, Artificial Sequence
  Description of Artificial Sequence: Synthetic polynucleotide
atggactataagcataattttgctacaagtccagattctttcttggatggaaggcagaacccactcttatatacagattttttatcttccaacaaggagcttatatacaaacaaccatctggtcctggtcttgtggattctgcctacaattttcatcaccaaaacagtttgcatgaccgtagcgtgcaagaaaacttgggtccaatgtttcaaccctttggcgtcgacatcagccatcttcccattaccaaccctcccatttttcaaagttctttaccagcgtttgatcagcccgtgtacaaaagacgcatatctatctccaatggtcagattagtcaattaggcgaagacttagaaacggttgaaaatctttacaactgtcagcctccgatcttatcttctaaggcgcaacagaatcccaatcctcaacaggtggcaaatccaagcgcagccatatacccaagctttagcagtaacgaattgcaaaacgtgccacaaccacacgaacaagctacagtcatacccgaagctgcacctcaaacaggtagcaagaatatctacgctgcaatgaccccgtatgatagcaatataaagcttaacatacccgcagtagcagccacttgtgacattccttctgccacgccttctatcccatctggcgattccacaatgaatcaggcttacatcaacatgcaactcagattacaagctcaaatgcaaactaaggcatggaaaaacgctcaattgaatgtgcatccatgtactccagcctctaattcttccgtttcctcttcttcttcctgccaaaacattaatgatcataatatcgaaaatcaatccgtccattcttccatttcccatggcgttaatcaccacactgttaataattcctgccaaaatgccgagttgaatatttctagcagccttccatacgaaagtaaatgccctgatgtcaatttaacacatgccaactccaaaccacaatacaaggatgccacttctgcattgaaaaacaatattaatagtgagaaagacgtacataccgcgcccttctcctctatgcacactacagcaaccttccaaataaagcaggaagctagaccccaaaaaatagagaacaatactgcaggcttgaaagacggtgctaaagcttggaagcgtgcaaggcttttagaaagaaacagaattgccgcttccaagtgtagacagagaaagaaaatgtctcaattacaacttcaaagggaatttgaccaaataagcaaagaaaacacaatgatgaagaaaaaaattgaaaattacgaaaaattggttcaaaaaatgaagaaaatttctaggttgcacatgcaagaatgcacaattaatggtggtaataatagttatcaaagccttcaaaacaaggatagtgatgttaacgggtttttgaaaatgattgaagaaatgatacgcagctccagtctttatgatgaatga

SEQ ID NO: 3095 - DNA, 432 bp, Saccharomyces cerevisiae
atgggcaaaaaccatttcttgaaggatttctctgctttaccggaggacgtactcatagaaaacgagagaggcataactttacttggttacccactattttctcccaagattttactgcctcacgttgacccaccacaatttcaaagactaaacactgaaaatggctcgttaattgccctgtcgaaaaatactatatcgaacttcatagaactgtatcctatcgatctgagtactgaacgcactgcaggcagtagcagttcacagatgacaaagtggttcgtactgatggattacaaggaaaagtacgatattgacgatcaaggatggtgttatagctggaatttcaataactctaggtggaaatcgaaaaatggcttggtgagaagaagggtctgggtaagactacctacgaccagtcatggattagattag

SEQ ID NO: 3096 - DNA, 432 bp, Artificial Sequence
  Description of Artificial Sequence: Synthetic polynucleotide
atgggcaaaaaccatttcttgaaggatttctctgctttaccggaggacgtactcatagaaaacgagagaggcataactttacttggttacccattattttctcccaagattttattgcctcacgttgacccaccacaatttcaaagattgaacactgaaaatggctctttaattgccctttctaaaaatactataagcaacttcatagaattgtatcctatcgatttgagtactgaacgcactgcaggcagtagcagttctcagatgacaaagtggttcgtattaatggattacaaggaaaagtacgatattgacgatcaaggatggtgttatagctggaatttcaataactctaggtggaaatctaaaaatggcttggtgagaagaagggtctgggtaagattacctacgaccagtcatggattagattga

SEQ ID NO: 3097 - DNA, 2694 bp, Saccharomyces cerevisiae
atggattcacaaagaagccatcatattttaacgagattaaccaagatacggagaagacctcaacaaccgttaaccgactttacagaactttacagtagaattgccaatgagacaatatattacttgaacctagaagagaaaaaacgatataaagaagcattgcaaggatggaaagcgcttaccactgatgtactattcaaacagacattgatagagcataactacccaaatactcaatcatacacgaaagatgaagttagtttacagaacggtattcgagaattgtaccacaagagcgttatgcatttgaaaagagtcaaaaaattggtccgagaagagcctgctcccaggaatgatatgccgtcatccaaaacatacactaatcatagctcatctttcacaaggtctactgaaccacctcctgtattccaaatggttcccggaagaatgatgaaaacattaagaaatagaaatgcatgcggctataaaaccgcatactccaacccctcactatcatcatatggtaacagcacatcgataaaacgcggagaagatgcggagaacattagagtaaattttgtaccttctaagcctttatccaacaatgcaagcagacagcacaagaaccctattgagcacaatgatcctccacttaagaaggaaactgaactgtactcagataaatatatctcagagccaatattgatagatttgactaatgacgaggatgatcacgatgtcggcattttaaaaggacacaacgtttttgatgaagaagaaagtgatggtttcgagtttgatgtgtccgattactatgataatttctccgaagtcgacgtagaagaagaagaagaagaaaaagaggaaagacgacgtataaaaacgttagaagcaattcaacagcaaatgtctgacttgtctgttacttcttctacgtccagtaataagagtgtaagttcttcagaaaatgttcccggatcatgcatacagtccctgccgactaccgcccctgctcttccttcattacctccacctcctttattaaatgtcgatagagcgtccagcactggcgctctaaagccacatagtttagaaacttctactactatggattcatcaaagattaggaatcctcaaatatcaaaattaatgaagaataatcacgtaccatacttaaagggtaccaaatcaacgcccactcttatcactaaatcaacgccaacatttattacaagatcaaaaagtaatacaaaaccaatcatcaaatccaatgcatcgtctccgacctcttctctgactgttccaaattcagtaattcaaaaacccaaaacggctgcaatggctgctaagagagttctgaacagcaaaaaggttgcgagtaaccccgcattaaacactacgaagaagagtcaccccattttgaaatccaaaacggcgaaagtcccaaattccagttcgaagaaaacgagtagccatccttccagacctgtaagtaactcaaaaccatactcgcatggtgcatcccagaataagaagccatcgaaaaatcaaaccacgtctatgagtaaaacgaatcgaaaaataccagcacaaaaaaaaatcggttctccaaaaatagaagatgttggaacagaagatgccactgaacatgccacttccctaaatgagcaaagagaagagcctgaaatagacaagaaagtcctgagggagattttagaagatgaaattattgatagtttacaaggtgtagataggcaagctgcaaagcaaatttttgccgaaatcgtagtgcacggagatgaagttcattgggatgatattgctggtttagaaagtgcaaaatattctttgaaggaagcagttgtctatccgtttttgagaccagacttattcagggggttacgtgaaccagtcagggggatgctcttatttggaccaccaggtacaggtaaaacaatgctagcgagagctgtagctacagagtcgcactccacctttttctctattagtgcttccagtttgacatctaaatacttgggtgaaagtgaaaaattagtgagggcactatttgcaattgccaaaaaattgtcaccttctataatatttgttgatgaaattgactctatcatgggtagtaggaataacgaaaatgaaaatgagtcaagccgaaggataaagaatgaatttcttgttcagtggtcatccttgtccagcgcagcggctggttcaaacaaaagtaacactaacaattctgacaccaatggcgacgaagatgatacaagggtactggtacttgccgcgacaaacttaccatggtctattgatgaggctgcaaggagaagatttgtgagaagacaatatatcccattaccagaggaccagaccagacacgttcaatttaagaagcttctttcccatcaaaagcacacgttaaccgaatcagattttgatgaactggtaaagattactgagggctattcaggaagtgatataacgtctttagcgaaggatgctgccatgggcccactacgagatctgggtgataagttattagaaacagagagggagatgataagacccataggccttgtggattttaagaacagtttagtgtatatcaagccctctgtatcccaggacggattagtgaagtacgaaaagtgggcttcacaattcggatcatcaggttcatga

SEQ ID NO: 3098 - DNA, 2694 bp, Artificial Sequence
  Description of Artificial Sequence: Synthetic polynucleotide
atggattctcaaagaagccatcatattttaacgagattaaccaagataagaagaagacctcaacaaccgttaaccgactttacagaactttacagtagaattgccaatgagacaatatattacttgaacttggaagagaaaaaaagatataaagaagcattgcaaggatggaaagcgcttaccactgatgtattattcaaacagacattgatagagcataactacccaaatactcaatcttacacgaaagatgaagttagtttacagaacggtattagagaattgtaccacaagagcgttatgcatttgaaaagagtcaaaaaattggtcagagaagagcctgctcccaggaatgatatgccgtcctccaaaacatacactaatcatagctcttctttcacaaggtctactgaaccacctcctgtattccaaatggttcccggaagaatgatgaaaacattaagaaatagaaatgcatgcggctataaaaccgcatactccaacccctctttatcttcttatggtaacagcacatctataaaacgcggagaagatgcggagaacattagagtaaattttgtaccttctaagcctttatccaacaatgcaagcagacagcacaagaaccctattgagcacaatgatcctccacttaagaaggaaactgaattatactctgataaatatatctctgagccaatattgatagatttgactaatgacgaggatgatcacgatgtcggcattttaaaaggacacaacgtttttgatgaagaagaaagtgatggtttcgagtttgatgtgtccgattactatgataatttctccgaagtcgacgtagaagaagaagaagaagaaaaagaggaaagaagacgtataaaaacgttagaagcaattcaacagcaaatgtctgacttgtctgttacttcttctacgtccagtaataagagtgtaagttcttctgaaaatgttcccggaagttgcatacagtccttaccgactaccgcccctgctcttccttctttacctccacctcctttattaaatgtcgatagagcgtccagcactggcgctttgaagccacatagtttagaaacttctactactatggattcttccaagattaggaatcctcaaatatccaaattaatgaagaataatcacgtaccatacttaaagggtaccaaatctacgcccactcttatcactaaatctacgccaacatttattacaagaagtaaaagtaatacaaaaccaatcatcaaatccaatgcatcttctccgacctcttctttgactgttccaaattctgtaattcaaaaacccaaaacggctgcaatggctgctaagagagttttgaacagcaaaaaggttgcgagtaaccccgcattaaacactacgaagaagagtcaccccattttgaaatccaaaacggcgaaagtcccaaattccagttccaagaaaacgagtagccatccttccagacctgtaagtaactccaaaccatactctcatggtgcatcccagaataagaagccatctaaaaatcaaaccacgtctatgagtaaaacgaatagaaaaataccagcacaaaaaaaaatcggttctccaaaaatagaagatgttggaacagaagatgccactgaacatgccacttccttgaatgagcaaagagaagagcctgaaatagacaagaaagtcttgagggagattttagaagatgaaattattgatagtttacaaggtgtagataggcaagctgcaaagcaaatttttgccgaaatcgtagtgcacggagatgaagttcattgggatgatattgctggtttagaaagtgcaaaatattctttgaaggaagcagttgtctatccgtttttgagaccagacttattcagggggttacgtgaaccagtcagggggatgctcttatttggaccaccaggtacaggtaaaacaatgttggcgagagctgtagctacagagtctcactccacctttttctctattagtgcttccagtttgacatctaaatacttgggtgaaagtgaaaaattagtgagggcattatttgcaattgccaaaaaattgtctccttctataatatttgttgatgaaattgactctatcatgggtagtaggaataacgaaaatgaaaatgagagcagcagaaggataaagaatgaatttcttgttcagtggtcttccttgtccagcgcagcggctggttccaacaaaagtaacactaacaattctgacaccaatggcgacgaagatgatacaagggtattggtacttgccgcgacaaacttaccatggtctattgatgaggctgcaaggagaagatttgtgagaagacaatatatcccattaccagaggaccagaccagacacgttcaatttaagaagcttctttcccatcaaaagcacacgttaaccgaaagtgattttgatgaattggtaaagattactgagggctattctggaagtgatataacgtctttagcgaaggatgctgccatgggcccattaagagatttaggtgataagttattagaaacagagagggagatgataagacccataggccttgtggattttaagaacagtttagtgtatatcaagccctctgtatcccaggacggattagtgaagtacgaaaagtgggcttctcaattcggaagttctggttcctga

SEQ ID NO: 3099 - DNA, 1176 bp, Saccharomyces cerevisiae
atggtaaaggagacggagtattatgatattttgggcatcaagcctgaggccacgcccactgaaatcaaaaaggcctatcgtagaaaggctatggaaacacatccggacaagcatcctgatgacccagatgctcaagcaaagtttcaagccgtaggcgaggcctaccaagtcttaagtgatccagggcttcgttccaagtatgaccagtttggtaaggaggatgctgttcctcagcaaggatttgaagatgcttctgaatactttacagcaatattcggtggtgatggcttcaaagattggattggagaattttctttgttcaaagagctaaacgaggcaacagaaatgtttggaaaggaagatgaggagggtacagcagccactgaaaccgaaaaagcagatgagagcactgatggtggaatggttaagcatgacactaataaagctgaatctttgaaaaaagataaattatcgaaggagcaaagagagaagctaatggaaatggagaaaaaaagacgggaagatatgatgaaacaagtcgacgagttggcagaaaaactgaacgaaaaaatctctaggtacttaattgctgtgaagtccaataacttggaggaatttacgcgaaaactagatcaagaaatcgaggatttgaaattagaaagttttggtctagagttattgtatttattggccagggtttacaagacaaaagcgaataattttatcatgtccaagaagacttacggaatttctaaaatattcactggtacacgcgacaatgctagatctgttaaatcagcatacaatttattgtctacaggcttagaagctcaaaaagccatggaaaaaatgagtgaagtcaatactgacgaactagaccaatatgaacgtgccaaatttgagtccacaatggctggtaaggcacttggtgtcatgtgggctatgtcgaaatttgaactggaaagaaaactaaaagacgtttgcaataagattctaaacgataaaaaggtcccttccaaggaacgtattgcaaaggcaaaagcaatgctgtttattgcccacaagtttgccagtgctagaaggtcaccagaagaagctgaagaagctagagtttttgaagagctaatcctaggtgagcaggagaaggaacacaaaaaacatactgtggccagataa

SEQ ID NO: 3100 - DNA, 1176 bp, Artificial Sequence
  Description of Artificial Sequence: Synthetic polynucleotide
atggtaaaggagacggagtattatgatattttgggcatcaagcctgaggccacgcccactgaaatcaaaaaggcctatcgtagaaaggctatggaaacacatccggacaagcatcctgatgacccagatgctcaagcaaagtttcaagccgtaggcgaggcctaccaagtcttaagtgatccagggcttcgttccaagtatgaccagtttggtaaggaggatgctgttcctcagcaaggatttgaagatgcttctgaatactttacagcaatattcggtggtgatggcttcaaagattggattggagaattttctttgttcaaagagttgaacgaggcaacagaaatgtttggaaaggaagatgaggagggtacagcagccactgaaaccgaaaaagcagatgagagcactgatggtggaatggttaagcatgacactaataaagctgaatctttgaaaaaagataaattatccaaggagcaaagagagaagttgatggaaatggagaaaaaaagaagagaagatatgatgaaacaagtcgacgagttggcagaaaaattgaacgaaaaaatctctaggtacttaattgctgtgaagtccaataacttggaggaatttacgagaaaattggatcaagaaatcgaggatttgaaattagaaagttttggtttagagttattgtatttattggccagggtttacaagacaaaagcgaataattttatcatgtccaagaagacttacggaatttctaaaatattcactggtacacgcgacaatgctagatctgttaaatctgcatacaatttattgtctacaggcttagaagctcaaaaagccatggaaaaaatgagtgaagtcaatactgacgaattagaccaatatgaacgtgccaaatttgagtccacaatggctggtaaggcacttggtgtcatgtgggctatgtccaaatttgaattggaaagaaaattgaaagacgtttgcaataagattttgaacgataaaaaggtcccttccaaggaacgtattgcaaaggcaaaagcaatgttatttattgcccacaagtttgccagtgctagaaggtctccagaagaagctgaagaagctagagtttttgaagagttgatcttgggtgagcaggagaaggaacacaaaaaacatactgtggccagatga

SEQ ID NO: 3101 - DNA, 285 bp, Saccharomyces cerevisiae
atgcctggatttacagctccaacaagaaggcaggtgttgtctttatacaaggaattcatcaagaatgctaatcaattcaataattacaacttcagggaatactttttaagtaaaacaaggactactttcagaaagaacatgaatcagcaagacccaaaagtgttaatgaacctatttaaggaagctaagaacgacttaggtgtcttgaaaagacagtctgttatttctcagatgtacacatttgacaggctggtcgtagaaccattgcaaggaagaaaacactaa

SEQ ID NO: 3102 - DNA, 285 bp, Artificial Sequence
  Description of Artificial Sequence: Synthetic polynucleotide
atgcctggatttacagctccaacaagaaggcaggtgttgtctttatacaaggaattcatcaagaatgctaatcaattcaataattacaacttcagggaatactttttaagtaaaacaaggactactttcagaaagaacatgaatcagcaagacccaaaagtgttaatgaacttgtttaaggaagctaagaacgacttaggtgtcttgaaaagacagtctgttatttctcagatgtacacatttgacaggttggtcgtagaaccattgcaaggaagaaaacactga

SEQ ID NO: 3103 - DNA, 1935 bp, Saccharomyces cerevisiae
atgaagagaaaaactgctgaagttaaaggtgagaaggagagaaattccaaacaaatttccctcgaagaggacaagataaagggtatgttcaaccctaaaatctgggacaagactttccaggatggcttgaaaaaggaaattgaagactctcagccttacaactggggtactattcatgaattggttaatgacgatcttctacgtgctgttcgtaaagaaatagaaactgagatccatttcactaaaaaagaaaccgatatctatagagtcaaccaaagtggtgacttggccaatttgtctggtctggactgggatgacttgtcccgtttgcctaatttgttcaagctgcgccagattctgtattccaagcaatatcgagatttttttggctacgtcaccaaagctggtaaattgtctggttctaagaccgacatgagcatcaacacttacacaaagggatgtcacttgttgactcatgatgacgttattggctctagaaggattagtttcattttatacctaccagatcccgacagaaaatggaaatcgcattatggtggtggtctaagactttttccaagtattttaccaaacgttccacattccgatccatctgctaaactagttccacagttcaatcaaattgcttttttcaaagttttaccgggtttctctttccacgatgtcgaagaagtcaaagttgataagcacagattatctattcaaggatggtaccatattccacaagttggcgaagaaggttacatacctggtgaagaagaagcgtgggtccgtaacaacacatccactttggcgcagattgaatctaatgtcctagaagattttgaatttccaaaggacgagagaaatattttatcatttcatgaagtgaagcactttgaaaaaatgctcaagggcgatgctggcgcaaaaactgataacacacctaaagaatctatgactagtgtgatttctgattcggttaagttgtctgaagccgagttcacctatctatctcaatacatctctcctgaacatttaagctcgaaaggtatcgaaaaactacaaaagcagtttgttgagaactcttctctacaaattgagtcgtttttaaatgacgataaatcagaattgttaaagaaggttatcaaacaaaaagagttggaacaggaatgtccttatcattcaaaagatgtgaaagctccgtggaaaacggctattcctccacacaaagcccgttatttgtacatcgacggtaaggaataccgtaatttccaaacagaagctgatattcttgaggcgctgaataacaatgatttgccaaactttcagtttactaaggacgcaattaaaattatctccgatgcttccggaaatagtagggaaaacaattttgatgcagaattagcgttgattgacctagctgtatttcacaagagcacaattttcaagaaatacctagctcttctaacttctttgtgcccagtcagtgagcaaatccttattagaaggtttaggccaggaatggatttcacattggccaccaaatgtcgctttaatgaacttttgaaaagcaatccagatataatcgatgctgtcttggaaggtactttgtgcttgacaccttctgccggttgggaatccggagagcttggtggttacgaattgtacatgatggacgacgacgaagataataagcaatacttaaaggaagacgttgaagacgcttctgtttatcgtgcggatgacagtggtgattcagtattgattaatgatccacctgcttggaatactttcaatttggtcttgagagatgaaagtgttttggagtttgttaagtacgtcagctggagcgctaaatctagtagatgggatgtcaaaatgaagtgggatgtcaaatcatgtgatgaagatggtcaggaagatgaagcgtaa

SEQ ID NO: 3104 - DNA, 1935 bp, Artificial Sequence
  Description of Artificial Sequence: Synthetic polynucleotide
atgaagagaaaaactgctgaagttaaaggtgagaaggagagaaattccaaacaaatttccctcgaagaggacaagataaagggtatgttcaaccctaaaatctgggacaagactttccaggatggcttgaaaaaggaaattgaagactctcagccttacaactggggtactattcatgaattggttaatgacgatcttttgcgtgctgttcgtaaagaaatagaaactgagatccatttcactaaaaaagaaaccgatatctatagagtcaaccaaagtggtgacttggccaatttgtctggtttggactgggatgacttgtcccgtttgcctaatttgttcaagttgcgccagattctttattccaagcaatatagagatttttttggctacgtcaccaaagctggtaaattgtctggttctaagaccgacatgagcatcaacacttacacaaagggatgtcacttgttgactcatgatgacgttattggctctagaaggattagtttcattttatacttgccagatcccgacagaaaatggaaatctcattatggtggtggtttaagactttttccaagtattttaccaaacgttccacattccgatccatctgctaaattggttccacagttcaatcaaattgcttttttcaaagttttaccgggtttctctttccacgatgtcgaagaagtcaaagttgataagcacagattatctattcaaggatggtaccatattccacaagttggcgaagaaggttacatacctggtgaagaagaagcgtgggtccgtaacaacacatccactttggcgcagattgaatctaatgtcttggaagattttgaatttccaaaggacgagagaaatattttatcttttcatgaagtgaagcactttgaaaaaatgctcaagggcgatgctggcgcaaaaactgataacacacctaaagaatctatgactagtgtgatttctgattctgttaagttgtctgaagccgagttcacctatttatctcaatacatctctcctgaacatttaagcagtaaaggtatcgaaaaattacaaaagcagtttgttgagaactcttctttacaaattgagtcttttttaaatgacgataaaagtgaattgttaaagaaggttatcaaacaaaaagagttggaacaggaatgtccttatcattctaaagatgtgaaagctccgtggaaaacggctattcctccacacaaagcccgttatttgtacatcgacggtaaggaataccgtaatttccaaacagaagctgatattcttgaggcgttgaataacaatgatttgccaaactttcagtttactaaggacgcaattaaaattatctccgatgcttccggaaatagtagggaaaacaattttgatgcagaattagcgttgattgacttggctgtatttcacaagagcacaattttcaagaaatacttggctcttttgacttctttgtgcccagtcagtgagcaaatccttattagaaggtttaggccaggaatggatttcacattggccaccaaatgtcgctttaatgaacttttgaaaagcaatccagatataatcgatgctgtcttggaaggtactttgtgcttgacaccttctgccggttgggaatccggagagcttggtggttacgaattgtacatgatggacgacgacgaagataataagcaatacttaaaggaagacgttgaagacgcttctgtttatcgtgcggatgacagtggtgattctgtattgattaatgatccacctgcttggaatactttcaatttggtcttgagagatgaaagtgttttggagtttgttaagtacgtcagctggagcgctaaatctagtagatgggatgtcaaaatgaagtgggatgtcaaaagttgtgatgaagatggtcaggaagatgaagcgtga

SEQ ID NO: 3105 - DNA, 417 bp, Saccharomyces cerevisiae
atgcaacctatcatcaagggagcagtaagctccacatttaaacgtgctctatacaatttcggtatcaaagaaaagaagagtgtcaatattgaaatggggagaacgcaacaaacaaagaaaatcgatcagtctttgtccaaaaaacttcccaaaggtactatctacgatccatttgacttctctatgggacgaatccatttagatagaaaatatcaggcaaacaagaactcaaacaggaacgatataatgaagtccggtgcaaatccactagaattttatgcaagaccaagaatactttcaagatatgtgacctccacgggaagaatccaacatagggatatcacaggcttatcggcaaagaatcaaagaagactatcgaaagccattagacggtgccaggcaataggattaatgtga

SEQ ID NO: 3106 - DNA, 417 bp, Artificial Sequence
  Description of Artificial Sequence: Synthetic polynucleotide
atgcaacctatcatcaagggagcagtaagctccacatttaaacgtgctttgtacaatttcggtatcaaagaaaagaagagtgtcaatattgaaatggggagaacgcaacaaacaaagaaaatcgatcagtctttgtccaaaaaacttcccaaaggtactatctacgatccatttgacttctctatgggaagaatccatttagatagaaaatatcaggcaaacaagaactccaacaggaacgatataatgaagtccggtgcaaatccattggaattttatgcaagaccaagaatactttctagatatgtgacctccacgggaagaatccaacatagggatatcacaggcttaagtgcaaagaatcaaagaagattatccaaagccattagaagatgccaggcaataggattaatgtga

SEQ ID NO: 3107 - DNA, 1479 bp, Saccharomyces cerevisiae
atgcaagatcccaatatttgccagcattgccagttgaaggataatccaggcgcattaatttgggtgaagtgtgatagttgcccgcagtgggtccacgtgaaatgcgtgcctttgaaacgcattcactattcaaatcttacaagttctgaagttctgtcttatccaaattctgcgaagcaaatcaagagctaccgttgtcctaatcataaggaaggagaatatcttaccgcatacgctctcatcacacaaaaaggaaagcggcaaaggaataaagaaaaccctgaagatagtcatataaataagcggtataatttcagaaagaagaaattacttgactatatcgctttgaatgagggtgaatcgaaaagggataaaatgaatcaccctcataaggagagtttcatgaaatcttttgaaaaatggaaaaatggctcaaatattataaacgccgctgactttgctgaaaagtttgataatatagatgtgccgtacaagatcatcgatccactgaatagcggagtatatgtaccgaatgtgggcacagacaatggatgcctcacagttaattatatcaccgaaatgataggcgaggattatcatgttgatgtaatggacgttcaatcacaaatgaatgaaaattggaacttgggatcttggaatgaatattttacaaatactgaaccagacaggagggatcgaataaggaatgttatatcattagaagtctctaatattgagggattagaactagagaggcccactgcagttaggcagaatgatcttgttgataaaatttggagtttcaatggacatttagaaaaagtcaatggggagaaggcggaggagaatgaccccaagccaaaagtgaccaaatatattttgatgtctgtaaaggatgcttatacggattttcatttggattttgccggtacctctgtttattataacgttatctcaggacagaagaagtttttattatttccacctacccaatcaaacatagataagtatattgagtggtctttaaaagaagaccaaaatagtgttttcctcggtgatattcttgaggatggtattgcgatggaattagatgctggtgatttgtttatgattccagctggatatattcatgcagtttatacaccagtagactctttggtatttggaggcaactttttaaccatccgtgatttggagacacaccttaaaattgtggaaattgaaaagttaacaaaggttcctagaagatttaccttcccgaagtttgatcaagtgatgggtaaattatgcgagtatcttgcgcttgataaaaataaaatcactagtgatgtcagtgatggggatttgctttccaggaccactaattgcgcaattcaatcacttcatgcatacgttataaaacctgaagttaagtacaagccgttaaatttcacttcaaagaagcatttagcgaaagctttagccgatcttatttcgtaa

SEQ ID NO: 3108 - DNA, 1479 bp, Artificial Sequence
  Description of Artificial Sequence: Synthetic polynucleotide
atgcaagatcccaatatttgccagcattgccagttgaaggataatccaggcgcattaatttgggtgaagtgtgatagttgcccgcagtgggtccacgtgaaatgcgtgcctttgaaacgcattcactattctaatcttacaagttctgaagttttatcttatccaaattctgcgaagcaaatcaagagctaccgttgtcctaatcataaggaaggagaatatcttaccgcatacgctctcatcacacaaaaaggaaagagacaaaggaataaagaaaaccctgaagatagtcatataaataagagatataatttcagaaagaagaaattacttgactatatcgctttgaatgagggtgaaagtaaaagggataaaatgaatcaccctcataaggagagtttcatgaaatcttttgaaaaatggaaaaatggcagtaatattataaacgccgctgactttgctgaaaagtttgataatatagatgtgccgtacaagatcatcgatccattgaatagcggagtatatgtaccgaatgtgggcacagacaatggatgcctcacagttaattatatcaccgaaatgataggcgaggattatcatgttgatgtaatggacgttcaatctcaaatgaatgaaaattggaacttgggatcttggaatgaatattttacaaatactgaaccagacaggagggatagaataaggaatgttatatctttagaagtctctaatattgagggattagaattagagaggcccactgcagttaggcagaatgatcttgttgataaaatttggagtttcaatggacatttagaaaaagtcaatggggagaaggcggaggagaatgaccccaagccaaaagtgaccaaatatattttgatgtctgtaaaggatgcttatacggattttcatttggattttgccggtacctctgtttattataacgttatcagtggacagaagaagtttttattatttccacctacccaaagtaacatagataagtatattgagtggtctttaaaagaagaccaaaatagtgttttcctcggtgatattcttgaggatggtattgcgatggaattagatgctggtgatttgtttatgattccagctggatatattcatgcagtttatacaccagtagactctttggtatttggaggcaactttttaaccatccgtgatttggagacacaccttaaaattgtggaaattgaaaagttaacaaaggttcctagaagatttaccttcccgaagtttgatcaagtgatgggtaaattatgcgagtatcttgcgcttgataaaaataaaatcactagtgatgtcagtgatggggatttgctttccaggaccactaattgcgcaattcaatctcttcatgcatacgttataaaacctgaagttaagtacaagccgttaaatttcacttctaagaagcatttagcgaaagctttagccgatcttatttcttga

SEQ ID NO: 3109 - DNA, 1584 bp, Saccharomyces cerevisiae
atgccaatggatttccaacctacatcaagtcattcgaactgggtcgtgcaaaagttcggtggtacatctgtcggtaaatttcccgtccaaatagtggatgacattgtgaagcactattctaaacctgacggcccaaacaataatgtcgctgtcgtttgttccgcccgttcttcatacaccaaggctgaaggtaccacttctcgtcttttgaaatgttgtgatttggcttcgcaagaatctgaatttcaagacattatcgaagttatcagacaagaccatatcgataatgccgaccgcttcattctcaatcctgccttgcaagccaagttagtggatgataccaataaagaacttgaactggtcaagaaatatttaaatgcttcaaaagttttgggtgaagtgagttcacgtacagtagatctggtgatgtcatgtggtgagaagttgagttgtttgttcatgactgctttatgtaatgaccgtggctgtaaggccaaatatgtggatttgagccacattgttccctctgatttcagtgccagcgctttggataacagtttctacactttcctggttcaagcattgaaagaaaaattggccccctttgtaagtgctaaagagcgtatcgttccagtctttacagggttttttggtttagttccaactggtcttctgaatggtgttggtcgtggctataccgatttatgtgccgctttgatagcagttgctgtaaatgctgatgaactacaagtttggaaggaagttgatggtatatttactgctgatcctcgtaaggttcctgaagcacgtttgctagacagtgttactccagaagaagcttctgaattaacatattatggttccgaagttatacatccttttacgatggaacaagttattagggctaagattcctattagaatcaagaatgttcaaaatccattaggtaacggtaccattatctacccagataatgtagcaaagaagggtgaatctactccaccacatcctcctgagaacttatcctcatctttctatgaaaagagaaagagaggtgccactgctatcaccaccaaaaatgacattttcgtcatcaacattcattccaataagaaaaccctatcccatggtttcctagctcaaatatttaccatcctggataagtacaagttagtcgtagatttaatatctacttctgaagttcatgtttcgatggctttgcccattccagatgcagactcattaaaatctctgagacaagctgaggaaaaattgagaattttaggttctgttgatatcacaaagaagttgtctattgtttcattagttggtaaacatatgaaacaatacatcggcattgctggtaccatgtttactactcttgctgaagaaggcatcaacattgaaatgatttctcaaggggcaaatgaaataaacatatcctgcgttatcaatgaatctgactccataaaagcgctacaatgtattcatgccaagttactaagtgagcggacaaatacttcaaaccaatttgaacatgccattgatgaacgtttagaacaattgaaaagacttggaatttaa

SEQ ID NO: 3110 - DNA, 1584 bp, Artificial Sequence
  Description of Artificial Sequence: Synthetic polynucleotide
atgccaatggatttccaacctacatctagtcattccaactgggtcgtgcaaaagttcggtggtacatctgtcggtaaatttcccgtccaaatagtggatgacattgtgaagcactattctaaacctgacggcccaaacaataatgtcgctgtcgtttgttccgcccgttcttcctacaccaaggctgaaggtaccacttctcgtcttttgaaatgttgtgatttggcttctcaagaatctgaatttcaagacattatcgaagttatcagacaagaccatatcgataatgccgaccgcttcattctcaatcctgccttgcaagccaagttagtggatgataccaataaagaacttgaattggtcaagaaatatttaaatgcttccaaagttttgggtgaagtgagttctcgtacagtagatttggtgatgtcctgtggtgagaagttgagttgtttgttcatgactgctttatgtaatgaccgtggctgtaaggccaaatatgtggatttgagccacattgttccctctgatttcagtgccagcgctttggataacagtttctacactttcttggttcaagcattgaaagaaaaattggccccctttgtaagtgctaaagagcgtatcgttccagtctttacagggttttttggtttagttccaactggtcttttgaatggtgttggtcgtggctataccgatttatgtgccgctttgatagcagttgctgtaaatgctgatgaattacaagtttggaaggaagttgatggtatatttactgctgatcctcgtaaggttcctgaagcacgtttgttggacagtgttactccagaagaagcttctgaattaacatattatggttccgaagttatacatccttttacgatggaacaagttattagggctaagattcctattagaatcaagaatgttcaaaatccattaggtaacggtaccattatctacccagataatgtagcaaagaagggtgaatctactccaccacatcctcctgagaacttatcctcttctttctatgaaaagagaaagagaggtgccactgctatcaccaccaaaaatgacattttcgtcatcaacattcattccaataagaaaaccttatcccatggtttcttggctcaaatatttaccatcttagataagtacaagttagtcgtagatttaatatctacttctgaagttcatgtttctatggctttgcccattccagatgcagactctttaaaatctttgagacaagctgaggaaaaattgagaattttaggttctgttgatatcacaaagaagttgtctattgtttctttagttggtaaacatatgaaacaatacatcggcattgctggtaccatgtttactactcttgctgaagaaggcatcaacattgaaatgatttctcaaggggcaaatgaaataaacatatcctgcgttatcaatgaatctgactccataaaagcgttgcaatgtattcatgccaagttattaagtgagagaacaaatacttctaaccaatttgaacatgccattgatgaacgtttagaacaattgaaaagacttggaatttga

SEQ ID NO: 3111 - DNA, 903 bp, Saccharomyces cerevisiae
atggagtccaataaacaaccacgtaaaatccaattatatacgaaagagttttatgccacatgtaccttaggtggtataattgcgtgcggtccaacacattcttcgatcactccactagatcttgtcaaatgtaggctacaggtcaatcccaagttgtatacttcaaacttacaagggttccgtaagattatagctaatgaaggctggaagaaagtatacactgggtttggtgctacattcgtcggatattcgctacaaggtgcaggtaagtatggtggttatgagtatttcaagcatttgtattctagttggttaagtcctggtgtcactgtgtacttgatggcctcagcgaccgctgaattcctcgctgatatcatgttgtgcccatttgaagctattaaagtgaaacagcagactactatgccgcccttttgcaataacgttgttgatggatggaaaaaaatgtatgcagaaagtggaggtatgaaagcattttataaaggtattgttcccctatggtgcagacagattccttacacaatgtgtaagtttacctcattcgaaaaaattgttcaaaaaatatacagtgttttacctaaaaagaaagaagaaatgaacgcattacagcaaatatcagtcagttttgtaggtggttatctggcaggtatattatgtgctgcagtctcacatcctgcagacgttatggtttccaagatcaatagcgaaagaaaggccaacgagtccatgtctgtagcctctaaaagaatatatcaaaaaattggctttactgggttgtggaatgggttaatggtgagaattgtcatgatcggtactttgacaagtttccaatggctaatttacgattcgttcaaggcttatgtaggcttaccaaccaccggttag

SEQ ID NO: 3112 - DNA, 903 bp, Artificial Sequence
  Description of Artificial Sequence: Synthetic polynucleotide
atggagtccaataaacaaccacgtaaaatccaattatatacgaaagagttttatgccacatgtaccttaggtggtataattgcgtgcggtccaacacattcttctatcactccattagatcttgtcaaatgtaggttacaggtcaatcccaagttgtatacttctaacttacaagggttccgtaagattatagctaatgaaggctggaagaaagtatacactgggtttggtgctacattcgtcggatattctttacaaggtgcaggtaagtatggtggttatgagtatttcaagcatttgtattctagttggttaagtcctggtgtcactgtgtacttgatggcctctgcgaccgctgaattcctcgctgatatcatgttgtgcccatttgaagctattaaagtgaaacagcagactactatgccgcccttttgcaataacgttgttgatggatggaaaaaaatgtatgcagaaagtggaggtatgaaagcattttataaaggtattgttcccctttggtgcagacagattccttacacaatgtgtaagtttaccagtttcgaaaaaattgttcaaaaaatatacagtgttttacctaaaaagaaagaagaaatgaacgcattacagcaaatatctgtcagttttgtaggtggttatttggcaggtatattatgtgctgcagtctctcatcctgcagacgttatggtttccaagatcaatagcgaaagaaaggccaacgagtccatgtctgtagcctctaaaagaatatatcaaaaaattggctttactgggttgtggaatgggttaatggtgagaattgtcatgatcggtactttgacaagtttccaatggttgatttacgattctttcaaggcttatgtaggcttaccaaccaccggttga

SEQ ID NO: 3113 - DNA, 114 bp, Saccharomyces cerevisiae
atgcaagatttagagatttttttgagtattttcgctttcattttcgttttctactttggtgctcatagaacagtcatgaacagaaacaagagcgatgttccttacttgcagtga

SEQ ID NO: 3114 - DNA, 114 bp, Artificial Sequence; identical to SEQ ID NO: 3113
  Description of Artificial Sequence: Synthetic polynucleotide

SEQ ID NO: 3115 - DNA, 1647 bp, Saccharomyces cerevisiae
atgtatataaaggcagaacagaaaccccaacagtttgagaggaagaatgaaaaactagacagaaataaaaaccagcagctaccagatcttgaaacagatttcaagggttacagagtgaattcggacctatacaacaaagaacgagatggaagtacggaagagactttaaactctttgaagtttttacataaacctcagagagtaactcaaatgagagcgaacaggttcccagaggaagaagtgcaaagaaacactgatttaaacaaaagaattttctccgcagggaatgatgaaaacgttgataatgagagcggctggtcaaaaattgccgctgccaagaatcacacttccgtagaatcattaaatggcagtacgagacccccattcaaaatagagctgcctcccctttcccccaaatccaccgtaccaaaatcttttcaagcagaatatcccgaagctaagtcacctggcaatgatatgaattttgaatatgatgaagaaattctaattccatttgcgccacctgtatataaaaagtcaggtgaactattgaagagctcattgaagagaagatcaaaatcattacctacaaccccaggtataaggagcgggaatggtgtccaagcaagagacggtagtccgatgttgattaggagtaagagtgttcactttgatcaggcggcacctgtaaaatattttgctgaggatgaaagccctataaacgttaataaaactgaacaacacgataattgtctaagctttaagcataagccagtgaatttaatggtggacccggaagaagagacaaaaatgctatcatctggattagaaacgacatccatagatgatgacttgacgacagttgcgccaaaaggcttcgcacatcctgctaaaatttcgaatccaaacaatggtaaaggcaccaacaatacaaaattaagaaaaagtaaaagatttcagaacctcctaaagaacaggaccgacatgccaccatcaaaatcaaataaaaaattcgttaatggtggcggtgctcatgaaatttcagatcgtaattcaaaaaattaccatgttgttggattatacagcaagaacttccccattttaagcaacaagaatcctaaaagtttaaagctgaacatttttatcaatttatcacaaaataagaaagtttttctacaagaattgtcattatacatccatagagacaacaattacttttcaaattcctcctcattttataatattcccaatagccacaatggtaatgactgtaatggtgtggccaagggttataacgctggctgtacaagattaattgctggaaggatactagtgaaaaacattttctatgataaaagagtggtggtacgatatacgtgggatagttggagaacaacacatgaagtggaatgcgtttacatcagtgatggcgatggaatattgccgggcactaacatggacattttccacttcattatcgatgatgtcagcaaagtggatcctcgcggcaagttagaattttgcattcattattctacacgtaacgactatgagcgcgaagagtactgggacaacaacaacgggaataattataaggtggatgttgtaatggatggctttaacgatcccttcgcggcggcagcatga

SEQ ID NO: 3116 - DNA, 1647 bp, Artificial Sequence
  Description of Artificial Sequence: Synthetic polynucleotide
atgtatataaaggcagaacagaaaccccaacagtttgagaggaagaatgaaaaattagacagaaataaaaaccagcagttaccagatcttgaaacagatttcaagggttacagagtgaatagtgacttgtacaacaaagaaagagatggaagtacggaagagactttaaactctttgaagtttttacataaacctcagagagtaactcaaatgagagcgaacaggttcccagaggaagaagtgcaaagaaacactgatttaaacaaaagaattttctccgcagggaatgatgaaaacgttgataatgagagcggctggtccaaaattgccgctgccaagaatcacacttccgtagaatctttaaatggcagtacgagacccccattcaaaatagagcttcctcccctttcccccaaatccaccgtaccaaaatcttttcaagcagaatatcccgaagctaagtctcctggcaatgatatgaattttgaatatgatgaagaaattttaattccatttgcgccacctgtatataaaaagtctggtgaattattgaagagctctttgaagagaagaagtaaatctttacctacaaccccaggtataaggagcgggaatggtgtccaagcaagagacggtagtccgatgttgattaggagtaagagtgttcactttgatcaggcggcacctgtaaaatattttgctgaggatgaaagccctataaacgttaataaaactgaacaacacgataattgtttgagctttaagcataagccagtgaatttaatggtggacccggaagaagagacaaaaatgctttcttctggattagaaacgacatccatagatgatgacttgacgacagttgcgccaaaaggcttcgcacatcctgctaaaatttctaatccaaacaatggtaaaggcaccaacaatacaaaattaagaaaaagtaaaagatttcagaacctcttgaagaacaggaccgacatgccaccatctaaatctaataaaaaattcgttaatggtggcggtgctcatgaaatttctgatcgtaattctaaaaattaccatgttgttggattatacagcaagaacttccccattttaagcaacaagaatcctaaaagtttaaagttgaacatttttatcaatttatctcaaaataagaaagtttttttgcaagaattgtctttatacatccatagagacaacaattacttttctaattcctcctctttttataatattcccaatagccacaatggtaatgactgtaatggtgtggccaagggttataacgctggctgtacaagattaattgctggaaggatattggtgaaaaacattttctatgataaaagagtggtggtaagatatacgtgggatagttggagaacaacacatgaagtggaatgcgtttacatcagtgatggcgatggaatattgccgggcactaacatggacattttccacttcattatcgatgatgtcagcaaagtggatcctcgcggcaagttagaattttgcattcattattctacacgtaacgactatgagcgcgaagagtactgggacaacaacaacgggaataattataaggtggatgttgtaatggatggctttaacgatcccttcgcggcggcagcatga

SEQ ID NO: 3117 - DNA, 894 bp, Saccharomyces cerevisiae
atggatttggtgaaccatctaaccgatagactactgtttgcaatcccaaagaaaggtcgtttatattctaaaagtgtttctattttgaatggtgctgatattacctttcaccgctctcaaagattagacattgcactaagcacaagcttacctgtagcgttggtctttctgcccgctgcagatattccaacttttgttggtgaaggtaaatgtgatcttggtataactggtgttgaccaagttcgtgaatctaacgtcgacgtagacttagcaatcgatttgcaatttggtaactgtaaattgcaggtacaagtccccgtaaatggcgagtataaaaagccagaacagttaattggcaaaaccattgttaccagtttcgtgaaacttgctgaaaaatactttgccgatttggaaggtactactgttgaaaaaatgaccacaaggataaagtttgtcagtggttccgtggaggcatcatgtgctctgggaattggtgatgctattgtagatcttgtagagagtggtgagacaatgagggcagcaggtttagttgatattgccaccgtcctaagcacaagtgcctacctaatagaatcaaagaacccaaagagcgataagagtttgattgctactatcaaatcaagaattgaaggtgtcatgaccgctcaaaggttcgtttcatgtatttataacgcacctgaagacaagctgcctgaactgttgaaggtgacgcctggccgtagagcaccaaccatttccaaaattgacgatgaaggatgggttgctgttagttccatgattgagagaaaaacgaagggtgttgttttagatgaattgaaaagactcggcgcatctgatatcatggttttcgaaatttctaattgtcgtgtataa

SEQ ID NO: 3118 - DNA, 894 bp, Artificial Sequence
  Description of Artificial Sequence: Synthetic polynucleotide
atggatttggtgaaccatttgaccgatagattactttttgcaatcccaaagaaaggtcgtttatattctaaaagtgtttctattttgaatggtgctgatattacctttcaccgctctcaaagattagacattgcattaagcacaagcttacctgtagcgttggtctttttgcccgctgcagatattccaacttttgttggtgaaggtaaatgtgatcttggtataactggtgttgaccaagttcgtgaatctaacgtcgacgtagacttagcaatcgatttgcaatttggtaactgtaaattgcaggtacaagtccccgtaaatggcgagtataaaaagccagaacagttaattggcaaaaccattgttaccagtttcgtgaaacttgctgaaaaatactttgccgatttggaaggtactactgttgaaaaaatgaccacaaggataaagtttgtcagtggttccgtggaggcatcttgtgctttaggaattggtgatgctattgtagatcttgtagagagtggtgagacaatgagggcagcaggtttagttgatattgccaccgtcttgagcacaagtgcctacttgatagaatccaagaacccaaagagcgataagagtttgattgctactatcaaatctagaattgaaggtgtcatgaccgctcaaaggttcgtttcttgtatttataacgcacctgaagacaagttacctgaattattgaaggtgacgcctggccgtagagcaccaaccatttccaaaattgacgatgaaggatgggttgctgttagttccatgattgagagaaaaacgaagggtgttgttttagatgaattgaaaagactcggcgcatctgatatcatggttttcgaaatttctaattgtcgtgtatga

SEQ ID NO: 3119 - DNA, 1602 bp, Saccharomyces cerevisiae
atgttggaagagggaaataatgtttacgaaatccaagacttggagaagagatctcctgtaataggctcaagcttggaaaacgaaaagaaggtagccgcttctgaaactttcacagcaacttccgaagatgaccaacagtatatcgttgaatcatcagaggccacaaaattatcgtggttccataagttctttgccagtttgaatgcagaaacaaagggtgttgaaccagttacagaggatgaaaaaacggacgattccatactgaatgctgcgtccatgtggttttcagctaatatggtcattgcatcatatgctttgggtgccttaggacccatggtgttcggtctaaattttggtcaaagtgttttagttatcatatttttcaatataatggggttgatatttgttgcgttcttttctgtctttggtgcagaactgggcttaagacagatgattttatcaagatatctggttggtaatgtaacggcaagaattttctctcttattaacgttattgcttgtgtcggttggggtattgtgaatacctcagtatccgcacaactgctgaatatggtgaatgaaggctccggccacgtctgtcctatttgggccggttgtctgatcattattggtggtaccgtgcttgtgactttttttggttacagtgtcattcatgcatacgagaaatggtcatgggtacccaattttgccgtctttttggttattattgcccaactatcgagatcaggaaagtttaaaggtggtgaatgggtaggaggtgcaactactgcaggtagtgttctttcttttggttcatctattttcggttttgccgcaggatggacgacctatgcagctgactacactgtttatatgccaaagagtacaaacaagtacaagatttttttctccctagttgctggtctagcgttccctctatttttcaccatgattcttggtgctgcttctgctatggctgctcttaatgacccaacctggaaggcatattatgacaaaaatgctatgggtggtgtcatatatgctatcctggttcctaactctctgaacggatttggtcaattctgctgcgttttgttagctctgtccactattgcaaataatattccaaatatgtatactgttgctttatccgctcaagctttgtgggcacctttggctaaaataccaagagtagtctggacaatggcaggtaatgctgccactttaggtatttccatccctgctacctattactttgatggctttatggagaatttcatggattctatcggttactacttagctatttacattgccatctcatgttcagaacatttcttctacagacgttccttcagtgcttacaatattgatgattgggataattgggagcatctacctatcggtatcgcaggtactgctgccttaattgttggtgccttcggtgttgcattgggtatgtgtcaaacctattgggttggtgaaattggccgcttaattggtaaatatggtggtgacattgggttcgagttgggtgcaagttgggccttcatcatctacaacatcttaagacctttagaattaaaatacttcggtcgttag

SEQ ID NO: 3120 - DNA, 1602 bp, Artificial Sequence
  Description of Artificial Sequence: Synthetic polynucleotide
atgttggaagagggaaataatgtttacgaaatccaagacttggagaagagatctcctgtaataggcagtagcttggaaaacgaaaagaaggtagccgcttctgaaactttcacagcaacttccgaagatgaccaacagtatatcgttgaatcttctgaggccacaaaattatcttggttccataagttctttgccagtttgaatgcagaaacaaagggtgttgaaccagttacagaggatgaaaaaacggacgattccatattgaatgctgcgtccatgtggttttctgctaatatggtcattgcaagttatgctttgggtgccttaggacccatggtgttcggtttgaattttggtcaaagtgttttagttatcatatttttcaatataatggggttgatatttgttgcgttcttttctgtctttggtgcagaattaggcttaagacagatgattttatctagatatttggttggtaatgtaacggcaagaattttctctcttattaacgttattgcttgtgtcggttggggtattgtgaatacctctgtatccgcacaattattgaatatggtgaatgaaggctccggccacgtctgtcctatttgggccggttgtttaatcattattggtggtaccgtgcttgtgactttttttggttacagtgtcattcatgcatacgagaaatggtcctgggtacccaattttgccgtctttttggttattattgcccaattatctagatctggaaagtttaaaggtggtgaatgggtaggaggtgcaactactgcaggtagtgttctttcttttggttcttctattttcggttttgccgcaggatggacgacctatgcagctgactacactgtttatatgccaaagagtacaaacaagtacaagatttttttctccttggttgctggtttggcgttccctttatttttcaccatgattcttggtgctgcttctgctatggctgctcttaatgacccaacctggaaggcatattatgacaaaaatgctatgggtggtgtcatatatgctatcttggttcctaactctttgaacggatttggtcaattctgctgcgttttgttagctttgtccactattgcaaataatattccaaatatgtatactgttgctttatccgctcaagctttgtgggcacctttggctaaaataccaagagtagtctggacaatggcaggtaatgctgccactttaggtatttccatccctgctacctattactttgatggctttatggagaatttcatggattctatcggttactacttagctatttacattgccatcagttgttctgaacatttcttctacagacgttccttcagtgcttacaatattgatgattgggataattgggagcatttacctatcggtatcgcaggtactgctgccttaattgttggtgccttcggtgttgcattgggtatgtgtcaaacctattgggttggtgaaattggccgcttaattggtaaatatggtggtgacattgggttcgagttgggtgcaagttgggccttcatcatctacaacatcttaagacctttagaattaaaatacttcggtcgttga

SEQ ID NO: 3121 - DNA, 366 bp, Saccharomyces cerevisiae
atggcccaacgtgttactttcagaagaagaaatccatacaacacccgttctaacaaaatcaaggttgttaagaccccaggtggtattttgcgtgcccaacatgtcaagaagttagctaccagaccaaagtgtggtgactgtggtagcgctttgcaaggtatctctactttgagaccaagacaatacgccactgtttccaagacccacaagactgtttccagagcttacggtggttccagatgtgccaactgtgttaaggaaagaattattagagctttcttgatcgaagaacaaaaaattgtcaagaaggttgtcaaggaacaaaccgaagctgccaagaaatctgaaaagaaggctaagaaataa

SEQ ID NO: 3122 - DNA, 366 bp, Artificial Sequence
  Description of Artificial Sequence: Synthetic polynucleotide
atggcccaacgtgttactttcagaagaagaaatccatacaacacccgttctaacaaaatcaaggttgttaagaccccaggtggtattttgcgtgcccaacatgtcaagaagttagctaccagaccaaagtgtggtgactgtggtagcgctttgcaaggtatctctactttgagaccaagacaatacgccactgtttccaagacccacaagactgtttccagagcttacggtggttccagatgtgccaactgtgttaaggaaagaattattagagctttcttgatcgaagaacaaaaaattgtcaagaaggttgtcaaggaacaaaccgaagctgccaagaaatctgaaaagaaggctaagaaatga

SEQ ID NO: 3123 - DNA, 390 bp, Saccharomyces cerevisiae
atggtcaccacgctaactcccgttatttgtgaatccgctccagctgctgcggcttcatactcccatgccatgaaagtgaacaatttgattttcctttctggccaaattccagtgaccccagacaacaagttagttgaaggttccattgctgataaggctgaacaggtgattcaaaacattaagaatgttctagaagcaagcaattcctcattggacagggtcgtaaaagttaacattttcttggcagatatcaatcactttgctgagtttaactccgtttacgccaagtacttcaatactcacaaacctgccagatcatgcgttgctgttgcagcattgccattaggcgttgacatggaaatggaagccattgctgccgaaagagattaa

SEQ ID NO: 3124 - DNA, 390 bp, Artificial Sequence
  Description of Artificial Sequence: Synthetic polynucleotide
atggtcaccacgttgactcccgttatttgtgaatccgctccagctgctgcggcttcttactcccatgccatgaaagtgaacaatttgattttcctttctggccaaattccagtgaccccagacaacaagttagttgaaggttccattgctgataaggctgaacaggtgattcaaaacattaagaatgttttggaagcaagcaattcctctttggacagggtcgtaaaagttaacattttcttggcagatatcaatcactttgctgagtttaactccgtttacgccaagtacttcaatactcacaaacctgccagatcttgcgttgctgttgcagcattgccattaggcgttgacatggaaatggaagccattgctgccgaaagagattga

SEQ ID NO: 3125 - DNA, 324 bp, Saccharomyces cerevisiae
atgagtagggctagcaagataacgtttgcagcttcctgtctgataacggcagcgacggtagtgggcgtgcattatgtgcaagaaatggaaagggaaactttgcatcagggtccgataaaagatgctaaacgagtcgaagaaaagaggttgagaaagacaaacggagttgcatcattagatcccacaaaagaaaggaaaaggtacttcaatatgagtgaacacgaggaacaaaaagagttgcgaaagaagtatgagaccatgcaaccgcttagtggagaagttgtgaccaaagatggagaggtggttaaagaatctaagaaataa

SEQ ID NO: 3126 - DNA, 324 bp, Artificial Sequence
  Description of Artificial Sequence: Synthetic polynucleotide
atgagtagggctagcaagataacgtttgcagcttcctgtttgataacggcagcgacggtagtgggcgtgcattatgtgcaagaaatggaaagggaaactttgcatcagggtccgataaaagatgctaaaagagtcgaagaaaagaggttgagaaagacaaacggagttgcatctttagatcccacaaaagaaaggaaaaggtacttcaatatgagtgaacacgaggaacaaaaagagttgagaaagaagtatgagaccatgcaaccgcttagtggagaagttgtgaccaaagatggagaggtggttaaagaatctaagaaatga

SEQ ID NO: 3127 - DNA, 1263 bp, Saccharomyces cerevisiae
atgtctatcaaaggtgattccccctcatcaacaaatgccagtagtagtccgaagtctacatattcaatacaatcggatgataaagcaaaccttggcagtggtaacgtcgatatacgtacagataattcacaacaggacagtaataatagacgcgatattgtggtagtgacgagggtagcttctgaagagactttagaatcacaatcatctacttcatcaatgggaattagaccagaatcatcttttaactatgaggatgcttctaaccaagctagggtcgaaatgaataacagggtacatggctcaaatatgaacacaattaacaaatattatccagtacgattcccaaagaataacgaaaggcaattgagcgacacaaataatttaaatgagaaagtgcaaggcacacatacagttcaatcatccacccaggaagacaaaatactcgacggtgacacaagcaactcacaagtaaccccgtctttgaacattgcagagtttcccacagacaagcttcttaaaatgctgacagcgttactaactaaaattattaagtcaaatgataggacggcagcgacaaatcctagtttgacacaagagattgagaatggtaggtgtcttgctttaagtgacaatgaaaagaaatacttaagccccgttctggggtttagagggaagcacgtaccacaaattggtcttgaccaatatttccagaggatccagaaatattgccccacaacgaatgatgtatttttatcgctcctcgtgtactttgatagaatatccaagagatgcaatagtgtcactacgacccctaaaactaatactgcaaaacatgaatctccctcaaatgaaagctctctagataaagctaacaggggcgctgacaaaatgtccgcatgtaacagtaacgaaaataatgaaaatgacgattcagatgatgaaaatacaggagttcaaagggattcaagggctcatcctcaaatgttcgtaatggattcacataatattcacagattaatcatagcaggtattactgtcagtacgaagtttctgagcgatttcttctatagcaattcaagatactcaagggtaggtgggatatctttacaagaactcaaccatttggaactgcagtttctagttttgtgtgattttgaacttttgatatcagtcaatgaattgcagagatacgcggacttactatacaggttttggaacaacgcaaaagctcaatcgcaagcactagttacgggcatgtag

SEQ ID NO: 3128 - DNA, 1263 bp, Artificial Sequence
  Description of Artificial Sequence: Synthetic polynucleotide
atgtctatcaaaggtgattccccctcttctacaaatgccagtagtagtccgaagtctacatattctatacaatctgatgataaagcaaaccttggcagtggtaacgtcgatatacgtacagataattctcaacaggacagtaataatagacgcgatattgtggtagtgacgagggtagcttctgaagagactttagaatctcaatcttctacttcttctatgggaattagaccagaaagctcttttaactatgaggatgcttctaaccaagctagggtcgaaatgaataacagggtacatggcagtaatatgaacacaattaacaaatattatccagtaagattcccaaagaataacgaaaggcaattgagcgacacaaataatttaaatgagaaagtgcaaggcacacatacagttcaatcttccacccaggaagacaaaatactcgacggtgacacaagcaactctcaagtaaccccgtctttgaacattgcagagtttcccacagacaagcttcttaaaatgttaacagcgttattaactaaaattattaagagcaatgataggacggcagcgacaaatcctagtttgacacaagagattgagaatggtaggtgtcttgctttaagtgacaatgaaaagaaatacttaagccccgttttggggtttagagggaagcacgtaccacaaattggtcttgaccaatatttccagaggatccagaaatattgccccacaacgaatgatgtatttttatctctcctcgtgtactttgatagaatatccaagagatgcaatagtgtcactacgacccctaaaactaatactgcaaaacatgaatctccctccaatgaaagctctttagataaagctaacaggggcgctgacaaaatgtccgcatgtaacagtaacgaaaataatgaaaatgacgattctgatgatgaaaatacaggagttcaaagggatagtagggctcatcctcaaatgttcgtaatggattctcataatattcacagattaatcatagcaggtattactgtcagtacgaagtttttgagcgatttcttctatagcaattctagatactctagggtaggtgggatatctttacaagaactcaaccatttggaattacagtttttggttttgtgtgattttgaacttttgatatctgtcaatgaattgcagagatacgcggacttattgtacaggttttggaacaacgcaaaagctcaatctcaagcattggttacgggcatgtga

SEQ ID NO: 3129 - DNA, 1587 bp, Saccharomyces cerevisiae
atgcctcaaacgcacgaaatgtccctgaacggcactcaatacttaaaatatgaacttaaagaccttgagtctcgagctcacgatgcaaagactccttcaacaaatgaattctatgatgatgtagaatcgcacggaacagaagaattagttgaagctaaactgtcgtttttgaacagaattgctgctggtttaagtgccgagacaaagggtattgaaccgattacagaagatgaaaaaactgatgattctatactgaacgctgcatctatgtggttttcagcaaatatggttctgcctgcttatgccattggcgccctagggcctatggtgtttgatctaaatttcggccaaagcgttttcgttattattttctttaacctcttaggcttggtatcagttgctttcttttctgttttcggtgcagagctgggcctaagacagatgattttgtctagatatttagttggcaatatcgcagccaggatcttctctttcatcaattttattgcctgtatcggttggggtatcgttaataccgtagcaagctcgcaagtcctgaatatggttaaccccggtcatcaatgtcctctctgggctggttgtatagttattatcggtgctactgtaattgtaacttttttcggctatggagtcattcatgcttacgagaaatgggcgtgggtaccaaattttgccgtttttttggtaataattgctcgtttggcaaggtctaaaaaatttgtccttggggagtggacatctggtcctactacagcaggtaacgtgctttcatttggatcaacagtttatgggtttgctgcaggctggacaacatatgcggctgactataccgtttatatgccaaggaaaacgaacaagtataaaatttttttctcgcttgtagttgggttagcaacaccattatattttactatgatacttggtgcagctgtagcaatggcagctatcggcgatccagcctggaagacgtattatgacgaaaattccataggtggtttaacttttgccgttcttgtccctaattctgttcacggattcggtcagttctgttgcgtgttattgtctctgtccactatcgctaataatgttcccaacatgtatactattgctttatcggtgcaagccacgtgggaacctcttgcgaaagtcccaagagttatttggactttattaggcaatgcggccgcactgggtattgccattcctgcctgctactatttttctaccttcatgaattacttcatggattccataggttattatttggctatttatattgccattgcatgttcagagcattttatttataggcgttccttcagtgcttacaatgttgatgattgggatagttgggaacgtctacctatcggcattgcaggtactgctgccttaattgttggtgcctttggcgtagcgttgggtatgtgccaaacttattgggttggcgagatcagccgtttgatcggagactacggtggtgatattggattcgagttaggactaagttgggcatttatagtttacaacattgctagaccctttgagctcaagtactttggtcgttaa

SEQ ID NO: 3130 - DNA, 1587 bp, Artificial Sequence
  Description of Artificial Sequence: Synthetic polynucleotide
atgcctcaaacgcacgaaatgtccttgaacggcactcaatacttaaaatatgaacttaaagaccttgagtctagagctcacgatgcaaagactccttctacaaatgaattctatgatgatgtagaatctcacggaacagaagaattagttgaagctaaattatcttttttgaacagaattgctgctggtttaagtgccgagacaaagggtattgaaccgattacagaagatgaaaaaactgatgattctatattaaacgctgcatctatgtggttttctgcaaatatggttttacctgcttatgccattggcgccttggggcctatggtgtttgatttgaatttcggccaaagcgttttcgttattattttctttaacctcttaggcttggtatctgttgctttcttttctgttttcggtgcagagttgggcttaagacagatgattttgtctagatatttagttggcaatatcgcagccaggatcttctctttcatcaattttattgcctgtatcggttggggtatcgttaataccgtagcaagctctcaagtcttgaatatggttaaccccggtcatcaatgtcctctctgggctggttgtatagttattatcggtgctactgtaattgtaacttttttcggctatggagtcattcatgcttacgagaaatgggcgtgggtaccaaattttgccgtttttttggtaataattgctcgtttggcaaggtctaaaaaatttgtccttggggagtggacatctggtcctactacagcaggtaacgtgctttcttttggaagtacagtttatgggtttgctgcaggctggacaacatatgcggctgactataccgtttatatgccaaggaaaacgaacaagtataaaatttttttctctcttgtagttgggttagcaacaccattatattttactatgatacttggtgcagctgtagcaatggcagctatcggcgatccagcctggaagacgtattatgacgaaaattccataggtggtttaacttttgccgttcttgtccctaattctgttcacggattcggtcagttctgttgcgtgttattgtctttatccactatcgctaataatgttcccaacatgtatactattgctttatctgtgcaagccacgtgggaacctcttgcgaaagtcccaagagttatttggactttattaggcaatgcggccgcattgggtattgccattcctgcctgctactatttttctaccttcatgaattacttcatggattccataggttattatttggctatttatattgccattgcatgttctgagcattttatttataggcgttccttcagtgcttacaatgttgatgattgggatagttgggaacgtttacctatcggcattgcaggtactgctgccttaattgttggtgcctttggcgtagcgttgggtatgtgccaaacttattgggttggcgagatcagccgtttgatcggagactacggtggtgatattggattcgagttaggattgagttgggcatttatagtttacaacattgctagaccctttgagctcaagtactttggtcgttga

SEQ ID NO: 3131 - DNA, 1593 bp, Saccharomyces cerevisiae
atgccagaaaagttagccatgtcaatggtcgatataaaagatgcggggagtgaactaagggacctcgaatctggagctctggacacaaaatcttccgccgctgatgtatactatgagggtgtagaattgcatagaaccaacgaattcattgataataagccgtcctttttcaataggattgcagctgctttaaatgctgagacgaaaggtattgaaccagttacagaagatgaaaaaaatgatgactcgatactcaatgccgccactatatggttttcagctaatatggtgattgtagcctattccgtaggtgccttgggtcctctagtatttggcctaaatttcggccaaagtgttttagttatcatttttttcaatattttgggtttgatccctgttgcattattctcactttttggggtagaactgggcctaagacagatgattctatcgagatatttggctggtaacatcacagcaagatttttctctcttgttaatgtcattgcttgtgtcggttggtgtgttttaaatatttctgtttctgctcaacttttgaatatggtgaatgaaggctctgggcacaactgtcctatttgggcaggttgtttgattattgctggtggtaccgtgcttgtgactttttttggttacagtgtcgttcatgcatacgaaaaatggtcgtgggtacccaattttgctgcctttttggtcattattgcccaactatcgagatcaggaaaatttaaaggtggtgaatgggtagggggtgcaactactgcaggtggtgttctttcttttggttcatctgtttttgggtcagctgcgggttgggcgacttatgcagcagattacactgtttatatgccaaagaccacaagtaaatacaaaatttttttttccgtagtagccggtctagcgttccctctatttttcaccatgattcttggtgctgcttgcggtatggcggcccttaatgacccaacctggaagtcatattatgataaaaacgccatgggtggtgtcatatatgctatcctggtccctaactctctaaacggattcggtcaattctgctgtgttttgttggctctttcaactgttgctaataatgtccctggaatgtacactgtcgctttatccgctcaagctttgtgggcacctttggctaaaataccaagagtagtctggacaatggcaggtaatgctgccactttaggtatttccatccctgctacctattactttgacggctttatggagaattttatggattccattggttattatttggctatttatattgccattgcatgttcagagcattttatttataggcgttccttcagtgcttacaatattgatgattgggataattgggagcatctacctatcggtatcgcaggtactgctgccttaattgctggtgcctttggagtagcgttgggtatgtgccaaacttattgggttggtgagatcagtcgtttgatcggagagtacggcggtgacattgggttcgagttaggcggaagttgggcgttcatcatctataacattgtaagacctttagaactcaaatatttcggtcgatga

SEQ ID NO: 3132 - DNA, 1593 bp, Artificial Sequence
  Description of Artificial Sequence: Synthetic polynucleotide
atgccagaaaagttagccatgtccatggtcgatataaaagatgcggggagtgaattgagggacctcgaatctggagctttggacacaaaatcttccgccgctgatgtatactatgagggtgtagaattgcatagaaccaacgaattcattgataataagccgtcctttttcaataggattgcagctgctttaaatgctgagacgaaaggtattgaaccagttacagaagatgaaaaaaatgatgacagtatactcaatgccgccactatatggttttctgctaatatggtgattgtagcctattccgtaggtgccttgggtcctttggtatttggcttgaatttcggccaaagtgttttagttatcatttttttcaatattttgggtttgatccctgttgcattattctctctttttggggtagaattaggcttaagacagatgattttatctagatatttggctggtaacatcacagcaagatttttctctcttgttaatgtcattgcttgtgtcggttggtgtgttttaaatatttctgtttctgctcaacttttgaatatggtgaatgaaggctctgggcacaactgtcctatttgggcaggttgtttgattattgctggtggtaccgtgcttgtgactttttttggttacagtgtcgttcatgcatacgaaaaatggtcctgggtacccaattttgctgcctttttggtcattattgcccaattatctagatctggaaaatttaaaggtggtgaatgggtagggggtgcaactactgcaggtggtgttctttcttttggttcttctgtttttgggtctgctgcgggttgggcgacttatgcagcagattacactgtttatatgccaaagaccacaagtaaatacaaaatttttttttccgtagtagccggtttggcgttccctttatttttcaccatgattcttggtgctgcttgcggtatggcggcccttaatgacccaacctggaagagttattatgataaaaacgccatgggtggtgtcatatatgctatcctcgtccctaactctttgaacggattcggtcaattctgctgtgttttgttggctctttctactgttgctaataatgtccctggaatgtacactgtcgctttatccgctcaagctttgtgggcacctttggctaaaataccaagagtagtctggacaatggcaggtaatgctgccactttaggtatttccatccctgctacctattactttgacggctttatggagaattttatggattccattggttattatttggctatttatattgccattgcatgttctgagcattttatttataggcgttccttcagtgcttacaatattgatgattgggataattgggagcatttacctatcggtatcgcaggtactgctgccttaattgctggtgcctttggagtagcgttgggtatgtgccaaacttattgggttggtgagatcagtcgtttgatcggagagtacggcggtgacattgggttcgagttaggcggaagttgggcgttcatcatctataacattgtaagacctttagaactcaaatatttcggtaggtga

SEQ ID NO: 3133 - DNA, 1329 bp, Saccharomyces cerevisiae
atgtcaagaagagtggttatcacaggattgggctgtgtaacgccgttgggaagatcattaagtgagtcatgggggaatctgctctcttccaaaaatggactcacaccaatcacatctttgcccaactataatgaggactacaaactcagagaaaaaagtatcccatcaacgataacagtggggaagattccagagaattttcaaaacgaaaattcagccatcaataaactgctgttcactagccaggatgagagaagaacctcaagctttatcaagctagcactacgtacaacttatgaagcgcttcacaatgctggtctcttgaacccaaatgatataaccatcaatacatctctgtgcaatctggatcactttggttgcctgataggttctggtataggatccattcaagacatataccaaacttctctacaattccataacgacaataaaagaataaatccatatttcgtccctaaaatccttacaaatatggcagctggtaatgtttccatcaagtttaaccttagaggattatcccatagtgtttccacagcatgcgcaacaggtaataactccattggcgatgcattcaattttattcggttaggcatgcaagacatctgtgtcgccggtgcaagtgaaacgagtttgcatccgttaagtttagcaggtttcatcagagcaaagtcgattactacaaacgggatctctagaccctttgatacacaacgttctggattcgtacttggtgaaggatgcggaatgattgtcatggaatcgctagaacatgctcaaaagagaaatgcaaacataatttctgagctcgtgggctatggtttaagcagtgatgcctgccatattacctcccctcctgctgatggaaatggtgccaaaagagcaatagagatggctctaaaaatggctagattagaaccaactgatgttgactacgtcaatgcacatgctacatcaactttactaggcgataaagcagagtgtctggcagtagcctcagcactcttaccaggaagatccaaaagcaagccactgtacatatccagtaacaaaggtgcaattggccatcttttaggtgcagctggcgccgtagaaagtatatttacaatttgttccttgaaggatgataagatgccgcataccttaaacctggacaatgttctgactctagaaaataacgaggccgataagctacatttcataagagacaaacctattgtgggagctaatccgaagtacgcattatgcaacagcttcggatttggaggagttaacacatctcttctcttcaagaaatgggaagggagttaa

SEQ ID NO: 3134 - DNA, 1329 bp, Artificial Sequence
  Description of Artificial Sequence: Synthetic polynucleotide
atgagtagaagagtggttatcacaggattgggctgtgtaacgccgttgggaagatctttaagtgagagttgggggaatttactctcttccaaaaatggactcacaccaatcacatctttgcccaactataatgaggactacaaactcagagaaaaaagtatcccatctacgataacagtggggaagattccagagaattttcaaaacgaaaattctgccatcaataaattattattcactagccaggatgagagaagaaccagtagctttatcaagttagcattgcgtacaacttatgaagcgcttcacaatgctggtctcttgaacccaaatgatataaccatcaatacatctttatgcaatttggatcactttggttgcttaataggttctggtataggatccattcaagacatataccaaacttctttacaattccataacgacaataaaagaataaatccatatttcgtccctaaaatccttacaaatatggcagctggtaatgtttccatcaagtttaaccttagaggattatcccatagtgtttccacagcatgcgcaacaggtaataactccattggcgatgcattcaattttattagattaggcatgcaagacatctgtgtcgccggtgcaagtgaaacgagtttgcatccgttaagtttagcaggtttcatcagagcaaagtctattactacaaacgggatctctagaccctttgatacacaacgttctggattcgtacttggtgaaggatgcggaatgattgtcatggaatctttggaacatgctcaaaagagaaatgcaaacataatttctgagctcgtgggctatggtttaagcagtgatgcctgccatattacctcccctcctgctgatggaaatggtgccaaaagagcaatagagatggctttgaaaatggctagattagaaccaactgatgttgactacgtcaatgcacatgctacatctactttattaggcgataaagcagagtgtttggcagtagcctctgcactcttaccaggaagatccaaaagcaagccattgtacatatccagtaacaaaggtgcaattggccatcttttaggtgcagctggcgccgtagaaagtatatttacaatttgttccttgaaggatgataagatgccgcataccttaaacttggacaatgttttaactttggaaaataacgaggccgataagttgcatttcataagagacaaacctattgtgggagctaatccgaagtacgcattatgcaacagcttcggatttggaggagttaacacatctcttctcttcaagaaatgggaagggagttga

SEQ ID NO: 3135 - DNA, 753 bp, Saccharomyces cerevisiae
atgggattgactactaaacctctatctttgaaagttaacgccgctttgttcgacgtcgacggtaccattatcatctctcaaccagccattgctgcattctggagggatttcggtaaggacaaaccttatttcgatgctgaacacgttatccaagtctcgcatggttggagaacgtttgatgccattgctaagttcgctccagactttgccaatgaagagtatgttaacaaattagaagctgaaattccggtcaagtacggtgaaaaatccattgaagtcccaggtgcagttaagctgtgcaacgctttgaacgctctaccaaaagagaaatgggctgtggcaacttccggtacccgtgatatggcacaaaaatggttcgagcatctgggaatcaggagaccaaagtacttcattaccgctaatgatgtcaaacagggtaagcctcatccagaaccatatctgaagggcaggaatggcttaggatatccgatcaatgagcaagacccttccaaatctaaggtagtagtatttgaagacgctccagcaggtattgccgccggaaaagccgccggttgtaagatcattggtattgccactactttcgacttggacttcctaaaggaaaaaggctgtgacatcattgtcaaaaaccacgaatccatcagagttggcggctacaatgccgaaacagacgaagttgaattcatttttgacgactacttatatgctaaggacgatctgttgaaatggtaa

SEQ ID NO: 3136 - DNA, 753 bp, Artificial Sequence
  Description of Artificial Sequence: Synthetic polynucleotide
atgggattgactactaaacctttatctttgaaagttaacgccgctttgttcgacgtcgacggtaccattatcatctctcaaccagccattgctgcattctggagggatttcggtaaggacaaaccttatttcgatgctgaacacgttatccaagtctctcatggttggagaacgtttgatgccattgctaagttcgctccagactttgccaatgaagagtatgttaacaaattagaagctgaaattccggtcaagtacggtgaaaaatccattgaagtcccaggtgcagttaagttgtgcaacgctttgaacgctttgccaaaagagaaatgggctgtggcaacttccggtacccgtgatatggcacaaaaatggttcgagcatttaggaatcaggagaccaaagtacttcattaccgctaatgatgtcaaacagggtaagcctcatccagaaccatatttgaagggcaggaatggcttaggatatccgatcaatgagcaagacccttccaaatctaaggtagtagtatttgaagacgctccagcaggtattgccgccggaaaagccgccggttgtaagatcattggtattgccactactttcgacttggacttcttgaaggaaaaaggctgtgacatcattgtcaaaaaccacgaatccatcagagttggcggctacaatgccgaaacagacgaagttgaattcatttttgacgactacttatatgctaaggacgatttattgaaatggtga

SEQ ID NO: 3137 - DNA, 657 bp, Saccharomyces cerevisiae
atggcagattattcttcccttactgttgttcaattgaaagatttactgaccaagagaaatctgtctgtaggcggattgaagaatgaactagttcaaagactgataaaggacgatgaagaatcaaagggtgaaagtgaagtttctccacaggaacaaaaccaggaacaagggtcagaacctgcggcgatagaagaaccagcctcccagaacattactgaaaaaaaggaagtttcaagcgagcctaaagaaacaaacgaacccaaggaggaaaataaggacgttcaaaagccctctgatggaccttctgctactgcttcagagaacgaacaagctgctgcttccactgctgctcccgctttgtcaccagaagaaattaaggccaaagcattggatcttttaaataagaaactgcaccgcgctaacaaattcggtcaagatcaagcggatattgactctttacaaagacagataaatcgtgtggagaagtttggtgttgacttgaatagcaagttggctgaagaactgggccttgtcagtaggaaaaatgaacctgaaagtggcaataacggtaaatttaaaaatagaaacaaaaatgcaaacaaccgctccagagtaagtaaaaacaggagaggcaaccgctctggttacagaagataa

SEQ ID NO: 3138 - DNA, 657 bp, Artificial Sequence
  Description of Artificial Sequence: Synthetic polynucleotide
atggcagattattcttcccttactgttgttcaattgaaagatttattaaccaagagaaatttatctgtaggcggattgaagaatgaattggttcaaagattaataaaggacgatgaagaatccaagggtgaaagtgaagtttctccacaggaacaaaaccaggaacaagggagtgaacctgcggcgatagaagaaccagcctcccagaacattactgaaaaaaaggaagtttccagcgagcctaaagaaacaaacgaacccaaggaggaaaataaggacgttcaaaagccctctgatggaccttctgctactgcttctgagaacgaacaagctgctgcttccactgctgctcccgctttgtctccagaagaaattaaggccaaagcattggatcttttaaataagaaattacaccgcgctaacaaattcggtcaagatcaagcggatattgactctttacaaagacagataaatcgtgtggagaagtttggtgttgacttgaatagcaagttggctgaagaattaggccttgtcagtaggaaaaatgaacctgaaagtggcaataacggtaaatttaaaaatagaaacaaaaatgcaaacaaccgctccagagtaagtaaaaacaggagaggcaaccgctctggttacagaagatga

SEQ ID NO: 3139 - DNA, 1518 bp, Saccharomyces cerevisiae
atgattgacgatactgagaactccaaaattcatttggaaggtagccataaaacaggaaagtatacgggctatggtactacacataaaatcagagctcagttaaactttaatgatgaaaagaaatggaagaagttttctagcagaagactagaactcattgactcatttggcttgagccagcacaaagcaagtgaacaagatgataatataagacaaatagccaccatattaaggagtgaatttgagtaccctgatacgttttcggcagaatttgaaaagttggttaccgctgctgttcaatcggtgagaagaaacaggaaacgttccaagaaaaaattattagactctaagaagaaaatagcccgtggtaaagttcaaaaaattcctttgtctccccccagctcaagtaatatggggtcttgttcagcttccaatgcatcaagctctgacgaagaagccagcgtgaaggaagaacctgctgagcacgctcttccttctcttaatactataacatcacaaaaattgttaccttatccgaatggccgcactcttccacctgtaccaactcaagttcgctctttacttaagaagaacgcatctcttcttcgtgatccatcggcaccgtatgcgcacggcggcgatgaaaaattacaaaagtttgatatagaagatcagcctctagaaagtgaacaagaatacgactttattgccaaatcaataattgttgaaattgtaaataatgctattccactacctgaacaaattcaaagagataagttcattagaccaaatttaacgaaaaaaaaagggtgccaaagcaaagttgtaatatccaacaacttgagaaaactcatcctgtcaaagatacataactcaaggacgtgcttggagatgtctaaggatgaaagaaatttggattcttttgctaatctagaaacgctgggcaaaaattcactaatggcttccatttcccttgtggtagaaaacagcttttcacatttaccgtcttctactaagcaatatcttactgaacggctgtcatcaatcgaatttttgactattctatcgcaaaggctatttatgcccgctacacgtcaactattcgctgacctatcacaagaaaaaattcaggtgagagtgctgaatctcatactgggatctcttgtcaaagattatgggtttgatgcatctttggcaccaatcaacgaaattatctatcacatgacactccatcaatatcccttggtttgtagtaataaacagtccaatccaatgaggccacactccacatctgaggtcttgagtgcacattcttcaacgaaagatgcaagcactcccggtaaagaagagcctcgagtgacgaggtcaagcacatcggcagatagcactatcattacattgccttcaattgaagtcccaaatacgtacgatgatgacaggttaaagatgttgagcgcgatatcgttgcagattgaaaattccaccttttccaaaccattcagtactatttcaaaataa

SEQ ID NO: 3140 - DNA, 1518 bp, Artificial Sequence
  Description of Artificial Sequence: Synthetic polynucleotide
atgattgacgatactgagaactccaaaattcatttggaaggtagccataaaacaggaaagtatacgggctatggtactacacataaaatcagagctcagttaaactttaatgatgaaaagaaatggaagaagttttctagcagaagattagaactcattgactcttttggcttgagccagcacaaagcaagtgaacaagatgataatataagacaaatagccaccatattaaggagtgaatttgagtaccctgatacgttttctgcagaatttgaaaagttggttaccgctgctgttcaatctgtgagaagaaacaggaaacgttccaagaaaaaattattagactctaagaagaaaatagcccgtggtaaagttcaaaaaattcctttgtctccccccagcagtagtaatatggggtcttgttctgcttccaatgcaagtagctctgacgaagaagccagcgtgaaggaagaacctgctgagcacgctcttccttctcttaatactataacatctcaaaaattgttaccttatccgaatggccgcactcttccacctgtaccaactcaagttcgctctttacttaagaagaacgcatctcttcttcgtgatccatctgcaccgtatgcgcacggcggcgatgaaaaattacaaaagtttgatatagaagatcagcctttggaaagtgaacaagaatacgactttattgccaaatctataattgttgaaattgtaaataatgctattccattgcctgaacaaattcaaagagataagttcattagaccaaatttaacgaaaaaaaaagggtgccaaagcaaagttgtaatatccaacaacttgagaaaactcatcttatccaagatacataacagcaggacgtgcttggagatgtctaaggatgaaagaaatttggattcttttgctaatttggaaacgttgggcaaaaattctttgatggcttccatttcccttgtggtagaaaacagcttttctcatttaccgtcttctactaagcaatatcttactgaaagattatcttctatcgaatttttgactattttatctcaaaggttatttatgcccgctacacgtcaattattcgctgacttatctcaagaaaaaattcaggtgagagtgttgaatctcatattaggatctcttgtcaaagattatgggtttgatgcatctttggcaccaatcaacgaaattatctatcacatgacactccatcaatatcccttggtttgtagtaataaacagtccaatccaatgaggccacactccacatctgaggtcttgagtgcacattcttctacgaaagatgcaagcactcccggtaaagaagagcctagagtgacgaggagcagcacaagtgcagatagcactatcattacattgccttctattgaagtcccaaatacgtacgatgatgacaggttaaagatgttgagcgcgatatctttgcagattgaaaattccaccttttccaaaccattcagtactatttccaaatga

SEQ ID NO: 3141 - DNA, 1674 bp, Saccharomyces cerevisiae
atgcctatccccgttggaaatacgaagaacgattttgcagctttacaagcaaaactagatgcagatgctgccgaaattgagaaatggtggtctgactcacgttggagtaagactaagagaaattattcagccagagatattgctgttagacgcgggacattcccaccaatcgaatacccatcttcggtcatggccagaaaattattcaaggtattagagaagcatcacaatgagggtacagtctctaaaactttcggtgccctagatcctgtccagatttctcaaatggcaaaatacttagacacaatctatatttctggttggcagtgttcatcaactgcttccacctcaaatgaacctggtccagacttagctgattatccaatggacaccgttccaaacaaagtggaacatttgttcaaggcccaattgtttcacgacagaaaacaactagaggcacggtcaaaggctaaatctcaggaagaactcgatgagatgggtgccccaattgactacctaacaccaattgtcgctgatgcagacgcaggccacggcggtttaaccgcagtcttcaaattgaccaagatgttcattgagcgtggtgctgctgggatccacatggaagaccagacatctacaaataagaaatgtgggcatatggcaggaagatgtgttatacccgttcaggaacatgttaacagattggtgactattagaatgtgtgctgatatcatgcattctgacttaattgtcgttgctaggactgattcagaagcagccactttgattagctcaaccatcgataccagagatcattatttcattgtcggtgccaccaatccaaatatcgagccatttgccgaagttttaaatgatgccatcatgagtggtgcatcaggacaagaactagctgacattgaacaaaaatggtgtagagacgctggactcaagttattccatgaagccgtcattgatgaaattgaaagatcagccctgtcaaataagcaagaattgattaagaaattcacctctaaagtgggtccattgactgaaacatcccacagagaagccaagaagctcgctaaagaaattcttggccacgaaattttcttcgactgggagctaccacgcgtaagggaagggttgtaccgttacagaggtgggacgcaatgttctatcatgagggcccgtgcatttgctccatatgctgatttggtatggatggaatctaactacccagacttccaacaggccaaggagtttgcagaaggtgttaaagagaaattccctgaccaatggctagcttacaacttgtctccatcctttaactggccaaaagccatgtccgttgatgaacaacacaccttcatccaaaggctgggtgatctaggttacatctggcaatttatcacattggccggtttacacactaacgctttagctgtccataacttctctcgtgactttgccaaggatgggatgaaagcttatgcccagaatgttcagcagagggaaatggacgatggtgttgatgtgttgaaacatcaaaaatggtctggtgcggagtacatcgatgggttattgaagttagctcaaggtggtgttagcgcaacagctgctatgggaaccggtgtcacagaagatcaattcaaagaaaatggcgtaaagaaatag

SEQ ID NO: 3142 - DNA, 1674 bp, Artificial Sequence
  Description of Artificial Sequence: Synthetic polynucleotide
atgcctatccccgttggaaatacgaagaacgattttgcagctttacaagcaaaattggatgcagatgctgccgaaattgagaaatggtggtctgactctcgttggagtaagactaagagaaattattctgccagagatattgctgttagacgcgggacattcccaccaatcgaatacccatcttctgtcatggccagaaaattattcaaggtattagagaagcatcacaatgagggtacagtctctaaaactttcggtgccttggatcctgtccagatttctcaaatggcaaaatacttagacacaatctatatttctggttggcagtgttcttctactgcttccacctctaatgaacctggtccagacttagctgattatccaatggacaccgttccaaacaaagtggaacatttgttcaaggcccaattgtttcacgacagaaaacaattggaggcaagatccaaggctaaatctcaggaagaactcgatgagatgggtgccccaattgactacttgacaccaattgtcgctgatgcagacgcaggccacggcggtttaaccgcagtcttcaaattgaccaagatgttcattgagcgtggtgctgctgggatccacatggaagaccagacatctacaaataagaaatgtgggcatatggcaggaagatgtgttatacccgttcaggaacatgttaacagattggtgactattagaatgtgtgctgatatcatgcattctgacttaattgtcgttgctaggactgattctgaagcagccactttgattagctctaccatcgataccagagatcattatttcattgtcggtgccaccaatccaaatatcgagccatttgccgaagttttaaatgatgccatcatgagtggtgcatctggacaagaattggctgacattgaacaaaaatggtgtagagacgctggactcaagttattccatgaagccgtcattgatgaaattgaaagatctgccttgagcaataagcaagaattgattaagaaattcacctctaaagtgggtccattgactgaaacatcccacagagaagccaagaagctcgctaaagaaattcttggccacgaaattttcttcgactgggagttaccacgcgtaagggaagggttgtaccgttacagaggtgggacgcaatgttctatcatgagggcccgtgcatttgctccatatgctgatttggtatggatggaatctaactacccagacttccaacaggccaaggagtttgcagaaggtgttaaagagaaattccctgaccaatggttggcttacaacttgtctccatcctttaactggccaaaagccatgtccgttgatgaacaacacaccttcatccaaaggcttggtgatttaggttacatctggcaatttatcacattggccggtttacacactaacgctttagctgtccataacttctctcgtgactttgccaaggatgggatgaaagcttatgcccagaatgttcagcagagggaaatggacgatggtgttgatgtgttgaaacatcaaaaatggtctggtgcggagtacatcgatgggttattgaagttagctcaaggtggtgttagcgcaacagctgctatgggaaccggtgtcacagaagatcaattcaaagaaaatggcgtaaagaaatga

SEQ ID NO: 3143 - DNA, 558 bp, Saccharomyces cerevisiae
atgaaatgtctatatatcttgagtggacatacggatcgtatttattcgacaatctacgatcatgaaagaaaaaggtgcatctctgccagtatggataccactattagaatttgggatttggaaaatataaggaataatggagaatgttcctacgcaacaaattcagcatcgccatgcgccaaaatacttggtgctatgtacactttgcggggtcacagagccctagtcggtttattgggattatccgataaatttttagtcagtgcttctgtagacggttcaataaggtgttgggacgctaacacttactttctgaagcactttttcgatcacacgcagttgaatacaatcaccgcattgcacgtttctgatgaggtattagtgagtggatctgaaggtttgctcaatatttatgatttaaatagtgggctgttagtccgttcagatacattgagtggtgctgataatgtttggaacgttagttttaaggacaacacacttgtggcagcggtagaacgagacaagcgaaatcttttagaaattttggactttagttga

SEQ ID NO: 3144 - DNA, 558 bp, Artificial Sequence
  Description of Artificial Sequence: Synthetic polynucleotide
atgaaatgtttgtatatcttgagtggacatacggatcgtatttattctacaatctacgatcatgaaagaaaaaggtgcatctctgccagtatggataccactattagaatttgggatttggaaaatataaggaataatggagaatgttcctacgcaacaaattctgcatctccatgcgccaaaatacttggtgctatgtacactttgagaggtcacagagccttggtcggtttattgggattatccgataaatttttagtcagtgcttctgtagacggttccataaggtgttgggacgctaacacttactttttgaagcactttttcgatcacacgcagttgaatacaatcaccgcattgcacgtttctgatgaggtattagtgagtggatctgaaggtttgctcaatatttatgatttaaatagtgggttattagtccgttctgatacattgagtggtgctgataatgtttggaacgttagttttaaggacaacacacttgtggcagcggtagaaagagacaagagaaatcttttagaaattttggactttagttga

SEQ ID NO: 3145 - DNA, 486 bp, Saccharomyces cerevisiae
atgacaaagaaggataagaaggaagtaaaagttcaaacggttaccacggaggatggtgaaaccgtgaaagtttttgaagacctgcagggttttgaaactttcattgccaatgaaactgaagatgatgatttcgatcatttgcactgtaaattaaattactacccaccatttgtgctacacgagtcgcacgaggaccctgaaaaaattagtgatgctgcaaattctcattctaagaagttcgtgcgtcacctgcaccagcatattgaaaagcatcttttgaaagatattaagcaagccgttaggaaacctgagcttaaatttcacgaaaaatcgaaggaagagacatttgataaaatcacctggcattacggtgaggaaactgaataccatggtagacctttcaagatagacgttcaagtagtttgcacacatgaagatgctatggtatttgtcgattacaaaacacatcctgtaggcgcaaattaa

SEQ ID NO: 3146 - DNA, 486 bp, Artificial Sequence
  Description of Artificial Sequence: Synthetic polynucleotide
atgacaaagaaggataagaaggaagtaaaagttcaaacggttaccacggaggatggtgaaaccgtgaaagtttttgaagacttacagggttttgaaactttcattgccaatgaaactgaagatgatgatttcgatcatttgcactgtaaattaaattactacccaccatttgtgttacacgagtctcacgaggaccctgaaaaaattagtgatgctgcaaattctcattctaagaagttcgtgcgtcacttgcaccagcatattgaaaagcatcttttgaaagatattaagcaagccgttaggaaacctgagcttaaatttcacgaaaaatccaaggaagagacatttgataaaatcacctggcattacggtgaggaaactgaataccatggtagacctttcaagatagacgttcaagtagtttgcacacatgaagatgctatggtatttgtcgattacaaaacacatcctgtaggcgcaaattga

SEQ ID NO: 3147 - DNA, 1764 bp, Saccharomyces cerevisiae
atgatgaatccacacgttcaagaaaatttgcaagcaatccacaacgccttaagcaattttgatacgtcatttttatcggaggatgaagaagattattgccctctttgtattgaaccaatggatattactgataaaaatttttttccttgtccctgtggttatcaaatttgtcaattttgctacaataatatcagacaaaatccagaattaaatggccgttgcccagcatgtcgtcgtaaatatgatgacgagaacgtcagatacgtcacattatctccggaggagttaaaaatggagagagccaagctcgctaggaaggagaaagaaagaaagcatagagaaaaagaacgtaaagagaatgaatatacgaataggaaacatttatctggtaccagagttatccaaaagaatttagtgtacgttgttggcatcaatcctcctgttccatacgaggaagttgcgcccactctgaaatctgaaaaatattttggccaatatggtaagataaataagattgtggttaatagaaaaacaccccattctaacaacacaaccagcgagcattatcaccatcattcaccaggatatggcgtttacataaccttcggatccaaggacgatgctgcaagatgtatagctcaggtagacgggacgtatatggatggccgcctgatcaaagctgcctacggtactactaaatactgttcttcttatttaagaggattgccatgcccaaatcccaactgtatgtttttgcatgaacctggtgaagaagctgattcttttaataaaagagaactccacaataaacaacaagcgcaacagcaaagtggcggaactgcattcactagatctggaatacacaacaatatatctaccagtaccgctggttcaaataccaatttactaagtgaaaatttcacaggcacaccttcaccggcggcgatgagggctcagttacatcatgacagccatacaaacgctggaacaccggtattaacacctgctccggtccctgcagggtcaaatccttggggagttactcaatcagcaacacctgtaacctctatcaatctctctaaaaacagcagctccataaacttgccaacattaaatgattctctgggccatcatactacccccacaacagagaataccatcacaagtacgacaactactaccaataccaatgctacaagtcactcccatggtagcaagaagaagcaatctcttgctgcagaggaatacaaagatccttatgacgcactagggaatgctgttgactttttggatgcaagactacattctctatcaaattatcagaagcgccctatatctatcaaatccaatattattgacgaagaaacttataaaaagtatccgtctttgttttcttgggacaagattgaggcctcaaagaaaagtgacaatacattagccaacaaacttgtggagatcctggctataaagccaatagactacactgcttctgtcgttcaattcttgcagagtgtcaatgttggtgtaaatgacaatattacaatcacagataatacgaaaactcccacccaaccaataagactgcaaaccgtctcacagcaaatccaaccaccattaaacgtcagtacccctccaccgggtatctttggtccacaacataaggttcctattcagcagcaacaaatgggtgatacaagctcaagaaattcctctgatttactaaatcaactaatcaacggaaggaaaattatcgccggtaattaa

SEQ ID NO: 3148 - DNA, 1764 bp, Artificial Sequence
  Description of Artificial Sequence: Synthetic polynucleotide
atgatgaatccacacgttcaagaaaatttgcaagcaatccacaacgccttaagcaattttgatacgtcttttttatctgaggatgaagaagattattgccctctttgtattgaaccaatggatattactgataaaaatttttttccttgtccctgtggttatcaaatttgtcaattttgctacaataatatcagacaaaatccagaattaaatggccgttgcccagcatgtcgtcgtaaatatgatgacgagaacgtcagatacgtcacattatctccggaggagttaaaaatggagagagccaagctcgctaggaaggagaaagaaagaaagcatagagaaaaagaacgtaaagagaatgaatatacgaataggaaacatttatctggtaccagagttatccaaaagaatttagtgtacgttgttggcatcaatcctcctgttccatacgaggaagttgcgcccactttgaaatctgaaaaatattttggccaatatggtaagataaataagattgtggttaatagaaaaacaccccattctaacaacacaaccagcgagcattatcaccatcattctccaggatatggcgtttacataaccttcggatccaaggacgatgctgcaagatgtatagctcaggtagacgggacgtatatggatggccgcttgatcaaagctgcctacggtactactaaatactgttcttcttatttaagaggattgccatgcccaaatcccaactgtatgtttttgcatgaacctggtgaagaagctgattcttttaataaaagagaactccacaataaacaacaagcgcaacagcaaagtggcggaactgcattcactagatctggaatacacaacaatatatctaccagtaccgctggtagtaataccaatttattaagtgaaaatttcacaggcacaccttctccggcggcgatgagggctcagttacatcatgacagccatacaaacgctggaacaccggtattaacacctgctccggtccctgcagggtctaatccttggggagttactcaaagtgcaacacctgtaacctctatcaatctctctaaaaacagcagctccataaacttgccaacattaaatgattctttaggccatcatactacccccacaacagagaataccatcacaagtacgacaactactaccaataccaatgctacaagtcactcccatggtagcaagaagaagcaatctcttgctgcagaggaatacaaagatccttatgacgcattggggaatgctgttgactttttggatgcaagattacattctttatccaattatcagaagcgccctatatctatcaaatccaatattattgacgaagaaacttataaaaagtatccgtctttgttttcttgggacaagattgaggcctccaagaaaagtgacaatacattagccaacaaacttgtggagatcttggctataaagccaatagactacactgcttctgtcgttcaattcttgcagagtgtcaatgttggtgtaaatgacaatattacaatcacagataatacgaaaactcccacccaaccaataagattacaaaccgtctcccagcaaatccaaccaccattaaacgtcagtacccctccaccgggtatctttggtccacaacataaggttcctattcagcagcaacaaatgggtgatacaagcagcagaaattcctctgatttattgaatcaattgatcaacggaaggaaaattatcgccggtaattga

SEQ ID NO: 3149 - DNA, 2592 bp, Saccharomyces cerevisiae
atgccatctgctagcttactcgtctcgacaaagagacttaacgcttccaaattccaaaaatttgtgtcttcattaaacaaatccaccatagcaggatttgcatctgtacccttgagagctccaccatccgttgcatttacgagaaagaaagtcggatactcaaagaggtatgtttcatctactaacggcttttcagctactagatccactgtgatccaactgttgaacaatatcagcacaaaaagagaggttgaacaatatttgaaatatttcacttccgtctcacaacaacaatttgctgtgatcaaggtgggtggtgccattatcagcgacaatctacacgaactcgcttcctgcttggcatttttgtatcatgttggtctatatccaatagttttacatggtaccggtcctcaggttaatggaaggctagaagcgcagggaattgagccagactatattgatggtattagaatcacggatgagcacacaatggccgtagttagaaaatgttttttggaacaaaatcttaagctagttactgcattagaacagctaggggtccgtgcaagacccattacttctggtgtttttactgctgactatttggataaggacaaatacaagctagtgggcaatattaaaagtgtcacaaaagagccaattgaagcatctattaaggcaggtgccctaccaatcttgacctctttagccgaaactgcttctggtcaaatgttgaacgtcaacgccgacgtagctgctggtgaattagcccgtgtttttgagcctttgaagatcgtttacctgaatgagaaagggggtattatcaatggctccacgggagaaaaaatttcgatgatcaatttggatgaagagtatgacgatttaatgaagcaaagttgggtgaagtatggtaccaaattaaaaattagagaaattaaagagcttttggactatcttcctcgttcttcttcagttgcaatcattaacgttcaagatctacaaaaagaactgttcactgattctggtgcgggtactatgatcaggagaggttacaaattagtgaagagatcctccattggcgaatttccatccgctgatgctctaagaaaagctcttcaaagggacgctggcattagttccggtaaagaatctgttgcttcttatttaagatatttggaaaactctgattttgtctcttatgctgatgaacctcttgaagcagtggccattgtaaagaaagatacgaacgttcccacactagacaaatttgtctgttctgacgcagcctggttgaataacgtcacagataatgtattcaatgttttgcgccgtgattttcctgctttacaatgggtagtcagtgaaaatgatgctaacattgcatggcattttgataagtctcaaggttcatatctaaaaggcggaaaagttttgttctggtatggtatcgatgatataaatacaatatccgagctcgttgaaaattttgtgaagtcgtgtgacactgcttctaccctcaactcatcagcaagtagtggagtatttgctaacaaaaaatcagctaggtcgtactcaactagatccactcctcgtcccgagggagttaacaccaaccctggtcgtgtcgcgcttattggtgctagaggttacacaggtaaaaatttggtatctttgatcaacggccacccatatttagaagtggcccatgtttcttctcgtgaattgaaaggtcaaaagttgcaagattatacaaaatccgaaattatatatgaaagtttgcaaatacaggatattaggaaactggaagaacaaaatgctgtggacttttgggttatggcattacccaacaaagtctgtgaacctttcgttgagacaatccaaagtgttcatggtaagtctaaaattattgatctgtccgctgatcacaggtttgtatcagaatcagactgggcttacggtttgccagaattgaatgatagagcaaaaattgcaaacgctgccaaaattgctaatcccggttgttatgctactggttcgcaattaactatttctccgttaacaaagtatatcaatggtcttccaactgtgtttggtgtttcagggtattcaggcgcggggacgaagccttctccaaaaaacgatcccaaattcttgaacaataacttaattccttacgctttaagtgatcatatacacgaacgcgaaatctcagctcgcattgggcacaatgttgcattcatgccccatgttgggcagtggtttcaaggtatctctttgaccgtctctattccaataaaaaaaggttccttgtctattgatgagatcaggaaattatacagaaatttttacgaagacgaaaagctagtacatgtcatcgatgatatcccactggttaaagatattgagggcacccatggtgtagttattggtggtttcaagctgaatgatgctgaagatcgtgtagttgtttgcgcaaccatcgataacttacttaaaggcgccgctactcaatgtctgcaaaatattaatcttgctatgggttatggagagtatgctggtatccctgaaaataaaattattggtgtctga

SEQ ID NO: 3150 - DNA, 2592 bp, Artificial Sequence
  Description of Artificial Sequence: Synthetic polynucleotide
atgccatctgctagcttactcgtctctacaaagagacttaacgcttccaaattccaaaaatttgtgtcttctttaaacaaatccaccatagcaggatttgcatctgtacccttgagagctccaccatccgttgcatttacgagaaagaaagtcggatactccaagaggtatgtttcttctactaacggcttttctgctactagatccactgtgatccaattattgaacaatatcagcacaaaaagagaggttgaacaatatttgaaatatttcacttccgtctctcaacaacaatttgctgtgatcaaggtgggtggtgccattatcagcgacaatttacacgaactcgcttcctgcttggcatttttgtatcatgttggtttatatccaatagttttacatggtaccggtcctcaggttaatggaaggttagaagcgcagggaattgagccagactatattgatggtattagaatcacggatgagcacacaatggccgtagttagaaaatgttttttggaacaaaatcttaagttggttactgcattagaacagttaggggtccgtgcaagacccattacttctggtgtttttactgctgactatttggataaggacaaatacaagttagtgggcaatattaaaagtgtcacaaaagagccaattgaagcatctattaaggcaggtgccttaccaatcttgacctctttagccgaaactgcttctggtcaaatgttgaacgtcaacgccgacgtagctgctggtgaattagcccgtgtttttgagcctttgaagatcgtttacttgaatgagaaagggggtattatcaatggctccacgggagaaaaaatttccatgatcaatttggatgaagagtatgacgatttaatgaagcaaagttgggtgaagtatggtaccaaattaaaaattagagaaattaaagagcttttggactatcttcctcgttcttcttctgttgcaatcattaacgttcaagatttgcaaaaagaattattcactgattctggtgcgggtactatgatcaggagaggttacaaattagtgaagagatcctccattggcgaatttccatccgctgatgctttgagaaaagctcttcaaagggacgctggcattagttccggtaaagaatctgttgcttcttatttaagatatttggaaaactctgattttgtctcttatgctgatgaacctcttgaagcagtggccattgtaaagaaagatacgaacgttcccacattagacaaatttgtctgttctgacgcagcctggttgaataacgtcacagataatgtattcaatgttttgcgccgtgattttcctgctttacaatgggtagtcagtgaaaatgatgctaacattgcatggcattttgataagtctcaaggttcttatttgaaaggcggaaaagttttgttctggtatggtatcgatgatataaatacaatatccgagctcgttgaaaattttgtgaagagttgtgacactgcttctaccctcaactcttctgcaagtagtggagtatttgctaacaaaaaatctgctaggtcttactccactagatccactcctcgtcccgagggagttaacaccaaccctggtcgtgtcgcgcttattggtgctagaggttacacaggtaaaaatttggtatctttgatcaacggccacccatatttagaagtggcccatgtttcttctcgtgaattgaaaggtcaaaagttgcaagattatacaaaatccgaaattatatatgaaagtttgcaaatacaggatattaggaaattagaagaacaaaatgctgtggacttttgggttatggcattacccaacaaagtctgtgaacctttcgttgagacaatccaaagtgttcatggtaagtctaaaattattgatttatccgctgatcacaggtttgtatctgaaagtgactgggcttacggtttgccagaattgaatgatagagcaaaaattgcaaacgctgccaaaattgctaatcccggttgttatgctactggttctcaattaactatttctccgttaacaaagtatatcaatggtcttccaactgtgtttggtgtttctgggtattctggcgcggggacgaagccttctccaaaaaacgatcccaaattcttgaacaataacttaattccttacgctttaagtgatcatatacacgaacgcgaaatctctgctcgcattgggcacaatgttgcattcatgccccatgttgggcagtggtttcaaggtatctctttgaccgtctctattccaataaaaaaaggttccttgtctattgatgagatcaggaaattatacagaaatttttacgaagacgaaaagttggtacatgtcatcgatgatatcccattagttaaagatattgagggcacccatggtgtagttattggtggtttcaagttgaatgatgctgaagatcgtgtagttgtttgcgcaaccatcgataacttacttaaaggcgccgctactcaatgtttgcaaaatattaatcttgctatgggttatggagagtatgctggtatccctgaaaataaaattattggtgtctga

SEQ ID NO: 3151 - DNA, 2667 bp, Saccharomyces cerevisiae
atgtacgtttataaaagagacggtcgtaaagaacctgtccaattcgataagattaccgctcgtatatcacgcttatgctatggtttagatccaaaacatatcgacgccgttaaggtcacccaacgtatcatttctggtgtctatgaaggtgtcacaacaatcgaactagacaacttagccgctgaaacatgcgcttatatgactactgttcatccagattacgccaccctagcggccagaattgccatttctaatttacataaacaaaccacaaaacaattttctaaggttgtcgaagatctttatagatacgtcaatgctgctactggtaagcccgctcccatgatctctgatgatgtctacaatattgtcatggaaaacaaggataaattgaactccgcaattgtctatgacagagattttcagtacagttattttggttttaaaactttggaacgttcttatttactaagaatcaacggtcaagtggccgaacgtccacaacatttaattatgagagtcgcactaggcatccacggtagagatatcgaggctgctttagaaacgtataacttgatgtctctaaaatattttactcacgcctctccaacgttgttcaatgccggtactccaaaacctcaaatgtcctcttgtttcttggttgccatgaaggaggactctatcgaggggatttacgacaccttgaaggaatgtgctttgatttccaaaactgctggtggtattggtctacatatccataacattcgttcaactggttcttacattgctggtacaaacggtacttctaacggtttaattcctatgattcgtgttttcaataacactgcccgttatgttgaccagggtggtaataaaagacctggtgcgtttgccctttacctggaaccatggcatgctgatatatttgattttattgatattaggaagaaccacggtaaagaggaaattcgtgcaagagatttgttccctgctctatggattcctgatcttttcatgaagcgtgtcgaagaaaatgggacctggacattattctctccaacatcagctcctggtttaagcgattgttacggtgacgagtttgaggctctatatacccgctacgagaaagaaggtcgtggtaagactatcaaagcccaaaaattatggtattccattttggaagctcaaactgaaactggtacacctttcgttgtttacaaggatgcttgtaacagaaaatctaatcaaaaaaacttaggtgtcatcaagtcatcaaacttatgctgtgaaattgttgaatactcagctccagatgaaactgctgtttgtaacttggcttccgttgccttaccagcattcattgaaacttctgaggatggtaagacttccacatacaacttcaaaaaattacatgaaattgctaaagttgttactcgtaatttaaacagagtcattgatcgtaattactaccctgttgaagaagcgagaaaatccaatatgagacatagaccaattgctttgggtgttcaaggtctcgctgacactttcatgctgttacgtttgccatttgattctgaggaagcccgtttgctaaatatccaaatctttgaaactatttatcatgcctccatggaagcttcttgtgaactagctcagaaggacggtccatacgaaactttccaaggatctcctgcttctcaaggtatactacagtttgatatgtgggaccaaaaaccctacggcatgtgggattgggacaccttaagaaaagatatcatgaagcatggtgttagaaattccttgaccatggcaccaatgcctactgcatccacatcccaaatattgggttataatgaatgtttcgaaccagtcacttccaatatgtactcccgtcgtgtcttatccggtgaattccaggttgtgaacccttacttactgcgtgacttggttgatttaggtatttgggatgagggtatgaaacagtatctgattacacaaaatggctccattcaaggcttaccaaacgttccacaagaattgaaggacttatacaagactgtttgggaaatttcacaaaagactatcattaacatggcagccgatcgttctgtctatattgatcaatctcattctttgaatttgttcttacgtgccccaactatgggtaaactaacaagtatgcatttttacggatggaagaagggattgaagaccggtatgtactatttgagaacccaagctgcatctgctgcaattcaatttactattgatcagaagattgcggatcaagctacagaaaacgttgctgatatttccaacttgaagcgtccatcatatatgccttccagtgcaagctacgctgccagcgatttcgtgcccgcagctgtgactgcaaacgcaactattccatctctagatagctcctcggaagcttcaagagaggcatctccagctccaacaggtagccactcattaactaaaggaatggcagaattaaacgttcaagagtctaaggtagaagttcctgaagtacctgccccaactaagaatgaagaaaaagctgcccccatcgttgatgatgaggaaaccgagttcgacatttacaactctaaggttatagcatgtgctattgataacccagaagcttgtgaaatgtgttcgggttaa

SEQ ID NO: 3152 - DNA, 2667 bp, Artificial Sequence
  Description of Artificial Sequence: Synthetic polynucleotide
atgtacgtttataaaagagacggtcgtaaagaacctgtccaattcgataagattaccgctcgtatatctcgcttatgctatggtttagatccaaaacatatcgacgccgttaaggtcacccaacgtatcatttctggtgtctatgaaggtgtcacaacaatcgaattagacaacttagccgctgaaacatgcgcttatatgactactgttcatccagattacgccaccttagcggccagaattgccatttctaatttacataaacaaaccacaaaacaattttctaaggttgtcgaagatctttatagatacgtcaatgctgctactggtaagcccgctcccatgatctctgatgatgtctacaatattgtcatggaaaacaaggataaattgaactccgcaattgtctatgacagagattttcagtacagttattttggttttaaaactttggaacgttcttatttattaagaatcaacggtcaagtggccgaacgtccacaacatttaattatgagagtcgcattgggcatccacggtagagatatcgaggctgctttagaaacgtataacttgatgtctttgaaatattttactcacgcctctccaacgttgttcaatgccggtactccaaaacctcaaatgtcctcttgtttcttggttgccatgaaggaggactctatcgaggggatttacgacaccttgaaggaatgtgctttgatttccaaaactgctggtggtattggtttgcatatccataacattcgttccactggttcttacattgctggtacaaacggtacttctaacggtttaattcctatgattcgtgttttcaataacactgcccgttatgttgaccagggtggtaataaaagacctggtgcgtttgccctttacttggaaccatggcatgctgatatatttgattttattgatattaggaagaaccacggtaaagaggaaattcgtgcaagagatttgttccctgctttatggattcctgatcttttcatgaagcgtgtcgaagaaaatgggacctggacattattctctccaacatctgctcctggtttaagcgattgttacggtgacgagtttgaggctttgtatacccgctacgagaaagaaggtcgtggtaagactatcaaagcccaaaaattatggtattccattttggaagctcaaactgaaactggtacacctttcgttgtttacaaggatgcttgtaacagaaaatctaatcaaaaaaacttaggtgtcatcaagagtagtaacttatgctgtgaaattgttgaatactctgctccagatgaaactgctgtttgtaacttggcttccgttgccttaccagcattcattgaaacttctgaggatggtaagacttccacatacaacttcaaaaaattacatgaaattgctaaagttgttactcgtaatttaaacagagtcattgatcgtaattactaccctgttgaagaagcgagaaaatccaatatgagacatagaccaattgctttgggtgttcaaggtctcgctgacactttcatgcttttacgtttgccatttgattctgaggaagcccgtttgttgaatatccaaatctttgaaactatttatcatgcctccatggaagcttcttgtgaattggctcagaaggacggtccatacgaaactttccaaggatctcctgcttctcaaggtatattacagtttgatatgtgggaccaaaaaccctacggcatgtgggattgggacaccttaagaaaagatatcatgaagcatggtgttagaaattccttgaccatggcaccaatgcctactgcatccacatcccaaatattgggttataatgaatgtttcgaaccagtcacttccaatatgtactcccgtcgtgtcttatccggtgaattccaggttgtgaacccttacttattacgtgacttggttgatttaggtatttgggatgagggtatgaaacagtatttgattacacaaaatggctccattcaaggcttaccaaacgttccacaagaattgaaggacttatacaagactgtttgggaaatttctcaaaagactatcattaacatggcagccgatcgttctgtctatattgatcaatctcattctttgaatttgttcttacgtgccccaactatgggtaaattaacaagtatgcatttttacggatggaagaagggattgaagaccggtatgtactatttgagaacccaagctgcatctgctgcaattcaatttactattgatcagaagattgcggatcaagctacagaaaacgttgctgatatttccaacttgaagcgtccatcttatatgccttccagtgcaagctacgctgccagcgatttcgtgcccgcagctgtgactgcaaacgcaactattccatctttagatagctccagtgaagcttccagagaggcatctccagctccaacaggtagccactctttaactaaaggaatggcagaattaaacgttcaagagtctaaggtagaagttcctgaagtacctgccccaactaagaatgaagaaaaagctgcccccatcgttgatgatgaggaaaccgagttcgacatttacaactctaaggttatagcatgtgctattgataacccagaagcttgtgaaatgtgttctggttga

SEQ ID NO: 3153 - DNA, 381 bp, Saccharomyces cerevisiae
atgagtatgcagattgaaataaaggatggaaggagtgataactctcctctgcccgaaagaaaactagttacgttaattcaagaaagttatgatagtttaaaagatgacaatgaaatcaatttatcgaccgaatcaacttccaaccttcttataaaactggtcctagaaaaacttgaaaagcactcttctttgtataaatatattgcctcggtaacgacgttgaacattgaaggactcaacgaagaaaacgctaatttctcattgaagaacgatataggcgcatcctgggaatctaaaaaagatggtatattcaactataaactagaagacaaaaataataatgagtgctatttaattacaattctttggcttcacaagtag

SEQ ID NO: 3154 - DNA, 381 bp, Artificial Sequence
  Description of Artificial Sequence: Synthetic polynucleotide
atgagtatgcagattgaaataaaggatggaaggagtgataactctcctttgcccgaaagaaaattggttacgttaattcaagaaagttatgatagtttaaaagatgacaatgaaatcaatttatctaccgaatctacttccaaccttcttataaaattggtcttggaaaaacttgaaaagcactcttctttgtataaatatattgcctctgtaacgacgttgaacattgaaggactcaacgaagaaaacgctaatttcagtttgaagaacgatataggcgcatcctgggaatctaaaaaagatggtatattcaactataaattagaagacaaaaataataatgagtgctatttaattacaattctttggcttcacaagtga

SEQ ID NO: 3155 - DNA, 390 bp, Saccharomyces cerevisiae
atgtcttcagcaccattattacaaagaacacctgggaaaaagatcgctttgcccacacgagttgagccaaaagtgttctttgccaatgagcgtacctttttgtcgtggttgaactttacagttatgctgggaggccttggtgtaggtttactgaattttggtgacaagataggtagggtcagtgcaggactatttacttttgttgccatgggtacaatgatatacgcgcttgtaacataccactggagagctgctgcgattagacgtagaggatcaggtccttatgatgacagattggggcccactttgttgtgctttttcttattggttgctgtcattatcaactttatattaagattgaagtacaatgacgctaacactaagttatga

SEQ ID NO: 3156 - DNA, 390 bp, Artificial Sequence
  Description of Artificial Sequence: Synthetic polynucleotide
atgtcttctgcaccattattacaaagaacacctgggaaaaagatcgctttgcccacaagagttgagccaaaagtgttctttgccaatgagcgtacctttttgtcctggttgaactttacagttatgcttggaggccttggtgtaggtttattgaattttggtgacaagataggtagggtcagtgcaggattatttacttttgttgccatgggtacaatgatatacgcgcttgtaacataccactggagagctgctgcgattagacgtagaggatctggtccttatgatgacagattggggcccactttgttgtgctttttcttattggttgctgtcattatcaactttatattaagattgaagtacaatgacgctaacactaagttatga

SEQ ID NO: 3157 - DNA, 1563 bp, Saccharomyces cerevisiae
atgctttctcgcacaagagctgcagctccgaattccagaatattcactagaagcttgttacgtctttattctcaagcaccattacgcgttccaattactcttccaaatggtttcacctacgaacagccaacagggttattcatcaatggtgaatttgttgcctcgaagcaaaagaaaacgtttgacgtgatcaatccatctaacgaagaaaagataacaactgtatacaaggctatggaagatgatgttgatgaagccgttgcagcggctaaaaaagcttttgaaacgaagtggtctattgtagagccggaggttcgcgctaaagctttattcaatctcgctgacttggttgagaaacaccaagaaacactggctgccattgagtcaatggataatggtaagtcattgttttgtgcgcgcggtgacgtcgctttagtatctaaatacttgcgttcttgcggtggttgggcagataaaatctacggtaacgttattgacacaggtaaaaaccattttacctactcaattaaggaaccattaggcgtttgcggccaaataatcccttggaacttccctttattgatgtggtcatggaaaattgggcctgctctggctacaggtaacaccgtcgtattgaaacccgctgaaacaacacctttatctgcccttttcgcttcccagttgtgtcaggaagcaggcatacccgctggtgtagtcaatatccttccgggttccggtagagttgttggagaaagattgagtgcacacccagacgtgaagaagattgcttttacaggctctactgccaccggccgccatattatgaaggtcgctgccgatactgtcaagaaagtcactttggagctgggaggtaaatcaccaaatattgtgtttgctgacgctgatctagataaagccgtcaagaacattgccttcggtattttttacaactctggtgaagtttgctgcgctggttccagaatatacattcaagatacagtatacgaggaggtgttgcaaaaactaaaggattacaccgagtcactaaaggtcggtgacccatttgatgaggaagttttccaaggtgctcaaacatctgacaaacagctgcataaaattttagactatgtcgatgtagcaaaatcagagggggctcgtcttgtgactggaggggccagacatggcagtaaaggttattttgtcaagccaacagtgtttgctgatgtcaaagaagatatgagaattgttaaggaggaagtgtttggtcccattgtaactgtatccaagttttctactgttgatgaagtgattgctatggcaaatgattctcaatatgggttagccgcaggtattcacactaacgatattaacaaggctgttgatgtgtccaaaagagtgaaagctggtactgtttggataaatacctataacaacttccaccaaaatgttcctttcggtggcttcggccagtcaggtattggccgtgaaatgggtgaggctgctttaagtaactacactcaaacaaaatctgtcagaattgccattgacaagccaattcgttga

SEQ ID NO: 3158 - DNA, 1563 bp, Artificial Sequence
  Description of Artificial Sequence: Synthetic polynucleotide
atgctttctcgcacaagagctgcagctccgaattccagaatattcactagaagcttgttacgtctttattctcaagcaccattacgcgttccaattactcttccaaatggtttcacctacgaacagccaacagggttattcatcaatggtgaatttgttgcctccaagcaaaagaaaacgtttgacgtgatcaatccatctaacgaagaaaagataacaactgtatacaaggctatggaagatgatgttgatgaagccgttgcagcggctaaaaaagcttttgaaacgaagtggtctattgtagagccggaggttcgcgctaaagctttattcaatctcgctgacttggttgagaaacaccaagaaacattggctgccattgagtccatggataatggtaagtctttgttttgtgcgcgcggtgacgtcgctttagtatctaaatacttgcgttcttgcggtggttgggcagataaaatctacggtaacgttattgacacaggtaaaaaccattttacctactctattaaggaaccattaggcgtttgcggccaaataatcccttggaacttccctttattgatgtggtcctggaaaattgggcctgctttggctacaggtaacaccgtcgtattgaaacccgctgaaacaacacctttatctgcccttttcgcttcccagttgtgtcaggaagcaggcatacccgctggtgtagtcaatatccttccgggttccggtagagttgttggagaaagattgagtgcacacccagacgtgaagaagattgcttttacaggctctactgccaccggccgccatattatgaaggtcgctgccgatactgtcaagaaagtcactttggagttaggaggtaaatctccaaatattgtgtttgctgacgctgatttggataaagccgtcaagaacattgccttcggtattttttacaactctggtgaagtttgctgcgctggttccagaatatacattcaagatacagtatacgaggaggtgttgcaaaaattgaaggattacaccgagtctttgaaggtcggtgacccatttgatgaggaagttttccaaggtgctcaaacatctgacaaacagttacataaaattttagactatgtcgatgtagcaaaaagtgagggggctcgtcttgtgactggaggggccagacatggcagtaaaggttattttgtcaagccaacagtgtttgctgatgtcaaagaagatatgagaattgttaaggaggaagtgtttggtcccattgtaactgtatccaagttttctactgttgatgaagtgattgctatggcaaatgattctcaatatgggttagccgcaggtattcacactaacgatattaacaaggctgttgatgtgtccaaaagagtgaaagctggtactgtttggataaatacctataacaacttccaccaaaatgttcctttcggtggcttcggccagtctggtattggccgtgaaatgggtgaggctgctttaagtaactacactcaaacaaaatctgtcagaattgccattgacaagccaattcgttga

SEQ ID NO: 3159 - DNA, 408 bp, Saccharomyces cerevisiae
atgtctgacgctgttactatccgtactagaaaggttatctccaacccattgttggccagaaagcaattcgtcgtcgacgtcttgcacccaaacagagctaatgtctccaaggatgaattgcgtgaaaaattagctgaagtctacaaggctgaaaaggacgctgtctccgttttcggtttcagaacccaatttggtggtggtaagtctgttggtttcggtttggtctacaactctgttgccgaagctaagaagttcgaaccaacttacagattagtcagatacggtttggctgaaaaggttgaaaaggcttccagacaacaaagaaagcaaaagaagaacagagacaagaagatcttcggtactggtaagagattggctaagaaggttgctcgtcgtaacgccgattaa

SEQ ID NO: 3160 - DNA, 408 bp, Artificial Sequence
  Description of Artificial Sequence: Synthetic polynucleotide
atgtctgacgctgttactatccgtactagaaaggttatctccaacccattgttggccagaaagcaattcgtcgtcgacgtcttgcacccaaacagagctaatgtctccaaggatgaattgcgtgaaaaattagctgaagtctacaaggctgaaaaggacgctgtctccgttttcggtttcagaacccaatttggtggtggtaagtctgttggtttcggtttggtctacaactctgttgccgaagctaagaagttcgaaccaacttacagattagtcagatacggtttggctgaaaaggttgaaaaggcttccagacaacaaagaaagcaaaagaagaacagagacaagaagatcttcggtactggtaagagattggctaagaaggttgctcgtcgtaacgccgattga

SEQ ID NO: 3161 - DNA, 258 bp, Saccharomyces cerevisiae
atggtactgtttggactaggtagactattttacgtcattttattattgattaatgccgttgcagtactgagcgaagaaaggttcttaagaagaattggccttggaagatcaaatgatgagacacctgtttttggtcaggatcaaaataccacgaagtccaaggttgttcaattgattggcgccgtacagacattactgaggataccattaattggaataaatatactggtgattgtttatgaattactattgggatga

SEQ ID NO: 3162 - DNA, 258 bp, Artificial Sequence
  Description of Artificial Sequence: Synthetic polynucleotide
atggtattatttggattaggtagattattttacgtcattttattattgattaatgccgttgcagtattgagcgaagaaaggttcttaagaagaattggccttggaagatctaatgatgagacacctgtttttggtcaggatcaaaataccacgaagtccaaggttgttcaattgattggcgccgtacagacattattgaggataccattaattggaataaatatattggtgattgtttatgaattattattgggatga

SEQ ID NO: 3163 - DNA, 2787 bp, Saccharomyces cerevisiae
atgaaggacagtgtagactgcccaagcattctacccaccgaccgcacttcagtgctttccgagactagcactttggtcggatcgagttcgcatgtatattcgaggcatgctcctatgaacagttatcataacagcatgaacagcaacatataccacagccccaaagccagtagccctttggtgagctataagacatcttcgccggtgttattgaagagggcgaccgctcctgtcctgccaagcttcaagcccaaggaacagcgatataataagccgcagggttgttcgctaattactgctgtagaactgggcaagattattgaaaccttaccagatgaaaaggtgctcttacttgatgttaggccgtttaccgaacatgccaaatccattatcacaaactccattcatgtatgtttgccttccacgctgctgaggaggaaaaatttcaccttttccaaactcttggacaacttaactcctagcgagcaaagcgtgttgaaatctaaactggccatcgataaccttcggattatcatttatgatagcaccgcaaatcaaacggaaagttctgtttctttaccttgttatggaatagcgtccaagctaatagagtttgatactaatgttaaaaaaaccgtgtctatactaatgtgtggttttcctcaattcaaaattctatttccagaccatataaacaccaacacatttaactcagattgcattagttcggctgaacctaaaagccccaagacaaaccttatgaacagtctacacaacacagcgccgcatatgacggcgacaacaccactatcgtctccgcaaatgaaccttaagttgaaagttcctgacgatagtaggtcagatcattcaaacttttccagttctccctctccgcgtaacgtcctatcagattctcccatgtcttcttcttcccccatatctgccttatttaagttccagctgcctgcaccacaaacaaacataaaccaaatgttcaaattttcgcaaaatgaagaaataatgggtttagagacgtatttgagtgcagtcaacatcaaagaagaacatgaaagatggtataataacgattctgccaaaaaatctttacaaaacttccaattcccaaagaaccaaaattctctagaaaaggacactaataaagacaaactagggtttcagatcagatacgaaaacctgagcaaaaattacgaaaaggaggtcattgactccgttatacctgaatggttccagcatctgatgtcaatacccaagatcgagttggtttctcagtttcaaaaattagattttttggaaaaaaggcgcttgaaccattctgtctctttcaggaagaaggaaaactcgtttatacttgaaaagccatcatcatatcctgaacagttaacatcaacttcttcttcaacaatcatgcctccaaaatttcctgacgtgaacaaagtacaaaagaggtcgcattctcagccaatcttcactcaatacagtaaatataaatcgatgctcagccttgaatcagattccgattcggagtcagatgacgttataatatcatcaggcgttgaattaggagccaagaacaggtacaaggatatttttccctacgagcattcgagagtgattctaaaaaaaggtttgcaatcatcaaaaggtatcaagcattcacattctacttccgatggtggcatcctcgacaattatatcaacgcaaactatttgtctctgccaaggttttctgtagagcaaaattcgtcatttcaaacaactacaaccacaacaagaagagtgcgctatatagcgacgcaagctccaatgccctccactgtacatgacttttatacatgcatattgaataatggcgttccgttggttctctcattgacaaatgatttcgaaaatggcattgagaaatgttatcgatattggcaagaaggtaattataacggtattcacgttaaattgttagaaaaaaaaatattaaagatgcctagcactactagcatgaggaaaaatactatgggaacacaaaatagtagtttatattcagctggtgttcagggaaatagtagtaactatagtactgataatgataatgataatgacaacaataataataacaataacaatagtaatattgctgttactgctgctgcttgtgatgatgatgatgatgatgatgatgacgcaattctcataagaaaaattctgctaacatatcatgatcaagagaaaccttatgaattgttacagattcaggtgaaaaattggcctgatttgggcactttactcaatcctatctcaatcttacaagcaatcaatgtcaagaatcacataatagatacactatttgccagaaattactatcaaaacgaccaacttcctaccattttggttcattgttccgcaggttgtggaaggactggtactttgtgtaccattgattccattctatccaatttcgaaatgtttgaaatgttgcagaaagagtttgttaaattaaaatacccggcaaagttattcgatccaatttcatggacaattaatatttttagaaagcaacgaatatccatggtccagaacattaatcaatttattttcatttatgactgcttgctattttactttagattacgtcttgatgacataacagagagaacggatggtgatggaagtaacaaggacaatatatcattaagtgcattaattgaacaaatcgaaaaattagagatcttgcagacattcgtggatgataagttgaaagaattgccacaatag

SEQ ID NO: 3164 - DNA, 2787 bp, Artificial Sequence
  Description of Artificial Sequence: Synthetic polynucleotide
atgaaggacagtgtagactgcccaagcattttgcccaccgaccgcacttctgtgctttccgagactagcactttggtcggaagtagttctcatgtatattctaggcatgctcctatgaacagttatcataacagcatgaacagcaacatataccacagccccaaagccagtagccctttggtgagctataagacatcttctccggtgttattgaagagggcgaccgctcctgtcttgccaagcttcaagcccaaggaacagagatataataagccgcagggttgttctttgattactgctgtagaattaggcaagattattgaaaccttaccagatgaaaaggtgctcttacttgatgttaggccgtttaccgaacatgccaaatccattatcacaaactccattcatgtatgtttgccttccacgttattgaggaggaaaaatttcaccttttccaaactcttggacaacttaactcctagcgagcaaagcgtgttgaaatctaaattggccatcgataaccttagaattatcatttatgatagcaccgcaaatcaaacggaaagttctgtttctttaccttgttatggaatagcgtccaagttaatagagtttgatactaatgttaaaaaaaccgtgtctatattaatgtgtggttttcctcaattcaaaattttatttccagaccatataaacaccaacacatttaacagtgattgcattagttctgctgaacctaaaagccccaagacaaaccttatgaacagtttacacaacacagcgccgcatatgacggcgacaacaccattatcttctccgcaaatgaaccttaagttgaaagttcctgacgatagtaggtctgatcattccaacttttccagttctccctctccgcgtaacgtcctttctgattctcccatgtcttcttcttcccccatatctgccttatttaagttccagttgcctgcaccacaaacaaacataaaccaaatgttcaaattttctcaaaatgaagaaataatgggtttagagacgtatttgagtgcagtcaacatcaaagaagaacatgaaagatggtataataacgattctgccaaaaaatctttacaaaacttccaattcccaaagaaccaaaattctttggaaaaggacactaataaagacaaattggggtttcagatcagatacgaaaacttgagcaaaaattacgaaaaggaggtcattgactccgttatacctgaatggttccagcatttaatgagtatacccaagatcgagttggtttctcagtttcaaaaattagattttttggaaaaaaggcgcttgaaccattctgtctctttcaggaagaaggaaaactcttttatacttgaaaagccatcttcttatcctgaacagttaacatctacttcttcttctacaatcatgcctccaaaatttcctgacgtgaacaaagtacaaaagaggagccattctcagccaatcttcactcaatacagtaaatataaatctatgctcagccttgaaagtgattccgattctgagtctgatgacgttataatatcttctggcgttgaattaggagccaagaacaggtacaaggatatttttccctacgagcattccagagtgattttgaaaaaaggtttgcaatcttctaaaggtatcaagcattctcattctacttccgatggtggcatcctcgacaattatatcaacgcaaactatttgtctttaccaaggttttctgtagagcaaaattcttcttttcaaacaactacaaccacaacaagaagagtgcgctatatagcgacgcaagctccaatgccctccactgtacatgacttttatacatgcatattgaataatggcgttccgttggttctctctttgacaaatgatttcgaaaatggcattgagaaatgttatcgttattggcaagaaggtaattataacggtattcacgttaaattgttagaaaaaaaaatattaaagatgcctagcactactagcatgaggaaaaatactatgggaacacaaaatagtagtttatattctgctggtgttcagggaaatagtagtaactatagtactgataatgataatgataatgacaacaataataataacaataacaatagtaatattgctgttactgctgctgcttgtgatgatgatgatgatgatgatgatgacgcaattctcataagaaaaattttattaacatatcatgatcaagagaaaccttatgaattgttacagattcaggtgaaaaattggcctgatttgggcactttactcaatcctatctccatcttacaagcaatcaatgtcaagaatcacataatagatacattatttgccagaaattactatcaaaacgaccaacttcctaccattttggttcattgttccgcaggttgtggaaggactggtactttgtgtaccattgattccattttatccaatttcgaaatgtttgaaatgttgcagaaagagtttgttaaattaaaatacccggcaaagttattcgatccaatttcttggacaattaatatttttagaaagcaaagaatatccatggtccagaacattaatcaatttattttcatttatgactgcttgttattttactttagattacgtcttgatgacataacagagagaacggatggtgatggaagtaacaaggacaatatatctttaagtgcattaattgaacaaatcgaaaaattagagatcttgcagacattcgtggatgataagttgaaagaattgccacaatga

SEQ ID NO: 3165 - DNA, 909 bp, Saccharomyces cerevisiae
atgacctcaggatactataccgtctcatttttttatgcgatcttattgttatgcgcatgcacacgtgctgagatctacctgacgggcggtgaaagccagggcttgccatcaggattctggcaaatggacgatgatttggcaatcgctccagtttctatggttgaattttaccagacgataggattaactgcaaatggtactgtacctgagtccttcaacaagcgtgatgctactgaataccctaacattatcagtaatataactacccaagcagccaacttcactcagcatagtctcgtcgagcaacttcaaaatgacgtcacggcaataagtatcagtaatgccattaatgtagccgtcgatggttctgtggaaacaccagcagacctgcaatacaaccgcaaccaggaaacaggtgaatctaccctctgtagagccaagttttacggagtggaggtaagaacttggtctaggttgtacaatagggccgtctcttccacaactcttacgactaatttgaacagctacatagcgcaatgggtagcatgggccgttcacgggagcggtgacaagaagttttgcggcagccaggagttcacgaatatcttttttgatgggcaagagggttggagtttgtttgtcaagacgtggtcaacaaacagtagctgtgatattacagcctctgaaggaaatttaacatgtgcagttcgtgtttcagtatccagtatgcacaatcacggcaagacagcgttttgtgttacctatagccacggtgattcttggcgtgccgagctgagagtagttgccaatgatgcttggtcccattattatccctggagtattgactgtccagaagttgataaaaataatatggctattaatgattgttttgatcaggcgcaaggttaa

SEQ ID NO: 3166 - DNA, 909 bp, Artificial Sequence
  Description of Artificial Sequence: Synthetic polynucleotide
atgacctctggatactataccgtcagttttttttatgcgatcttattgttatgcgcatgcacacgtgctgagatctacttgacgggcggtgaaagccagggcttgccatctggattctggcaaatggacgatgatttggcaatcgctccagtttctatggttgaattttaccagacgataggattaactgcaaatggtactgtacctgagtccttcaacaagcgtgatgctactgaataccctaacattatcagtaatataactacccaagcagccaacttcactcagcatagtctcgtcgagcaacttcaaaatgacgtcacggcaataagtatcagtaatgccattaatgtagccgtcgatggttctgtggaaacaccagcagacttgcaatacaaccgcaaccaggaaacaggtgaatctaccctctgtagagccaagttttacggagtggaggtaagaacttggtctaggttgtacaatagggccgtctcttccacaactcttacgactaatttgaacagctacatagcgcaatgggtagcatgggccgttcacgggagcggtgacaagaagttttgcggcagccaggagttcacgaatatcttttttgatgggcaagagggttggagtttgtttgtcaagacgtggtctacaaacagtagctgtgatattacagcctctgaaggaaatttaacatgtgcagttcgtgtttctgtatccagtatgcacaatcacggcaagacagcgttttgtgttacctatagccacggtgattcttggcgtgccgagttaagagtagttgccaatgatgcttggtcccattattatccctggagtattgactgtccagaagttgataaaaataatatggctattaatgattgttttgatcaggcgcaaggttga

SEQ ID NO: 3167 - DNA, 2067 bp, Saccharomyces cerevisiae
atgggtctaaaaattacaaaaggacagctgagaaccaaggatctgaatcaatcatcctcaaagtcatcgcagtcttcaagaataggtgtagacacttgtatatttactagaatgctaccccgaataaacactgcaattaatctcacagagcatctgctgagaagatcttttcattcactgacaaatctacagaaaactcaagtaaaagaaagactacatgagctagaacgtcacggtttcatattaaataaaacatccaaacaattggaaaggataaattctaagaaaagaagacaattgaaaaaactgcaaaagacagcataccccaaggatcaagcttttcatattcttcgaaaatttcataaaataaataatgaggcattagcagatacaaaactggggccaactagccaaagcgacttgaagttcctatccttaaccaaagataagagactcttttataccatactaggcgtcaatggagaacagttacgtgattccaaattaatcgccaatgatgttcaaaaatttttgaaaagaggacaactggaaaaagctgtctttttggctaggctagctaaaaagaaaggcgtcgttgggatgaatttgattatgaaatattatatcgaagttgtgcagtcccaacaaagtgctgtagatatcttcaattggcgaaaaaaatggggagtccctattgatcaacattccatcacaatcctctttaatgggctctcaaaacaagaaaatttggtctcaaaaaaatacggagaacttgttttgaagactatagatagtttgtgtgacaaaaatgagctcacggaaatagaatataataccgctttggcggcactgataaattgtaccgatgaaacactagtgttcaaacttcttaataaaaagtgcccaggtttgaaaaaggatagtattacatataccttaatgataagatcttgtaccaggattgccgatgagaaacgttttatggtggtactcaatgatttgatgaataaaataccagactattgtgtcgattctaaattgttatttgagtactgtgaagtaatatgtagccagaagtcaccaaagattgagaagcaaggaatgggactatgggccctctgtgaatattttcaatttgataagaccattttcaagaagtatttgacacaaagcgattttcctacgttagttccactaagtcattggaacatcaataagccatttcctctcaacaaacatgttgtgggattgtttatgaattactgtttgaaaaacaaggaatatgatcttgctatggaaatatttaagacattagaggcacagaacaaccaaatgttagatcagagcatataccacaaatacatggaaactgtcataacaacgaggcccatcacttgcggcgacgagtgtctggacatttatgaacgggtagcctcgtcggcacaaatctcaataaccaggaggacgttaattttggtgtacaacgcattccaaagacaaagtctcaaggccgttataaacaaagatgcatcaaatgctgaagctactttgcacaagattcgggggtttatagatagcgtagaggccacatactcatcaaagttgaacggcaaagtttacaggtttaattcatggaagttcctgtttcctatcgttaaaaatctgaacatgaatgataaagtgtctacagtggaactgaaaagtatactagatgaatacttgaaatctttattgaatggtgagttcgggaaggaatttaaagcgagcatagaagacaagcggtttgttacgttggagggaattcgtttagtcaaggttttaaccgagagaatcaagcttccgtcactggacagtgaggaaatagccagtttaaaaggcacggaaagaaagaagtttcttgccagaaggcaccttttgaggctgaagcaaatattactggaagatttagcggacattgaaggcaactcaagaaggaagggtgatagcgaaaatacaagtaccagtgaagagcgcatcatggaggacttggccgagctgatacttgaaaccagctatgacaagttttaa

SEQ ID NO: 3168 - DNA, 2067 bp, Artificial Sequence
  Description of Artificial Sequence: Synthetic polynucleotide
atgggtttgaaaattacaaaaggacagttaagaaccaaggatttgaatcaatcttcctccaagtcttctcagtcttctagaataggtgtagacacttgtatatttactagaatgttgcccagaataaacactgcaattaatctcacagagcatttattaagaagatcttttcattctttaacaaatttacagaaaactcaagtaaaagaaagattacatgagttagaacgtcacggtttcatattaaataaaacatccaaacaattggaaaggataaattctaagaaaagaagacaattgaaaaaattacaaaagacagcataccccaaggatcaagcttttcatattcttagaaaatttcataaaataaataatgaggcattagcagatacaaaattggggccaactagccaaagcgacttgaagttcttatccttaaccaaagataagagactcttttataccatattgggcgtcaatggagaacagttacgtgattccaaattaatcgccaatgatgttcaaaaatttttgaaaagaggacaattggaaaaagctgtctttttggctaggttggctaaaaagaaaggcgtcgttgggatgaatttgattatgaaatattatatcgaagttgtgcagtcccaacaaagtgctgtagatatcttcaattggagaaaaaaatggggagtccctattgatcaacattccatcacaatcctctttaatgggctctctaaacaagaaaatttggtctccaaaaaatacggagaacttgttttgaagactatagatagtttgtgtgacaaaaatgagctcacggaaatagaatataataccgctttggcggcattaataaattgtaccgatgaaacattagtgttcaaacttcttaataaaaagtgcccaggtttgaaaaaggatagtattacatataccttaatgataagatcttgtaccaggattgccgatgagaaacgttttatggtggtactcaatgatttgatgaataaaataccagactattgtgtcgattctaaattgttatttgagtactgtgaagtaatatgtagccagaagtctccaaagattgagaagcaaggaatgggattatgggccctctgtgaatattttcaatttgataagaccattttcaagaagtatttgacacaaagcgattttcctacgttagttccattaagtcattggaacatcaataagccatttcctctcaacaaacatgttgtgggattgtttatgaattactgtttgaaaaacaaggaatatgatcttgctatggaaatatttaagacattagaggcacagaacaaccaaatgttagatcagagcatataccacaaatacatggaaactgtcataacaacgaggcccatcacttgcggcgacgagtgtttggacatttatgaaagagtagcctcttctgcacaaatctccataaccaggaggacgttaattttggtgtacaacgcattccaaagacaaagtctcaaggccgttataaacaaagatgcatctaatgctgaagctactttgcacaagattagagggtttatagatagcgtagaggccacatactcttccaagttgaacggcaaagtttacaggtttaattcttggaagttcttatttcctatcgttaaaaatttgaacatgaatgataaagtgtctacagtggaattgaaaagtatattggatgaatacttgaaatctttattgaatggtgagttcgggaaggaatttaaagcgagcatagaagacaagagatttgttacgttggagggaattcgtttagtcaaggttttaaccgagagaatcaagcttccgtccttggacagtgaggaaatagccagtttaaaaggcacggaaagaaagaagtttcttgccagaaggcaccttttgaggttaaagcaaatattattggaagatttagcggacattgaaggcaactctagaaggaagggtgatagcgaaaatacaagtaccagtgaagagcgcatcatggaggacttggccgagttgatacttgaaaccagctatgacaagttttga

SEQ ID NO: 3169 - DNA, 1536 bp, Saccharomyces cerevisiae
atgttacataggataaacccagtacggttttctatgcaatcttgccaaagatacttctcgaagttggtatcgccattggaacagcataaaagtaatacttttactaatagagtcagaatccccattgaggcaggccaaccactgcatgagacaaggccgttccttataaagtcgggcgagttgacaccaggcatttcagccttggaatactatgaaagaagaattaggttggcggaaacattgcctcccaaaagttgtgtgattttagctggtaacgatatccaatttgcatctggagcagtattttatccgttccaacaggaaaatgacctgttttatcttagtggttggaatgaacctaattcggtcatgattttagaaaagccaacggatagtttaagtgatacaattttccacatgctggttccgccaaaggatgcgtttgctgaaaagtgggaaggatttaggtctggggtttatggtgttcaagaaattttcaatgccgatgaatctgcttccattaacgatttgtctaaatatttgcccaaaataattaacaggaatgatttcatctattttgatatgctatcaacttctaatcccagttcgtccaattttaaacacatcaagagcctgttagatggcagtgggaatagcaatcgatcattgaattccattgcgaataagaccatcaaacccatcagtaaaagaattgcagagttccgtaagatcaagtcccctcaagagttgagaattatgaggagagctggccaaatatcaggaagatcgttcaatcaagcctttgctaaaagatttaggaatgagagaactttagattcctttcttcattacaagtttatatccggtggttgcgataaggacgcatatatccccgtggtcgctactggttcgaattctttgtgtatccattacacaagaaacgatgatgtgatgtttgacgacgaaatggttcttgtagacgctgctggctccttgggtggttattgtgctgatatttcgagaacgtggcccaatagtgggaaattcactgatgcacaaagagatctctacgaagctgtattaaatgttcagcgtgattgcattaagttatgtaaagctagcaataactattccctccacgacatccatgaaaagagtatcacactcatgaaacaggaattgaaaaacttgggcatagataaagtctccggttggaatgttgaaaaattgtatccgcactatattggacacaatttaggtctagatgttcacgatgtgcctaaagtttccaggtacgaaccattaaaggttggacaagttattactattgaaccgggtttatatattcctaacgaggaatcatttccatcttactttagaaacgtcggaataagaattgaagatgacatagccattggtgaagatacttacactaatttaactgttgaagcagtgaaagaaattgacgatttagaaaatgtcatgcaaaatggcttatctacaaaattcgaggaggaccaagtggcaccactgtaa

SEQ ID NO: 3170 - DNA, 1536 bp, Artificial Sequence
  Description of Artificial Sequence: Synthetic polynucleotide
atgttacataggataaacccagtaagattttctatgcaatcttgccaaagatacttctccaagttggtatctccattggaacagcataaaagtaatacttttactaatagagtcagaatccccattgaggcaggccaaccattgcatgagacaaggccgttccttataaagtctggcgagttgacaccaggcatttctgccttggaatactatgaaagaagaattaggttggcggaaacattgcctcccaaaagttgtgtgattttagctggtaacgatatccaatttgcatctggagcagtattttatccgttccaacaggaaaatgacttattttatcttagtggttggaatgaacctaattctgtcatgattttagaaaagccaacggatagtttaagtgatacaattttccacatgcttgttccgccaaaggatgcgtttgctgaaaagtgggaaggatttaggtctggggtttatggtgttcaagaaattttcaatgccgatgaatctgcttccattaacgatttgtctaaatatttgcccaaaataattaacaggaatgatttcatctattttgatatgctttctacttctaatcccagttcttccaattttaaacacatcaagagcttattagatggcagtgggaatagcaatagaagtttgaattccattgcgaataagaccatcaaacccatcagtaaaagaattgcagagttccgtaagatcaagtcccctcaagagttgagaattatgaggagagctggccaaatatctggaagatctttcaatcaagcctttgctaaaagatttaggaatgagagaactttagattcctttcttcattacaagtttatatccggtggttgcgataaggacgcatatatccccgtggtcgctactggtagtaattctttgtgtatccattacacaagaaacgatgatgtgatgtttgacgacgaaatggttcttgtagacgctgctggctccttgggtggttattgtgctgatatttctagaacgtggcccaatagtgggaaattcactgatgcacaaagagatctctacgaagctgtattaaatgttcagcgtgattgcattaagttatgtaaagctagcaataactattccctccacgacatccatgaaaagagtatcacactcatgaaacaggaattgaaaaacttgggcatagataaagtctccggttggaatgttgaaaaattgtatccgcactatattggacacaatttaggtttggatgttcacgatgtgcctaaagtttccaggtacgaaccattaaaggttggacaagttattactattgaaccgggtttatatattcctaacgaggaaagttttccatcttactttagaaacgtcggaataagaattgaagatgacatagccattggtgaagatacttacactaatttaactgttgaagcagtgaaagaaattgacgatttagaaaatgtcatgcaaaatggcttatctacaaaattcgaggaggaccaagtggcaccattatga

SEQ ID NO: 3171 - DNA, 165 bp, Saccharomyces cerevisiae
atggtgcggctttcgtatctgcgtctcatccttcccccttgccgcttgtcagaactctctagcttggcgattctctatcaacctgttattccaattcttatatctaccattaccttccagcattttttcaaatgtgttcacacgccctgtaacgtttatatataa

SEQ ID NO: 3172 - DNA, 165 bp, Artificial Sequence
  Description of Artificial Sequence: Synthetic polynucleotide
atggtgaggctttcctatttacgtctcatccttcccccttgccgcttgagtgaactctctagcttggcgattctctatcaacctgttattccaattcttatatctaccattaccttccagcattttttcaaatgtgttcacacgccctgtaacgtttatatatga

SEQ ID NO: 3173 - DNA, 633 bp, Saccharomyces cerevisiae
atgcctgattcatcacattcaataagctcaaaagatgttgcatctgccatctctctctatgatcagtccatttacactaataacaggtctactaacctggacttagatcagagatcaatgagcccttccaatattgcctctggtgaagataggataacgagaacgaactcaggttgctccatcacatcaggtgcctccatgattgccacgaaggatggtattcaggggattaatgtcaaaagagatgggattccgaaatattcacttaatttattgaattccatggttcgaaaacaatatgatcacaataatggaacaaagtctcctaccccgaagactagcaatatggtagaccctaagaacaaaaagaagaacaaaaaaaagaagaatgacaaggatgacaaatacaaggtatcgcatgatcaaaccgaaaagttttacaaactcaacaccacttccaactccaatctcacctctgattctactacttcgttatcggaccagttttatttccagaaaagtaacgctgattctgctccattagacaatgcaaattacccactctccgaccattccccctccctaaactctatggataatactacaaagcatagcagcaatgtgcacacttga

SEQ ID NO: 3174 - DNA, 633 bp, Artificial Sequence
  Description of Artificial Sequence: Synthetic polynucleotide
atgcctgattcttctcattccataagcagtaaagatgttgcatctgccatctctctctatgatcagtccatttacactaataacaggtctactaacttggacttagatcagagaagtatgagcccttccaatattgcctctggtgaagataggataacgagaacgaacagtggttgctccatcacatctggtgcctccatgattgccacgaaggatggtattcaggggattaatgtcaaaagagatgggattccgaaatattctcttaatttattgaattccatggttagaaaacaatatgatcacaataatggaacaaagtctcctaccccgaagactagcaatatggtagaccctaagaacaaaaagaagaacaaaaaaaagaagaatgacaaggatgacaaatacaaggtatctcatgatcaaaccgaaaagttttacaaactcaacaccacttccaactccaatctcacctctgattctactacttctttaagtgaccagttttatttccagaaaagtaacgctgattctgctccattagacaatgcaaattacccactctccgaccattccccctccttgaactctatggataatactacaaagcatagcagcaatgtgcacacttga

SEQ ID NO: 3175 - DNA, 1884 bp, Saccharomyces cerevisiae
atgattaggtacactgttgctggccattccagaaggtgtgtagtaggagcttcgaaaagagtgggtgcaattaaatgtatcaccgtcgccgccaccaagagatttatctccaataagccaaacgaagtttttaccaagctaacgaatgacaatgatccaaagagagatgcctttttcaaatatacgtggggctcatggcttaaaaatgataagcaagaaaaggaaaaaagattcacgaagttttcgattgaaggtttaaatcgcattctcaatgacatctacattcaatctaatgaaatggctaaggcccccgacggtaagatcttaccaccagtgtttaacaagaacttgaccgtttcattggtcaataacgttgtaccaaagaatataggtaaaatcaacccaaatgaaaaagttcaagtaaccacattatctagtattcacgaaggtaaacatcacagaatatacaaggtcgacacgaatttgaacaaggcatttatcttgaggattccttatccgctggaaaatgaaaacactctatcctacagaataagaagtgaagtagcaaccatggattttgctgacttgaagttgggcatcaaagttcccaagattttttgttatggtgtcaattctttgaaccctgtaaggcagccttttgtcttacaagaatttatcgaaggagaactcttgatgaaagattgggatccattgattgaagacggttcctccaatcaaaaaaaatatgacaatgttattaaacaagtttctgattttcagtcgaagttagtgtcattgaaattaaatgcatttggatccatatattttaacaatgacttaaaagacggaaatgagaaggagtttgttaaggaagacatatacgatggggaaactaatccggatctacaaaacagatggaaaattgggccatccgtggaaagatgtctctggagacataaatctcacttggattttcataaacaaatgaaaccttttttgggaccatggccaaagaagtctccaatggatataattaaaaatactggcctattggaagctgaaaatgctaaaactagaatagccatgaaagaggcaggaagttcagctgaattgatgtatcctcgaactttgaaggagcaaataactacctatgaaaatttagctaagattgccccggatttattcaacgtcaaaacaaaggccattccaaatatgcaggaactattgtcaccacgtttgtttcatcctgatctagaccccatgaatattattgttaacaaagaagcacaagaagcctatctattagattttgaaggagcatgcacaaaacctttcattttacagaattcgccacaattcatcgcctatgatgggcccaagatttatgacttaaaggaggacataaccgattttgacaaattatctgaggcggaaaaggtgcaatatcagttcatgtacaagcgcacccgtaatcaacatcaatgggagaaaaaattaaatgacaataatcctaaattaattactgcagttgccccacctgttaagctactgagaagcccatatattgcagctgtcgaaagaaaaacggaagaagagtatttacttattgatgaatcactattgcaattgaaggaagtttgggacatctttgcccagaatgagttagtgaatcagaaaaagtttcctctaaactatagtaaagaagatattgaaagacatgttgaggatttgcaaaaattacacgaaaagctaatctctacaccatttgctgccactcaagggtggattcctcaagatatgtttgatcaactattaaattccggcagtattgttaagcaagagaacggagactacaccgtgaagcaacctgaagctaccaaataa

SEQ ID NO: 3176 - DNA, 1884 bp, Artificial Sequence
  Description of Artificial Sequence: Synthetic polynucleotide
atgattaggtacactgttgctggccattccagaaggtgtgtagtaggagcttccaaaagagtgggtgcaattaaatgtatcaccgtcgccgccaccaagagatttatctccaataagccaaacgaagtttttaccaagttgacgaatgacaatgatccaaagagagatgcctttttcaaatatacgtggggctcctggcttaaaaatgataagcaagaaaaggaaaaaagattcacgaagttttctattgaaggtttaaatcgcattctcaatgacatctacattcaatctaatgaaatggctaaggcccccgacggtaagatcttaccaccagtgtttaacaagaacttgaccgtttctttggtcaataacgttgtaccaaagaatataggtaaaatcaacccaaatgaaaaagttcaagtaaccacattatctagtattcacgaaggtaaacatcacagaatatacaaggtcgacacgaatttgaacaaggcatttatcttgaggattccttatccgttggaaaatgaaaacactttatcctacagaataagaagtgaagtagcaaccatggattttgctgacttgaagttgggcatcaaagttcccaagattttttgttatggtgtcaattctttgaaccctgtaaggcagccttttgtcttacaagaatttatcgaaggagaactcttgatgaaagattgggatccattgattgaagacggttcctccaatcaaaaaaaatatgacaatgttattaaacaagtttctgattttcagtccaagttagtgtctttgaaattaaatgcatttggatccatatattttaacaatgacttaaaagacggaaatgagaaggagtttgttaaggaagacatatacgatggggaaactaatccggatttgcaaaacagatggaaaattgggccatccgtggaaagatgtctctggagacataaatctcacttggattttcataaacaaatgaaaccttttttgggaccatggccaaagaagtctccaatggatataattaaaaatactggccttttggaagctgaaaatgctaaaactagaatagccatgaaagaggcaggaagttctgctgaattgatgtatcctcgtactttgaaggagcaaataactacctatgaaaatttagctaagattgccccggatttattcaacgtcaaaacaaaggccattccaaatatgcaggaattattgtctccacgtttgtttcatcctgatttggaccccatgaatattattgttaacaaagaagcacaagaagcctatcttttagattttgaaggagcatgcacaaaacctttcattttacagaattctccacaattcatcgcctatgatgggcccaagatttatgacttaaaggaggacataaccgattttgacaaattatctgaggcggaaaaggtgcaatatcagttcatgtacaagcgcacccgtaatcaacatcaatgggagaaaaaattaaatgacaataatcctaaattaattactgcagttgccccacctgttaagttattaagaagcccatatattgcagctgtcgaaagaaaaacggaagaagagtatttacttattgatgaatctttgttgcaattgaaggaagtttgggacatctttgcccagaatgagttagtgaatcagaaaaagtttcctttgaactatagtaaagaagatattgaaagacatgttgaggatttgcaaaaattacacgaaaagttaatctctacaccatttgctgccactcaagggtggattcctcaagatatgtttgatcaattattaaattccggcagtattgttaagcaagagaacggagactacaccgtgaagcaacctgaagctaccaaatga

SEQ ID NO: 3177 - DNA, 1410 bp, Saccharomyces cerevisiae
atgacaagcattgacattaacaacttacaaaatacctttcaacaagctatgaatatgagcggctccccaggcgctgtttgtacttcacctacgcaatctttcatgaataccgttccacagcgcttgaatgctgtaaagcacccaaaaattttgaagcctttctcaacgggtgatatgaagattttactattagaaaacgttaatcaaactgctattacaatcttcgaagagcaaggttaccaagtcgaattctataaatcttcattgcccgaggaagagttgatcgaaaagatcaaggacgttcatgctattggtatcagatcaaagactagattaacttcaaatgtcttacaacatgcgaagaatctggtttgtattggttgtttctgtatcggtaccaaccaagttgacttagactacgctaccagcagaggtattgctgttttcaactcgcctttctccaactcaagatcagtagcagaattggtcatcgctgaaatcattagtttagcaagacaactaggtgatagatctatcgaattacataccggtacatggaataaggttgctgctagatgttgggaggtaagaggaaaaactcttggtattattgggtacggtcacattggttcccaattatcagttcttgcagaagctatgggtttgcatgtgttgtactacgatattgtaactatcatggccttgggtactgccagacaagtttctacattagatgaattgttgaataaatctgattttgtgacactacatgtaccagctactcctgaaactgaaaaaatgttatctgccccacaatttgctgctatgaaggatggcgcttatgttattaatgcttcaagaggtactgtcgtggacattccatctttgatccaagccgtgaaagccaacaaaattgcaggtgctgctttggatgtttatccacatgaaccagctaagaacggtgaaggttcatttaacgatgagctaaatagctggacttctgaattagtttcattaccaaatatcatcttgacaccacacattggtggctctaccgaagaagcccaaagctcaatcggtattgaagtggctaccgcattgtccaaatacatcaatgaaggtaactctgtcggttcagtcaacttcccagaagtggcattgaaatcattgtcttacgaccaagagaacactgtgcgtgtgttatacattcaccaaaatgtaccaggtgttttgaagaccgtcaatgatattttatcgaaccataacatcgaaaagcaattttccgattcaaatggtgaaattgcttatttaatggctgatatctcttctgttgaccaaagcgatattaaagatatttatgaacaactaaatcaaacctctgctaagatctcaattagattgctatattaa

SEQ ID NO: 3178 - DNA, 1410 bp, Artificial Sequence
  Description of Artificial Sequence: Synthetic polynucleotide
atgacaagcattgacattaacaacttacaaaatacctttcaacaagctatgaatatgagcggctccccaggcgctgtttgtacttctcctacgcaatctttcatgaataccgttccacagcgcttgaatgctgtaaagcacccaaaaattttgaagcctttcagtacgggtgatatgaagattttattattagaaaacgttaatcaaactgctattacaatcttcgaagagcaaggttaccaagtcgaattctataaatcttctttgcccgaggaagagttgatcgaaaagatcaaggacgttcatgctattggtatcagatccaagactagattaacttccaatgtcttacaacatgcgaagaatttggtttgtattggttgtttctgtatcggtaccaaccaagttgacttagactacgctaccagcagaggtattgctgttttcaactctcctttctccaactctagatctgtagcagaattggtcatcgctgaaatcattagtttagcaagacaattgggtgatagatctatcgaattacataccggtacatggaataaggttgctgctagatgttgggaggtaagaggaaaaactcttggtattattgggtacggtcacattggttcccaattaagtgttcttgcagaagctatgggtttgcatgtgttgtactacgatattgtaactatcatggccttgggtactgccagacaagtttctacattagatgaattgttgaataaatctgattttgtgacattgcatgtaccagctactcctgaaactgaaaaaatgttatctgccccacaatttgctgctatgaaggatggcgcttatgttattaatgcttccagaggtactgtcgtggacattccatctttgatccaagccgtgaaagccaacaaaattgcaggtgctgctttggatgtttatccacatgaaccagctaagaacggtgaaggttcttttaacgatgagttgaatagctggacttctgaattagtttctttaccaaatatcatcttgacaccacacattggtggctctaccgaagaagcccaaagctctatcggtattgaagtggctaccgcattgtccaaatacatcaatgaaggtaactctgtcggttctgtcaacttcccagaagtggcattgaaatctttgtcttacgaccaagagaacactgtgcgtgtgttatacattcaccaaaatgtaccaggtgttttgaagaccgtcaatgatattttatctaaccataacatcgaaaagcaattttccgattctaatggtgaaattgcttatttaatggctgatatctcttctgttgaccaaagcgatattaaagatatttatgaacaattgaatcaaacctctgctaagatctctattagattgttatattga

SEQ ID NO: 3179 - DNA, 1665 bp, Saccharomyces cerevisiae
atgggtcacaagaagaacggtcacagacgccagataaaagaaagagaaaaccagaataaatttgaacgttccacatatactaataatgctaaaaataatcatactcaaacaaaggataaaaaactaagagcaggcttgaaaaaaatagacgagcaatataaaaaggcggtatcttctgctgcggcaacagattaccttttacccgagtccaatggttatttggaacctgagaatgagctagaaaagactttcaaagtgcaacaatcggaaatcaaatcgagtgtggatgtcagtactgcaaacaaagctttggatttatctttgaaggaattcggcccttatcatataaaatatgcaaaaaacggtacgcatcttttgattactggccgcaaaggtcacgtagcatctatggactggagaaagggacaacttcgtgctgagctgtttttgaatgaaacctgtcactcagcgacatatttgcaaaacgaacaatactttgctgtagcgcaaaaaaaatatacatttatttatgatcacgaaggtacagaattacatcgtttgaaacaacatattgaggcaagacatttagattttctaccatatcattacctgctcgtaactgccggtgagacaggttggttgaagtaccacgatgtttccactggccagttggtctcggaattgaggaccaaagctgggccaactatggcaatggcacaaaacccatggaatgctgtgatgcatctaggtcattcaaacggtacagtatccctctggtcaccatccatgcctgaaccattagtaaaattactttctgccagaggaccagtgaacagcattgctatcgatagaagcgggtattacatggcaaccacaggggctgataggtcgatgaaaatttgggatatcagaaacttcaagcaactacattctgtggaaagcttaccgacgccaggaacaaacgtttccatttcagatactggtctattggcattatctaggggccctcacgttacgttgtggaaggacgctttaaaattaagtggagacagtaaaccgtgcttcgggtccatgggagggaacccacatagaaacaccccttacatgtcacatttgtttgccggaaacaaagtagaaaatttgggattcgtaccatttgaagatttactaggtgtaggccatcaaacgggtattacgaatttgattgtacctggtgcaggtgaagccaattacgatgccttagaattaaacccattcgaaaccaaaaaacaaagacaggaacaggaagtcagaaccctattgaacaaactgccagcagatacaattactttagatccgaattccatcggttcagtggataaaaggtcttctaccataaggttaaacgctaaggatttggcgcaaactacaatggatgctaataataaagccaaaaccaacagcgacattccagatgtaaaacctgatgtgaaaggtaagaattcgggtttgcgttcctttttgcgtaaaaagactcaaaacgttattgatgaaagaaaattaagagtacagaaacaactggataaggagaaaaatattcgtaaaagaaaccaccaaatcaaacaaggcctaatttcagaagaccacaaggatgtcatcgaagaggcattgagcagattcggctaa

SEQ ID NO: 3180 - DNA, 1665 bp, Artificial Sequence
  Description of Artificial Sequence: Synthetic polynucleotide
atgggtcacaagaagaacggtcacagacgccagataaaagaaagagaaaaccagaataaatttgaacgttccacatatactaataatgctaaaaataatcatactcaaacaaaggataaaaaattgagagcaggcttgaaaaaaatagacgagcaatataaaaaggcggtatcttctgctgcggcaacagattaccttttacccgagtccaatggttatttggaacctgagaatgagttagaaaagactttcaaagtgcaacaaagtgaaatcaaatctagtgtggatgtcagtactgcaaacaaagctttggatttatctttgaaggaattcggcccttatcatataaaatatgcaaaaaacggtacgcatcttttgattactggccgcaaaggtcacgtagcatctatggactggagaaagggacaacttcgtgctgagttatttttgaatgaaacctgtcactctgcgacatatttgcaaaacgaacaatactttgctgtagcgcaaaaaaaatatacatttatttatgatcacgaaggtacagaattacatcgtttgaaacaacatattgaggcaagacatttagattttttaccatatcattacttgctcgtaactgccggtgagacaggttggttgaagtaccacgatgtttccactggccagttggtcagtgaattgaggaccaaagctgggccaactatggcaatggcacaaaacccatggaatgctgtgatgcatttaggtcattccaacggtacagtatccctctggtctccatccatgcctgaaccattagtaaaattactttctgccagaggaccagtgaacagcattgctatcgatagaagcgggtattacatggcaaccacaggggctgataggtctatgaaaatttgggatatcagaaacttcaagcaattgcattctgtggaaagcttaccgacgccaggaacaaacgtttccatttctgatactggtttattggcattatctaggggccctcacgttacgttgtggaaggacgctttaaaattaagtggagacagtaaaccgtgcttcgggtccatgggagggaacccacatagaaacaccccttacatgtcccatttgtttgccggaaacaaagtagaaaatttgggattcgtaccatttgaagatttattgggtgtaggccatcaaacgggtattacgaatttgattgtacctggtgcaggtgaagccaattacgatgccttagaattaaacccattcgaaaccaaaaaacaaagacaggaacaggaagtcagaacccttttgaacaaattaccagcagatacaattactttagatccgaattccatcggttctgtggataaaaggtcttctaccataaggttaaacgctaaggatttggcgcaaactacaatggatgctaataataaagccaaaaccaacagcgacattccagatgtaaaacctgatgtgaaaggtaagaattctggtttgcgttcctttttgcgtaaaaagactcaaaacgttattgatgaaagaaaattaagagtacagaaacaattggataaggagaaaaatattcgtaaaagaaaccaccaaatcaaacaaggcttaatttctgaagaccacaaggatgtcatcgaagaggcattgagcagattcggctga

SEQ ID NO: 3181 - DNA, 858 bp, Saccharomyces cerevisiae
atgtctgaattaacagaggcggaaaagcgcaggttactaagggaaaggagacagaagaagtttagcaatggaggtgccagctccaggcttaataaaatcaccgggcaggcaagcagtcatttgaacgcagaatcacctttagacgctcctagcgctgcaaagaccacaccacctgcgagtgtgcattcggctactccagatatcaaagaagatagcaacgtagcgccccaattggacctattgaaacagctcgctgccatgcaaggccaaggtacgggtaaaagtacccctcaggactcctctacgcccgatctactctcactactaagttctatgaacactggcatgcccagtgcagagggtacaccatcgtttggtcaagcggctcctgcagccccgatcaatcaagctgctttggactaccatgattacttgctgaacagactgaaagcctggaccattcttgtgaagtgggtctttttcctactaccctatctatacctaatcacaagaccaaattcctctgtgtggccggcctatgcatttactcaatcagcttggtttgcacctttgcggaacccatcgaatttcactagaatttttgccacgtttgagttcctttccatatccatctactaccagctattgaagaatgtggaacacaagagcaagattaaaaatttacaagataccaataaacttgtcaagttagtttcactggtgcccgagggagtaattcccgtcgccaacctgaaggggaagctaattacccttttgcaatactgggatctattgtccatgctaatcactgacatttcgtttgtgctaattgtcttaggcttattgacgtacttataa

SEQ ID NO: 3182 - DNA, 858 bp, Artificial Sequence
  Description of Artificial Sequence: Synthetic polynucleotide
atgtctgaattaacagaggcggaaaagcgcaggttattgagggaaaggagacagaagaagtttagcaatggaggtgccagctccaggcttaataaaatcaccgggcaggcaagcagtcatttgaacgcagaatctcctttagacgctcctagcgctgcaaagaccacaccacctgcgagtgtgcattctgctactccagatatcaaagaagatagcaacgtagcgccccaattggacttgttgaaacagctcgctgccatgcaaggccaaggtacgggtaaaagtacccctcaggactcctctacgcccgatttactctccttattaagttctatgaacactggcatgcccagtgcagagggtacaccatcttttggtcaagcggctcctgcagccccgatcaatcaagctgctttggactaccatgattacttgttgaacagattgaaagcctggaccattcttgtgaagtgggtctttttcttattgccctatttgtacttgatcacaagaccaaattcctctgtgtggccggcctatgcatttactcaatctgcttggtttgcacctttgagaaacccatccaatttcactagaatttttgccacgtttgagttcctttccatatccatctactaccagttattgaagaatgtggaacacaagagcaagattaaaaatttacaagataccaataaacttgtcaagttagtttctttggtgcccgagggagtaattcccgtcgccaacttgaaggggaagttgattacccttttgcaatactgggatttattgtccatgttgatcactgacatttcctttgtgttgattgtcttaggcttattgacgtacttatga

SEQ ID NO: 3183 - DNA, 387 bp, Saccharomyces cerevisiae
atggaagagctcatttgtacatatccatatcattcaaatcttttcatgttcctattcttgttcttttgtcccagcaaacgcgcacggcggggtcaccccaaatttttatttaccttatgttataagagcaaccatctcatccccaaacttctccctccctcccttttcacaaagagagtaatgctcaacccaagtagccatccgccttccccggattttcccacaggatcttctgcaagtcctagggtcaaactgagaccatccacgttgtgggcaccaccactcacagtatcctctgactttgcggcttccagtagttctactgcccctgtcaccgtcacagataaacctgtcacacccgctgtatcaaagcggtatcaaccttaa

SEQ ID NO: 3184 - DNA, 387 bp, Artificial Sequence
  Description of Artificial Sequence: Synthetic polynucleotide
atggaagagctcatttgtacatatccatatcattctaatcttttcatgttccttttcttgttcttttgtcccagcaaacgcgcaagaagaggtcaccccaaatttttatttaccttatgttataagagcaaccatctcatccccaaacttctccctccctcccttttcacaaagagagtaatgctcaacccaagtagccatccgccttccccggattttcccacaggatcttctgcaagtcctagggtcaaattgagaccatccacgttgtgggcaccaccactcacagtatcctctgactttgcggcttccagtagttctactgcccctgtcaccgtcacagataaacctgtcacacccgctgtatccaagagatatcaaccttga

SEQ ID NO: 3185 - DNA, 522 bp, Saccharomyces cerevisiae
atgaatttcaaggagccgctagtgaattttttaaaatgcgtcttgaataacataaactcggcattttcgcataggattgatcaattgcaattgcagctgttgcgggaaacaaatatcttgagggttttgaacaggggaatagagagactgtttagcgagaatccaaggacccattctgtttcccgtatcgtggtggaaaaagatgtgggctgcagaattggacgatatgtggaaggttctaaatatgaactggtagagtccagggcgaaagaaatacaaatatattatgaaaggatggtttttgaaataacacaagaattgaaaggggacaagcgggtgtttgccttgattgcaaatctttcccaaagatatagcgcagagaggaaagaaatacgaaatgtaaaggtgcatggtgggcggccatgtaatgagaacgaattccaggtgattccgataagattcaaacctattaatttggaaagaagagcacgactgataagaaagaagaagactattaattaa

SEQ ID NO: 3186 - DNA, 522 bp, Artificial Sequence
  Description of Artificial Sequence: Synthetic polynucleotide
atgaatttcaaggagccgttggtgaattttttaaaatgcgtcttgaataacataaactctgcattttctcataggattgatcaattgcaattgcagttattgagagaaacaaatatcttgagggttttgaacaggggaatagagagattatttagcgagaatccaaggacccattctgtttcccgtatcgtggtggaaaaagatgtgggctgcagaattggaagatatgtggaaggttctaaatatgaattggtagagtccagggcgaaagaaatacaaatatattatgaaaggatggtttttgaaataacacaagaattgaaaggggacaagagggtgtttgccttgattgcaaatctttcccaaagatatagcgcagagaggaaagaaataagaaatgtaaaggtgcatggtgggagaccatgtaatgagaacgaattccaggtgattccgataagattcaaacctattaatttggaaagaagagcaagattaataagaaagaagaagactattaattga

SEQ ID NO: 3187 - DNA, 1731 bp, Saccharomyces cerevisiae
atgtcagctactctactaaagcaaccattatgtacggttgttcggcaaggtaaacagtccaaagtgtctggattgaaccttttgagactaaaggctcatttgcacagacaacacctgtcaccttccttgataaaactacactctgaattgaaattggatgagctgcaaactgataacacccctgattacgtccgtttagttttaaggtcctctgtatacgatgttattaatgaatctccaatctctcaaggtgtaggtttgtcttcccgtctaaacacgaatgtcatcttgaaaagagaagatctattgcctgttttctctttcaagcttcgtggtgcctataacatgattgccaagttggacgattctcaaagaaaccagggtgttattgcctgttcagctgggaatcatgcccaaggtgtggcctttgctgctaaacacttgaaaatacctgctactatcgttatgcctgtttgtacaccatctattaagtatcaaaatgtctcgagattagggtctcaagtcgtcctatatggtaacgattttgacgaggctaaggctgaatgtgccaaattggctgaagagcgtggcttgacgaacattcctcctttcgatcatccttatgtcattgccggtcaaggtactgtagctatggaaatcctaagacaagtacgtaccgctaataagatcggtgctgtctttgttcccgtcggcggtggtggtttaattgctggtattggtgcttatttgaaaagggttgctcctcatatcaaaatcattggtgttgaaacttacgatgcggccactttacataattccttgcaacgcaaccagagaactcctttacctgtggtgggtacttttgccgatggtacgtctgtgcgtatgattggtgaagaaacatttagagtcgcccaacaagtggttgatgaagttgttcttgttaacactgacgaaatctgtgctgcagtaaaggatatttttgaagatactagaagtattgtagaaccatctggtgccctttcagtagccggtatgaagaaatacatctctaccgtacatccagaaattgaccacactaaaaacacctatgttcccatcctttctggtgctaacatgaactttgatagattaagatttgtttccgaacgtgctgttcttggtgaaggaaaggaagtcttcatgttagttactttacccgacgtccctggtgcgttcaagaaaatgcaaaagatcatccacccaagatctgtcactgaattctcttaccgttacaatgaacatcgtcatgagtcctctagtgaagtgcccaaggcttacatttacacttctttcagcgtcgttgacagagaaaaggaaatcaagcaagttatgcaacagttgaatgctttaggttttgaagctgtggatatctccgataacgaattggctaaatctcatggtagatacttggttggtggtgcttctaaggttcctaatgaaagaattatttcatttgaattccctgaaagaccaggtgccttgactaggttccttggaggcctaagcgattcttggaatcttactttattccattatagaaaccatggtgccgatatcggtaaggttttagctggtatttccgttcctccaagggaaaacttaaccttccaaaaattcttggaagatttaggctacacttatcatgatgaaactgataacactgtttatcaaaaattcttgaaatattaa

SEQ ID NO: 3188 - DNA, 1731 bp, Artificial Sequence
  Description of Artificial Sequence: Synthetic polynucleotide
atgtctgctactttattgaagcaaccattatgtacggttgttcgtcaaggtaaacagtccaaagtgtctggattgaaccttttgagattaaaggctcatttgcacagacaacacttatctccttccttgataaaattacactctgaattgaaattggatgagttacaaactgataacacccctgattacgtccgtttagttttaaggtcctctgtatacgatgttattaatgaatctccaatctctcaaggtgtaggtttgtcttcccgtttgaacacgaatgtcatcttgaaaagagaagatttattgcctgttttctctttcaagcttcgtggtgcctataacatgattgccaagttggacgattctcaaagaaaccagggtgttattgcctgttctgctgggaatcatgcccaaggtgtggcctttgctgctaaacacttgaaaatacctgctactatcgttatgcctgtttgtacaccatctattaagtatcaaaatgtctctagattagggtctcaagtcgtcctttatggtaacgattttgacgaggctaaggctgaatgtgccaaattggctgaagagcgtggcttgacgaacattcctcctttcgatcatccttatgtcattgccggtcaaggtactgtagctatggaaatcttaagacaagtacgtaccgctaataagatcggtgctgtctttgttcccgtcggcggtggtggtttaattgctggtattggtgcttatttgaaaagggttgctcctcatatcaaaatcattggtgttgaaacttacgatgcggccactttacataattccttgcaacgcaaccagagaactcctttacctgtggtgggtacttttgccgatggtacgtctgtgcgtatgattggtgaagaaacatttagagtcgcccaacaagtggttgatgaagttgttcttgttaacactgacgaaatctgtgctgcagtaaaggatatttttgaagatactagaagtattgtagaaccatctggtgccctttctgtagccggtatgaagaaatacatctctaccgtacatccagaaattgaccacactaaaaacacctatgttcccatcctttctggtgctaacatgaactttgatagattaagatttgtttccgaacgtgctgttcttggtgaaggaaaggaagtcttcatgttagttactttacccgacgtccctggtgcgttcaagaaaatgcaaaagatcatccacccaagatctgtcactgaattctcttaccgttacaatgaacatcgtcatgagtcctctagtgaagtgcccaaggcttacatttacacttctttcagcgtcgttgacagagaaaaggaaatcaagcaagttatgcaacagttgaatgctttaggttttgaagctgtggatatctccgataacgaattggctaaatctcatggtagatacttggttggtggtgcttctaaggttcctaatgaaagaattatttcctttgaattccctgaaagaccaggtgccttgactaggttccttggaggcttaagcgattcttggaatcttactttattccattatagaaaccatggtgccgatatcggtaaggttttagctggtatttccgttcctccaagggaaaacttaaccttccaaaaattcttggaagatttaggctacacttatcatgatgaaactgataacactgtttatcaaaaattcttgaaatattga

SEQ ID NO: 3189 - DNA, 1731 bp, Saccharomyces cerevisiae
atgttgaaatatcgtacattgtctcgatcatgtcatatttttcacccaaaatctctttcaaacaataccctgaaatctgaaactactcaggaactacttcaaactgtgggattcgtaagacgctcgcaggttgggttgttccaatggctgccacttggactcagatcacttaataaagtatcaaatgctatacggaaccgaatggatagcgatggtggagccatagaagtttcattaagtgctatctcgtcaaaagcattatggcaagcgacggatcgctggaacaacagtgaattatttaaattgaaggattctaaagggaagcagtactgcttgacagcaacatgtgaggaggacattacagatttaatgaaaaattacattgctagttataaagatatgcctatcacaatataccaaatgacaagaaaatatagggacgaaatcagacccaggggtggtatcttacgtggacgagaatttttaatgaaggatgcgtattcgtttgctagtaatgaagaggatgcgtttgccagttttcaaaagctagatgatacttacaataagatattcaaagatctgaaaatcccctttgttagtgcgtgggcagatagcggtgacattggcggtgagtttagcaaagaatttcacctgattcatgaatccggtgaggataccttgatgagttgcaaacattgcggcgatatatcaactttggatatgtcccagtcatatcctgaaaaagatggtcaatattcaggtgatgtcgattgtaagtatgctttgactaaggatcactcaacattgatatgtttctactatccaaaggatagacaattgaattggaatttagcattaaatgctatggataaagacatcgatttgacgttgaggaacaaaccaaatgatcacgtcttacaagtctacgaaaaagataacgaagatattatgttcagtaaaatattaagagttatggactgtagattgaattcaaaatccaactttcctgattttccactaaagaaatacctgaaaaataattttggtcaaatcagtgacgtttctatagtggatgcacaggaaaacgaaatctgtggcaaatgtgaggaaggaaggttagaacctctcaaaagtattgaggtaggccacatatttttgctgggtaataaatactcgaagccgttaaatgtcaagtttgtcgacaaagaaaacaaaaacgagacatttgtccatatgggttgctacggcattggagtaagcaggctagttggagcaattgctgaactagggcgtgattccaatggatttagatggcccgctataatggctccatacaaagtatcgatttgtactggaccaaataatcctgaaaactcacagaggttacaggatgttaaatcagagctgctgaatgatcctaccatgcaaaatttacagaatgacatccttgaccagtttaatgaaaaactgggtataggtgctagaataaaattatcgcatgccatgggtataccattatgtgttatcgtgggctcaaaaagttggcccaatgtggaaattgaagttcgtggcataagatggggagaaaaggacctgtggagaaagcagtttgaaaaaagatgtagcgaactgcaatggaagtgtaccaaaaatgaacatggaattgagaaacatactgttccaatccagcatttagcggaagtcattggcgtattgctaaaggatatgtag

SEQ ID NO: 3190 - DNA, 1731 bp, Artificial Sequence
  Description of Artificial Sequence: Synthetic polynucleotide
atgttgaaatatcgtacattgtctagatcttgtcatatttttcacccaaaatctctttccaacaataccttgaaatctgaaactactcaggaattgcttcaaactgtgggattcgtaagacgctctcaggttgggttgttccaatggttaccacttggactcagatctcttaataaagtatctaatgctataagaaacagaatggatagcgatggtggagccatagaagtttctttaagtgctatctcttctaaagcattatggcaagcgacggatcgctggaacaacagtgaattatttaaattgaaggattctaaagggaagcagtactgcttgacagcaacatgtgaggaggacattacagatttaatgaaaaattacattgctagttataaagatatgcctatcacaatataccaaatgacaagaaaatatagggacgaaatcagacccaggggtggtatcttacgtggaagagaatttttaatgaaggatgcgtattcttttgctagtaatgaagaggatgcgtttgccagttttcaaaagttggatgatacttacaataagatattcaaagatttgaaaatcccctttgttagtgcgtgggcagatagcggtgacattggcggtgagtttagcaaagaatttcacttgattcatgaatccggtgaggataccttgatgagttgcaaacattgcggcgatatatctactttggatatgtcccagagttatcctgaaaaagatggtcaatattctggtgatgtcgattgtaagtatgctttgactaaggatcactctacattgatatgtttctactatccaaaggatagacaattgaattggaatttagcattaaatgctatggataaagacatcgatttgacgttgaggaacaaaccaaatgatcacgtcttacaagtctacgaaaaagataacgaagatattatgttcagtaaaatattaagagttatggactgtagattgaattctaaatccaactttcctgattttccattgaagaaatacttgaaaaataattttggtcaaatcagtgacgtttctatagtggatgcacaggaaaacgaaatctgtggcaaatgtgaggaaggaaggttagaacctctcaaaagtattgaggtaggccacatatttttgttgggtaataaatactccaagccgttaaatgtcaagtttgtcgacaaagaaaacaaaaacgagacatttgtccatatgggttgctacggcattggagtaagcaggttggttggagcaattgctgaattggggcgtgattccaatggatttagatggcccgctataatggctccatacaaagtatctatttgtactggaccaaataatcctgaaaactctcagaggttacaggatgttaaaagtgagttattgaatgatcctaccatgcaaaatttacagaatgacatccttgaccagtttaatgaaaaattgggtataggtgctagaataaaattatctcatgccatgggtataccattatgtgttatcgtgggctctaaaagttggcccaatgtggaaattgaagttcgtggcataagatggggagaaaaggacttatggagaaagcagtttgaaaaaagatgtagcgaattacaatggaagtgtaccaaaaatgaacatggaattgagaaacatactgttccaatccagcatttagcggaagtcattggcgtattgttgaaggatatgtga

SEQ ID NO: 3191 - DNA, 249 bp, Saccharomyces cerevisiae
atgtcaagcccaactcctccaggtggtcaacgtactttgcaaaagagaaaacagggaagttcacaaaaagttgcggcatccgctccaaagaaaaacacgaacagcaataattcgattttgaagatttattctgatgaggctacgggactaagagtagatcccttagttgtgttgtttctagcggtcggtttcatcttttctgttgttgcattacatgttatttctaaagttgccggtaagttattttaa

SEQ ID NO: 3192 - DNA, 249 bp, Artificial Sequence
  Description of Artificial Sequence: Synthetic polynucleotide
atgtctagcccaactcctccaggtggtcaacgtactttgcaaaagagaaaacagggaagttctcaaaaagttgcggcatccgctccaaagaaaaacacgaacagcaataattctattttgaagatttattctgatgaggctacgggattaagagtagatcccttagttgtgttgtttttggcggtcggtttcatcttttctgttgttgcattacatgttatttctaaagttgccggtaagttattttga

SEQ ID NO: 3193 - DNA, 2013 bp, Saccharomyces cerevisiae
atgtccatttcaaccagtttgaactcagcttccattcatttgagcagcatggacacccatcctcagctacactcactcactcgtcagccacactcgtcgtcaacagctatgtccaagaacgaagcccaggaatcttcgccctctctgccagcttcctcttcatcgtcgacttcggcatcggcatctgcgtcttccaagaattcgagcaagaacccttcctcttgggaccctcaagatgatctgctgctacgtcatttaaaggaggtcaagaaaatgggctggaaggatatttcgcaatacttcccaaacaggactcctaacgcgtgtcagttcagatggagaaggttgaagtctggtaacttgaagtcgaacaagactgctttgatcgacatcaacacctatacgggcccactcaagatcacccacggcgatgagactgccaacgctcagcaaaagcccagcaagaaggtagaagaaaacgtattaacggaagatactgctgagttcactacaacgtcatccatcccgattccctccagaaagacctcgttgccttcgtttcacgcatcgatgtcattttctcaatctccgtccaatgtgactcccactacgattgtctcaaacgctgcttcttccatgccgttcgctcctcccacgctgccggccgcactccctcatcatcctcatcaacacctacaccaccatccccatcataagactctaaagccaaggtcaaactctcactccttcaccaattctttgaaccaagaccccatcgttcggtctaatgatgaggagaagtatggattcattcctaaagtattcgttagatccagaagaagttcgtttgcctatccacaacaggtagcaataaccactactccgtcttctccaaactcttcgcatgtcttactaagctcaaagtcaagaaggggctcgcttgcgaattggtccagaagatcatcgtttaatgtttcaagtaacaacacttcaagacggtcttcaatgattcttgcaccaaattccgtgtcaaacatattcaatgtcaacaatagcggcagtaacactgcttctacttctaataccaactcaagaagggaatctgtcatcaagaaggaatttcagcaaagattaaacaacttaagtaacagtggaggtcctacctccaacaacgggcccattttccccaactcttatacctttatggatctcccacattcttcatcggtgtcatcgtcatccactttgcataagtctaaacgaggttcgttttctggccattctatgaagtcatcgtgtaatccgactaatctatggtcaaaagatgaagacgctttgctaatggaaaacaaaaagagaaacctatccgttatggaactatccattcttttgccgcagagaactgaggtggaaattcaatggagattaaacgccttgtcaagtgatgcggatatgttgtctcctacacattcacctcaaaaaactctgtccaagaaaacttgtccaagaatgttcaaaagtggttctaccactgatgatgacaaaggtagcgacaaagaggacgttatgggtgatggtagtaacgatgatgacgaagataatgtagacccgctgcaccgtgctaaacaatccagtaacaagactgtcttttcatccagcagttccaacatatcctccaaagacgtttcaccggatccgatcttttcaccggatcccgcagatgattcatcgaatacttctgatgctggttctaggtgcaccataacctccgataccagctcctcggctgcaaccatgaatcgcacccctaattccaaaaacccgcaagatattgctttgttaaacaactttcgttctgaagccattactccgagaccgaagccttcttccacaactacatccatcactaccgaaaccaccaataacatgataaaccactctagttctacaactactaccacaaacaacagtccgctgccaagcataaacactatcttcaaggatatgctgtga

SEQ ID NO: 3194 - DNA, 2013 bp, Artificial Sequence
  Description of Artificial Sequence: Synthetic polynucleotide
atgtccatttctaccagtttgaactctgcttccattcatttgagcagcatggacacccatcctcagttgcacagtctcactcgtcagccacactcttcttctacagctatgtccaagaacgaagcccaggaatcttctccctctttaccagcttcctcttcttcttctacttctgcatctgcatctgcgtcttccaagaatagtagcaagaacccttcctcttgggaccctcaagatgatttattattacgtcatttaaaggaggtcaagaaaatgggctggaaggatatttctcaatacttcccaaacaggactcctaacgcgtgtcagttcagatggagaaggttgaagtctggtaacttgaagtctaacaagactgctttgatcgacatcaacacctatacgggcccactcaagatcacccacggcgatgagactgccaacgctcagcaaaagcccagcaagaaggtagaagaaaacgtattaacggaagatactgctgagttcactacaacgtcttccatcccgattccctccagaaagacctctttgccttcttttcacgcatctatgagtttttctcaatctccgtccaatgtgactcccactacgattgtctccaacgctgcttcttccatgccgttcgctcctcccacgttgccggccgcactccctcatcatcctcatcaacacttgcaccaccatccccatcataagactttgaagccaaggtctaactctcactccttcaccaattctttgaaccaagaccccatcgttagatctaatgatgaggagaagtatggattcattcctaaagtattcgttagatccagaagaagttcttttgcctatccacaacaggtagcaataaccactactccgtcttctccaaactcttctcatgtcttattaagctctaagtctagaaggggctctcttgcgaattggtccagaagatcttcttttaatgtttctagtaacaacacttccagaagatcttctatgattcttgcaccaaattccgtgtctaacatattcaatgtcaacaatagcggcagtaacactgcttctacttctaataccaactctagaagggaatctgtcatcaagaaggaatttcagcaaagattaaacaacttaagtaacagtggaggtcctacctccaacaacgggcccattttccccaactcttatacctttatggatctcccacattcttcttctgtgtcttcttcttccactttgcataagtctaaaagaggttctttttctggccattctatgaagtcttcttgtaatccgactaatttatggtccaaagatgaagacgctttgttgatggaaaacaaaaagagaaacctttccgttatggaattatccattcttttgccgcagagaactgaggtggaaattcaatggagattaaacgccttgagcagtgatgcggatatgttgtctcctacacattctcctcaaaaaactttatccaagaaaacttgtccaagaatgttcaaaagtggttctaccactgatgatgacaaaggtagcgacaaagaggacgttatgggtgatggtagtaacgatgatgacgaagataatgtagacccgttgcaccgtgctaaacaatccagtaacaagactgtcttttcttccagcagttccaacatatcctccaaagacgtttctccggatccgatcttttctccggatcccgcagatgattcttccaatacttctgatgctggttctaggtgcaccataacctccgataccagctcctctgctgcaaccatgaatcgcacccctaattccaaaaacccgcaagatattgctttgttaaacaactttcgttctgaagccattactccgagaccgaagccttcttccacaactacatccatcactaccgaaaccaccaataacatgataaaccactctagttctacaactactaccacaaacaacagtccgttaccaagcataaacactatcttcaaggatatgctttga

SEQ ID NO: 3195 - DNA, 1395 bp, Saccharomyces cerevisiae
atgggacaaattctatcaaacccggtaattgataaagagagccactccggtgctgactccttgaccgcgtttggactgtgtgcaatgcaagggtggcggatgtcaatggaggattcacacattctagagcctaatgttttgacaaagtccgataaggaccatattgcattttacggtatattcgatggtcatggtggcgctaaagtagcagaatactgtggtaataaaatagtggagatcctgcaagagcagaaatcgttccatgaaggaaatttaccaagggctttgattgatactttcataaacacagacgtgaaactgttacaagatcctgtgatgaaagaagaccatagcggatgtacggctacatccatattagtatcaaagtcccagaacttgttagtatgtggtaacgctggtgacagtagaaccgtactcgccaccgacgggaacgcaaaggcattatcatacgatcacaagcccactctagcaagcgaaaaatcacgtattgtggcagctgatggcttcgtagaaatggatagggtcaacggtaacttggcgctctctcgtgccattggtgattttgagttcaaatccaaccccaaattgggccccgaggagcaaatagtgacatgtgttccggacattctcgagcattctctagattacgatagggacgagtttgtaatcttagcctgtgatggtatctgggattgtttgacttcccaagattgtgtggacttggttcatctcggccttcgcgaaggcaagacattgaatgaaatttcttcgcggatcatcgatgtctgttgtgctcccaccacagaggggacgggtattggatgcgacaacatgagtatagtggttgtcgcgctgctgaaagaaggtgaagacgtcgctcaatggagcgaccgtatgaagtccaaggcccaccgcacatcagtgcgttcttttgcagacaagagaagaagggtgtttagttactacgatttttccaaatgtaacgacgaacaggtgttcgctatcactacgaagaaacctcaggacaaattcactcgcgaccacgaagccgctgtggcctcggtgactgccgccgataacgacgatccaatggacatagacgacacggacgctgacacagatgcagaaaatcttgacccttccagccaatccaagagcaagacctccggccccattgatctagcatccttggaggcgctacttggtgctacaggaggagtgaagacagacagcaacgggaacaaagtcacctacactcttccccagtctgccttggcccaactgctccaaaccatgggccatgacccggcttcctcccatcccgagaatgacagtaacactgaccacaaggccggccgttcccacttgcaatga

SEQ ID NO: 3196 - DNA, 1395 bp, Artificial Sequence
  Description of Artificial Sequence: Synthetic polynucleotide
atgggacaaattttatctaacccggtaattgataaagagagccactccggtgctgactccttgaccgcgtttggattatgtgcaatgcaagggtggagaatgtccatggaggattctcacattttagagcctaatgttttgacaaagtccgataaggaccatattgcattttacggtatattcgatggtcatggtggcgctaaagtagcagaatactgtggtaataaaatagtggagatcttgcaagagcagaaatctttccatgaaggaaatttaccaagggctttgattgatactttcataaacacagacgtgaaattattacaagatcctgtgatgaaagaagaccatagcggatgtacggctacatccatattagtatccaagtcccagaacttgttagtatgtggtaacgctggtgacagtagaaccgtactcgccaccgacgggaacgcaaaggcattatcttacgatcacaagcccactttggcaagcgaaaaatctcgtattgtggcagctgatggcttcgtagaaatggatagggtcaacggtaacttggcgctctctcgtgccattggtgattttgagttcaaatccaaccccaaattgggccccgaggagcaaatagtgacatgtgttccggacattctcgagcattctttagattacgatagggacgagtttgtaatcttagcctgtgatggtatctgggattgtttgacttcccaagattgtgtggacttggttcatctcggccttcgcgaaggcaagacattgaatgaaatttcttccagaatcatcgatgtctgttgtgctcccaccacagaggggacgggtattggatgcgacaacatgagtatagtggttgtcgcgttattgaaagaaggtgaagacgtcgctcaatggagcgaccgtatgaagtccaaggcccaccgcacatctgtgcgttcttttgcagacaagagaagaagggtgtttagttactacgatttttccaaatgtaacgacgaacaggtgttcgctatcactacgaagaaacctcaggacaaattcactcgcgaccacgaagccgctgtggcctctgtgactgccgccgataacgacgatccaatggacatagacgacacggacgctgacacagatgcagaaaatcttgacccttccagccaatccaagagcaagacctccggccccattgatttggcatccttggaggcgttacttggtgctacaggaggagtgaagacagacagcaacgggaacaaagtcacctacactcttccccagtctgccttggcccaattgctccaaaccatgggccatgacccggcttcctcccatcccgagaatgacagtaacactgaccacaaggccggccgttcccacttgcaatga

SEQ ID NO: 3197 - DNA, 1524 bp, Saccharomyces cerevisiae
atgaccgcttccatcaaaattcaaccggatattgactctctaaagcaattacagcagcaaaatgacgatagttccataaatatgtatcccgtgtatgcgtatttgccatcattggatctgactcctcacgtggcatatctaaaattggcacaattgaacaaccctgatagaaaggaatcatttctgttggaaagtgctaagacaaataatgaattagatcgttattcattcataggtatctcgccacgcaagaccatcaaaaccggtcctactgaaggcattgaaacagatcctttggaaattttggaaaaggagatgtctacctttaaagtagccgaaaatgttcctggtttaccgaaattaagtggtggtgctattggttatatttcttatgactgtgttcgttatttcgagccaaaaacaagaaggcctttgaaagatgtcctaagacttccagaggcatatttaatgctttgtgataccattattgcctttgataatgtttttcagagatttcaaatcattcataacattaataccaatgaaacttcgttggaggaaggttaccaagctgcagcacaaataatcactgatatcgtatcaaagctaaccgacgattcctcgccaataccatatccagaacaacctcctattaaattgaatcaaacttttgaatcgaatgtgggcaaggaaggttacgaaaatcacgtctccactttgaagaagcatattaagaaaggtgatattattcaaggtgtgccatcgcaaagagtggcaaggccaacttcgttacatcctttcaatatttacagacatttacgtacagtgaacccatctccttacctgttttatattgattgtttggatttccaaatcattggtgcatctccagaattgttgtgcaaatcggattccaaaaatagagtcattacccatccaattgctggtactgtcaaacgtggggctactactgaagaggatgatgctttagcggaccaattacgtggctcgttaaaagaccgtgcagaacatgttatgctggtagatttagcaagaaacgatattaacagaatttgtgacccattaacaacaagtgtcgataaactgttaactattcaaaaattttctcatgtccaacatctggtttctcaagtcagcggtgttctccgcccagaaaagacaagatttgatgcattcagatcgattttccctgcaggtactgtcagtggtgctccaaaggttagagccatggaattgattgccgaactagaaggagaaaggcgtggggtttatgcaggcgccgtaggtcattggtcatacgacggtaaaacaatggacaattgtatcgctttaaggactatggtctataaagatggcattgcttacttgcaagctggcggtggtattgtttacgattcagatgagtacgatgaatatgtcgaaaccatgaataaaatgatggccaatcacagtactattgtgcaagcagaagaattgtgggccgatatcgtaggatcagcttaa

SEQ ID NO: 3198 - DNA, 1524 bp, Artificial Sequence
  Description of Artificial Sequence: Synthetic polynucleotide
atgaccgcttccatcaaaattcaaccggatattgactctttgaagcaattacagcagcaaaatgacgatagttccataaatatgtatcccgtgtatgcgtatttgccatctttggatttgactcctcacgtggcatatttgaaattggcacaattgaacaaccctgatagaaaggaaagttttttattggaaagtgctaagacaaataatgaattagatcgttattctttcataggtatctctccacgcaagaccatcaaaaccggtcctactgaaggcattgaaacagatcctttggaaattttggaaaaggagatgtctacctttaaagtagccgaaaatgttcctggtttaccgaaattaagtggtggtgctattggttatatttcttatgactgtgttcgttatttcgagccaaaaacaagaaggcctttgaaagatgtcttgagacttccagaggcatatttaatgctttgtgataccattattgcctttgataatgtttttcagagatttcaaatcattcataacattaataccaatgaaacttctttggaggaaggttaccaagctgcagcacaaataatcactgatatcgtatccaagttgaccgacgattcctctccaataccatatccagaacaacctcctattaaattgaatcaaacttttgaaagtaatgtgggcaaggaaggttacgaaaatcacgtctccactttgaagaagcatattaagaaaggtgatattattcaaggtgtgccatctcaaagagtggcaaggccaacttctttacatcctttcaatatttacagacatttacgtacagtgaacccatctccttacttgttttatattgattgtttggatttccaaatcattggtgcatctccagaattgttgtgcaaatctgattccaaaaatagagtcattacccatccaattgctggtactgtcaaacgtggggctactactgaagaggatgatgctttagcggaccaattacgtggctctttaaaagaccgtgcagaacatgttatgttggtagatttagcaagaaacgatattaacagaatttgtgacccattaacaacaagtgtcgataaattattaactattcaaaaattttctcatgtccaacatttggtttctcaagtcagcggtgttctccgcccagaaaagacaagatttgatgcattcagatctattttccctgcaggtactgtcagtggtgctccaaaggttagagccatggaattgattgccgaattggaaggagaaaggcgtggggtttatgcaggcgccgtaggtcattggagttacgacggtaaaacaatggacaattgtatcgctttaaggactatggtctataaagatggcattgcttacttgcaagctggcggtggtattgtttacgattctgatgagtacgatgaatatgtcgaaaccatgaataaaatgatggccaatcacagtactattgtgcaagcagaagaattgtgggccgatatcgtaggatctgcttga

SEQ ID NO: 3199 - DNA, 2304 bp, Saccharomyces cerevisiae
atggttcaatctgctgtcttagggttcccaagaatcggtccaaacagagaattaaagaaggccactgaaggttactggaacggtaaaatcactgtcgatgaattattcaaggtcggtaaggatttgagaactcaaaactggaagttgcaaaaggaggctggtgttgatatcatcccatccaatgacttctccttttacgaccaagttttggatttgtctttgttgttcaatgtcattccagaccgttacactaagtacgatctatctccaatcgacactttgtttgctatgggtagaggtttacaaagaaaggccactgaaactgaaaaggctgtcgacgtcactgctttggaaatggttaaatggttcgactctaactaccattacgttagaccaactttctccaagaccactcaatttaagttgaacggccaaaagccagttgacgaatttttggaagccaaggagttaggtattcatactagacctgtcttgttgggtccagtttcttacttattcttgggtaaggctgacaaggattctctagatttggaaccattgtccctattggaacaattgttgcctctatacactgaaatcctatctaaattggcttctgctggtgccactgaagttcaaattgacgaacctgtcttagttttggacttgcctgccaacgcccaagccgccattaagaaggcttacacttacttcggtgaacaaagcaatctaccaaagattactttggctacttacttcggtaccgttgtccctaacttagacgccatcaagggcttgccagttgctgccttacacgttgactttgttagagctccagaacaatttgatgaagtcgttgccgccattggtaacaaacaaaccttgtccgttggtattgttgatggtagaaacatttggaagaatgatttcaagaagtcttccgctatcgttaacaaggctattgaaaagttgggtgctgacagagtcgttgttgccacttcttcttctctattgcacacaccagttgatttgaacaacgaaaccaagttggacgctgaaatcaagggctttttctctttcgccactcaaaaattggatgaagttgttgtgatcaccaagaacgtttccggtcaagacgttgctgctgccctagaagctaacgctaaatctgttgaatccagaggtaaatccaagtttatccacgatgctgccgttaaggccagagttgcctctatcgacgaaaaaatgtctactagagcagctccatttgaacaaagattgcctgaacaacaaaaagtcttcaacttgccattgttcccaacaacaactattggttccttccctcaaaccaaggacatcagaattaacagaaacaaattcaacaagggcaccatctctgctgaagaatatgaaaaattcatcaattctgaaattgaaaaggtcatcagattccaagaagaaattggtttggatgtcttagtccacggtgaaccagaaagaaacgatatggttcaatacttcggtgaacaaatcaacggttatgctttcactgttaacggttgggttcaatcttacggttccagatatgtcagaccaccaattattgttggtgacttgtccagaccaaaggctatgtccgtcaaggaatctgtttacgctcaatccatcacttctaagccagtaaagggtatgttgactggtccaattacctgtttgagatggtctttcccaagagacgatgtcgaccaaaaaactcaagctatgcaattagctttggctttgagagatgaagtcaatgatttggaagctgccggtatcaaggttatccaagttgatgaaccagctttaagagaaggtttaccattgagagaaggtactgagagatctgcttactacacctgggctgccgaagctttcagagttgctacttctggtgttgctaacaagactcaaatacactctcatttctgttactctgacttggatccaaaccatatcaaggctttggatgctgatgttgtttccatcgaattctctaagaaggacgatgctaactacattgctgaattcaaaaactatccaaaccacattggtctaggtttattcgatattcattctccaagaattccatcaaaggatgaatttatcgccaagatttcaaccatcttgaagagctacccagctgaaaagttctgggttaacccagattgtggtttgaagactagaggctgggaagaaactagattgtctttgactcatatggtcgaagccgccaagtacttccgtgaacaatacaagaattaa

SEQ ID NO: 3200 - DNA, 2304 bp, Artificial Sequence
  Description of Artificial Sequence: Synthetic polynucleotide
atggttcaatctgctgtcttagggttcccaagaatcggtccaaacagagaattaaagaaggccactgaaggttactggaacggtaaaatcactgtcgatgaattattcaaggtcggtaaggatttgagaactcaaaactggaagttgcaaaaggaggctggtgttgatatcatcccatccaatgacttctccttttacgaccaagttttggatttgtctttgttgttcaatgtcattccagaccgttacactaagtacgatttatctccaatcgacactttgtttgctatgggtagaggtttacaaagaaaggccactgaaactgaaaaggctgtcgacgtcactgctttggaaatggttaaatggttcgactctaactaccattacgttagaccaactttctccaagaccactcaatttaagttgaacggccaaaagccagttgacgaatttttggaagccaaggagttaggtattcatactagacctgtcttgttgggtccagtttcttacttattcttgggtaaggctgacaaggattctttagatttggaaccattgtccttattggaacaattgttgcctttgtacactgaaatcctttctaaattggcttctgctggtgccactgaagttcaaattgacgaacctgtcttagttttggacttgcctgccaacgcccaagccgccattaagaaggcttacacttacttcggtgaacaaagcaatttaccaaagattactttggctacttacttcggtaccgttgtccctaacttagacgccatcaagggcttgccagttgctgccttacacgttgactttgttagagctccagaacaatttgatgaagtcgttgccgccattggtaacaaacaaaccttgtccgttggtattgttgatggtagaaacatttggaagaatgatttcaagaagtcttccgctatcgttaacaaggctattgaaaagttgggtgctgacagagtcgttgttgccacttcttcttctttgttgcacacaccagttgatttgaacaacgaaaccaagttggacgctgaaatcaagggctttttctctttcgccactcaaaaattggatgaagttgttgtgatcaccaagaacgtttccggtcaagacgttgctgctgccttggaagctaacgctaaatctgttgaatccagaggtaaatccaagtttatccacgatgctgccgttaaggccagagttgcctctatcgacgaaaaaatgtctactagagcagctccatttgaacaaagattgcctgaacaacaaaaagtcttcaacttgccattgttcccaacaacaactattggttccttccctcaaaccaaggacatcagaattaacagaaacaaattcaacaagggcaccatctctgctgaagaatatgaaaaattcatcaattctgaaattgaaaaggtcatcagattccaagaagaaattggtttggatgtcttagtccacggtgaaccagaaagaaacgatatggttcaatacttcggtgaacaaatcaacggttatgctttcactgttaacggttgggttcaatcttacggttccagatatgtcagaccaccaattattgttggtgacttgtccagaccaaaggctatgtccgtcaaggaatctgtttacgctcaatccatcacttctaagccagtaaagggtatgttgactggtccaattacctgtttgagatggtctttcccaagagacgatgtcgaccaaaaaactcaagctatgcaattagctttggctttgagagatgaagtcaatgatttggaagctgccggtatcaaggttatccaagttgatgaaccagctttaagagaaggtttaccattgagagaaggtactgagagatctgcttactacacctgggctgccgaagctttcagagttgctacttctggtgttgctaacaagactcaaatacactctcatttctgttactctgacttggatccaaaccatatcaaggctttggatgctgatgttgtttccatcgaattctctaagaaggacgatgctaactacattgctgaattcaaaaactatccaaaccacattggtttaggtttattcgatattcattctccaagaattccatctaaggatgaatttatcgccaagatttctaccatcttgaagagctacccagctgaaaagttctgggttaacccagattgtggtttgaagactagaggctgggaagaaactagattgtctttgactcatatggtcgaagccgccaagtacttccgtgaacaatacaagaattga

SEQ ID NO: 3201 - DNA, 378 bp, Saccharomyces cerevisiae
atgcctagtaaagatccagagagcgttatagacaaagaaatacggaagatatcagcaagaaatgatgagcttatcaaacaggatgggactctaaaaagggaatacactacattattgagaaaagtatcgagcgtgataacggtactgaacagtattgatgatgcagatactggttctgctgaaacggaactcccacgcttaatatctcaagcaacagtagagaaagtacccgaattgaagtggtacaatgatcagatatcactgattacagaaaagttggaggacgatgaagatattgaggttcccgaggagctaatggatgcttatactctgtacaaggaaaccccattattatataatgatacgcacacaccataa

SEQ ID NO: 3202 - DNA, 378 bp, Artificial Sequence
  Description of Artificial Sequence: Synthetic polynucleotide
atgcctagtaaagatccagagagcgttatagacaaagaaataagaaagatatctgcaagaaatgatgagcttatcaaacaggatgggactttgaaaagggaatacactacattattgagaaaagtatccagcgtgataacggtattgaacagtattgatgatgcagatactggttctgctgaaacggaactcccacgcttaatatctcaagcaacagtagagaaagtacccgaattgaagtggtacaatgatcagatatctttgattacagaaaagttggaggacgatgaagatattgaggttcccgaggagttgatggatgcttatactttgtacaaggaaaccccattattatataatgatacgcacacaccatga

SEQ ID NO: 3203 - DNA, 4293 bp, Saccharomyces cerevisiae
atgagcatacctcacagtgcaaaacagagtagccctctctcaagtcggcgccggtcagtaactaatactactccactgttaacccctagacatagccgtgataactcgagcacccaaatatcaagcgccaagaacatcacctccagcagcccatcaaccataacgaatgaaagttccaaaagaaataaacaaaatctggtactctcgacctcatttatctccaccaagaggctagaaaatagtgcaccttcaccgaccagtcccttaatggcaagacgaacgagaagtactatgaccaaggcacttttaaatcttaaagcagaaataaacaaccaatatcaagaattagctcgattgcgcaagaaaaaagacgatatcgaacatcttcgggattctacaatatctgatatatactctggatcttactctacgaatcatttacaaaagcactcgatgaggattagagcgaatactcaacttagagaaattgacaattcaataaaaagagttgagaagcatatttttgacctcaagcaacagttcgacaagaaaaggcaaagatcactcacaacatccagctcaataaaggctgacgtggggagcatcaggaatgatgatggccaaaataacgatagtgaagaattgggcgaccatgatagtttgacagatcaagttactcttgatgatgaatatcttacgactcccacttctggaactgagcgtaatagtcagcagaacttaaatcgtaatagtaccgtcaactcacggaataacgaaaatcattctacgctttccattccagatttagatggatctaataaagtaaacttaaccggtgatactgaaaaagatcttggtgatcttgaaaacgaaaatcaaatattcacatccacaacaactgaagcggcaacatggcttgtaagcgattatatgcaaagttttcaagaaaagaacgtcaaccctgatttcattgctcaaaaagcaaatggcctggtcaccttattgaaagaacattcagagataagaaaagatctggttttaacttcattcatgtcatcaattcaaaatctgcttctcaatggaaacaagcttatagcagcatctgcttatagggtatgtcgttacctaataaatagctcgattttcattgatgagctgttagagctaagactggatgcattcataattatttcccttgcgaaggataattcttttcaaatagaaagggaacaagccttaaaaatggtacgaagattcattgaatacaacaacggtgttactcaaggcattatgcaggctataataagctgtgttgaaaaacctgaagactccttaaggcacatggcattagaaactttgttggaactttgttttgtcgcccctgaaatggttaaagaatgccgtggtatgagagtgatcgagggatttttacaagattatacttctttttcactcgcatcagtaatacttgatactattttacaattaatggctacacacaagacaaggcaacattttctggaagatttcaatgtatctgtgttaaccacggtcttttcggatacaaatacaaagtcaaacgttaatgtggaaaaaatgcaaaacgcttctacacttatctcaataactttgaacagctacaatggctttatgcttttttctaacaacaatttcaaaccgttaaaacagctggtgtcattcttccaaattcctatatgcgcccaatatcttatcgacatctttcttgatgttttgaaaatcaaaccactaccatacaagccaaggggcagacattctcattctttcaaaccaatcccatctcagtactacaaagagtgtatgtctgtgaatcaacggctagccttaattgtgctaattctggagaactcggaatttgtaccccacctccttgaacttttgaacgaagaagatagagatgatcacttggtagcaaaaggcagatatcttcttaccgaatattttaatttaagaatgaatttagtcgataaaaagtatacttcagtatcaaaaccaatttacaaggagaacttcacttacgtcaatgaaacattccagttcaagaagatcgcttataaaatgaatagaaacaggaatacaattggcatgtcgggcattgattatgctcaaaatataaaatcattttccaaaaatattaaagagaatactcttctccgcgaagtagatgatttccgatttagaagaatggtttatgactctaaagttttgcaaacgaaggattttacgcgatggaattggaacataattaacgaattacttgaaggaccattactaaataaaaagcaactagaagaattagttaaatcaaccaaattcatcagaagacttttggtgttttacagaccactcagattgagattttccaacgtcaataaaggcgcaaaattatctcaaaagtatgtacaagttggatgccagtttttcaaaacactaacggcgactccagaaggaatgaaaatccttatggatgatacaaaaattataccgcaactggcgtctttaatgtttagagcaatggagggaaatatatcaggcaacatcttcaacaagaataaactacgagaaaaaataatatttggatacttcaaattcatcggaatattgacgcagtcaaagaatggggttcatatcctaacgaggtggaatttttttaccgtaatctataagatgtttcaatttgaatcgaaactggggcttgagtttctattattaacaataccagaattagatttgaaatattcatcacattgccgcgtcattatcggcaaggcccttgtagtggccaatgagaaagttaggattgaggctacaaagcatataggcgataaactaaaagaactgttatccacgaaagaaagtgatcttaagttaaaagcgaataaagtgaaactgcagcaattcaaaatggaaatgttaacaaggcaactatacgacctgagccccagcgtagtcgccgtagcagaccaagctttatatgaatgtattgtcgcgggcaatggctctgaagagctgggcacctcatttaggatgtttttaaaccaaatggtattcattaggtctccaatacttttcgagttattaagccgcccatacgggttccagttgttgaacgaaatcaattttgtgaaggaggaaagggattcgtggttatctaaaaaaaacattgagtatgttcatattgtggaggaattcctgaagaaaaatgaatcaattaatgcaaaatccctcacatttcaacaaaagagtcgcctgccattgcatttttatgaaagtctaacgaaaacagaagacggaatattactattaagccaaacaggagatttggttactttcatgaacgttataaaaaaatacgtcaacggaaacaatatggccacagtagaaaatgccaaagaaattctcgacttaaaagcagcattatggtgtgttgggtttatcggatccacagaattggggataggtctactagataactactcattggtggaagatattatcgaggtggcctacaatgccagcgtaaccagcgttaggtttacagcattttatgttctgggattaatcagcatgacccgcgagggttgcgaaattctagacgagatgggatggaactgttgtgtcagtgtacaagatgagcctatcgggatcgcactaccaaataggctcgatagatttctatcgtataacgaacacaaatggtccgcatttggcgagtattctgatgagatgattgtttttaataaaagcgatggcgacttgatagaaaaatgcttacccatcgaatttgatttggacaaactactcaaagagaaagataccgcagagaatccattaaatgaaaaaatcattactaataaatacgacaacgatatcacaagtcaaactatcactgtttcaggtgaaaatagtagtcttttcgcaaacgaaggcctttcttctccctatgttacacaataccgcaatgacgatgactccatcgagagcaaggtactacatatagtaagtcagctaggcaatcatatcctttcaaatcacgcagtgaaggagattacagaaataaacaataaatacggtccaaggctttttgaaaacgagaaaatgttcttcaaagtatttaatatgatgtcgaagtatcggtttaagccacatgttaggaagtttctttgcggactatttattaacaatagagcgcttgaaaatgtcatcaggcacgacaacaaaagggacaaaaggccggctaattttacacgttag

SEQ ID NO: 3204 - DNA, 4293 bp, Artificial Sequence
  Description of Artificial Sequence: Synthetic polynucleotide
atgagcatacctcacagtgcaaaacagagtagccctctctccagtagacgccgttctgtaactaatactactccattattaacccctagacatagccgtgataactccagcacccaaatatctagcgccaagaacatcacctccagcagcccatctaccataacgaatgaaagttccaaaagaaataaacaaaatttggtactctctacctcttttatctccaccaagaggttagaaaatagtgcaccttctccgaccagtcccttaatggcaagaagaacgagaagtactatgaccaaggcacttttaaatcttaaagcagaaataaacaaccaatatcaagaattagctagattgcgcaagaaaaaagacgatatcgaacatcttagagattctacaatatctgatatatactctggatcttactctacgaatcatttacaaaagcactccatgaggattagagcgaatactcaacttagagaaattgacaattctataaaaagagttgagaagcatatttttgacctcaagcaacagttcgacaagaaaaggcaaagaagtctcacaacatccagcagtataaaggctgacgtggggagcatcaggaatgatgatggccaaaataacgatagtgaagaattgggcgaccatgatagtttgacagatcaagttactcttgatgatgaatatcttacgactcccacttctggaactgagcgtaatagtcagcagaacttaaatcgtaatagtaccgtcaactctagaaataacgaaaatcattctacgctttccattccagatttagatggatctaataaagtaaacttaaccggtgatactgaaaaagatcttggtgatcttgaaaacgaaaatcaaatattcacatccacaacaactgaagcggcaacatggcttgtaagcgattatatgcaaagttttcaagaaaagaacgtcaaccctgatttcattgctcaaaaagcaaatggccttgtcaccttattgaaagaacattctgagataagaaaagatttggttttaacttctttcatgtcttccattcaaaatttacttctcaatggaaacaagcttatagcagcatctgcttatagggtatgtcgttacttgataaatagctctattttcattgatgagttattagagttaagattagatgcattcataattatttcccttgcgaaggataattcttttcaaatagaaagggaacaagccttaaaaatggtaagaagattcattgaatacaacaacggtgttactcaaggcattatgcaggctataataagctgtgttgaaaaacctgaagactccttaaggcacatggcattagaaactttgttggaactttgttttgtcgcccctgaaatggttaaagaatgccgtggtatgagagtgatcgagggatttttacaagattatacttctttttctctcgcatctgtaatacttgatactattttacaattaatggctacacacaagacaaggcaacattttttggaagatttcaatgtatctgtgttaaccacggtcttttctgatacaaatacaaagtctaacgttaatgtggaaaaaatgcaaaacgcttctacacttatctccataactttgaacagctacaatggctttatgcttttttctaacaacaatttcaaaccgttaaaacagttggtgtctttcttccaaattcctatatgcgcccaatatcttatcgacatctttcttgatgttttgaaaatcaaaccattaccatacaagccaaggggcagacattctcattctttcaaaccaatcccatctcagtactacaaagagtgtatgtctgtgaatcaaagattggccttaattgtgttgattttagagaactctgaatttgtaccccacctccttgaacttttgaacgaagaagatagagatgatcacttggtagcaaaaggcagatatcttcttaccgaatattttaatttaagaatgaatttagtcgataaaaagtatacttctgtatccaaaccaatttacaaggagaacttcacttacgtcaatgaaacattccagttcaagaagatcgcttataaaatgaatagaaacaggaatacaattggcatgagtggcattgattatgctcaaaatataaaaagtttttccaaaaatattaaagagaatactcttctccgcgaagtagatgatttcagatttagaagaatggtttatgactctaaagttttgcaaacgaaggattttacgagatggaattggaacataattaacgaattacttgaaggaccattattgaataaaaagcaattggaagaattagttaaatctaccaaattcatcagaagacttttggtgttttacagaccactcagattgagattttccaacgtcaataaaggcgcaaaattatctcaaaagtatgtacaagttggatgccagtttttcaaaacattaacggcgactccagaaggaatgaaaatccttatggatgatacaaaaattataccgcaattggcgtctttaatgtttagagcaatggagggaaatatatctggcaacatcttcaacaagaataaacttagagaaaaaataatatttggatacttcaaattcatcggaatattgacgcagtccaagaatggggttcatatcttaacgaggtggaatttttttaccgtaatctataagatgtttcaatttgaaagtaaattggggcttgagtttttattattaacaataccagaattagatttgaaatattcttctcattgccgcgtcattatcggcaaggcccttgtagtggccaatgagaaagttaggattgaggctacaaagcatataggcgataaattgaaagaattattatccacgaaagaaagtgatcttaagttaaaagcgaataaagtgaaattacagcaattcaaaatggaaatgttaacaaggcaattgtacgacttgagccccagcgtagtcgccgtagcagaccaagctttatatgaatgtattgtcgcgggcaatggctctgaagagttgggcacctcttttaggatgtttttaaaccaaatggtattcattaggtctccaatacttttcgagttattaagccgcccatacgggttccagttgttgaacgaaatcaattttgtgaaggaggaaagggattcttggttatctaaaaaaaacattgagtatgttcatattgtggaggaattcttgaagaaaaatgaaagtattaatgcaaaatccctcacatttcaacaaaagagtcgcttgccattgcatttttatgaaagtttaacgaaaacagaagacggaatattattattaagccaaacaggagatttggttactttcatgaacgttataaaaaaatacgtcaacggaaacaatatggccacagtagaaaatgccaaagaaattctcgacttaaaagcagcattatggtgtgttgggtttatcggatccacagaattggggataggtttattagataactactctttggtggaagatattatcgaggtggcctacaatgccagcgtaaccagcgttaggtttacagcattttatgttttaggattaatcagcatgacccgcgagggttgcgaaattttggacgagatgggatggaactgttgtgtcagtgtacaagatgagcctatcgggatcgcattgccaaataggctcgatagatttttatcttataacgaacacaaatggtccgcatttggcgagtattctgatgagatgattgtttttaataaaagcgatggcgacttgatagaaaaatgcttacccatcgaatttgatttggacaaattactcaaagagaaagataccgcagagaatccattaaatgaaaaaatcattactaataaatacgacaacgatatcacaagtcaaactatcactgtttctggtgaaaatagtagtcttttcgcaaacgaaggcctttcttctccctatgttacacaataccgcaatgacgatgactccatcgagagcaaggtattacatatagtaagtcagttaggcaatcatatcctttctaatcacgcagtgaaggagattacagaaataaacaataaatacggtccaaggctttttgaaaacgagaaaatgttcttcaaagtatttaatatgatgtccaagtataggtttaagccacatgttaggaagtttctttgcggattatttattaacaatagagcgcttgaaaatgtcatcaggcacgacaacaaaagggacaaaaggccggctaattttacacgttga

SEQ ID NO: 3205 - DNA, 414 bp, Saccharomyces cerevisiae
atgatcgaagagaagaaggaacttaagaaacgcagggttcttcaaatggccagattttatggtgcggccgccttcaccctgattaccatgaggcttatctccagggccataaaagtacgaaaatacgtccccagcatatttcaacaaaattacaagcttccacctttttcccaaaggaatgaagccatgtcagcgttaacgtatgcatccgccgcttcaataggtacgttcagcacattgatattcggcttttgttgggcacttgacatttcaacggcaagagagtttgtatttaagactagagagttcatgagccttccacaagccttagaaaccgacacgagcatggacgaagaaacttccaaactaactaagcaattgcaagacctcctgtcgagcgaaaacaacaagtag

SEQ ID NO: 3206 - DNA, 414 bp, Artificial Sequence
  Description of Artificial Sequence: Synthetic polynucleotide
atgatcgaagagaagaaggaacttaagaaacgcagggttcttcaaatggccagattttatggtgcggccgccttcaccttgattaccatgaggcttatctccagggccataaaagtaagaaaatacgtccccagcatatttcaacaaaattacaagcttccacctttttcccaaaggaatgaagccatgagtgcgttaacgtatgcatccgccgcttctataggtacgttcagcacattgatattcggcttttgttgggcacttgacatttctacggcaagagagtttgtatttaagactagagagttcatgagccttccacaagccttagaaaccgacacgagcatggacgaagaaacttccaaattaactaagcaattgcaagacctcttgagtagcgaaaacaacaagtga

SEQ ID NO: 3207 - DNA, 618 bp, Saccharomyces cerevisiae
atgtcggatccaagttctattaacggtggtatcgtcgttgcgatgacaggtaaagactgtgtggccattgcctgtgatttgcgtctcggaagccagtcactaggtgtgtcgaacaagtttgaaaaaatcttccactatgggcatgtgttcttagggattaccggtctggctaccgacgtgactactctgaacgagatgttccgctacaagacgaacctatataagttgaaggaagaaagggccattgagcctgaaacgtttacccaattagtgtcaagttcactttatgaaagaagattcggtccatactttgtggggccggtggtagcaggtattaattccaagtccgggaagccctttattgcgggattcgacctaatcggctgtatcgacgaggccaaggattttatcgttagcggtactgcatccgaccaactgttcggtatgtgtgagtccctgtacgaacctaatctagagccagaagatcttttcgaaactataagtcaggccctactgaatgctgctgaccgtgacgctctatcaggctggggagctgtagtatacatcatcaagaaggatgaagtggtgaagagatacttgaagatgagacaagattga

SEQ ID NO: 3208 - DNA, 618 bp, Artificial Sequence
  Description of Artificial Sequence: Synthetic polynucleotide
atgagtgatccaagttctattaacggtggtatcgtcgttgcgatgacaggtaaagactgtgtggccattgcctgtgatttgcgtctcggaagccagtccttgggtgtgtctaacaagtttgaaaaaatcttccactatgggcatgtgttcttagggattaccggtttagctaccgacgtgactactttgaacgagatgttccgctacaagacgaacttatataagttgaaggaagaaagggccattgagcctgaaacgtttacccaattagtgtccagttctctttatgaaagaagattcggtccatactttgtggggccggtggtagcaggtattaattccaagtccgggaagccctttattgcgggattcgacttgatcggctgtatcgacgaggccaaggattttatcgttagcggtactgcatccgaccaattattcggtatgtgtgagtccttgtacgaacctaatttggagccagaagatcttttcgaaactataagtcaggccttattgaatgctgctgaccgtgacgctttaagtggctggggagctgtagtatacatcatcaagaaggatgaagtggtgaagagatacttgaagatgagacaagattga

SEQ ID NO: 3209 - DNA, 1203 bp, Saccharomyces cerevisiae
atgtctcaagttcaagaacaacatatatcagagtcacagcttcagtacgggaacggttcgttgatgtccactgtaccagcagacctttcacagtcagtcgttgatggaaacggcaacggtagcagcgaagatattgaggccaccaacggctccggcgatggtggcggattgcaggagcaagcggaagcgcaaggtgaaatggaggatgaagcatacgatgaagctgccttaggttcgtttgtgccaatagaaaaactgcaagtgaacgggattactatggcggatgtgaaaaaactaagggagagtgggcttcacactgctgaagcggtagcatatgctcccagaaaggatttattggaaatcaaaggtatatcggaagctaaggcagataagttgctaaacgaagcggcaaggctagtgcctatgggatttgtcacggctgctgattttcatatgagaagatcggagctgatttgtttgacaacgggttctaagaatttggacactcttttgggtggtggtgtggaaactggttctattactgagcttttcggtgaattcaggacaggtaagtcccagctatgtcacactttggccgtgacatgccaaattccattggatattggtggcggtgaaggtaagtgtttgtatatcgataccgaaggtactttcaggccggtaagattggtatccatagctcagcggttcggattagacccggatgatgctttgaacaacgttgcgtatgcaagagcctataacgccgatcatcagttaagacttctggatgctgctgcccaaatgatgagcgagtctcggttttccttgattgtggtcgattctgttatggctctataccgtacggatttttctggtcgtggtgaactaagcgcaaggcaaatgcatttagccaaatttatgcgtgctttgcaaaggctggccgaccaatttggtgttgcagtcgtcgttactaaccaagtggtcgcccaagttgatggtggtatggcttttaatccagatccaaagaagcctatcggtggtaatattatggcacattcttccaccacgcgattaggtttcaaaaagggtaagggatgtcaaagattatgcaaagttgttgactcaccttgcttaccagaggctgaatgtgtgttcgcgatctatgaagatggtgttggtgaccccagagaagaagacgagtag

SEQ ID NO: 3210 - DNA, 1203 bp, Artificial Sequence
  Description of Artificial Sequence: Synthetic polynucleotide
atgtctcaagttcaagaacaacatatatctgagagccagcttcagtacgggaacggttctttgatgtccactgtaccagcagacctttctcagtctgtcgttgatggaaacggcaacggtagcagcgaagatattgaggccaccaacggctccggcgatggtggcggattgcaggagcaagcggaagcgcaaggtgaaatggaggatgaagcatacgatgaagctgccttaggttcttttgtgccaatagaaaaattacaagtgaacgggattactatggcggatgtgaaaaaattgagggagagtgggcttcacactgctgaagcggtagcatatgctcccagaaaggatttattggaaatcaaaggtatatctgaagctaaggcagataagttgttgaacgaagcggcaaggttggtgcctatgggatttgtcacggctgctgattttcatatgagaagaagtgagttgatttgtttgacaacgggttctaagaatttggacactcttttgggtggtggtgtggaaactggttctattactgagcttttcggtgaattcaggacaggtaagtcccagttgtgtcacactttggccgtgacatgccaaattccattggatattggtggcggtgaaggtaagtgtttgtatatcgataccgaaggtactttcaggccggtaagattggtatccatagctcagagattcggattagacccggatgatgctttgaacaacgttgcgtatgcaagagcctataacgccgatcatcagttaagacttttagatgctgctgcccaaatgatgagcgagtctagattttccttgattgtggtcgattctgttatggctttgtaccgtacggatttttctggtcgtggtgaattgagcgcaaggcaaatgcatttagccaaatttatgcgtgctttgcaaaggttggccgaccaatttggtgttgcagtcgtcgttactaaccaagtggtcgcccaagttgatggtggtatggcttttaatccagatccaaagaagcctatcggtggtaatattatggcacattcttccaccacgagattaggtttcaaaaagggtaagggatgtcaaagattatgcaaagttgttgactctccttgcttaccagaggctgaatgtgtgttcgcgatctatgaagatggtgttggtgaccccagagaagaagacgagtga

SEQ ID NO: 3211 - DNA, 1539 bp, Saccharomyces cerevisiae
atgtccatgactatttgctcaaatactcctggtgcataccctgaaattggagcttataatgaggttgataaacagttggaatcaagcggattctcctctgattcctctctgatattgaataaaccagaagttcgtcaatactggtcatccgtttcatctcatatttcacgctcaggtgatgtgtttacaaatgataaagaaaaaatttcatcctctattggtgaggatgcgatggatatcgacgcttcgccctcattgattgaaaaatataactcttttcccacaagaaagattcttcctgagcaggacgagtttgagaacgacgttgaggacgatgcttcttcctcactgaaggaaaaatcacaaggttcttgtgaaattgaaattgcttctgaaatttcatccgaaattttaaatggcacatcggcagacggtaattccgagtttcacgacttcgctgagccccctccctctcagaatgaatctgtcgctctgtcttttagtcaatcgaatgatttggactttttgaataatccaagcggatcaggctcttcaaacgatatcaatagaagtacaagttccatttcacttcctagacatgtgtcactagattttaacgtttacaatagtctttgcctcacaaatgaggtgactgcatcagaatcacataatgtggccaaatttcaccttggcaagaaaaacaagaagagcttgctaccaagatggaaaaccattgaaatgtacggggaggtagttaagaaaactcaagacatatattctaattttcagtatgcacaatacattttaagggtagggttggataccgaaaaactacacgaacttgttaaggaactggaggatgaaagcaatagcttctctgtagattctttaaaggaatatttagtgaacgatgccaaagttattttgaagaaactaagtgccgttggataccctgatgcacagtaccttctaggtgacgcctactcctctggagttttcggtaaaataaagaatagaagagcatttcttttattctccgctgcagccaaaagaatgcacatcgaaagtgtttacagaactgccatttgctatgagtgcggcttgggtgtaaccagaaatgcaccgaaggcggttaactttttgacttttgctgcaactaagaaccatcctgcagcaatgtacaaattaggagtatattcgtatcatggtttgatgggtcttccagatgatattctaaccaaaatggatggttatagatggttgcgaagggctacatctatggctagcagctttgtttgtggtgctccttttgaattagccaatatttatatgacgggatataaagatcttatcatttcggatccagattatgctatggcattgtatgagaaggcggcggctttagggcatactgaatcggcaagaatactagaagacgctcgcagaagtggagggtttgtttcgcgaggacatcctccttcggcacagaaatatcataaaacctcccatgaagctgtggcagccaaaaagttgatttaa

SEQ ID NO: 3212 - DNA, 1539 bp, Artificial Sequence
  Description of Artificial Sequence: Synthetic polynucleotide
atgtccatgactatttgctccaatactcctggtgcataccctgaaattggagcttataatgaggttgataaacagttggaaagtagcggattctcctctgattcctctttgatattgaataaaccagaagttcgtcaatactggtcttccgtttcttctcatatttctcgctctggtgatgtgtttacaaatgataaagaaaaaatttcttcctctattggtgaggatgcgatggatatcgacgcttctccctctttgattgaaaaatataactcttttcccacaagaaagattcttcctgagcaggacgagtttgagaacgacgttgaggacgatgcttcttcctctttgaaggaaaaatctcaaggttcttgtgaaattgaaattgcttctgaaatttcttccgaaattttaaatggcacaagtgcagacggtaattccgagtttcacgacttcgctgagccccctccctctcagaatgaatctgtcgctttatcttttagtcaaagcaatgatttggactttttgaataatccaagcggatctggctcttccaacgatatcaatagaagtacaagttccatttctcttcctagacatgtgtctttagattttaacgtttacaatagtctttgcctcacaaatgaggtgactgcatctgaaagtcataatgtggccaaatttcaccttggcaagaaaaacaagaagagcttgttaccaagatggaaaaccattgaaatgtacggggaggtagttaagaaaactcaagacatatattctaattttcagtatgcacaatacattttaagggtagggttggataccgaaaaattacacgaacttgttaaggaattagaggatgaaagcaatagcttctctgtagattctttaaaggaatatttagtgaacgatgccaaagttattttgaagaaattaagtgccgttggataccctgatgcacagtaccttttgggtgacgcctactcctctggagttttcggtaaaataaagaatagaagagcatttcttttattctccgctgcagccaaaagaatgcacatcgaaagtgtttacagaactgccatttgctatgagtgcggcttgggtgtaaccagaaatgcaccgaaggcggttaactttttgacttttgctgcaactaagaaccatcctgcagcaatgtacaaattaggagtatattcttatcatggtttgatgggtcttccagatgatattttgaccaaaatggatggttatagatggttgagaagggctacatctatggctagcagctttgtttgtggtgctccttttgaattagccaatatttatatgacgggatataaagatcttatcatttctgatccagattatgctatggcattgtatgagaaggcggcggctttagggcatactgaaagtgcaagaatattggaagacgctcgcagaagtggagggtttgtttccagaggacatcctccttctgcacagaaatatcataaaacctcccatgaagctgtggcagccaaaaagttgatttga

SEQ ID NO: 3213 - DNA, 2265 bp, Saccharomyces cerevisiae
atgataaaaagatggttatctgtgaataggaaaaagtcacacccggagaagaacactcaaggtaatgacgaaattaatcggaaagcaactagcctgaagaaaacgaaaggttctggagatccctccatagcgaaatcaccaagtgctaagagtagtacatcaagcataccttctaatcttgcgagccatgaaagaagaagcaagtttagtagtcaaacggataaccttgcaggaaataaacattaccatgagcattaccataatatggcaagtacttcagatgaaagagagtacgattcctcgactacatatgaagatcgtgcgttcgatacagagtcctccatactatttactactattacagatttaatgccatatggggatggttccaataaagtgtttggttatgaaaattttgggaatacttgctactgcaactccgttctacaatgcctttataatatccccgaatttaggtgtaatgtgctgcgatatcctgaaagagtagccgcagtaaacagaatacgcaaaagtgatttgaagggttcaaaaataagggtattcactaatgaaagttttgaaacatctactaatagcggaaattctaatacggggtaccaaagcaatgataatgaagatgcacataaccaccaccaccttcagcagagtgatcaagataactcctcttcttctactcaagaaaaacagaataattttgaaagaaaaaggaactcgtttatgggttttggaaaagataaatcgaactataaagattctgcaaagaaagatgataacaatgagatggaacggcctcagcctgttcacacagttgtaatggcctctgatacattaacagagaagcttcacgaaggctgtaaaaaaattattgtgggaagaccgcttttaaagcaaagcgattccttatcaaaagcttcaactacagattgtcaagcaaattcgcattgccagtgtgattcacaaggcagtaggattacatcagtggatgatgatgtccttgttaaccctgagagctgtaacgatgctgtcaacaattctaataataataaagagaatacgtttccaacaagtgaacaaagaaaaaaagccgctttaattagaggccccgttcttaacgtagatcatttactttatccaaccgaggaagctacactttacaatggactaaaagatatatttgagtctattactgaaaacttgtcgctaaccggtatcgtttcacctacagagtttgtcaaaattttaaaaaaagaaaacgtcttgttcaacactatgatgcaacaagatgcccatgaatttttaaactttttattaaatgatttcagtgaatatattcaacgcaataatcccagaatgagattcggaccacaaaagacagacaacagcaacgacaactttataacggatttattcaaaggtacactgacgaataggatcaaatgtttaacttgtgacaatatcacctcaagggacgaaccatttttagactttccaatagaagtacagggtgatgaagagactgatatccagaagatgttaaaaagctatcatcagcgtgagatgttgaacggggttaacaaattttattgtaacaaatgttatggtttacaagaagcagaacgtatggtcggactgaagcaactgccccatattctgtcattgcacctaaaaagattcaagtattcagaggagcaaaagtcaaacatcaaactttttaacaaaatactctatccactaactttggatgtttcttccacttttaatacatcagtatataaaaaatatgaactaagcggcgtcgtcatccatatggggagcggtccacagcatggtcattacgtatgcatttgcaggaacgaaaagtttgggtggcttttgtatgatgacgaaacggtggaatccataaaagaagaaactgtgttacaattcacaggtcatccaggtgatcaaactacagcctacgttttattctataaagaaacacaggctgataagaccgaaaatcaaaatgaaaatatagacacttctagtcaagatcaaatgcagactgacaataacattgaacagttaataaaatgcgatgattggttaagggatcgtaaattgagggcagctgcaaatattgaacgcaaaaagaccttggggaatatacctgaagttaagactgcagaaaccaagacgccattaaatgataaaaaacgcaataagcaaaaaagaaaatcgagaatattgagcttcatcaaataa

SEQ ID NO: 3214 - DNA, 2265 bp, Artificial Sequence
  Description of Artificial Sequence: Synthetic polynucleotide
atgataaaaagatggttatctgtgaataggaaaaagtctcacccggagaagaacactcaaggtaatgacgaaattaatagaaaagcaactagcttgaagaaaacgaaaggttctggagatccctccatagcgaaatctccaagtgctaagagtagtacatctagcataccttctaatcttgcgagccatgaaagaagaagcaagtttagtagtcaaacggataaccttgcaggaaataaacattaccatgagcattaccataatatggcaagtacttctgatgaaagagagtacgattccagcactacatatgaagatcgtgcgttcgatacagagtcctccatattgtttactactattacagatttaatgccatatggggatggttccaataaagtgtttggttatgaaaattttgggaatacttgctactgcaactccgttttgcaatgcctttataatatccccgaatttaggtgtaatgtgttgagatatcctgaaagagtagccgcagtaaacagaatacgcaaaagtgatttgaagggttccaaaataagggtattcactaatgaaagttttgaaacatctactaatagcggaaattctaatacggggtaccaaagcaatgataatgaagatgcacataaccaccaccaccttcagcagagtgatcaagataactcctcttcttctactcaagaaaaacagaataattttgaaagaaaaaggaactcttttatgggttttggaaaagataaaagtaactataaagattctgcaaagaaagatgataacaatgagatggaaaggcctcagcctgttcacacagttgtaatggcctctgatacattaacagagaagcttcacgaaggctgtaaaaaaattattgtgggaagaccgcttttaaagcaaagcgattccttatccaaagcttccactacagattgtcaagcaaattctcattgccagtgtgattctcaaggcagtaggattacatctgtggatgatgatgtccttgttaaccctgagagctgtaacgatgctgtcaacaattctaataataataaagagaatacgtttccaacaagtgaacaaagaaaaaaagccgctttaattagaggccccgttcttaacgtagatcatttactttatccaaccgaggaagctacactttacaatggattgaaagatatatttgagtctattactgaaaacttgtccttgaccggtatcgtttctcctacagagtttgtcaaaattttaaaaaaagaaaacgtcttgttcaacactatgatgcaacaagatgcccatgaatttttaaactttttattaaatgatttcagtgaatatattcaacgcaataatcccagaatgagattcggaccacaaaagacagacaacagcaacgacaactttataacggatttattcaaaggtacattaacgaataggatcaaatgtttaacttgtgacaatatcacctctagggacgaaccatttttagactttccaatagaagtacagggtgatgaagagactgatatccagaagatgttaaaaagctatcatcagcgtgagatgttgaacggggttaacaaattttattgtaacaaatgttatggtttacaagaagcagaacgtatggtcggattgaagcaattgccccatattttatctttgcacttgaaaagattcaagtattctgaggagcaaaagtctaacatcaaactttttaacaaaatactctatccattgactttggatgtttcttccacttttaatacatctgtatataaaaaatatgaattgagcggcgtcgtcatccatatggggagcggtccacagcatggtcattacgtatgcatttgcaggaacgaaaagtttgggtggcttttgtatgatgacgaaacggtggaatccataaaagaagaaactgtgttacaattcacaggtcatccaggtgatcaaactacagcctacgttttattctataaagaaacacaggctgataagaccgaaaatcaaaatgaaaatatagacacttctagtcaagatcaaatgcagactgacaataacattgaacagttaataaaatgcgatgattggttaagggatcgtaaattgagggcagctgcaaatattgaacgcaaaaagaccttggggaatatacctgaagttaagactgcagaaaccaagacgccattaaatgataaaaaacgcaataagcaaaaaagaaaatctagaatattgagcttcatcaaatga

SEQ ID NO: 3215 - DNA, 957 bp, Saccharomyces cerevisiae
atgtctacaaacagtattaagttgttagctggtaactcacatcctgggcttgctgagcttatttcccaaaggcttggtgtaccgttatctaaagtgggggtatatcagtattcaaataaagagacgtctgttacaataggggaaagcattcgtgatgaagacgtatatatcatccaaactggttacggggaacatgaaatcaacgatttcttaatggaattacttatcttaattcacgcttgtaagacggcatcagtcagaagaattacggcagtaataccaaatttcccttatgctagacaagataagaaggataaatcgcgggcgcccatcactgcgaagctgattgccaatcttttggaaactgcgggttgtgatcatgttattactatggatctccatgcttcacaaattcaagggttttttcatatcccggttgataatttatacggtgaaccaagtgtgttgaattacataaggaccaaaacagatttcaataatgcgatactggtatcgcctgatgctggtggtgcgaaaagggtggcttctttagcggacaagctggatatgaattttgccttgattcataaggagaggcaaaaagctaatgaagtttcgcgaatgctgcttgtcggtgatgttgctggtaagtcatgcttgttgattgacgatatggctgacacgtgtggtacgctggtgaaagcctgtgacacattaatggatcacggtgctaaggaggttatcgctattgtcacacatggtatattttctggctcagctagggagaagttaataaatagtaggttatcaagaattgtttgcaccaacacggtacctgttgatttggatttggacattgtcgatcaggtggatatcagccctacgattgcagaagctatcagaagattgcataatggagaatcagtctcatatttatttacacatgcgcctgtttaa

SEQ ID NO: 3216 - DNA, 957 bp, Artificial Sequence
  Description of Artificial Sequence: Synthetic polynucleotide
atgtctacaaacagtattaagttgttagctggtaactctcatcctgggcttgctgagcttatttcccaaaggcttggtgtaccgttatctaaagtgggggtatatcagtattctaataaagagacgtctgttacaataggggaaagcattcgtgatgaagacgtatatatcatccaaactggttacggggaacatgaaatcaacgatttcttaatggaattacttatcttaattcacgcttgtaagacggcatctgtcagaagaattacggcagtaataccaaatttcccttatgctagacaagataagaaggataaaagcagagcgcccatcactgcgaagttgattgccaatcttttggaaactgcgggttgtgatcatgttattactatggatctccatgcttctcaaattcaagggttttttcatatcccggttgataatttatacggtgaaccaagtgtgttgaattacataaggaccaaaacagatttcaataatgcgatattagtatctcctgatgctggtggtgcgaaaagggtggcttctttagcggacaagttggatatgaattttgccttgattcataaggagaggcaaaaagctaatgaagtttccagaatgttacttgtcggtgatgttgctggtaagtcttgcttgttgattgacgatatggctgacacgtgtggtacgttagtgaaagcctgtgacacattaatggatcacggtgctaaggaggttatcgctattgtcacacatggtatattttctggctctgctagggagaagttaataaatagtaggttatctagaattgtttgcaccaacacggtacctgttgatttggatttggacattgtcgatcaggtggatatcagccctacgattgcagaagctatcagaagattgcataatggagaatctgtctcttatttatttacacatgcgcctgtttga

SEQ ID NO: 3217 - DNA, 753 bp, Saccharomyces cerevisiae
atggctacaaagcaggctcacaagagattgacgaaagagtacaagttgatggtggaaaaccctccaccatatattcttgctcgccccaacgaagataatattttagagtggcactatattatcacaggacctgcggatactccttacaagggcggtcaatatcacggtactttaactttcccgtctgattatccatacaaaccaccggctatcagaatgataacaccgaatggacgtttcaagcccaacacacgattatgcctttctatgagtgattaccaccctgatacttggaatcctggctggtctgtctcaaccattttgaacgggttactaagtttcatgaccagtgatgaagccacgacaggatcaattacaacatcagaccatcagaagaagacattagcaagaaattccataagttataacacttttcaaaatgttagattcaaattgatttttccggaagttgtacaggaaaatgtagagacattagaaaagagaaaattggatgagggggatgcggcaaatacaggtgatgaaacagaagacccttttacaaaggctgcgaaggaaaaagtcatctcgttggaggaaattctagaccctgaagacagaatacgcgctgaacaagcgttgagacaatcagaaaataattccaagaaagatggcaaagaacctaatgatagttcttcaatggtttatattggtatcgctatttttttgtttttggttggcctttttatgaaatga

SEQ ID NO: 3218 - DNA, 753 bp, Artificial Sequence
  Description of Artificial Sequence: Synthetic polynucleotide
atggctacaaagcaggctcacaagagattgacgaaagagtacaagttgatggtggaaaaccctccaccatatattcttgctcgccccaacgaagataatattttagagtggcactatattatcacaggacctgcggatactccttacaagggcggtcaatatcacggtactttaactttcccgtctgattatccatacaaaccaccggctatcagaatgataacaccgaatggacgtttcaagcccaacacaagattatgcctttctatgagtgattaccaccctgatacttggaatcctggctggtctgtctccaccattttgaacgggttattaagtttcatgaccagtgatgaagccacgacaggatctattacaacaagtgaccatcagaagaagacattagcaagaaattccataagttataacacttttcaaaatgttagattcaaattgatttttccggaagttgtacaggaaaatgtagagacattagaaaagagaaaattggatgagggggatgcggcaaatacaggtgatgaaacagaagacccttttacaaaggctgcgaaggaaaaagtcatctctttggaggaaattttggaccctgaagacagaatacgcgctgaacaagcgttgagacaaagtgaaaataattccaagaaagatggcaaagaacctaatgatagttcttctatggtttatattggtatcgctatttttttgtttttggttggcctttttatgaaatga

SEQ ID NO: 3219 - DNA, 1293 bp, Saccharomyces cerevisiae
atggcagagaaaatcttggaaaataaagaccctaaactagaagcgatgacagtggaccatgaagtttcagcgccgaagccaatccccgtggatgaacctacgctgactagagtcgccagaccgttaagacatgtaagacatattcccgttaagtcattagtttttcattctaaacacggtcccattactttttcatatgagaacaaaattaagttgcccataagtaaaaacaaactggtagttcaagtgaactatgtaggtttgaaccctgttgatatgaagattaggaatggttacaccaagcctatttatggtgaagccggcattggaagagaatacagcggagtgataacacatgtcggtgataatttgacaaatagatggaacgtgggtgacgatgtgtacggcatttactatcatcccaagttagccattggcgccctgcaaagttcgttgctcattgatccgcgtgtcgatcctattttaatgcgacccaaaaatactctatcaccagaaaaggcagcaggctccttattctgtttaggaacagcacttaatctgttagctcaactaaaggagaaggatcaattgaatacagaatctaatgttttaataaacggtggtacaagctctgtagggatgtttgctatccagttattgaagcgttactataaagtttctaaaaagctagtagtggtaacgtcaggtaatggtgcagcagtcctgtcagaacatttcccggatttgaaagatgaaatcattttcataaattatctgtcatgtaggggaaaatctagtaaaccactcagacgtatgttggataccggtaaagttgtagattatgatgattttaatactctcaaagaaaccgaagattatactcagggtaaatttaatgtcgtgttggacttcatcggtggttatgatatcttgagtcactcgagttctttaattcacgctaaaggtgcttatattacaacagttggtgattatgttggaaattataagaaagacgtctttgattcttgggataaccctagcgccaatgcaagaaaaatgtttggatcaatgttatggtcatacgattattctcatttttactttgaccccaatatcaagattatccccaagaagaatgattggatacatgaatgcggcaagctgctaaatgagggagtcgtagattgcgttgttgataaggtttattcctggaaaaatttcaaggaagcattttcctatatggctacacaacgtgctcaaggtaagcttataatgaaagttgaaggtttttga

SEQ ID NO: 3220 - DNA, 1293 bp, Artificial Sequence
  Description of Artificial Sequence: Synthetic polynucleotide
atggcagagaaaatcttggaaaataaagaccctaaattagaagcgatgacagtggaccatgaagtttctgcgccgaagccaatccccgtggatgaacctacgttgactagagtcgccagaccgttaagacatgtaagacatattcccgttaagtctttagtttttcattctaaacacggtcccattactttttcttatgagaacaaaattaagttgcccataagtaaaaacaaattagtagttcaagtgaactatgtaggtttgaaccctgttgatatgaagattaggaatggttacaccaagcctatttatggtgaagccggcattggaagagaatacagcggagtgataacacatgtcggtgataatttgacaaatagatggaacgtgggtgacgatgtgtacggcatttactatcatcccaagttagccattggcgccttgcaaagttctttgctcattgatccgcgtgtcgatcctattttaatgagacccaaaaatactttatctccagaaaaggcagcaggctccttattctgtttaggaacagcacttaatttattagctcaattgaaggagaaggatcaattgaatacagaatctaatgttttaataaacggtggtacaagctctgtagggatgtttgctatccagttattgaagcgttactataaagtttctaaaaagttggtagtggtaacgtctggtaatggtgcagcagtcctttctgaacatttcccggatttgaaagatgaaatcattttcataaattatttaagttgtaggggaaaatctagtaaaccactcagacgtatgttggataccggtaaagttgtagattatgatgattttaatactctcaaagaaaccgaagattatactcagggtaaatttaatgtcgtgttggacttcatcggtggttatgatatcttgagtcacagcagttctttaattcacgctaaaggtgcttatattacaacagttggtgattatgttggaaattataagaaagacgtctttgattcttgggataaccctagcgccaatgcaagaaaaatgtttggatccatgttatggagttacgattattctcatttttactttgaccccaatatcaagattatccccaagaagaatgattggatacatgaatgcggcaagttattgaatgagggagtcgtagattgcgttgttgataaggtttattcctggaaaaatttcaaggaagcattttcctatatggctacacaacgtgctcaaggtaagcttataatgaaagttgaaggtttttga

SEQ ID NO: 3221 - DNA, 603 bp, Saccharomyces cerevisiae
atgggtatttctcgtgattctcgtcacaaaagatcagccactggtgctaaacgtgctcaattcagaaagaagagaaagttcgaattaggtcgtcaaccagccaacacaaaaattggtgctaagagaatccactctgtcagaactagaggtggtaacaagaaatacagagctctaagaattgaaaccggtaacttttcttgggcttctgaaggtatctccaagaagaccagaattgctggtgttgtttaccatccatccaacaatgaattggttagaactaacactttgaccaaggctgccattgtccaaattgatgctactccattcagacaatggttcgaagctcactacggtcaaaccttgggtaagaagaagaacgtcaaggaagaagaaactgttgccaagagcaagaacgctgaaagaaagtgggctgctagagctgcttctgccaagatcgaatcttccgttgaatctcaattcagcgccggtagattatacgcttgtatctcttccagaccaggtcaatccggtagatgtgatggttacatcttggaaggtgaagaattagctttctacctaagaagattgactgctaagaaatag

SEQ ID NO: 3222 - DNA, 603 bp, Artificial Sequence
  Description of Artificial Sequence: Synthetic polynucleotide
atgggtatttctcgtgattctcgtcacaaaagatctgccactggtgctaaacgtgctcaattcagaaagaagagaaagttcgaattaggtcgtcaaccagccaacacaaaaattggtgctaagagaatccactctgtcagaactagaggtggtaacaagaaatacagagctttgagaattgaaaccggtaacttttcttgggcttctgaaggtatctccaagaagaccagaattgctggtgttgtttaccatccatccaacaatgaattggttagaactaacactttgaccaaggctgccattgtccaaattgatgctactccattcagacaatggttcgaagctcactacggtcaaaccttgggtaagaagaagaacgtcaaggaagaagaaactgttgccaagagcaagaacgctgaaagaaagtgggctgctagagctgcttctgccaagatcgaatcttccgttgaatctcaattcagcgccggtagattatacgcttgtatctcttccagaccaggtcaatccggtagatgtgatggttacatcttggaaggtgaagaattagctttctacttgagaagattgactgctaagaaatga

SEQ ID NO: 3223 - DNA, 1929 bp, Saccharomyces cerevisiae
atgtcaaaagctgttggtattgatttaggtacaacctattcatgtgttgctcattttgcaaacgatagggttgaaattatcgctaacgatcaaggtaatagaacgacgccttcttatgtggcttttactgacacagaaaggctaattggtgacgctgcgaagaatcaagctgcgatgaacccacataatacagtattcgatgctaagcgtctgatcggacgtaaattcgatgatccagaagtgacgaacgatgctaagcattacccattcaaagtgattgacaagggaggtaaaccggtagtgcaagtggaatataaaggcgagacaaagacatttactccagaagaaatttcctcaatgatcttgacaaagatgaaggagactgctgagaactttttaggaacagaagtgaaagatgctgtagtaacggttccagcctatttcaacgattcacaaaggcaagcaacaaaagatgccggtacaatcgcgggcttgaacgttcttcgtatcattaatgaacctacagctgccgctattgcgtatgggctggacaagaaatcgcagaaggagcacaacgtcttgatctttgatttaggtggtggtacttttgatgtctctctgctatccatagatgaaggtgtctttgaggttaaggctactgctggtgacactcacttgggtggtgaagatttcgatagtaggctggttaactttctagccgaggagttcaaaagaaaaaataaaaaggatctaacaactaaccaaaggtccctaaggaggttaaggaccgccgctgaaagggccaagagaactctgtcttcgtctgctcagacatctatagaaatagattcattatttgagggtatcgatttctatacttccattacaagggcaagatttgaagaattatgtgctgatttgtttagatctacattggagccagtggaaaaagttttggctgattcaaaattagataagtcacaaattgatgaaattgtacttgttggtggttcaacaagaattccaaaagtacaaaaactggtttctgattttttcaatggtaaagaaccaaaccgttcgattaaccctgatgaggccgtcgcttatggtgctgccgtacaggctgccatcttaacgggtgaccagtcgtcgacgacccaagatttactgttgctggatgttgcaccattatctctaggtattgaaactgcaggtggtattatgacaaagttgatcccaagaaattcgactatcccaacaaaaaaatcggaagtgttttccacctacgctgacaaccaacctggtgtgttgatacaagtttttgagggtgaaaggacaaggacaaaagacaacaatctactgggtaaatttgagttgagcggtattccacccgctccaagaggcgtaccacaaattgaagttacatttgatatcgatgcaaatggtattctgaacgtatctgccgttgaaaaaggtactggtaaatctaacaagattacaattactaacgataagggaagattatcgaaggaagatatcgataaaatggttgctgaggcagaaaagttcaaggccgaagatgaacaagaagctcaacgtgttcaagctaagaatcagctagaatcgtacgcgtttactttgaaaaattctgtgagcgaaaataacttcaaggagaaggtgggtgaagaggatgccaggaaattggaagccgccgcccaagatgctataaattggttagatgcttcgcaagcggcctccaccgaggaatacaaggaaaggcaaaaggaactagaaggtgttgcaaaccccattatgagtaaattttacggagctgcaggtggtgccccaggagcaggcccagttccgggtgctggagcaggccccactggagcaccagacaacggcccaacggttgaagaggttgattag

SEQ ID NO: 3224 - DNA, 1929 bp, Artificial Sequence
  Description of Artificial Sequence: Synthetic polynucleotide
atgtccaaagctgttggtattgatttaggtacaacctattcttgtgttgctcattttgcaaacgatagggttgaaattatcgctaacgatcaaggtaatagaacgacgccttcttatgtggcttttactgacacagaaaggttgattggtgacgctgcgaagaatcaagctgcgatgaacccacataatacagtattcgatgctaagcgtttgatcggacgtaaattcgatgatccagaagtgacgaacgatgctaagcattacccattcaaagtgattgacaagggaggtaaaccggtagtgcaagtggaatataaaggcgagacaaagacatttactccagaagaaatttcctctatgatcttgacaaagatgaaggagactgctgagaactttttaggaacagaagtgaaagatgctgtagtaacggttccagcctatttcaacgattctcaaaggcaagcaacaaaagatgccggtacaatcgcgggcttgaacgttcttcgtatcattaatgaacctacagctgccgctattgcgtatgggttggacaagaaatctcagaaggagcacaacgtcttgatctttgatttaggtggtggtacttttgatgtctctttattatccatagatgaaggtgtctttgaggttaaggctactgctggtgacactcacttgggtggtgaagatttcgatagtaggttggttaactttttggccgaggagttcaaaagaaaaaataaaaaggatttaacaactaaccaaaggtccttaaggaggttaaggaccgccgctgaaagggccaagagaactttatcttcttctgctcagacatctatagaaatagattctttatttgagggtatcgatttctatacttccattacaagggcaagatttgaagaattatgtgctgatttgtttagatctacattggagccagtggaaaaagttttggctgattctaaattagataagtctcaaattgatgaaattgtacttgttggtggttctacaagaattccaaaagtacaaaaattggtttctgattttttcaatggtaaagaaccaaaccgttctattaaccctgatgaggccgtcgcttatggtgctgccgtacaggctgccatcttaacgggtgaccagtcttctacgacccaagatttattattgttggatgttgcaccattatctttgggtattgaaactgcaggtggtattatgacaaagttgatcccaagaaattctactatcccaacaaaaaaaagtgaagtgttttccacctacgctgacaaccaacctggtgtgttgatacaagtttttgagggtgaaaggacaaggacaaaagacaacaatttattgggtaaatttgagttgagcggtattccacccgctccaagaggcgtaccacaaattgaagttacatttgatatcgatgcaaatggtattttgaacgtatctgccgttgaaaaaggtactggtaaatctaacaagattacaattactaacgataagggaagattatccaaggaagatatcgataaaatggttgctgaggcagaaaagttcaaggccgaagatgaacaagaagctcaacgtgttcaagctaagaatcagttagaatcttacgcgtttactttgaaaaattctgtgagcgaaaataacttcaaggagaaggtgggtgaagaggatgccaggaaattggaagccgccgcccaagatgctataaattggttagatgcttctcaagcggcctccaccgaggaatacaaggaaaggcaaaaggaattggaaggtgttgcaaaccccattatgagtaaattttacggagctgcaggtggtgccccaggagcaggcccagttccgggtgctggagcaggccccactggagcaccagacaacggcccaacggttgaagaggttgattga

SEQ ID NO: 3225 - DNA, 627 bp, Saccharomyces cerevisiae
atgtacagcaatcataatttaaattcggatgactgttgcttcgattggaatgaagagaaggccgcagaactacagcgtacaggtgtttcttttgaccggagtttaacacctcaatctttaagaacatctacacgtagactatcagaagagaacaaacaacaaagtggcactatgcacattgacacttccccttctgtggtttcagatataatatcaagtagacgagatcgttcacaggatttttttgggcctcattcttcatcccctattgccccttcagaacgacaacgagcggatcagagatcacggttggagtccatgagattaactagacgtcgagacaaaatgaccaaagtacgcggtggcctagaaaagatggaagaaatgatcatgcaaggtgaacaccttagagaaatgcaaaggctaaagcaggaagcacaaaagaacgctctaccctctgacatggctgaatatatggaatggcaaaacaacgaggatttggaagacgatgagttgcttgcctttattgaaaaacaggaaacttataaaaatgaattagaacactttttgaacaatgctaataaaaatgtttatgagaacaactcgtatccgaactctcatacgtga

SEQ ID NO: 3226 - DNA, 627 bp, Artificial Sequence
  Description of Artificial Sequence: Synthetic polynucleotide
atgtacagcaatcataatttaaattctgatgactgttgcttcgattggaatgaagagaaggccgcagaattacagcgtacaggtgtttcttttgacagaagtttaacacctcaatctttaagaacatctacacgtagattatctgaagagaacaaacaacaaagtggcactatgcacattgacacttccccttctgtggtttctgatataatatctagtagaagagatcgttctcaggatttttttgggcctcattcttcttcccctattgccccttctgaaagacaaagagcggatcagagatctagattggagtccatgagattaactagacgtagagacaaaatgaccaaagtacgcggtggccttgaaaagatggaagaaatgatcatgcaaggtgaacaccttagagaaatgcaaaggttaaagcaggaagcacaaaagaacgctcttccctctgacatggctgaatatatggaatggcaaaacaacgaggatttggaagacgatgagttgcttgcctttattgaaaaacaggaaacttataaaaatgaattagaacactttttgaacaatgctaataaaaatgtttatgagaacaacagttatccgaactctcatacgtga

SEQ ID NO: 3227 - DNA, 4176 bp, Saccharomyces cerevisiae
atgtattcaactccactaaaaaagaggattgattacgatcgcgaaacgtttacggcttcggcttccttaggaggaaatcgcttaaggaatcggccaagagatgaccaaaacaacggtaagcccaacctgtcgagccgttccttcctaagcgaaagaaaaaccaggaaagatgtattaaacaagtatggcgaggctggaaatactattgaatcagaacttcgtgacgtaactacacacgtcaagataagcgggttgacttcctctgaaccgttgcagttggctagtgaatttgtccaggatttgagctttagggacagaaatacgccaatactagataatccagactattatagtaaaggtttggattataatttctcagatgaagtcggtggattaggtgcatttacccccttccaaagacaacaagtgacaaatataccagatgaagttttatcacaagtttcaaataccgaaataaagagtgatatgggtatttttctcgaactgaactattgttggataacctctgataataaattgatcttgtggaatatcaataatagttcagaataccactgtatcgatgaaatcgagcacaccattttaaaagtgaaactagttaagcctagcccaaacacttttgtttcttctgttgaaaatttattgattgtcgccactctttttgatatctatattttgacaatatcatttaatgaccgtactcatgagttgaatatctttaacacaggattaaaagtaaatgtaactgggttcaacgtttctaacataataagctacgaaaggactggacaaatatttttcactggtgcgactgatggtgtcaacgtgtgggaattacaatataactgctcggagaacctattcaatagcaagagtaacaaaatatgtttgacaaagtcaaacttagcaaatttactacctacaaaactaatacctagcatacccggaggaaagttgatacaaaaagtactagaaggggatgcaggtaccgaagaagaaactatatcacagctcgaagttgaccagtcaagaggcgttttacatactctatcaacgaaatctattgtcagatcttacctaattactagtaacgggctagtaggaccggtcctcattgatgctgctcatatcaggcgtggaatgaatgcattgggtgtaaaaaattcacctctactcagtaatcgagctttcaagattgccaaaattgtttctatctctatgtgtgagaacaatgatttattcttagctgttataactactactggggtacgcttgtatttcaaaggttccatttctaggagatcgattggctcattaaaattagactctgtaaagtttcctcctaccagtatatctagctccctcgagcaaaataaatctttcataatcggtcatcaccccttaaacacacatgatacaggcccactttcaacacaaaaagctagttcaacttatatcaataccacttgcgctagtacgataatatcaccaggtatatactttacgtgcgtgaggaaaagagctaattccggagaactatctaaaggtattacaaataaagctttgctggaaaataaagaggaacacaaactttacgttagtgctccagattacggtatattaaagaattatggtaaatatgtagagaataccgcactactcgatacgacagatgaaattaaagagattgttcccttaacaagatcttttaattacacttctactccccaaggttacgccaatgtgtttgcctcacaatacagtgcagaaccattaaaagttgccgttttaacaagcaatgccttagaaatttattgctatcgcacgcccgacgaagtgttcgaaagcttgattgaaaatcctttgccatttattcacagttatggtttatctgaggcttgctctacggcactttatttagcttgtaagtttaataagtcagagcatattaaatcaagtgccctggccttcttctctgccggtatacctggggtagttgaaataaaaccgaaaagttctagagaaagtggcagcgtgccgccaatctcacaaaatttattcgataaatctggtgaatgtgatggtatagtactatctcccaggttttatggttctgcgttattaattacaagattatttagccaaatatgggaagagagggtctttgtttttaaaagggcttccaaaacggaaaaaatggatgcttttggtatttctataactaggccacaggttgagtattatttatcatcgatatctgttttggcagatttcttcaacatccaccgtccttccttcgtttcatttgtgcctccgaaaggtagcaatgctataactgcatccgatgctgagtctattgctatgaatgctcttatcctcttaataaattctattaaggatgcgctttcccttataaatgtcttctacgaagatattgatgctttcaaatctttgctaaatacattgatgggtgcagggggagtttatgactccaagacacgtgagtatttttttgatcttaagttccatgatttgtttacccctaacgcaaaaaccaaacaattaataaaagagattttaatagaagttgtaaacgctaatattgcaagcggcacatcggcagattatattgtgaacgttttaaaggaacgctttggatctttttgtcatagtgcagacattttgtgttacagggcaggagagcatttagaagcagcacagaagtttgaaatgatagattctaaaatatcaaggaaccatttagataccgcaattgacctttatgaaaggtgtgccgagaatatagaattatgtgaattgagacgtgtggtggatatcatggtaaaacttaattaccagcctaagactgttggatttctacttagatttgcagataaaattgataaaggaaaccaagcacaagagtatgtgtctagaggttgtaatactgccgatccaagaaaagttttttatgacaaacgcataaatgtgtacactttgatttttgagattgtcaaaagcgtggatgactatacatctatcgaacaatccccttcaattgcaaatatatctattttttcaccagcttcgtcactgaagaaaagagtttactcagtgataatgaatagcaataacaggttcttccattattgcttttatgattggcttgtcgcaaataaaagacaagactacttattacgtttggattctcaatttgttttgccgtacttgaaagaaagagcagaaaaatctctagaaattagtaatctgttgtggttctacttattcaaagaagaacattttcttgaagcagctgatgttttatatgctctagctagttctgattttgacttaaaattaagtgaaagaatcgaatgcctagcaagagcaaacggtctttgtgatagctcaacgtcattcgaccaaaagccggcactggtccagttatctgagaacatccacgaacttttcgacatagcttccattcaggatgacctacttaatttggtaaggaatgaaacaaggattgacgaagattatagaaagcaactaacacttaaactaaatggaagggtgctcccattatcagatctctttaatgattgtgcagacccattagattactacgaaataaaactaagaattttcaaagtatctcaattcaaagatgaaaaagtcattcaaggagagtggaatcgattgctcgatagcatgaaaaatgctccatcgcctgacgtgggaagtgtaggccaagaatcctttctttcctcgatatccaacacactaattcgaattggtaaaacaacacgcgatacggacgttgttttccctgtacatttcttaatgaataaaatattagaatcattcattgataaaagttcagctgctgatggatctgtatgttcaatgttcttgcttgccggagtttctcatttaaaactctattacattctaagtcgtatcatagaaaactctgaaggaaatgtcgaattggcaaaaaaagaaatggtatggttgatcaaagattggtaccaaagtgattcagatttacgcggttcaattgcgccagaacaaatcaaaaaattggagaaatatgatccgaataccgatcccgttcaagattatgtgaaggatcgtcatcatggcctgaaatga

SEQ ID NO: 3228 - DNA, 4176 bp, Artificial Sequence
  Description of Artificial Sequence: Synthetic polynucleotide
atgtattctactccattgaaaaagaggattgattacgatcgcgaaacgtttacggcttctgcttccttaggaggaaatcgcttaaggaatagaccaagagatgaccaaaacaacggtaagcccaacttatccagccgttccttcttgagcgaaagaaaaaccaggaaagatgtattaaacaagtatggcgaggctggaaatactattgaaagtgaacttcgtgacgtaactacacacgtcaagataagcgggttgacttcctctgaaccgttgcagttggctagtgaatttgtccaggatttgagctttagggacagaaatacgccaatattggataatccagactattatagtaaaggtttggattataatttcagtgatgaagtcggtggattaggtgcatttacccccttccaaagacaacaagtgacaaatataccagatgaagttttatctcaagtttctaataccgaaataaagagtgatatgggtatttttctcgaattgaactattgttggataacctctgataataaattgatcttgtggaatatcaataatagttctgaataccactgtatcgatgaaatcgagcacaccattttaaaagtgaaattggttaagcctagcccaaacacttttgtttcttctgttgaaaatttattgattgtcgccactctttttgatatctatattttgacaatatcctttaatgaccgtactcatgagttgaatatctttaacacaggattaaaagtaaatgtaactgggttcaacgtttctaacataataagctacgaaaggactggacaaatatttttcactggtgcgactgatggtgtcaacgtgtgggaattacaatataactgcagtgagaacttgttcaatagcaagagtaacaaaatatgtttgacaaagtctaacttagcaaatttattgcctacaaaattgatacctagcatacccggaggaaagttgatacaaaaagtattggaaggggatgcaggtaccgaagaagaaactatatctcagctcgaagttgaccagtctagaggcgttttacatactttatctacgaaatctattgtcagatcttacttgattactagtaacgggttggtaggaccggtcctcattgatgctgctcatatcaggcgtggaatgaatgcattgggtgtaaaaaattctcctttactcagtaatagggctttcaagattgccaaaattgtttctatctctatgtgtgagaacaatgatttattcttagctgttataactactactggggtacgcttgtatttcaaaggttccatttctaggagatctattggctctttaaaattagactctgtaaagtttcctcctaccagtatatctagctccctcgagcaaaataaatctttcataatcggtcatcaccccttaaacacacatgatacaggcccactttctacacaaaaagctagttctacttatatcaataccacttgcgctagtacgataatatctccaggtatatactttacgtgcgtgaggaaaagagctaattccggagaattatctaaaggtattacaaataaagctttgttggaaaataaagaggaacacaaactttacgttagtgctccagattacggtatattaaagaattatggtaaatatgtagagaataccgcattgctcgatacgacagatgaaattaaagagattgttcccttaacaagatcttttaattacacttctactccccaaggttacgccaatgtgtttgcctctcaatacagtgcagaaccattaaaagttgccgttttaacaagcaatgccttagaaatttattgctatcgcacgcccgacgaagtgttcgaaagcttgattgaaaatcctttgccatttattcacagttatggtttatctgaggcttgctctacggcactttatttagcttgtaagtttaataagagtgagcatattaaatctagtgccttggccttcttctctgccggtatacctggggtagttgaaataaaaccgaaaagttctagagaaagtggcagcgtgccgccaatctctcaaaatttattcgataaatctggtgaatgtgatggtatagtattatctcccaggttttatggttctgcgttattaattacaagattatttagccaaatatgggaagagagggtctttgtttttaaaagggcttccaaaacggaaaaaatggatgcttttggtatttctataactaggccacaggttgagtattatttatcttctatatctgttttggcagatttcttcaacatccaccgtccttccttcgtttcttttgtgcctccgaaaggtagcaatgctataactgcatccgatgctgagtctattgctatgaatgctcttatcctcttaataaattctattaaggatgcgctttcccttataaatgtcttctacgaagatattgatgctttcaaatctttgttgaatacattgatgggtgcagggggagtttatgactccaagacacgtgagtatttttttgatcttaagttccatgatttgtttacccctaacgcaaaaaccaaacaattaataaaagagattttaatagaagttgtaaacgctaatattgcaagcggcacaagtgcagattatattgtgaacgttttaaaggaacgctttggatctttttgtcatagtgcagacattttgtgttacagggcaggagagcatttagaagcagcacagaagtttgaaatgatagattctaaaatatctaggaaccatttagataccgcaattgacctttatgaaaggtgtgccgagaatatagaattatgtgaattgagacgtgtggtggatatcatggtaaaacttaattaccagcctaagactgttggatttttacttagatttgcagataaaattgataaaggaaaccaagcacaagagtatgtgtctagaggttgtaatactgccgatccaagaaaagttttttatgacaaacgcataaatgtgtacactttgatttttgagattgtcaaaagcgtggatgactatacatctatcgaacaatccccttctattgcaaatatatctattttttctccagcttcttctttgaagaaaagagtttactctgtgataatgaatagcaataacaggttcttccattattgcttttatgattggcttgtcgcaaataaaagacaagactacttattacgtttggattctcaatttgttttgccgtacttgaaagaaagagcagaaaaatctttggaaattagtaatttattgtggttctacttattcaaagaagaacattttcttgaagcagctgatgttttatatgctttggctagttctgattttgacttaaaattaagtgaaagaatcgaatgcttggcaagagcaaacggtctttgtgatagctctacgtccttcgaccaaaagccggcattggtccagttatctgagaacatccacgaacttttcgacatagcttccattcaggatgacttacttaatttggtaaggaatgaaacaaggattgacgaagattatagaaagcaattgacacttaaattgaatggaagggtgctcccattaagtgatctctttaatgattgtgcagacccattagattactacgaaataaaattgagaattttcaaagtatctcaattcaaagatgaaaaagtcattcaaggagagtggaatagattgctcgatagcatgaaaaatgctccatctcctgacgtgggaagtgtaggccaagaatcctttctttcctccatatccaacacattaattagaattggtaaaacaacacgcgatacggacgttgttttccctgtacatttcttaatgaataaaatattagaatctttcattgataaaagttctgctgctgatggatctgtatgttccatgttcttgcttgccggagtttctcatttaaaactctattacattttaagtcgtatcatagaaaactctgaaggaaatgtcgaattggcaaaaaaagaaatggtatggttgatcaaagattggtaccaaagtgattctgatttacgcggttccattgcgccagaacaaatcaaaaaattggagaaatatgatccgaataccgatcccgttcaagattatgtgaaggatcgtcatcatggcttgaaatga

SEQ ID NO: 3229 - DNA, 909 bp, Saccharomyces cerevisiae
atgagggaaaaaagaacaatttcaaataaagacacaaactatctcaaattcccaaataaactccaaagatattcccgattcttgagcaggaagatatccaataccagcccagaaaagcaaccgaagaagaacataaaagaacactgtttatcgagttatcataaagaacactcggtaaaaccaaagcaaaactccggtaatgttgcagcaaaagaagacaaagatacgcagcatttacaaaataatgtcgctaatgaagaagcaacggaatgtctaacaagaagtaatttgaaaaagttacaagagaaaattttcgatagagaacttaatgatattgcctgtgatcattgtctttgtagcacagaaaatagaagagatatcaagtattcacgactttggttcctttttgagttggaaatgagtgaaaactggaatgaaaatctccgccttagttgctataataaatatgtgtattccgcaattgatgagtcgtggaaaatggagaatattctacttaaagaacaagagaagcattatgaatattttccaataggacaattactgatacccaataatattgactacactaataaacagaaaaggaaggaaaacattgaagacttaacaattgaaattgatagtattatagagacaaaccatcaaaagaaaagatttttgccgcaaagtgtcctgataaaaagggaggatgaaattgcatttgacgactttcatttggatgcacgaaaggttctaaacgatttgagcgccacttctgaaaatccattcagctcttcaccaaatacaaaaaaaattaaatcaaagggaaaaaccttggaagtggttcccaaaaagaaaaacaaaaagatcataggtgctttggaaagaaagctacatatagatgaaaattaa

SEQ ID NO: 3230 - DNA, 909 bp, Artificial Sequence
  Description of Artificial Sequence: Synthetic polynucleotide
atgagggaaaaaagaacaatttctaataaagacacaaactatctcaaattcccaaataaactccaaagatattccagattcttgagcaggaagatatccaataccagcccagaaaagcaaccgaagaagaacataaaagaacactgtttatccagttatcataaagaacactctgtaaaaccaaagcaaaactccggtaatgttgcagcaaaagaagacaaagatacgcagcatttacaaaataatgtcgctaatgaagaagcaacggaatgtttaacaagaagtaatttgaaaaagttacaagagaaaattttcgatagagaacttaatgatattgcctgtgatcattgtctttgtagcacagaaaatagaagagatatcaagtattctaggctttggttcctttttgagttggaaatgagtgaaaactggaatgaaaatctccgccttagttgctataataaatatgtgtattccgcaattgatgagagttggaaaatggagaatattttacttaaagaacaagagaagcattatgaatattttccaataggacaattattgatacccaataatattgactacactaataaacagaaaaggaaggaaaacattgaagacttaacaattgaaattgatagtattatagagacaaaccatcaaaagaaaagatttttgccgcaaagtgtcttgataaaaagggaggatgaaattgcatttgacgactttcatttggatgcaagaaaggttttgaacgatttgagcgccacttctgaaaatccattcagctcttctccaaatacaaaaaaaattaaatccaagggaaaaaccttggaagtggttcccaaaaagaaaaacaaaaagatcataggtgctttggaaagaaagttgcatatagatgaaaattga

SEQ ID NO: 3231 - DNA, 1098 bp, Saccharomyces cerevisiae
atgtctttttttaatcgatcaaatacaacctcagctttgggaacgagtactgcaatggcgaatgaaaaggatttggccaatgatattgtcattaatagcccagcagaggactcaatatcggatattgcgttttcaccgcaacaagatttcatgtttagtgccagttcctgggacggtaaggtacgtatttgggatgtccaaaatggtgtacctcaaggtagagcgcagcatgaaagctccagccctgtattatgtaccagatggtcgaatgatggtacaaaagtagcctcaggcgggtgtgataatgccctgaaattgtacgatattgccagtggtcaaacacagcaaattggaatgcattctgcgccaataaaagtattacgttttgtacaatgtggaccatcgaacacagagtgtatagtaaccggatcctgggataaaaccataaaatattgggatatgagacaaccccagcccgtatccaccgtaatgatgcctgaaagagtatattcgatggataataaacagtctctgttagtagtggctactgccgaaagacatatcgctattatcaatctagcaaacccaacaacgatttttaaggcaaccacgtcacctttaaaatggcaaactcgatgcgtggcatgttataatgaagccgatggatatgcgattggttcagtggaaggtagatgctccataaggtatatcgatgatggtatgcagaaaaaatcaggcttttcatttaaatgccatcgtcaaaccaatcctaatagggcacctggctccaatggtcaatctctagtgtatcctgtaaatagcattgcatttcatccattatatggtacttttgttacggctggtggtgatggtaccttcaatttttgggataagaatcaaaggcatagattgaaaggctatcctactttgcaagcatctattcctgtatgcagcttcaataggaatggtagcgtatttgcgtacgctctaagttatgattggcatcaaggccatatgggcaacagacccgactatccaaacgtcattaggctacatgccacaactgatgaagaggttaaagagaaaaagaaaaggtga

SEQ ID NO: 3232 - DNA, 1098 bp, Artificial Sequence
  Description of Artificial Sequence: Synthetic polynucleotide
atgtctttttttaatagatctaatacaaccagtgctttgggaacgagtactgcaatggcgaatgaaaaggatttggccaatgatattgtcattaatagcccagcagaggacagtatatctgatattgcgttttctccgcaacaagatttcatgtttagtgccagttcctgggacggtaaggtacgtatttgggatgtccaaaatggtgtacctcaaggtagagcgcagcatgaaagctccagccctgtattatgtaccagatggtctaatgatggtacaaaagtagcctctggcgggtgtgataatgccttgaaattgtacgatattgccagtggtcaaacacagcaaattggaatgcattctgcgccaataaaagtattacgttttgtacaatgtggaccatctaacacagagtgtatagtaaccggatcctgggataaaaccataaaatattgggatatgagacaaccccagcccgtatccaccgtaatgatgcctgaaagagtatattccatggataataaacagtctttattagtagtggctactgccgaaagacatatcgctattatcaatttggcaaacccaacaacgatttttaaggcaaccacgtctcctttaaaatggcaaactagatgcgtggcatgttataatgaagccgatggatatgcgattggttctgtggaaggtagatgctccataaggtatatcgatgatggtatgcagaaaaaatctggcttttcttttaaatgccatcgtcaaaccaatcctaatagggcacctggctccaatggtcaatctttggtgtatcctgtaaatagcattgcatttcatccattatatggtacttttgttacggctggtggtgatggtaccttcaatttttgggataagaatcaaaggcatagattgaaaggctatcctactttgcaagcatctattcctgtatgcagcttcaataggaatggtagcgtatttgcgtacgctttaagttatgattggcatcaaggccatatgggcaacagacccgactatccaaacgtcattaggttacatgccacaactgatgaagaggttaaagagaaaaagaaaaggtga

SEQ ID NO: 3233 - DNA, 3342 bp, Saccharomyces cerevisiae
atggatcaacaatttctaagtcaacttgagcaaactttgcacgctatcacttctggtgtaggcttgaaggaggctacaaaaactttgcaaactcaattttatacccagcctacaactttgccagctttgattcatattttgcagaacggctccgatgattcgttgaaacaactagctggtgttgaagctagaaagttggtttccaagcactggaacgccattgatgaatccactagagcctccatcaaaacatctcttttacaaacagcatttagtgagccaaaagaaaatgttcgtcattccaacgctcgagtaattgcttctattggtactgaagagctagatggtaacaaatggccagatttagtccctaacctaatccaaactgcttctggtgaagacgttcaaacaagacaaactgccatttttattttgttttctctgttggaagatttcacctcttctctatctggccacatcgatgactttttggctttgttctctcagacaattaatgatccatcttctttggagatcagatcattatctgcccaggctttgaaccacgtttctgctttgattgaagaacaagaaaccatcaaccctgttcaagctcaaaaattcgccgcctcaattccatctgtggttaacgttttagacgcagttatcaaggccgacgacaccatgaacgctaaattaatctttaactgtttaaacgatttcctgctattggactcccaattaacaggaaactttattgtggatttgattaagctgtctttacaaattgctgttaacagtgagattgacgaagatgttcgagtttttgctcttcaattcatcatatcttcattgtcctacagaaaatcgaaggtttctcaaagcaaattgggcccagaaattactgttgcagctttgaaggtggcttgtgaagagatcgatgttgacgatgaattaaacaacgaagacgaaacaggcgaaaatgaggaaaatacaccctcttcttctgctattagactgttagctttcgcttcctctgaactgccaccatcccaggttgcttccgttattgttgaacacattccagctatgttgcaatccgcaaacgtttttgagagaagagctattcttttagctatttccgttgctgttactggttctccagactacattttgtctcaattcgacaaaattatccctgccaccataaacggtttgaaggatactgaaccgattgttaaattagctgctctgaagtgtattcaccaattaaccactgacttacaagacgaagttgccaaatttcatgaagaatacttgccattgatcatcgatatcattgattctgcgaaaaacattgtcatttacaactatgcaactgttgctttagatggtctgcttgagttcattgcttatgatgctatcgctaagtacttggatccattaatgaacaaactattctatatgttggaaagtaatgaatcatccaagttgagatgtgctgttgtttctgcaattggttccgctgcttttgcagcaggttccgcgttcattccatatttcaagactagtgttcactatttggaaaaattcatccaaaactgttctcaaattgaaggtatgagcgaagatgatatagaactaagggccaacacttttgaaaatatttctactatggccagagccgtcagatcagacgcatttgccgaatttgccgaacctttggttaactccgcctatgaggccatcaaaactgattctgctagattaagagaatctggttatgcattcattgcaaacttggctaaagtttacggcgaaaattttgctcctttcttgaaaactatcctaccagaaatcttcaagacactagaattagatgaataccaattcaacttcgatggtgatgcagaggatttagccgcatttgctgattctgccaatgaagaagaactacagaacaaattcaccgttaacactggtatttcctatgaaaaggaagttgcttctgcagctctatccgaattagcattgggtacgaaggagcatttcttgccatacgtcgaacaatccttaaaggttttgaatgaacaagtcgatgagtcgtacggtttaagagaaaccgctctaaacaccatctggaatgttgttaagtctgtcctgttggcttccaaagtagaaccagaaagctatcctaagggtatcccagcctcttcctacgttaatgctgatgttttggcggttattcaagctgccagggaaacttccatgggtaacttaagcgatgaattcgaaacctcaatggtcattaccgttatggaagattttgccaatatgattaagcaatttggcgcaatcatcatcatggacaacggcgactcttctatgctagaagctttgtgcatgcaagttcttagtgtcttgaagggtacccatacttgtcaaaccattgatatcgaggaggacgttccaagagatgaagaattagacgcttctgaaaccgaagcaactttacaagatgttgcattggaagttcttgtcagtttatctcaagctttagctggtgattttgccaaagtctttgacaacttcagaccggttgttttcggattattccaatctaaatccaagaataagagatcatccgccgtcggtgccgcctctgaattagctctaggtatgaaagaacaaaatcctttcgttcatgaaatgctagaagccttagtcattagattaacaagcgataaatctttagaagttagaggtaacgcggcttatggtgttggtttgttgtgtgaatatgcttctatggacatctcagccgtttatgaacctgttttgaaggcgctttatgagttactaagtgctgctgaccaaaaggccttagcagccgaagatgacgaagccaccagagagattattgatagagcatacgctaatgctagtggatgtgtggccagaatggctttgaagaacagtgctctagttccattggaacaaactgttccagcattattggcacatttaccactaaacaccggttttgaagaatacaatccaattttcgaattgatcatgaaactataccaggaaaatagtcccgttatcacaaacgaaaccccaaggatcatcgagattttcagtgctgtgtttaccaaagaaaatgatagaattaagttagaaaaggagtctactctaggtagggaagagaatatggaaagattaaagcaattccaaaccgaagagatgaagcataaggttattgaattattgaagtatctaaacactacttacaacggaattgttgctcaaaatccggttttagctgccgtcattgcttga

SEQ ID NO: 3234 - DNA, 3342 bp, Artificial Sequence
  Description of Artificial Sequence: Synthetic polynucleotide
atggatcaacaatttttgagtcaacttgagcaaactttgcacgctatcacttctggtgtaggcttgaaggaggctacaaaaactttgcaaactcaattttatacccagcctacaactttgccagctttgattcatattttgcagaacggctccgatgattctttgaaacaattggctggtgttgaagctagaaagttggtttccaagcactggaacgccattgatgaatccactagagcctccatcaaaacatctcttttacaaacagcatttagtgagccaaaagaaaatgttcgtcattccaacgctcgtgtaattgcttctattggtactgaagagttagatggtaacaaatggccagatttagtccctaacttgatccaaactgcttctggtgaagacgttcaaacaagacaaactgccatttttattttgttttctttgttggaagatttcacctcttctttatctggccacatcgatgactttttggctttgttctctcagacaattaatgatccatcttctttggagatcagatctttatctgcccaggctttgaaccacgtttctgctttgattgaagaacaagaaaccatcaaccctgttcaagctcaaaaattcgccgcctctattccatctgtggttaacgttttagacgcagttatcaaggccgacgacaccatgaacgctaaattaatctttaactgtttaaacgatttcttattattggactcccaattaacaggaaactttattgtggatttgattaagttatctttacaaattgctgttaacagtgagattgacgaagatgttcgtgtttttgctcttcaattcatcatatcttctttgtcctacagaaaatccaaggtttctcaaagcaaattgggcccagaaattactgttgcagctttgaaggtggcttgtgaagagatcgatgttgacgatgaattaaacaacgaagacgaaacaggcgaaaatgaggaaaatacaccctcttcttctgctattagattattagctttcgcttcctctgaattaccaccatcccaggttgcttccgttattgttgaacacattccagctatgttgcaatccgcaaacgtttttgagagaagagctattcttttagctatttccgttgctgttactggttctccagactacattttgtctcaattcgacaaaattatccctgccaccataaacggtttgaaggatactgaaccgattgttaaattagctgctttgaagtgtattcaccaattaaccactgacttacaagacgaagttgccaaatttcatgaagaatacttgccattgatcatcgatatcattgattctgcgaaaaacattgtcatttacaactatgcaactgttgctttagatggtttacttgagttcattgcttatgatgctatcgctaagtacttggatccattaatgaacaaattattctatatgttggaaagtaatgaatcttccaagttgagatgtgctgttgtttctgcaattggttccgctgcttttgcagcaggttccgcgttcattccatatttcaagactagtgttcactatttggaaaaattcatccaaaactgttctcaaattgaaggtatgagcgaagatgatatagaattgagggccaacacttttgaaaatatttctactatggccagagccgtcagaagtgacgcatttgccgaatttgccgaacctttggttaactccgcctatgaggccatcaaaactgattctgctagattaagagaatctggttatgcattcattgcaaacttggctaaagtttacggcgaaaattttgctcctttcttgaaaactatcttgccagaaatcttcaagacattagaattagatgaataccaattcaacttcgatggtgatgcagaggatttagccgcatttgctgattctgccaatgaagaagaattacagaacaaattcaccgttaacactggtatttcctatgaaaaggaagttgcttctgcagctttgtccgaattagcattgggtacgaaggagcatttcttgccatacgtcgaacaatccttaaaggttttgaatgaacaagtcgatgagagttacggtttaagagaaaccgctttgaacaccatctggaatgttgttaagtctgtcttattggcttccaaagtagaaccagaaagctatcctaagggtatcccagcctcttcctacgttaatgctgatgttttggcggttattcaagctgccagggaaacttccatgggtaacttaagcgatgaattcgaaacctccatggtcattaccgttatggaagattttgccaatatgattaagcaatttggcgcaatcatcatcatggacaacggcgactcttctatgttggaagctttgtgcatgcaagttcttagtgtcttgaagggtacccatacttgtcaaaccattgatatcgaggaggacgttccaagagatgaagaattagacgcttctgaaaccgaagcaactttacaagatgttgcattggaagttcttgtcagtttatctcaagctttagctggtgattttgccaaagtctttgacaacttcagaccggttgttttcggattattccaatctaaatccaagaataagagaagttccgccgtcggtgccgcctctgaattagctttgggtatgaaagaacaaaatcctttcgttcatgaaatgttggaagccttagtcattagattaacaagcgataaatctttagaagttagaggtaacgcggcttatggtgttggtttgttgtgtgaatatgcttctatggacatcagtgccgtttatgaacctgttttgaaggcgctttatgagttattaagtgctgctgaccaaaaggccttagcagccgaagatgacgaagccaccagagagattattgatagagcatacgctaatgctagtggatgtgtggccagaatggctttgaagaacagtgctttggttccattggaacaaactgttccagcattattggcacatttaccattgaacaccggttttgaagaatacaatccaattttcgaattgatcatgaaactttaccaggaaaatagtcccgttatcacaaacgaaaccccaaggatcatcgagattttcagtgctgtgtttaccaaagaaaatgatagaattaagttagaaaaggagtctactttaggtagggaagagaatatggaaagattaaagcaattccaaaccgaagagatgaagcataaggttattgaattattgaagtatttgaacactacttacaacggaattgttgctcaaaatccggttttagctgccgtcattgcttga

SEQ ID NO: 3235 - DNA, 3282 bp, Saccharomyces cerevisiae
atgccatttgatgttttgatatcaaaccaaaaagataataccaatcaccagaacatcacgccaatatcaaaatcagttcttttggcgcctcattcaaaccatccagtgattgaaatagctacgtattcagaaaccgatgtatacgaatgctatatacgtgggtttgaaactaaaatagtgatgagaagaactaaagatgattggattaatattacccaggttttcaaaatagctcaattttcgaagacgaaaagaactaaaatactggaaaaggaatcaaatgatatgcaacatgaaaaagttcaaggtgggtatggtaggtttcaaggtacttggatcccactggattcagcgaagtttttagtcaataagtacgaaataattgaccctgtggtcaactccatcttaacttttcaattcgatccaaataaccctccaccaaagagaagcaaaaatagtatattgaggaagacttcgccgggaacgaagataacttctccatcgagctacaataaaacaccaagaaaaaagaacagtagttcatcaacatcggctacaactacagctgcgaataagaaaggcaagaaaaatgcatcgatcaaccagccgaatccaagtcctttacaaaaccttgttttccaaactcctcaacagttccaagtaaattcatcaatgaatataatgaacaataatgataaccacaccacgatgaatttcaacaatgacacaagacacaatttaataaataatattagtaacaacagcaatcaatctactattattcaacaacaaaaatccattcatgaaaactctttcaataataattattcggcaactcagaaacctcttcaattttttccaattccgacaaatttacaaaacaagaacgttgctctgaataaccctaataataatgacagtaatagttacagccataacatcgacaatgtcattaacagcagtaataacaataataatggcaataataataacttgatcatagttccagacggacctatgcaaagccaacaacaacaacaacatcatcatgaatatttgacgaataacttcaatcattccatgatggactccattacaaatggcaatagtaaaaaaaggaggaaaaagctgaatcaatctaatgaacaacaattttacaaccagcaagaaaaaatacaaaggcatttcaaattaatgaagcaacccttattatggcaatcctttcaaaatccaaatgatcaccataatgagtactgtgacagtaacggcagcaacaataacaacaacactgtagcatccaatggctcctccattgaagtattttcatcaaatgaaaatgataacagtatgaatatgtcttcacgatctatgacaccgttcagcgcaggaaatacttcatctcaaaacaagttggaaaacaaaatgacagatcaagaatacaagcagacgatattaacaatactatcatcggaaaggtcttctgatgtagatcaagcgttgttggctactttatatccggcgcccaaaaattttaacataaattttgaaattgatgatcaaggtcacactccactccattgggctacagctatggcgaatattcctttgataaaaatgctaattaccttaaatgctaatgcattacagtgtaataagctcggttttaattgcatcacaaaatcaattttctacaacaattgctacaaggagaatgctttcgatgaaataatatccatcttaaaaatatgtcttataactcccgacgtaaatggaagattgccatttcattatttaattgaattgagcgttaataagtccaaaaatccaatgataataaaatcttatatggattcgataatattgagcttgggtcagcaggactacaatttgttgaagatatgtttgaactaccaagataatatagggaacactccactgcatttatctgctttaaacttgaacttcgaggtttacaacagactggtatatcttggtgcgtcaacagatatattgaatctagataacgaatcgcctgcgtcaataatgaataagtttaatactccggctggcgggtcaaacagcagaaacaacaacaccaaggcagatcgaaagttagctcgaaaccttcctcaaaagaattattaccaacaacagcaacagcaacagcaaccacaaaacaatgtcaaaattccaaaaattataaaaactcaacatcctgataaagaagattctactgcagatgtcaatatagctaaaacagattctgaagtcaacgaaagtcaatacctgcattccaaccagccaaattctacaaatatgaacactattatggaagacttgtcgaatattaattctttcgtgacgtcgtctgtcattaaagatataaagtctacgccgtccaaaattcttgaaaactctcccattttatacagaagaagatcacagtcaatatcagatgaaaaagaaaaggcaaaggataatgagaatcaagttgaaaagaaaaaggatcccttgaatagtgtgaaaactgccatgccatcattggaatcgccttcttcccttctgccgatacagatgtctccactaggaaagtactcaaaaccgctttcgcagcagatcaacaaattaaatacaaaagtttcttctctacaaagaataatgggtgaagaaattaaaaatctggacaacgaagtagtagaaaccgaatcctctatttctaacaataagaagagattgattacaatagcacatcaaatagaggatgctttcgattccgtatcaaacaaaactcccataaattcgatatcagatttacaatcaaggattaaagaaacatcgtcaaagttgaattctgaaaagcaaaattttattcaaagcttggaaaaatctcaagctttaaaactggctacaattgtccaggatgaggaatcaaaggttgatatgaatactaactcaagttcacatccagaaaaacaggaagatgaagagccaattccaaagtcaacgtcggaaacttcttctcctaaaaacaccaaagcggacgccaaattttctaatactgtacaagaatcatatgatgtaaatgagacgttgagactagcaacggaactaactattctacagtttaaaagaaggatgacaacattgaaaataagcgaagctaaaagcaaaattaattcatcggtgaagttagataaatacagaaacttgattggtatcacaattgagaacattgactcaaaattggacgatatagaaaaggatttgagggcaaacgcataa

SEQ ID NO: 3236 - DNA, 3282 bp, Artificial Sequence
  Description of Artificial Sequence: Synthetic polynucleotide
atgccatttgatgttttgataagcaaccaaaaagataataccaatcaccagaacatcacgccaatatccaaatctgttcttttggcgcctcattccaaccatccagtgattgaaatagctacgtattctgaaaccgatgtatacgaatgctatatacgtgggtttgaaactaaaatagtgatgagaagaactaaagatgattggattaatattacccaggttttcaaaatagctcaattttccaagacgaaaagaactaaaatattggaaaaggaaagtaatgatatgcaacatgaaaaagttcaaggtgggtatggtaggtttcaaggtacttggatcccattagattctgcgaagtttttagtcaataagtacgaaataattgaccctgtggtcaactccatcttaacttttcaattcgatccaaataaccctccaccaaagagaagcaaaaatagtatattgaggaagacttctccgggaacgaagataacttctccatccagctacaataaaacaccaagaaaaaagaacagtagttcttctacatctgctacaactacagctgcgaataagaaaggcaagaaaaatgcatctatcaaccagccgaatccaagtcctttacaaaaccttgttttccaaactcctcaacagttccaagtaaattcttctatgaatataatgaacaataatgataaccacaccacgatgaatttcaacaatgacacaagacacaatttaataaataatattagtaacaacagcaatcaatctactattattcaacaacaaaaatccattcatgaaaactctttcaataataattattctgcaactcagaaacctcttcaattttttccaattccgacaaatttacaaaacaagaacgttgctttgaataaccctaataataatgacagtaatagttacagccataacatcgacaatgtcattaacagcagtaataacaataataatggcaataataataacttgatcatagttccagacggacctatgcaaagccaacaacaacaacaacatcatcatgaatatttgacgaataacttcaatcattccatgatggactccattacaaatggcaatagtaaaaaaaggaggaaaaagttgaatcaatctaatgaacaacaattttacaaccagcaagaaaaaatacaaaggcatttcaaattaatgaagcaacccttattatggcaatcctttcaaaatccaaatgatcaccataatgagtactgtgacagtaacggcagcaacaataacaacaacactgtagcatccaatggctcctccattgaagtattttcttccaatgaaaatgataacagtatgaatatgtcttctcgttctatgacaccgttcagcgcaggaaatacttcttctcaaaacaagttggaaaacaaaatgacagatcaagaatacaagcagacgatattaacaatattatcttctgaaaggtcttctgatgtagatcaagcgttgttggctactttatatccggcgcccaaaaattttaacataaattttgaaattgatgatcaaggtcacactccactccattgggctacagctatggcgaatattcctttgataaaaatgttgattaccttaaatgctaatgcattacagtgtaataagctcggttttaattgcatcacaaaatccattttctacaacaattgctacaaggagaatgctttcgatgaaataatatccatcttaaaaatatgtcttataactcccgacgtaaatggaagattgccatttcattatttaattgaattgagcgttaataagtccaaaaatccaatgataataaaatcttatatggattctataatattgagcttgggtcagcaggactacaatttgttgaagatatgtttgaactaccaagataatatagggaacactccattgcatttatctgctttaaacttgaacttcgaggtttacaacagattggtatatcttggtgcgtctacagatatattgaatttggataacgaatctcctgcgtctataatgaataagtttaatactccggctggcgggtctaacagcagaaacaacaacaccaaggcagatagaaagttagctagaaaccttcctcaaaagaattattaccaacaacagcaacagcaacagcaaccacaaaacaatgtcaaaattccaaaaattataaaaactcaacatcctgataaagaagattctactgcagatgtcaatatagctaaaacagattctgaagtcaacgaaagtcaatacttgcattccaaccagccaaattctacaaatatgaacactattatggaagacttgagcaatattaattctttcgtgacgtcttctgtcattaaagatataaagtctacgccgtccaaaattcttgaaaactctcccattttatacagaagaagaagccagagtatatctgatgaaaaagaaaaggcaaaggataatgagaatcaagttgaaaagaaaaaggatcccttgaatagtgtgaaaactgccatgccatctttggaatctccttcttcccttttgccgatacagatgtctccattaggaaagtactctaaaccgctttctcagcagatcaacaaattaaatacaaaagtttcttctttacaaagaataatgggtgaagaaattaaaaatttggacaacgaagtagtagaaaccgaatcctctatttctaacaataagaagagattgattacaatagcacatcaaatagaggatgctttcgattccgtatccaacaaaactcccataaattctatatctgatttacaatccaggattaaagaaacatcttccaagttgaattctgaaaagcaaaattttattcaaagcttggaaaaatctcaagctttaaaattggctacaattgtccaggatgaggaatccaaggttgatatgaatactaacagtagttctcatccagaaaaacaggaagatgaagagccaattccaaagtctacgagtgaaacttcttctcctaaaaacaccaaagcggacgccaaattttctaatactgtacaagaaagttatgatgtaaatgagacgttgagattagcaacggaattgactattttacagtttaaaagaaggatgacaacattgaaaataagcgaagctaaaagcaaaattaattcttctgtgaagttagataaatacagaaacttgattggtatcacaattgagaacattgactctaaattggacgatatagaaaaggatttgagggcaaacgcatga

SEQ ID NO: 3237 - DNA, 564 bp, Saccharomyces cerevisiae
atgctacctttatatcttttaacaaatgcgaagggacaacaaatgcaaatagaattgaaaaacggtgaaattatacaagggatattgaccaacgtagataactggatgaaccttactttatctaatgtaaccgaatatagtgaagaaagcgcaattaattcagaagacaatgctgagagcagtaaagccgtaaaattgaacgaaatttatattagagggacttttatcaagtttatcaaattgcaagataatataattgacaaggtcaagcagcaaattaactccaacaataactctaatagtaacggccctgggcataaaagatactacaacaatagggattcaaacaacaatagaggtaactacaacagaagaaataataataacggcaacagcaaccgccgtccatactctcaaaaccgtcaatacaacaacagcaacagcagtaacattaacaacagtatcaacagtatcaatagcaacaaccaaaatatgaacaatggtttaggtgggtccgtccaacatcattttaacagctcttctccacaaaaggtcgaattttaa

SEQ ID NO: 3238 - DNA, 564 bp, Artificial Sequence
  Description of Artificial Sequence: Synthetic polynucleotide
atgttgcctttatatcttttaacaaatgcgaagggacaacaaatgcaaatagaattgaaaaacggtgaaattatacaagggatattgaccaacgtagataactggatgaaccttactttatctaatgtaaccgaatatagtgaagaaagcgcaattaattctgaagacaatgctgagagcagtaaagccgtaaaattgaacgaaatttatattagagggacttttatcaagtttatcaaattgcaagataatataattgacaaggtcaagcagcaaattaactccaacaataactctaatagtaacggccctgggcataaaagatactacaacaatagggattccaacaacaatagaggtaactacaacagaagaaataataataacggcaacagcaaccgccgtccatactctcaaaaccgtcaatacaacaacagcaacagcagtaacattaacaacagtatcaacagtatcaatagcaacaaccaaaatatgaacaatggtttaggtgggtccgtccaacatcattttaacagctcttctccacaaaaggtcgaattttga

SEQ ID NO: 3239 - DNA, 2121 bp, Saccharomyces cerevisiae
atgagagtaagaccaaagaggtcggtcataacactcatggcgatagtagtcgtgatgctcatcctcagaaaccagttctactcatcacgaacgcgagggcatgggcaggaaccagtcatctcctccagccaaaagaatctttatgacgggtggataacacccaatttctatagaaagggtgatcccttggaattgattgtgaataaggtagaatctgacttaacgcaattgccatacgcatattatgacttgcccttcacttgtcctcctactatgcataaaaaaccgcttcatttatctctaaacgaaataataagaggggataggaaatgggaaagcgactataaactcaaatttggcgaagacaatccatgtgaaacgttgtgtgcccggaaaactaccaaagagggcatgcagaccttagacaagttagtcagggagggatacgtcgtacaatggctaattgatgatgaattgccggctgccactacctttatttccaccactgatcataaaaaatattatgcatctgggtttcctttaggtttcatagatcctgatacagataaaacctatctgcataatcacgtaatgctggtaatacgttttcatgccagtgataatgataaaaataccatagtcggctttgaagtatatccaagatctgtgtcagattatcattgtcctggggcatcgaagaactacgaacaatacgaaatagtcattcctgaggatgaaaatgagttgacatatttgccatttacttactccgtatattggagggaagaatttgaagtagactggaatcatagatgggattatttcttgaacgcaggtgagttatctgacgaacagagcattcagtttcattggatgagcttagccaattcagtgggaattgtattgtccatctcatttatcacgcttattatttacgtacgagtcatgtacacggataaaagtaattcaaagtcccccaaatacatgataaatatagaaggaattgaaacagaggatgacctggacgatgacaagtatggtaaatactccgtttacacggtggcgaaagactggatacaaaatggtagaccaaatttatttggtttaaaagttttaatccttctggtctcatttggggtgcaatttttatttaccataattggatccttaacgatatcatgttcaatgaacaaattgcataatgtaagaaacagtgtgctaactatggccattttatttttcgtacttggagcattcatggcatcattcgtagggacaagactcagtatggtaacgaaaacgaaaagaaccaaggccaattaccttgacgataacagatacctcaaagactacaagaagtttagtcccatttttacgatactttgtgggtccagcttacctggcattgtaatggtgagcacatttttattaaatagtattgtttgggcacatgattctacaagtgcattaccattcaagactattgtgtttttcatgagcatttatttcatcgtctgtataccactcagcttgtttggtggtattgtagctaataatatacctttgcctcaatattggttgagtggaattactaaagatgaaagcaatagcgatggcaatggattatttgtacctaaatcacgagccaagttcaacccgttggtttactgcggcatttatttatgtggtattttccccttgttagtaatttacgtggaaatgcaatacgtttacaaatctctctggttggagaaaactacattttattatttttacggattcctttttttgagtatcatactattatgcgtgttaactatggagatatcaattattggaagttatttattaatgagattttgcttcgaagataaggtggttcgcaacaattggagatggaagtgctttgaaatgggatttagcggtggtgtatatatggaattgtattcgctatattacattttcgcagtgctaaacatccatgggttttcatctatcttaatttccatttgttatagtttaatcttcaacgtaatgtgcagtttagggcttggcgcattaagttacttaacggcttcatggtttataaataaaatataccaccagaaagtcaacctgtaa

SEQ ID NO: 3240 - DNA, 2121 bp, Artificial Sequence
  Description of Artificial Sequence: Synthetic polynucleotide
atgagagtaagaccaaagaggtccgtcataacactcatggcgatagtagtcgtgatgctcatcctcagaaaccagttctactcttctaggacgcgtgggcatgggcaggaaccagtcatctcctccagccaaaagaatctttatgacgggtggataacacccaatttctatagaaagggtgatcccttggaattgattgtgaataaggtagaatctgacttaacgcaattgccatacgcatattatgacttgcccttcacttgtcctcctactatgcataaaaaaccgcttcatttatctttgaacgaaataataagaggggataggaaatgggaaagcgactataaactcaaatttggcgaagacaatccatgtgaaacgttgtgtgccagaaaaactaccaaagagggcatgcagaccttagacaagttagtcagggagggatacgtcgtacaatggttgattgatgatgaattgccggctgccactacctttatttccaccactgatcataaaaaatattatgcatctgggtttcctttaggtttcatagatcctgatacagataaaacctatttgcataatcacgtaatgttggtaatacgttttcatgccagtgataatgataaaaataccatagtcggctttgaagtatatccaagatctgtgtctgattatcattgtcctggggcatccaagaactacgaacaatacgaaatagtcattcctgaggatgaaaatgagttgacatatttgccatttacttactccgtatattggagggaagaatttgaagtagactggaatcatagatgggattatttcttgaacgcaggtgagttatctgacgaacagagcattcagtttcattggatgagcttagccaattctgtgggaattgtattgtccatctcttttatcacgcttattatttacgtaagagtcatgtacacggataaaagtaattctaagtcccccaaatacatgataaatatagaaggaattgaaacagaggatgacttggacgatgacaagtatggtaaatactccgtttacacggtggcgaaagactggatacaaaatggtagaccaaatttatttggtttaaaagttttaatccttttggtcagttttggggtgcaatttttatttaccataattggatccttaacgatatcttgttccatgaacaaattgcataatgtaagaaacagtgtgttgactatggccattttatttttcgtacttggagcattcatggcatctttcgtagggacaagactcagtatggtaacgaaaacgaaaagaaccaaggccaattaccttgacgataacagatacctcaaagactacaagaagtttagtcccatttttacgatactttgtgggtccagcttacctggcattgtaatggtgagcacatttttattaaatagtattgtttgggcacatgattctacaagtgcattaccattcaagactattgtgtttttcatgagcatttatttcatcgtctgtataccactcagcttgtttggtggtattgtagctaataatatacctttgcctcaatattggttgagtggaattactaaagatgaaagcaatagcgatggcaatggattatttgtacctaaatctcgtgccaagttcaacccgttggtttactgcggcatttatttatgtggtattttccccttgttagtaatttacgtggaaatgcaatacgtttacaaatctctctggttggagaaaactacattttattatttttacggattcctttttttgagtatcatattattatgcgtgttaactatggagatatctattattggaagttatttattaatgagattttgcttcgaagataaggtggttcgcaacaattggagatggaagtgctttgaaatgggatttagcggtggtgtatatatggaattgtattctttgtattacattttcgcagtgttgaacatccatgggttttcttctatcttaatttccatttgttatagtttaatcttcaacgtaatgtgcagtttagggcttggcgcattaagttacttaacggcttcttggtttataaataaaatataccaccagaaagtcaacttgtga

SEQ ID NO: 3241 - DNA, 3123 bp, Saccharomyces cerevisiae
atgagtaatgacagggaagtacccacactctcgcagctcaacacaactgtcagcagagataaagacgtatcggacactttgtcaccggattttgacagcaaaggaagtgcaaccgggcgtgacggtggcaatttcccaatgtatattgccattaatgagtattttaagcgaatggaagatgaactagatatgaagcccggtgacaagatcaaagtaataactgatgacgaagaatacaaggatggctggtattttggtcgaaatctgagaaccaatgaggaaggtttatatccggtggtctttactcaaaagataacagtggagaaggctccgacattgatgagagccaagtctaccaaaaggatatatagtccattaaccaatgaagatcctcttctttccagcacttttatcagtgaaaacgattcaaacagtgaactgccaaccccgcaaccaattgaaaccgccgcctctatttcgagaactgccaatggaaagatcgaaagaaacttgtctttaaagaatacaatgagtgacatagacaatgcactactggagtttaaagacgactctataggtccaccagatcgtttcatcaattcgggcagagacgaggaacatagcattacgcatgaaacaattctatcagccactgatggactggatgtagtcgaatctaacagtaagccaacaacgagtagttctactgggttcctgaacggagatttggaaaatcaagctactttaattaatggaattgatactactaaattgaaccctgtagaagcagagttttggtcacccgaagaaataacagcttattttattatggaaggatacgatgtccaatctgcctctagattccagaagcacaaaatatcgggtaaaattttgttagaattagagcttgttcatttaaaagagttggacataaattcttttgggacaagatttgagattttcaaagaaatagaaaaaatcaaagaggctattagaactaatggccgctccctgaatagagctagtaagaccaataacgctaacatttataaccaattgatgcctcccgcaaacgttgaccagagagcttcctacagaggccatgttagaaagacttcacagtcgttagaggaccttccgtcacaacagaattttatccccactcccagaaatactaggaactcctcagcttccaagcaccggcctaaatctttagtttttgattcacaagaggctaatgctaatatagctccagatgttcaaattcctcaggtggtagaggaaatggcaggtaatgaaaatttgtttgtttctccgaggagagcccccaaacccccatcttaccctagtccagcacaacctccaaaatcgcccctattgaataacacaaggacgtcaccttctcctgctcaactttattcatggcaatcacctactttatctttctcagggcctaaaagaacttcttatatcgatcaatattcttcatcagattctaatttcaattcccgttccgcactcccaaagaacaaccaaggcggtgggaaggcgttgtcacctattccatcccccacccgtaattctgttagaaatgaagatagtgaaggcaagctaacatcgtcttcgaagaggaattctgtcccttattatggatacgctcctgaatcttcttcggatagaaaatcctcttgttccagccatgaggaagagcagtttcaagaaacaatgaacacattcgaaagacccacgtccagtatatacgctgatggatctaccattgcatccataagtaatgacaaattggcacatgagaaggaggggaagaaaaaaccaacgagacactcgtcttcattatcttctaaatcaaaaagcgattccaggaggaactcgtctttaaagagaagcagcagtgcatcgcgaactagttcattcaaaaaaagttccttcatgctaagtccctttaggcaacaatttactgataatgctgctcgctcttcaagtcctgaagagaatcccataacctcaatgccgtcagaaaaaaacagctcaccgatagttgataaaaagtcttccaaaaagagtagatctaaaagaagatcagttagcgcaaaggaagctgaaatctttaccgaaactgtgaaagatgataaaaataagaggtctgcgagtgaggctattaaaggtgaaacgctcaagggcaaaagcttgcgtcaaatgaccgctagacctgtagccaagaaaaagcaaacttctgcatttatagaaggtttaaggagtattagtgttaaagaggcaatgaaggatgctgacttttctggttggatgagcaagaaaggcagcggtgccatgagtacttggaagacgagatttttcacattgcatggtactagattgtcatacttcagctccactacggacacgagagaaagaggtcttatcgacattactgctcatcgcgttgtgcctgctaaggaagatgataaactagtttcattatatgcagccagtacaggtaaaggacggtattgtttcaaactattacctccgcaaccaggatcaaagaaaggtttgacatttacacaacctcgcacgcactattttgcagtagataataaagaagagatgagaggttggatggctgcactaattaaaaccaccattgatatcgacacatcagtgccaattatcagttcctatacaacacctacggtttccttgagcaaagcgcaagagatgttagcagaagcgagagaagagaccaagctaagggaacagcaaatgctagagaacgaggaagatgaggaccagtttttatgggatcaacagcagcttcaacagcagcaacatgacaataatcaagggcaagctgatcgcacaatatcagcgtcaacccaacgaacttccgacgaggataatactatatctactccgaatttgtcctctgctaacaatacaaccattggctcaaatggattttccagtccgttcttactagcttccggattgttatcgcctggagtggctcgcaatagtagtatgcgtggaacagagaaaaagggtaaattctcaacggaagaggattacttcggggataattcaaaacataaaaccgacaaaatataa

SEQ ID NO: 3242 - DNA, 3123 bp, Artificial Sequence
  Description of Artificial Sequence: Synthetic polynucleotide
atgagtaatgacagggaagtacccacactctctcagctcaacacaactgtcagcagagataaagacgtaagtgacactttgtctccggattttgacagcaaaggaagtgcaaccgggcgtgacggtggcaatttcccaatgtatattgccattaatgagtattttaagagaatggaagatgaattagatatgaagcccggtgacaagatcaaagtaataactgatgacgaagaatacaaggatggctggtattttggtagaaatttaagaaccaatgaggaaggtttatatccggtggtctttactcaaaagataacagtggagaaggctccgacattgatgagagccaagtctaccaaaaggatatatagtccattaaccaatgaagatcctcttctttccagcacttttatcagtgaaaacgattccaacagtgaattaccaaccccgcaaccaattgaaaccgccgcctctatttctagaactgccaatggaaagatcgaaagaaacttgtctttaaagaatacaatgagtgacatagacaatgcattattggagtttaaagacgactctataggtccaccagatcgtttcatcaatagtggcagagacgaggaacatagcattacgcatgaaacaattttatctgccactgatggattagatgtagtcgaatctaacagtaagccaacaacgagtagttctactgggttcttgaacggagatttggaaaatcaagctactttaattaatggaattgatactactaaattgaaccctgtagaagcagagttttggtcccccgaagaaataacagcttattttattatggaaggatacgatgtccaatctgcctctagattccagaagcacaaaatatctggtaaaattttgttagaattagagcttgttcatttaaaagagttggacataaattcttttgggacaagatttgagattttcaaagaaatagaaaaaatcaaagaggctattagaactaatggccgctccttgaatagagctagtaagaccaataacgctaacatttataaccaattgatgcctcccgcaaacgttgaccagagagcttcctacagaggccatgttagaaagacttctcagtctttagaggaccttccgtctcaacagaattttatccccactcccagaaatactaggaactcctctgcttccaagcacagacctaaatctttagtttttgattctcaagaggctaatgctaatatagctccagatgttcaaattcctcaggtggtagaggaaatggcaggtaatgaaaatttgtttgtttctccgaggagagcccccaaacccccatcttaccctagtccagcacaacctccaaaaagtcccttattgaataacacaaggacgtctccttctcctgctcaactttattcttggcaaagtcctactttatctttctctgggcctaaaagaacttcttatatcgatcaatattcttcttctgattctaatttcaattcccgttccgcactcccaaagaacaaccaaggcggtgggaaggcgttgtctcctattccatcccccacccgtaattctgttagaaatgaagatagtgaaggcaagttaacatcttcttccaagaggaattctgtcccttattatggatacgctcctgaatcttcttctgatagaaaatcctcttgttccagccatgaggaagagcagtttcaagaaacaatgaacacattcgaaagacccacgtccagtatatacgctgatggatctaccattgcatccataagtaatgacaaattggcacatgagaaggaggggaagaaaaaaccaacgagacactcttcttctttatcttctaaatctaaaagcgattccaggaggaactcttctttaaagagaagcagcagtgcatctagaactagttctttcaaaaaaagttccttcatgttaagtccctttaggcaacaatttactgataatgctgctcgctcttccagtcctgaagagaatcccataacctccatgccgagtgaaaaaaacagctctccgatagttgataaaaagtcttccaaaaagagtagatctaaaagaagatctgttagcgcaaaggaagctgaaatctttaccgaaactgtgaaagatgataaaaataagaggtctgcgagtgaggctattaaaggtgaaacgctcaagggcaaaagcttgcgtcaaatgaccgctagacctgtagccaagaaaaagcaaacttctgcatttatagaaggtttaaggagtattagtgttaaagaggcaatgaaggatgctgacttttctggttggatgagcaagaaaggcagcggtgccatgagtacttggaagacgagatttttcacattgcatggtactagattgagttacttcagctccactacggacacgagagaaagaggtcttatcgacattactgctcatcgcgttgtgcctgctaaggaagatgataaattggtttctttatatgcagccagtacaggtaaaggaagatattgtttcaaattattacctccgcaaccaggatccaagaaaggtttgacatttacacaacctcgcacgcactattttgcagtagataataaagaagagatgagaggttggatggctgcattgattaaaaccaccattgatatcgacacatctgtgccaattatcagttcctatacaacacctacggtttccttgagcaaagcgcaagagatgttagcagaagcgagagaagagaccaagttaagggaacagcaaatgttagagaacgaggaagatgaggaccagtttttatgggatcaacagcagcttcaacagcagcaacatgacaataatcaagggcaagctgatcgcacaatatctgcgagtacccaaagaacttccgacgaggataatactatatctactccgaatttgtcctctgctaacaatacaaccattggcagtaatggattttccagtccgttcttattagcttccggattgttatctcctggagtggctcgcaatagtagtatgcgtggaacagagaaaaagggtaaattcagtacggaagaggattacttcggggataattctaaacataaaaccgacaaaatatga

SEQ ID NO: 3243 - DNA, 576 bp, Saccharomyces cerevisiae
atggctgtttctaatatatggcaatcgtactcttcctccaatttacattggatttatcctctgtataccaataactgttcacaaaatgtaaagtcatcatttacagcagaaatattattgaaaagaagatgtaatgatattcaagatatacttaatgacaggatgattgaattgttgctacagggcgcgtgtgacccaaataagcagcagaattaccttcaggggatgagtccaagtaggaagaagaaaacccacgttaagaaatttttgaaaaagcaaaaaaaatcaaggaaaccaatcactctggagcatggttgcttgtcaggacccgtgactctacgtttcggaaattttgcaggaatcagagatttgagaggtaccaggtgcccgctccacggcataaaacatggtgtccatccaaaacccggggagaggtgtgcatgtcagcaagctaccctctttccaagtccactagctcggtttagttgtgaccagtctgctgtacttggttgcgctgcctcctccacacgggtctatgacagtatagccgatgagttttcatccctatatttttaa

SEQ ID NO: 3244 - DNA, 576 bp, Artificial Sequence
  Description of Artificial Sequence: Synthetic polynucleotide
atggctgtttctaatatatggcaatcttactcttcctccaatttacattggatttatcctttatataccaataactgttctcaaaatgtaaagagttcttttacagcagaaatattattgaaaagaagatgtaatgatattcaagatatacttaatgacaggatgattgaattgttgttacagggcgcgtgtgacccaaataagcagcagaattaccttcaggggatgagtccaagtaggaagaagaaaacccacgttaagaaatttttgaaaaagcaaaaaaaatctaggaaaccaatcactttagagcatggttgcttgagtggacccgtgactttacgtttcggaaattttgcaggaatcagagatttgagaggtaccaggtgcccgctccacggcataaaacatggtgtccatccaaaacccggggagaggtgtgcatgtcagcaagctaccctctttccaagtccattggctagatttagttgtgaccagtctgctgtacttggttgcgctgcctcctccacaagagtctatgacagtatagccgatgagttttcttccttatatttttga

SEQ ID NO: 3245 - DNA, 825 bp, Saccharomyces cerevisiae
atggcaagaagacctgataaccaaaatccagaaggtgaaaatctacgaatcaaaagggtaagactagagtcggtcaggcagaacgatgaggaggaagaaaatgaagtatcgagaacacaaaatatcgtcacagataaccgccatgacagcccagaggccgtagtcgaaatcattggagagcgagctcttgagaatacttctgaggaagatggtgatgatgatttatctctctttagagcacttgaagaagatccaggtagcgaccataacaccagtaacaacgattctgggaatcatgacagggaaacaatgcataccgaagagccagaagcaagttctggtaacaatatcacattaacgaataatgttgaagaattgcacacaatggacgttctttcacaaacagcaaacactccgagtgcttccccgatgcttgacgcagcaccgccgacaacgaaacctggaacaaatagtaaggaacaaactgttgatttaactgcagatgccatagacttagacgctgaagagcaacaagtgttgcaaatatcagatgacgactttcaggaggaaaccaaagaagcacccaaagagtatggtgcagccaaggactatcgctgcccgatttgttttgaacctccagagacagccctcatgacgttatgtgggcacgtcttttgttgtccatgcttatttcaaatggttaatagctcaagaacatgtagacagttcggccattgcgctctttgtagaagtaaagtgtacttaaaggatgtgaggttaattattctaaggaaaaagcaagtcaagaagaaggtaaaaagctag

SEQ ID NO: 3246 - DNA, 825 bp, Artificial Sequence
  Description of Artificial Sequence: Synthetic polynucleotide
atggcaagaagacctgataaccaaaatccagaaggtgaaaatttaagaatcaaaagggtaagattggagtctgtcaggcagaacgatgaggaggaagaaaatgaagtatctagaacacaaaatatcgtcacagataaccgccatgacagcccagaggccgtagtcgaaatcattggagagagagctcttgagaatacttctgaggaagatggtgatgatgatttatctctctttagagcacttgaagaagatccaggtagcgaccataacaccagtaacaacgattctgggaatcatgacagggaaacaatgcataccgaagagccagaagcaagttctggtaacaatatcacattaacgaataatgttgaagaattgcacacaatggacgttctttctcaaacagcaaacactccgagtgcttccccgatgcttgacgcagcaccgccgacaacgaaacctggaacaaatagtaaggaacaaactgttgatttaactgcagatgccatagacttagacgctgaagagcaacaagtgttgcaaatatctgatgacgactttcaggaggaaaccaaagaagcacccaaagagtatggtgcagccaaggactatcgctgcccgatttgttttgaacctccagagacagccctcatgacgttatgtgggcacgtcttttgttgtccatgcttatttcaaatggttaatagcagcagaacatgtagacagttcggccattgcgctctttgtagaagtaaagtgtacttaaaggatgtgaggttaattattttaaggaaaaagcaagtcaagaagaaggtaaaaagctga

SEQ ID NO: 3247 - DNA, 414 bp, Saccharomyces cerevisiae
atgtcaggtaacggtgctcaaggtacaaaattcagaatttctttaggtttaccagttggtgctatcatgaactgtgctgacaacagtggtgccagaaacttgtacatcattgccgtcaaaggttctggttctagattgaacagattaccagccgcctctttaggtgacatggttatggccactgttaaaaagggtaagccagaattgagaaagaaggttatgccagctattgttgtccgtcaagctaagtcttggagaagaagagacggtgtctttttgtacttcgaggacaatgctggtgtcatcgctaatcctaagggtgaaatgaagggttctgccattactggtccagtcggtaaggaatgtgccgacttatggccaagagttgcttccaactctggtgttgttgtttaa

SEQ ID NO: 3248 - DNA, 414 bp, Artificial Sequence
  Description of Artificial Sequence: Synthetic polynucleotide
atgagtggtaacggtgctcaaggtacaaaattcagaatttctttaggtttaccagttggtgctatcatgaactgtgctgacaacagtggtgccagaaacttgtacatcattgccgtcaaaggttctggttctagattgaacagattaccagccgcctctttaggtgacatggttatggccactgttaaaaagggtaagccagaattgagaaagaaggttatgccagctattgttgtccgtcaagctaagtcttggagaagaagagacggtgtctttttgtacttcgaggacaatgctggtgtcatcgctaatcctaagggtgaaatgaagggttctgccattactggtccagtcggtaaggaatgtgccgacttatggccaagagttgcttccaactctggtgttgttgtttga

SEQ ID NO: 3249 - DNA, 1104 bp, Saccharomyces cerevisiae
atgtcaatatcatcaaagataagaccaactcctcgtaaaccttcacgtatggctaccgaccattcttttaaaatgaaaaaattttatgccgatcctttcgctatatcatcaatttctttggcaattgtatcgtgggtcatcgccatcgggggctccatctcatctgcatccaccaatgaatccttcccacgttttacttggtggggtatagtataccaatttctaattatttgttctttaatgctgttctattgttttgatttagtcgatcattacagaatcttcatcaccacatctattgcagtggcatttgtgtataatacaaacagtgcaacgaatttagtgtatgcggatggtcccaagaaagctgctgcttcagcaggtgtcatcttactttccatcataaatttaatctggattctgtactacggcggtgataatgcttccccaaccaatagatggattgattcgttttccattaagggtatcaggccttcgccattagagaattctcttcatagagctcgtcgaagaggcaataggaacacaacgccttaccaaaataatgtctataatgatgctatacgagactcaggctacgcgacacagtttgatggatatccacagcagcaaccttctcacacaaattatgtatcttctacggcattggctggttttgagaatactcagccaaatacttcagaagccgttaatcttcacttgaacactctacaacaacgtatcaatagcgcaagcaacgcgaaggaaaccaatgataatagcaataatcaaaccaatactaatataggtaatacgttcgatactgatttttcaaatggcaatacggaaactacgatgggagacactttgggtctgtatagcgatatcggtgatgataatttcatttacaaggcaaaagcactgtacccatacgacgctgatgacgatgatgcttacgaaatctcatttgaacaaaatgaaatcctacaagtctctgacattgaaggcagatggtggaaggcaagaagggcaaacggtgaaacaggtattattccaagcaattatgttcaactaatcgatggtccagaagaaatgcatcgttaa

SEQ ID NO: 3250 - DNA, 1104 bp, Artificial Sequence
  Description of Artificial Sequence: Synthetic polynucleotide
atgagtatatcttccaagataagaccaactcctcgtaaaccttctcgtatggctaccgaccattcttttaaaatgaaaaaattttatgccgatcctttcgctatatcttccatttctttggcaattgtaagctgggtcatcgccatcgggggctccatctcttctgcatccaccaatgaatccttcccacgttttacttggtggggtatagtataccaatttttgattatttgttctttaatgcttttctattgttttgatttagtcgatcattacagaatcttcatcaccacatctattgcagtggcatttgtgtataatacaaacagtgcaacgaatttagtgtatgcggatggtcccaagaaagctgctgcttctgcaggtgtcatcttactttccatcataaatttaatctggattttatactacggcggtgataatgcttccccaaccaatagatggattgattctttttccattaagggtatcaggccttctccattagagaattctcttcatagagctcgtagaagaggcaataggaacacaacgccttaccaaaataatgtctataatgatgctataagagacagtggctacgcgacacagtttgatggatatccacagcagcaaccttctcacacaaattatgtatcttctacggcattggctggttttgagaatactcagccaaatacttctgaagccgttaatcttcacttgaacactttacaacaacgtatcaatagcgcaagcaacgcgaaggaaaccaatgataatagcaataatcaaaccaatactaatataggtaatacgttcgatactgatttttctaatggcaatacggaaactacgatgggagacactttgggtttatatagcgatatcggtgatgataatttcatttacaaggcaaaagcattgtacccatacgacgctgatgacgatgatgcttacgaaatctcttttgaacaaaatgaaatcttgcaagtctctgacattgaaggcagatggtggaaggcaagaagggcaaacggtgaaacaggtattattccaagcaattatgttcaattgatcgatggtccagaagaaatgcatcgttga

SEQ ID NO: 3251 - DNA, 1347 bp, Saccharomyces cerevisiae
atggtagctagtattagatcaggtgtgctgacacttttacacacggcgtgcggtgctggtatcctggccatgccgtacgcattcaagccgtttggattaattcctggagtgataatgatagtgctgtgtggggcgtgcgctatgcaaagcttgttcatacaagctcgtgtagctaaatacgtaccacaggggagggcctcgttcagtgctctgacgcggttgattaacccaaatctaggtattgtgtttgacctagcgatcgctatcaagtgttttggtgtgggcgtctcttatatgattgtagttggggatctgatgccccaaataatgtctgtgtggaccagaaatgcttggctgttgaacaggaacgtgcaaatttcactgatcatgctttttttcgtggccccgctgtcttttctgaagaagttgaattcgttgaggtacgcttccatggtggccatctcttctgtagcgtacttgtgtgttttggtgttgttgcactatgtagcaccatcagatgagattcttcgcttgaaaggccggatctcctacctcctgccaccacaatcgcatgatttgaacgtgctaaacactcttccaatttttgtctttgcctacacatgtcaccacaatatgttttcaataatcaatgagcagaggtcaagccggttcgagcatgtgatgaagattccactgatagcaatatctttggctctcatcttatatattgcgatcggctgtgctggatacctgacattcggcgacaacatcattggaaacattatcatgctgtacccgcaagcggtctcgagcaccatcggcagaatagcgattgtgttgttggtgatgctggcgttcccactacagtgtcatcctgcaagagcttcaatccatcagattttgcaacacttcgccgaggaaaatgtaagtataagtgctacatcggcggatgaacccactgttgctaccgaaagttctccgttgattcgcgacagtagccttgacctcaatgaggtaattgaagaagaatctatttatcagcctaaggagactccattgagaggcaagagctttattgttataacgtgcagcattttagttgcatcatatcttgtcgccatttcggtttcctccttggcccgtgtactggccattgttggggccacaggctccacttctatttctttcattctgcccgggctctttggctacaagcttataggaactgagcacaagacagccgtgccattgacgacaaagattttcaaatacacaggtcttctcttgtttatctgggggctaataatcatgatcacctgcctgaccgcagctttgaagctaaactaa

SEQ ID NO: 3252 - DNA, 1347 bp, Artificial Sequence
  Description of Artificial Sequence: Synthetic polynucleotide
atggtagctagtattagatctggtgtgttaacacttttacacacggcgtgcggtgctggtatcttggccatgccgtacgcattcaagccgtttggattaattcctggagtgataatgatagtgttgtgtggggcgtgcgctatgcaaagcttgttcatacaagctcgtgtagctaaatacgtaccacaggggagggcctctttcagtgctttgacgagattgattaacccaaatttgggtattgtgtttgacttggcgatcgctatcaagtgttttggtgtgggcgtctcttatatgattgtagttggggatttgatgccccaaataatgtctgtgtggaccagaaatgcttggttattgaacaggaacgtgcaaatttctttgatcatgctttttttcgtggccccgttatcttttttgaagaagttgaattctttgaggtacgcttccatggtggccatctcttctgtagcgtacttgtgtgttttggtgttgttgcactatgtagcaccaagtgatgagattcttcgcttgaaaggcagaatctcctacctcttaccaccacaatctcatgatttgaacgtgttgaacactcttccaatttttgtctttgcctacacatgtcaccacaatatgttttccataatcaatgagcagaggagcagcaggttcgagcatgtgatgaagattccattgatagcaatatctttggctctcatcttatatattgcgatcggctgtgctggatacttgacattcggcgacaacatcattggaaacattatcatgctttacccgcaagcggtctccagcaccatcggcagaatagcgattgtgttgttggtgatgttggcgttcccattacagtgtcatcctgcaagagcttctatccatcagattttgcaacacttcgccgaggaaaatgtaagtataagtgctacatctgcggatgaacccactgttgctaccgaaagttctccgttgattcgcgacagtagccttgacctcaatgaggtaattgaagaagaatctatttatcagcctaaggagactccattgagaggcaagagctttattgttataacgtgcagcattttagttgcaagttatcttgtcgccatttctgtttcctccttggcccgtgtattggccattgttggggccacaggctccacttctatttctttcattttgcccgggctctttggctacaagcttataggaactgagcacaagacagccgtgccattgacgacaaagattttcaaatacacaggtcttctcttgtttatctgggggttgataatcatgatcacctgcttaaccgcagctttgaagttgaactga

SEQ ID NO: 3253 - DNA, 735 bp, Saccharomyces cerevisiae
atgtctgctgttgaaatttcccctgacgtgttggtgtataagtctccattaacggagcaatcgacagaatacgctagtatttccaacaattcagaccaaaccattgcatttaaggtcaagaccacagccccaaagttttactgcgtgagaccaaacgccgcagttgttgctccaggtgaaacaatccaggttcaagttatcttcctgggtttgactgaagagcctgccgcagactttaagtgccgtgacaagttcctggttatcacgttgccttctccttacgacctcaatggcaaggctgttgcagatgtttggtccgacttggaggctgagttcaagcaacaggctatctctaaaaagataaaagtcaaatatttgataagtccagatgtacacccagcacagaaccaaaatatacaggaaaacaaggaaactgttgaaccagtagtccaagacagtgagccaaaggaagtgcctgctgtggtaaacgaaaaggaggtccctgctgaaccggaaactcaacctcccgtccaagtaaagaaagaagaggtcccacctgtcgttcagaaaaccgttcctcatgaaaatgagaagcaaacgtccaacagcactccggccccacagaaccagataaaggaagccgcaaccgtacctgcagaaaatgaatcatccagcatgggtatattcatattggttgcactccttatcttggttttaggatggttctacagataa

SEQ ID NO: 3254 - DNA, 735 bp, Artificial Sequence
  Description of Artificial Sequence: Synthetic polynucleotide
atgtctgctgttgaaatttcccctgacgtgttggtgtataagtctccattaacggagcaaagtacagaatacgctagtatttccaacaatagtgaccaaaccattgcatttaaggtcaagaccacagccccaaagttttactgcgtgagaccaaacgccgcagttgttgctccaggtgaaacaatccaggttcaagttatcttcttgggtttgactgaagagcctgccgcagactttaagtgccgtgacaagttcttggttatcacgttgccttctccttacgacctcaatggcaaggctgttgcagatgtttggtccgacttggaggctgagttcaagcaacaggctatctctaaaaagataaaagtcaaatatttgataagtccagatgtacacccagcacagaaccaaaatatacaggaaaacaaggaaactgttgaaccagtagtccaagacagtgagccaaaggaagtgcctgctgtggtaaacgaaaaggaggtccctgctgaaccggaaactcaacctcccgtccaagtaaagaaagaagaggtcccacctgtcgttcagaaaaccgttcctcatgaaaatgagaagcaaacgtccaacagcactccggccccacagaaccagataaaggaagccgcaaccgtacctgcagaaaatgaatcttccagcatgggtatattcatattggttgcactccttatcttggttttaggatggttctacagatga

SEQ ID NO: 3255 - DNA, 345 bp, Saccharomyces cerevisiae
atgggcttatcgcgctggcacgacaagaattcaaggccagcagaggaaaagagcgaagaaatgcaacaggatgcgcactactacgcccttgcggcaagtgatagtttaaatgcaagtgtttctaacgaatatggtaatcaagtaatgaactcgttttggaaagtgggtatagactctccctatgtggacgatgaagcaattagaaacagagatgtcgaaaataacttaccttctttaaagcaaagtgtttataatgctaatgaaccaaatgctacctcgtctgcattttcaaccgcttcatacgcacatgaaactttcgattttagaaaccttaaactaagataa

SEQ ID NO: 3256 - DNA, 345 bp, Artificial Sequence
  Description of Artificial Sequence: Synthetic polynucleotide
atgggcttatctcgctggcacgacaagaattctaggccagcagaggaaaagagcgaagaaatgcaacaggatgcgcactactacgcccttgcggcaagtgatagtttaaatgcaagtgtttctaacgaatatggtaatcaagtaatgaactctttttggaaagtgggtatagactctccctatgtggacgatgaagcaattagaaacagagatgtcgaaaataacttaccttctttaaagcaaagtgtttataatgctaatgaaccaaatgctacctcttctgcattttccaccgcttcttacgcacatgaaactttcgattttagaaaccttaaattgagatga

SEQ ID NO: 3257 - DNA, 1482 bp, Saccharomyces cerevisiae
atgagtaacgatgaaggagaaacatttgccacggaacagactactcaacaagtttttcagaagctaggtagcaacatggaaaatcgagtttgttttgattgtggtaacaagaatcctacttggacttcggtaccttttggtgtgatgctgtgtattcaatgctctgctgtgcatagaaacatgggtgttcatatcacctttgtaaagtcttctacattagataaatggacaattaacaatttaagaaggtttaagttgggtgggaaccataaggctcgtgattttttcttaaagaacaatgggaaacagctactaaatacagcaaatgttgacgcgaaaacaaaatatacgagccctgttgctaagaaatataagatacatctcgacaagaaggttcaaaaggatatggagttatacccatcagaattagtcttgaacggtcaagattcttcggactcaccgttggacaccgattcagacgcttccaggtcgacttccaaagaaaatagtgttgacgattttttctctaattggcaaaaaccaagctccaattccagttctaaactcaatgtaaatacaggctctctcgccccaaaaaacaacaccacaggcagcacacccaagaccactgtcactaaaacgagaagttccatcttaacggctagcagaaagaaaccggtattaaactcgcaagataaaaagaaacattcaattttgtcttcgtcaagaaagcccactagactaaccgcaaagaaagtcgacaaatcacaggcagaagacttgtttgatcaatttaaaaaagaggctcaacaagaaaaggaggacgagttcactaattcgtcttctagcaccaaaattagacaaaatgattacgattcccaatttatgaataacagtaaaggcaacaataataacagtatagatgatattaatacccagcctgatgaattcaatgattttttaaatgacacttcaaacagcttcgacacaactagaaaagaacagcaagatactttaacacccaagtttgccaaattgggatttggtatgaccatgaatgacgccaatgatttggcaaagcaacaaaaagaatctcagaaaatagctcagggaccaagatatacgggcagaatcgcggaaaggtacggcacacaaaaagctatatcatctgatcaattatttggtcgtggctcatttgatgaagcagcaaacagggaagcgcatgacaagttgaaaacatttgacaatgctacatcaatttcctcttcttcatactttggagaagataaagaagtggatgaatttggtaatcccatcaatagtagtggaagtggagcagggaattttgatggccgtaattctaataacggtttcatcgattttaatgcctccgcagatgatgaattgcagatgttgagagacgttgtagaacagggtgctgaaaaactcggtagttatttaagggactacttaagaaaataa

SEQ ID NO: 3258 - DNA, 1482 bp, Artificial Sequence
  Description of Artificial Sequence: Synthetic polynucleotide
atgagtaacgatgaaggagaaacatttgccacggaacagactactcaacaagtttttcagaagttgggtagcaacatggaaaatagagtttgttttgattgtggtaacaagaatcctacttggacttctgtaccttttggtgtgatgctttgtattcaatgctctgctgtgcatagaaacatgggtgttcatatcacctttgtaaagtcttctacattagataaatggacaattaacaatttaagaaggtttaagttgggtgggaaccataaggctcgtgattttttcttaaagaacaatgggaaacagttgttgaatacagcaaatgttgacgcgaaaacaaaatatacgagccctgttgctaagaaatataagatacatctcgacaagaaggttcaaaaggatatggagttatacccatctgaattagtcttgaacggtcaagattcttctgactctccgttggacaccgattctgacgcttccaggtctacttccaaagaaaatagtgttgacgattttttctctaattggcaaaaaccaagctccaattccagttctaaactcaatgtaaatacaggctctctcgccccaaaaaacaacaccacaggcagcacacccaagaccactgtcactaaaacgagaagttccatcttaacggctagcagaaagaaaccggtattaaactctcaagataaaaagaaacattctattttgtcttcttctagaaagcccactagattgaccgcaaagaaagtcgacaaatctcaggcagaagacttgtttgatcaatttaaaaaagaggctcaacaagaaaaggaggacgagttcactaattcttcttctagcaccaaaattagacaaaatgattacgattcccaatttatgaataacagtaaaggcaacaataataacagtatagatgatattaatacccagcctgatgaattcaatgattttttaaatgacacttctaacagcttcgacacaactagaaaagaacagcaagatactttaacacccaagtttgccaaattgggatttggtatgaccatgaatgacgccaatgatttggcaaagcaacaaaaagaatctcagaaaatagctcagggaccaagatatacgggcagaatcgcggaaaggtacggcacacaaaaagctatatcttctgatcaattatttggtcgtggctcttttgatgaagcagcaaacagggaagcgcatgacaagttgaaaacatttgacaatgctacatccatttcctcttcttcctactttggagaagataaagaagtggatgaatttggtaatcccatcaatagtagtggaagtggagcagggaattttgatggccgtaattctaataacggtttcatcgattttaatgcctccgcagatgatgaattgcagatgttgagagacgttgtagaacagggtgctgaaaaactcggtagttatttaagggactacttaagaaaatga

SEQ ID NO: 3259 - DNA, 1575 bp, Saccharomyces cerevisiae
atgtcccaacgatcttcacaacacattgtaggtattcattatgctgtaggacctaagattggcgaagggtctttcggagtaatatttgagggagagaacattcttcattcttgtcaagcgcagaccggtagcaagagggactctagtataataatggcgaacgagccagtcgcaattaaattcgaaccgcgacattcggacgcaccccagttgcgtgacgaatttagagcctataggatattgaatggctgcgttggaattccccatgcttattattttggtcaagaaggtatgcacaacatcttgattatcgatttactagggccatcattggaagatctctttgagtggtgtggtagaaaattttcagtgaaaacaacctgtatggttgccaagcaaatgattgatagagttagagcaattcatgatcacgacttaatctatcgcgatattaaacccgataactttttaatttctcaatatcaaagaatttcacctgaaggaaaagtcattaaatcatgtgcctcctcttctaataatgatcccaatttaatatacatggttgactttggtatggcaaaacaatatagagatccaagaacgaaacaacatataccataccgtgaacgaaaatcattgagcggtaccgccagatatatgtctattaatactcattttggaagagaacagtcacgtagggatgatttagaatcgctaggtcacgtttttttttatttcttgaggggatccttgccatggcaaggtttgaaagcaccaaacaacaaactgaagtatgaaaagattggtatgactaaacagaaattgaatcctgatgatcttttattgaataatgctattccttatcagtttgccacatatttaaaatatgcacgttccttgaagttcgacgaagatccggattatgactatttaatctcgttaatggatgacgctttgagattaaacgacttaaaggatgatggacactatgactggatggatttgaatggtggtaaaggctggaatatcaagattaatagaagagctaacttgcatggttacggaaatccaaatccaagagtcaatggcaatactgcaagaaacaatgtgaatacgaattcaaagacacgaaatacaacgccagttgcgacacctaagcaacaagctcaaaacagttataacaaggacaattcgaaatccagaatttcttcgaacccgcagagctttactaaacaacaacacgtcttgaaaaaaatcgaacccaatagtaaatatattcctgaaacacattcaaatcttcaacggccaattaaaagtcaaagtcaaacgtacgactccatcagtcatacacaaaattcaccatttgtaccatattcaagttctaaagctaaccctaaaagaagtaataatgagcacaacttaccaaaccactacacaaaccttgcaaataagaatatcaattatcaaagtcaacgaaattacgaacaagaaaatgatgcttattctgatgacgagaatgatacattttgttctaaaatatacaaatattgttgttgctgtttttgttgctgttga

SEQ ID NO: 3260 - DNA, 1575 bp, Artificial Sequence
  Description of Artificial Sequence: Synthetic polynucleotide
atgtcccaaagatcttctcaacacattgtaggtattcattatgctgtaggacctaagattggcgaagggtctttcggagtaatatttgagggagagaacattcttcattcttgtcaagcgcagaccggtagcaagagggactctagtataataatggcgaacgagccagtcgcaattaaattcgaaccgcgccattctgacgcaccccagttgcgtgacgaatttagagcctataggatattgaatggctgcgttggaattccccatgcttattattttggtcaagaaggtatgcacaacatcttgattatcgatttattagggccatctttggaagatctctttgagtggtgtggtagaaaattttctgtgaaaacaacctgtatggttgccaagcaaatgattgatagagttagagcaattcatgatcacgacttaatctatcgcgatattaaacccgataactttttaatttctcaatatcaaagaatttctcctgaaggaaaagtcattaaaagttgtgcctcctcttctaataatgatcccaatttaatatacatggttgactttggtatggcaaaacaatatagagatccaagaacgaaacaacatataccataccgtgaaagaaaatctttgagcggtaccgccagatatatgtctattaatactcattttggaagagaacagtctcgtagggatgatttagaatctttgggtcacgtttttttttatttcttgaggggatccttgccatggcaaggtttgaaagcaccaaacaacaaattgaagtatgaaaagattggtatgactaaacagaaattgaatcctgatgatcttttattgaataatgctattccttatcagtttgccacatatttaaaatatgcacgttccttgaagttcgacgaagatccggattatgactatttaatctctttaatggatgacgctttgagattaaacgacttaaaggatgatggacactatgactggatggatttgaatggtggtaaaggctggaatatcaagattaatagaagagctaacttgcatggttacggaaatccaaatccaagagtcaatggcaatactgcaagaaacaatgtgaatacgaattctaagacaagaaatacaacgccagttgcgacacctaagcaacaagctcaaaacagttataacaaggacaattctaaatccagaatttcttccaacccgcagagctttactaaacaacaacacgtcttgaaaaaaatcgaacccaatagtaaatatattcctgaaacacattctaatcttcaaagaccaattaaaagtcaaagtcaaacgtacgactccatcagtcatacacaaaattctccatttgtaccatattctagttctaaagctaaccctaaaagaagtaataatgagcacaacttaccaaaccactacacaaaccttgcaaataagaatatcaattatcaaagtcaaagaaattacgaacaagaaaatgatgcttattctgatgacgagaatgatacattttgttctaaaatatacaaatattgttgttgctgtttttgttgctgttga

SEQ ID NO: 3261 - DNA, 1722 bp, Saccharomyces cerevisiae
atgcaagataccaaatactacgaaccaacaaatatttttcgtcagcctgctattaatataaagaagagatcagataaaaagaggattttacaatcgatgatgactttatccacatacaaaaaaacgtggcaaaacaatacttcgaaaatgaattcaccgattttgcgaaaagcatcagacaacttcaatgactattatacaactaaaaaattaaaatcagattattggaaactgtacggtgttgatgaaagtgagttatccataccttcagacatgtccattgtggataatatacttctagtatctacaatgaacgagaaagacaacttgaaactttttgaaatttccgctgagaaaaagctgaaggaactacagacgattactgttcccggtaaacccattacttgtatctgcttattgcccatggtagattttccgccacagattttccccagctctcaaataaatcctaaccacaaccaattaatattgacaggtcatcaagacggtatagtcaatctgatagcaacttcaacatataagggatgtgctaaaataataaaaaggtttaaccacaacaagtttctaaaatctaccgtatcaacgtcgattccgattctggaaataacgccaaaaacagcacctattttgaaggtttcgccatggaacaagaccggttttgtttcccttctaaatgactccctctttatatatgacttgaaatcaaatcttgattgcataaaaacacctatttttttgcaatcatatccaggtataaattcttttgccgttaatgaattccatgatcccttcttactggccttagttggctcaaaatttggaccaaatggcatctcgctgcttgatttgagaacaaatctctatattccagatattttagataatagcatatctgcaggatgtggaaaagaccatttgcaaagaaagaacacaagtttggattgcgtatggataagtaatcatcacgttgcacagagcttgaacgataaaattcaaatttgggacattcaatcctgcgacggtaaaccagtttgtgaattatatgctaagaaaggatacattgaaagtctaaaatttaacgaaaacacaggcgcgttatatagcagtgatgaccaaggctttgtcatttgttgggatttacaaaacctacaaaacatgaaatatggtgagttagtccatggatttaactcaattagcctagatagtgaaagtgaactactattaaccaagcaagtcttccaatgtggaaacattattgtgagtggtatgagtgataaaaatatttgcttgaagagcaatgacactaaggccaatggaaaaggatgtggatttttattccttgatatggcaaacgatggaagtttagtaactcttgacaatttttgtgaactgggattacatcaaatttgtcaagttcaattcaatgtcgataccggtaaaataatcgatggtaatggtactgggaagagtggaatatctgattcttctatgttatcattatccaatgagagtgaccatagtatgacagaaacatctgatgatatgttctcaaattctggtaattgggattgttcttcagcaaatactgttagcgaaggtagattgaatgatgaccaagaggatatcgtcttcacaaagaggatgtattctgtaaatgatgtgcatttaagtggatctactattgatactactgttgtctag

SEQ ID NO: 3262 - DNA, 1722 bp, Artificial Sequence
  Description of Artificial Sequence: Synthetic polynucleotide
atgcaagataccaaatactacgaaccaacaaatatttttcgtcagcctgctattaatataaagaagagaagtgataaaaagaggattttacaatctatgatgactttatccacatacaaaaaaacgtggcaaaacaatacttctaaaatgaattctccgattttgagaaaagcaagtgacaacttcaatgactattatacaactaaaaaattaaaatctgattattggaaactttacggtgttgatgaaagtgagttatccataccttctgacatgtccattgtggataatatacttttggtatctacaatgaacgagaaagacaacttgaaactttttgaaatttccgctgagaaaaagttgaaggaattacagacgattactgttcccggtaaacccattacttgtatctgcttattgcccatggtagattttccgccacagattttccccagctctcaaataaatcctaaccacaaccaattaatattgacaggtcatcaagacggtatagtcaatttgatagcaacttctacatataagggatgtgctaaaataataaaaaggtttaaccacaacaagtttttgaaatctaccgtatctacgtccattccgattttggaaataacgccaaaaacagcacctattttgaaggtttctccatggaacaagaccggttttgtttcccttttgaatgactccctctttatatatgacttgaaatctaatcttgattgcataaaaacacctatttttttgcaaagttatccaggtataaattcttttgccgttaatgaattccatgatcccttcttattagccttagttggctctaaatttggaccaaatggcatctctttacttgatttgagaacaaatctctatattccagatattttagataatagcatatctgcaggatgtggaaaagaccatttgcaaagaaagaacacaagtttggattgcgtatggataagtaatcatcacgttgcacagagcttgaacgataaaattcaaatttgggacattcaatcctgcgacggtaaaccagtttgtgaattatatgctaagaaaggatacattgaaagtttgaaatttaacgaaaacacaggcgcgttatatagcagtgatgaccaaggctttgtcatttgttgggatttacaaaacttacaaaacatgaaatatggtgagttagtccatggatttaactctattagcttagatagtgaaagtgaattattattaaccaagcaagtcttccaatgtggaaacattattgtgagtggtatgagtgataaaaatatttgcttgaagagcaatgacactaaggccaatggaaaaggatgtggatttttattccttgatatggcaaacgatggaagtttagtaactcttgacaatttttgtgaattaggattacatcaaatttgtcaagttcaattcaatgtcgataccggtaaaataatcgatggtaatggtactgggaagagtggaatatctgattcttctatgttatctttatccaatgagagtgaccatagtatgacagaaacatctgatgatatgttcagtaattctggtaattgggattgttcttctgcaaatactgttagcgaaggtagattgaatgatgaccaagaggatatcgtcttcacaaagaggatgtattctgtaaatgatgtgcatttaagtggatctactattgatactactgttgtctga

SEQ ID NO: 3263 - DNA, 2430 bp, Saccharomyces cerevisiae
atgccttcatccatatccgtcaagttagtggctgcagagtcattatataagagggacgtattccgttccccggatccgtttgctgttctgactattgatggttaccaaaccaaatctacatccgcagcgaagaaaacgttaaatccctactggaatgagactttcaaattcgacgatatcaatgaaaattctattttaaccatccaagtctttgatcaaaagaaatttaaaaagaaggatcaagggtttcttggcgtggttaacgtccgcgtgggtgatgttttgggccatttggatgaagatactgctacatcgagtggtagacctcgcgaagaaactattactcgtgatttaaaaaaatctaatgacggaatggccgtcagcggtaggttgattgttgttttatcaaaactaccttcgtcaagtccgcattcacaagctccttctggccatactgcatcttctagtacgaatacaagttcaactactcgaacaaatggtcattctacttcctccacccgtaatcattcaacgtctcatccttccagaggcaccgcgcaagcagtagaatcaactcttcaaagcggtacaacagctgctactaatacggcaacaaccagtcaccgttccaccaattccacatccagtgctaccagacaatactcttcgtttgaagaccagtatggtcgtttaccccctggttgggagagaaggaccgataactttggtcgtacatattacgtcgatcataacacaaggactaccacttggaaacgtccaacgctcgatcaaacagaagccgaacgtggcaaccaattaaatgcaaatactgagttagagagaaggcagcataggggaagaactttacctggtggatcatcagataattcctctgtaacagttcaagtgggaggtggttccaatatacctcctgttaatggtgcagcagcagcagcgtttgcagctacaggtggtaccacatctggtttaggcgaattaccttcaggctgggagcagcgatttactccagaaggaagagcttatttcgttgaccataatactagaacaaccacttgggtggatccaaggagacaacagtatatacgtacttatggccctacaaataccaccattcagcaacaaccggtctcccaattaggtcctttgccttctggatgggaaatgagattgaccaatacggcacgtgtatatttcgttgaccacaatacaaaaacaacgacctgggatgacccaagacttccatcatcgctagaccaaaatgttccacaatacaagcgtgacttcagacgtaaggttatttatttcaggtcccagcccgctcttagaatattgccgggacaatgtcatattaaagtacgtagaaagaacatttttgaggatgcttatcaagaaattatgagacaaaccccagaagatttaaagaaaagattaatgatcaagtttgatggtgaggaaggtttagattacggtggtgtttccagagaatttttctttttattatcacatgagatgtttaatccattttattgtttgtttgaatattctgcgtatgacaactataccattcaaataaatcctaacagtggcatcaaccccgaacatttgaactatttcaaattcattggtagagttgtgggtcttggtgttttccatagaagatttttggatgcattctttgtaggtgcactttacaaaatgatgctacgtaaaaaagtcgtattgcaagatatggaaggtgttgacgcagaggtgtataactcattaaactggatgcttgagaatagtatagatggtgtcttggatctgacgttcagtgccgacgatgaaagattcggtgaagttgtaacagtggatttgaagccagatgggagaaatattgaagttactgatggtaataagaaagaatatgtcgaattatatacccaatggagaattgttgatagagttcaagaacaatttaaggcattcatggatggttttaacgaattaatccccgaagacttagtaactgtgtttgatgagcgtgaactagaactattgatcggtggtattgcggaaattgacattgaagattggaagaaacacactgattatcgtggttaccaagagtcagacgaggtcattcaatggttttggaagtgtgtcagtgaatgggataatgaacaaagagcccgtttattgcagttcaccactggtacttctcgtatacctgtcaacgggtttaaagatttgcaaggctctgatggtccaagaagattcactattgaaaaagctggtgaagtacaacaattgccaaaatctcacacatgttttaacagagttgatttgccacaatacgttgattatgacagcatgaaacagaagctaacattggccgtggaagaaaccatagggtttggtcaagaatga

SEQ ID NO: 3264 - DNA, 2430 bp, Artificial Sequence
  Description of Artificial Sequence: Synthetic polynucleotide
atgccttcttccatatccgtcaagttagtggctgcagagtctttatataagagggacgtattccgttccccggatccgtttgctgttttaactattgatggttaccaaaccaaatctacatccgcagcgaagaaaacgttaaatccctactggaatgagactttcaaattcgacgatatcaatgaaaattctattttaaccatccaagtctttgatcaaaagaaatttaaaaagaaggatcaagggtttcttggcgtggttaacgtccgcgtgggtgatgttttgggccatttggatgaagatactgctacatctagtggtagacctcgcgaagaaactattactcgtgatttaaaaaaatctaatgacggaatggccgtcagcggtaggttgattgttgttttatccaaattaccttcttccagtccgcattctcaagctccttctggccatactgcatcttctagtacgaatacaagttctactactagaacaaatggtcattctacttcctccacccgtaatcattctacgtctcatccttccagaggcaccgcgcaagcagtagaatctactcttcaaagcggtacaacagctgctactaatacggcaacaaccagtcaccgttccaccaattccacatccagtgctaccagacaatactcttcttttgaagaccagtatggtcgtttaccccctggttgggagagaaggaccgataactttggtcgtacatattacgtcgatcataacacaaggactaccacttggaaacgtccaacgctcgatcaaacagaagccgaacgtggcaaccaattaaatgcaaatactgagttagagagaaggcagcataggggaagaactttacctggtggaagttctgataattcctctgtaacagttcaagtgggaggtggttccaatatacctcctgttaatggtgcagcagcagcagcgtttgcagctacaggtggtaccacatctggtttaggcgaattaccttccggctgggagcagagatttactccagaaggaagagcttatttcgttgaccataatactagaacaaccacttgggtggatccaaggagacaacagtatatacgtacttatggccctacaaataccaccattcagcaacaaccggtctcccaattaggtcctttgccttctggatgggaaatgagattgaccaatacggcacgtgtatatttcgttgaccacaatacaaaaacaacgacctgggatgacccaagacttccatcttctttggaccaaaatgttccacaatacaagcgtgacttcagacgtaaggttatttatttcaggtcccagcccgctcttagaatattgccgggacaatgtcatattaaagtacgtagaaagaacatttttgaggatgcttatcaagaaattatgagacaaaccccagaagatttaaagaaaagattaatgatcaagtttgatggtgaggaaggtttagattacggtggtgtttccagagaatttttctttttattatctcatgagatgtttaatccattttattgtttgtttgaatattctgcgtatgacaactataccattcaaataaatcctaacagtggcatcaaccccgaacatttgaactatttcaaattcattggtagagttgtgggtcttggtgttttccatagaagatttttggatgcattctttgtaggtgcactttacaaaatgatgcttcgtaaaaaagtcgtattgcaagatatggaaggtgttgacgcagaggtgtataactctttaaactggatgcttgagaatagtatagatggtgtcttggatttgacgttcagtgccgacgatgaaagattcggtgaagttgtaacagtggatttgaagccagatgggagaaatattgaagttactgatggtaataagaaagaatatgtcgaattatatacccaatggagaattgttgatagagttcaagaacaatttaaggcattcatggatggttttaacgaattaatccccgaagacttagtaactgtgtttgatgagcgtgaattggaattattgatcggtggtattgcggaaattgacattgaagattggaagaaacacactgattatcgtggttaccaagagagtgacgaggtcattcaatggttttggaagtgtgtcagtgaatgggataatgaacaaagagcccgtttattgcagttcaccactggtacttctcgtatacctgtcaacgggtttaaagatttgcaaggctctgatggtccaagaagattcactattgaaaaagctggtgaagtacaacaattgccaaaatctcacacatgttttaacagagttgatttgccacaatacgttgattatgacagcatgaaacagaagttaacattggccgtggaagaaaccatagggtttggtcaagaatga

SEQ ID NO: 3265 - DNA, 786 bp, Saccharomyces cerevisiae
atgcctcaaaacgattatatcgagcgtcacatcaaacagcatggtaaaagattagatcacgaagaaaggaaacgtaagagagaggcaagagagtctcataagatttctgaacgggcccagaagttgactggttggaagggtaagcaatttgctaagaagagatatgctgaaaaggtatcaatgagaaagaagattaaggcacatgaacaatctaaggtcaagggttcatccaaaccattggataccgatggtgatgctttgccgacatatctattggacagagaacaaaataacacagccaaagctatttcttcatcgatcaaacaaaagaggttggaaaaagctgataagttttcagttccgttaccaaaggttcgtggtataagtgaagaagaaatgttcaaagttattaaaacaggtaaatctagatccaagtcatggaagagaatgataacgaaacacacttttgtgggtgaaggtttcactagaagaccagttaaaatggaaagaatcatcagaccaagtgcgttgagacagaaaaaggcaaacgtcactcatccggaattaggtgtaactgtcttcttgccaattttggcagttaagaagaatccacaatctccaatgtacactcagttaggtgttttgactaaaggtaccattattgaagttaacgtttcggaattggggatggttactgctggtggtaaagttgtctggggtaagtatgctcaggtcacaaacgaaccagacagagacggctgtgtcaatgcggttttgcttgtatga

SEQ ID NO: 3266 - DNA, 786 bp, Artificial Sequence
  Description of Artificial Sequence: Synthetic polynucleotide
atgcctcaaaacgattatatcgagcgtcacatcaaacagcatggtaaaagattagatcacgaagaaaggaaacgtaagagagaggcaagagagtctcataagatttctgaaagagcccagaagttgactggttggaagggtaagcaatttgctaagaagagatatgctgaaaaggtatctatgagaaagaagattaaggcacatgaacaatctaaggtcaagggttcttccaaaccattggataccgatggtgatgctttgccgacatatcttttggacagagaacaaaataacacagccaaagctatttcttcttctatcaaacaaaagaggttggaaaaagctgataagttttctgttccgttaccaaaggttcgtggtataagtgaagaagaaatgttcaaagttattaaaacaggtaaatctagatccaagtcttggaagagaatgataacgaaacacacttttgtgggtgaaggtttcactagaagaccagttaaaatggaaagaatcatcagaccaagtgcgttgagacagaaaaaggcaaacgtcactcatccggaattaggtgtaactgtcttcttgccaattttggcagttaagaagaatccacaatctccaatgtacactcagttaggtgttttgactaaaggtaccattattgaagttaacgtttctgaattggggatggttactgctggtggtaaagttgtctggggtaagtatgctcaggtcacaaacgaaccagacagagacggctgtgtcaatgcggttttgcttgtatga

SEQ ID NO: 3267 - DNA, 1074 bp, Saccharomyces cerevisiae
atgtctgaacttaatgcattattaaaagatatcaacggctcgctcactgcgacatcagaatccttggagaggttgtctgggatttatagtaattctgcgaccgatgagattcctgaaagtaaccaactacatgagcatctattttacgacgctaagaagcctgctgagaaagtatcgctgctatccttaaaaaatgggagcatgctagggtacataaattctctattgatgcttataggcaataggctagacgacgagtgcaaagatccttctgctatggatgcacgtgaacgctctattcaacaccgtgtggtattagagcgtggtgttaaaccactagaaaaaaagttggcttaccaattggacaagctgactagagcatatgtgaaaatggaaaaggaatataaagacgctgagaagcgtgcactggaaaaatctaccttagtgaatcatagcggcaacgacgatagcgaagatgatgagtctagtgaggatgaaatagcatacaggccaaatacctctggaattatcaacacaaataaaaaatcatcagcatacagggtggaggaaacggctaagcaagaaaacggggaagaaaacgatgacaatgagactggcgtgtataaaccaccaaagattacggctgttctaccaccgcaacaaacgcattttgaagatagattcgatgccagagaacacaaagatcgtagtaacaaatcgcgtatgcaagccatggaagaatatattagagagtcatcggaccaaccggactggagtgcatctattggtgctgacattgtgaaccatggaagaggcggtatcaaatctttgagagacacagagaaggaacgtagagtcacttcattcgaagaagataattttaccagattgaatattacaaataaagctgaaaaaaggaagcaaaagcaacgagaaagaaatgcaaggatgaacgttatcggtggtgaagattttggtatattcagctcaaagaggaagctggaagatagcacttcgagacgtggggccaagaagactcgttctgcctgggatagagctcaaaggagactgtag

SEQ ID NO: 3268 - DNA, 1074 bp, Artificial Sequence
  Description of Artificial Sequence: Synthetic polynucleotide
atgtctgaacttaatgcattattaaaagatatcaacggcagtctcactgcgacaagtgaatccttggagaggttgtctgggatttatagtaattctgcgaccgatgagattcctgaaagtaaccaattgcatgagcatttattttacgacgctaagaagcctgctgagaaagtatctttattatccttaaaaaatgggagcatgttggggtacataaattctttgttgatgcttataggcaataggttggacgacgagtgcaaagatccttctgctatggatgcacgtgaacgctctattcaacaccgtgtggtattagagcgtggtgttaaaccattggaaaaaaagttggcttaccaattggacaagttgactagagcatatgtgaaaatggaaaaggaatataaagacgctgagaagcgtgcattggaaaaatctaccttagtgaatcatagcggcaacgacgatagcgaagatgatgagtctagtgaggatgaaatagcatacaggccaaatacctctggaattatcaacacaaataaaaaatcttctgcatacagggtggaggaaacggctaagcaagaaaacggggaagaaaacgatgacaatgagactggcgtgtataaaccaccaaagattacggctgttttgccaccgcaacaaacgcattttgaagatagattcgatgccagagaacacaaagatcgtagtaacaaatctcgtatgcaagccatggaagaatatattagagagagtagtgaccaaccggactggagtgcatctattggtgctgacattgtgaaccatggaagaggcggtatcaaatctttgagagacacagagaaggaacgtagagtcacttctttcgaagaagataattttaccagattgaatattacaaataaagctgaaaaaaggaagcaaaagcaaagagaaagaaatgcaaggatgaacgttatcggtggtgaagattttggtatattcagctctaagaggaagttggaagatagcacttccagacgtggggccaagaagactcgttctgcctgggatagagctcaaaggagattgtga

SEQ ID NO: 3269 - DNA, 612 bp, Saccharomyces cerevisiae
atgataaatgagtacgttgccagaaaggtcgctctaaaggacatgcaaccatgtgcgatctgtagcaaaccatccactaccgtcctttacaacgcatctggtccagattggctatatacatgcgaaatacatttacaagataatccacaatttgtcattcccctctatagtacagagtataatgaagccgtggctcaattaaaactagtaaaggggaaaatggatagtctgacatcagctcaaacccaattagggtcctgggatggttgggttactaaaatattctccaagaaagaaaaggagacaaataactctaaagaccctgatccaactacaaccgactctactgatacatctccacaggctaagaacgatgcagaaatcttgtcagaaacaaagaaacagtacagcaaaatacttgacaaagttacagaactgcaaaggaaaaacagaaaatacgaactagcaaaaatcatgtttgaaagcagactcctaagaaaaagaacagaacaagtaaatcgcgaacgatacctcaaggagcaagagaattactctaatacggatcctgaagaactgcttcgaaaacacgtgttcccctccgttccaaaataa

SEQ ID NO: 3270 - DNA, 612 bp, Artificial Sequence
  Description of Artificial Sequence: Synthetic polynucleotide
atgataaatgagtacgttgccagaaaggtcgctttgaaggacatgcaaccatgtgcgatctgtagcaaaccatccactaccgtcctttacaacgcatctggtccagattggttatatacatgcgaaatacatttacaagataatccacaatttgtcattcccctctatagtacagagtataatgaagccgtggctcaattaaaattagtaaaggggaaaatggatagtttgacatctgctcaaacccaattagggtcctgggatggttgggttactaaaatattctccaagaaagaaaaggagacaaataactctaaagaccctgatccaactacaaccgactctactgatacatctccacaggctaagaacgatgcagaaatcttgagtgaaacaaagaaacagtacagcaaaatacttgacaaagttacagaattacaaaggaaaaacagaaaatacgaattggcaaaaatcatgtttgaaagcagactcttgagaaaaagaacagaacaagtaaatcgcgaaagatacctcaaggagcaagagaattactctaatacggatcctgaagaattgcttagaaaacacgtgttcccctccgttccaaaatga

SEQ ID NO: 3271 - DNA, 3429 bp, Saccharomyces cerevisiae
atggataggagtgataaaaaagttaacgtcgaagaggtcaatgtaccttcaaacttacaaatagaattagaaaaatcaggcaccagtagcagtgtatcactccgaagcccgactaagagtagcgctaccaatttggcgggcatggccgaaggtgcaagagataatgcatcaatagcgtcttcatcggtagattccctcaacatgctattagagcggcaaagagtaaggcagttaaaccatccacagcaccaacagcatataagtagttcactagctaagaccccgacaacgacttcatcattttgttcgagcgggagttctaagaataaagttaaggaaactaatcgaatatctctaacatacgacccggtgtcaaagaggaaagttttaaacacttatgagatcatcaaagaattaggccatggacaacatggaaaagtaaaattagcaagagatatattgagtaagcaattagtagcgattaaaatagtggatagacatgaaaagaaacagaggaagtttttcacgtttatcaaatcaagtaaaatatccgaaaatgataaaataaaacgagaaattgccattatgaaaaaatgccatcacaaacatgtcgtacaactgatagaagttctggatgatttaaaatcaagaaaaatttatttagttctagagtattgttctcgaggcgaggtaaaatggtgtccaccggattgtatggaatcagatgctaagggtccctctttactaagttttcaagaaacgcgagagattttaagaggcgttgtgctcggcttagaatatctccattaccaaggaatcattcaccgagatattaagcctgccaacttattaatatcaggagatggcactgttaagatttccgattttggtgtttctttagctgctagcagcacgaatagttccgatagtagcgaatccttagacgagttagaattagccaaaacagtgggcacgcctgcattttttgctcccgaaatgtgcttgggtgaagatgcattcaccaggtataacttaacaaaggaaaatttatttcgtggttcttgcatctcattcatgatagatatttgggctgtgggtgtgaccttgtactgtcttctttttggaatgctgccttttttttctgattttgagctcaaattatttgaaaaaattgtaaacgacccgttaaaatttccaacatttaaagaaatacagtccaacaaagtatctaaagtatcttgtgaggaggaatacgaaatggcaaaggaccttttattgaaattgttagaaaaaaatccccaaaaaagaatgactatacctgccattaaaaaacatccttttgtttcatgggattttgaccacgtaccggagaacgatgaaaagttactatcttctgtccttgagcaaaaattacgtttccaatgtaaccaaactgatcaatttgaacccatttctatttcaaagcacgaattgaaaaacgctgtctccggtgtcgggaaaaaaatcaaagagtccgtactaaaaagtatcccgctaaaggatccgtcagatctctctaataaaaactaccttcatccaacggaaaccactaggggcagaggggatgccaatgttattgtcagcgaaggttcagtgttatcgaatattaaggaattaagtgctaatgatggatgtttgaacactgatagcgacactaatattaatatcaacgacgatgatcattatagtggtgatgataacgatggacatttaacgaaaagagaactagaacgagaattaaacaaattcgatgataaacacgaggccggaaatatggttaatttacctatcaattcctcatttgcatccttggacagcttctacatagataattttgcgatggctagaatgggaatgagttctccagaagcgggagattcggtttcgtctgtaccaaaccttccttctgcaccgtcttcaacaaggcttggacgatcaccagtctttagtggagtcaccaaccaaccaagtccaattcgccccgttttgccacaacaaaagtcatcgttttgtgcaacaggtcggtatgataagagtcacaatagtcttcttagaaattcttcatctcatctaacgtcatacaactccggcagaccatcttcaaggactggccgaatgaattcacgcaaccaaaacttaccgaaaataccaaatagcctttcaaaaatctcaacaacgaaattgactgaactaagagttccaaaggattcagaaattccatcacctgcaaaaaaccctaacgctgatcgtttgagaaggtttcccgtaaagaaaaataccaaaacacccgccataaaagatcctccgagaataaacattaatagcagcgataagtcaggctccaaaaattctcctataaaatccttataccaacggatgaaacagtctaaggataattcaaaaaccttcgaggtacgtagaggaaactttttcagtcattttaatggagatgatgatgatagcagtagccagtcgtccgtaaccagttctggttcagaatctgattctgaattatcatccacttcatcgtcctgtacatctggaacccaatctcggaatagctccaacaataatgcatattcagaaacggagtcattacctttcgagtttggtgttgattcagaagatggaagtggagtattattaagagatttacctaacgaagatcaaataaggccgtttctggatatacaaccatgtcgacgcatgaaagttaaaagttcattgaacctcgaaccaccttctgtctcatcttcttcatcttcatcctccgacgaagatgagctaattttaaatgtcgggactgcaggtcatcgaagaaggcataattcttcaaaacttagtgaactatccaatagtccgcagaagggatcaaataatttcatgtattccaatggaagtgttcatgacagtgagacgacgataacgccgcaaaatatggatgacttgacgctgcatcaggcactgagccgcagccaacccattagtaagcctggcccattagtattaccaaagcgtttagaccaaaagaaagctacgacggaaacctcaaatttaacagatatcgttgaatttaacggtaataacgatcatcgaaaggacaaaaatttcgataaagttctttattcaagggacttgttaaaagatgctctaagttccactaatgcaggcagaaggagatccataccttcaaataaaataagaggacgaaaggacgcaagtattaccatgagtactaatgttggtaatgatgaacatgctagaaataccagctgccatggtgataaaggacaagaaaatggcgctataaaacaaaggacccatgaaagatcgcgatctttaacagtcgctgaactaaatgaagagaagagaaggagtgcacttccatga

SEQ ID NO: 3272 - DNA, 3429 bp, Artificial Sequence
  Description of Artificial Sequence: Synthetic polynucleotide
atggataggagtgataaaaaagttaacgtcgaagaggtcaatgtaccttccaacttacaaatagaattagaaaaatctggcaccagtagcagtgtatctctcagaagcccgactaagagtagcgctaccaatttggcgggcatggccgaaggtgcaagagataatgcatctatagcgtcttcttctgtagattccctcaacatgcttttagagagacaaagagtaaggcagttaaaccatccacagcaccaacagcatataagtagttctttggctaagaccccgacaacgacttcttctttttgtagcagcgggagttctaagaataaagttaaggaaactaatagaatatctttaacatacgacccggtgagcaagaggaaagttttaaacacttatgagatcatcaaagaattaggccatggacaacatggaaaagtaaaattagcaagagatatattgagtaagcaattagtagcgattaaaatagtggatagacatgaaaagaaacagaggaagtttttcacgtttatcaaatctagtaaaatatccgaaaatgataaaataaaaagagaaattgccattatgaaaaaatgccatcacaaacatgtcgtacaattgatagaagttttggatgatttaaaatctagaaaaatttatttagttttggagtattgttctcgtggcgaggtaaaatggtgtccaccggattgtatggaaagtgatgctaagggtccctctttattaagttttcaagaaacgagagagattttaagaggcgttgtgctcggcttagaatatctccattaccaaggaatcattcacagagatattaagcctgccaacttattaatatctggagatggcactgttaagatttccgattttggtgtttctttagctgctagcagcacgaatagttccgatagtagcgaatccttagacgagttagaattagccaaaacagtgggcacgcctgcattttttgctcccgaaatgtgcttgggtgaagatgcattcaccaggtataacttaacaaaggaaaatttatttcgtggttcttgcatctctttcatgatagatatttgggctgtgggtgtgaccttgtactgtcttctttttggaatgttgccttttttttctgattttgagctcaaattatttgaaaaaattgtaaacgacccgttaaaatttccaacatttaaagaaatacagtccaacaaagtatctaaagtatcttgtgaggaggaatacgaaatggcaaaggaccttttattgaaattgttagaaaaaaatccccaaaaaagaatgactatacctgccattaaaaaacatccttttgtttcctgggattttgaccacgtaccggagaacgatgaaaagttattatcttctgtccttgagcaaaaattacgtttccaatgtaaccaaactgatcaatttgaacccatttctatttccaagcacgaattgaaaaacgctgtctccggtgtcgggaaaaaaatcaaagagtccgtattgaaaagtatcccgttgaaggatccgagtgatctctctaataaaaactaccttcatccaacggaaaccactaggggcagaggggatgccaatgttattgtcagcgaaggttctgtgttatccaatattaaggaattaagtgctaatgatggatgtttgaacactgatagcgacactaatattaatatcaacgacgatgatcattatagtggtgatgataacgatggacatttaacgaaaagagaattggaaagagaattaaacaaattcgatgataaacacgaggccggaaatatggttaatttacctatcaattcctcttttgcatccttggacagcttctacatagataattttgcgatggctagaatgggaatgagttctccagaagcgggagattctgtttcttctgtaccaaaccttccttctgcaccgtcttctacaaggcttggaagatctccagtctttagtggagtcaccaaccaaccaagtccaattcgccccgttttgccacaacaaaagtcttctttttgtgcaacaggtagatatgataagagtcacaatagtcttcttagaaattcttcttctcatttaacgtcttacaactccggcagaccatcttccaggactggcagaatgaatagccgcaaccaaaacttaccgaaaataccaaatagcctttctaaaatcagtacaacgaaattgactgaattgagagttccaaaggattctgaaattccatctcctgcaaaaaaccctaacgctgatcgtttgagaaggtttcccgtaaagaaaaataccaaaacacccgccataaaagatcctccgagaataaacattaatagcagcgataagtctggctccaaaaattctcctataaaatccttataccaaagaatgaaacagtctaaggataattctaaaaccttcgaggtacgtagaggaaactttttcagtcattttaatggagatgatgatgatagcagtagccagtcttccgtaaccagttctggttctgaatctgattctgaattatcttccacttcttcttcctgtacatctggaacccaatctagaaatagctccaacaataatgcatattctgaaacggagtctttacctttcgagtttggtgttgattctgaagatggaagtggagtattattaagagatttacctaacgaagatcaaataaggccgtttttggatatacaaccatgtcgccgcatgaaagttaaaagttctttgaacctcgaaccaccttctgtcagctcttcttcttcttcttcctccgacgaagatgagttgattttaaatgtcgggactgcaggtcatagaagaaggcataattcttctaaacttagtgaattatccaatagtccgcagaagggaagtaataatttcatgtattccaatggaagtgttcatgacagtgagacgacgataacgccgcaaaatatggatgacttgacgttgcatcaggcattaagccgcagccaacccattagtaagcctggcccattagtattaccaaagcgtttagaccaaaagaaagctacgacggaaacctctaatttaacagatatcgttgaatttaacggtaataacgatcatagaaaggacaaaaatttcgataaagttctttattctagggacttgttaaaagatgctttaagttccactaatgcaggcagaaggagatccataccttccaataaaataagaggaagaaaggacgcaagtattaccatgagtactaatgttggtaatgatgaacatgctagaaataccagctgccatggtgataaaggacaagaaaatggcgctataaaacaaaggacccatgaaagatctcgttctttaacagtcgctgaattgaatgaagagaagagaaggagtgcacttccatga

SEQ ID NO: 3273 - DNA, 1332 bp, Saccharomyces cerevisiae
atgtctttataccctttacaaagatttgaatcaaatgacacggttttcagttacactttgaattctaagactgagctgtttaacgaaagccgcaataacgacaagcaacattttacccttcaactcataccaaatgccaacgccaatgccaaggaaattgacaataataatgtagaaattatcaacgatctaacaggcaatactattgtcgacaattgtgtaactacagctacttcatcaaatcagttggagagaaggctttcgatatccgactatcgtaccgaaaacggtaactactacgaatacgagttttttggtaggagggaacttaacgaaccattatttaataacgacatcgtagaaaatgatgatgacatcgatctaaataatgaaagtgatgtattgatggttagcgacgacgagttggaggtaaatgaaagattttcctttctcaagcaacagcctcttgacgggctgaacaggatttccagtactaataacttgaaaaatctggagatacatgaatttataatagatccaacggaaaacattgacgatgagcttgaagactcttttaccactgtgccccaatctaaaaaaaaagttagggactatttcaaattaaacatattcggcagtagtagcagtagtaataataacagtaatagccttggttgtgaacccattcagaccgaaaactcttcctcgcagaaaatgttcaaaaatagattcttcagaagtaggaaaagcactctaatcaagtctcttcctcttgagcaagaaaatgaagtgcttataaattcagggtttgatgtttcctctaatgaagaaagtgatgagagtgaccacgcgataataaatccgttaaagctggtgggaaataacaaggatatctctactcaaagcattgctaagacaacgaatccatttaagtctggcagtgattttaagatgattgagccagtttcaaaattcagcaatgattcgagaaaggacttattggctgccatatcagaaccatcctcttctccttctccttctgcaccatcaccttcagtacaatcttcctcttcttctcatggcttagtggtgaggaagaagacaggaagcatgcagaagacgcgcggaaggaagccctctttaattccggacgcttccaagcaatttggttgtgaattttgcgatagaagatttaaaagacaagagcatttgaagaggcatgtcagatctttacatatgtgcgaaaaaccatttacatgccatatctgtaataagaacttcagcagaagcgataatttgaatcagcacgttaaaactcacgcttccttatga

SEQ ID NO: 3274 - DNA, 1332 bp, Artificial Sequence
  Description of Artificial Sequence: Synthetic polynucleotide
atgtctttataccctttacaaagatttgaaagtaatgacacggttttcagttacactttgaattctaagactgagttatttaacgaaagccgcaataacgacaagcaacattttacccttcaactcataccaaatgccaacgccaatgccaaggaaattgacaataataatgtagaaattatcaacgatttaacaggcaatactattgtcgacaattgtgtaactacagctacttcttccaatcagttggagagaaggctttccatatccgactatcgtaccgaaaacggtaactactacgaatacgagttttttggtaggagggaacttaacgaaccattatttaataacgacatcgtagaaaatgatgatgacatcgatttgaataatgaaagtgatgtattgatggttagcgacgacgagttggaggtaaatgaaagattttcctttctcaagcaacagcctcttgacgggttgaacaggatttccagtactaataacttgaaaaatttggagatacatgaatttataatagatccaacggaaaacattgacgatgagcttgaagactcttttaccactgtgccccaatctaaaaaaaaagttagggactatttcaaattaaacatattcggcagtagtagcagtagtaataataacagtaatagccttggttgtgaacccattcagaccgaaaactcttcctctcagaaaatgttcaaaaatagattcttcagaagtaggaaaagcactttgatcaagtctcttcctcttgagcaagaaaatgaagtgcttataaatagtgggtttgatgtttcctctaatgaagaaagtgatgagagtgaccacgcgataataaatccgttaaagttagtgggaaataacaaggatatctctactcaaagcattgctaagacaacgaatccatttaagtctggcagtgattttaagatgattgagccagtttccaaattcagcaatgattccagaaaggacttattggctgccatatctgaaccatcctcttctccttctccttctgcaccatctccttctgtacaatcttcctcttcttctcatggcttagtggtgaggaagaagacaggaagcatgcagaagacgcgcggaaggaagccctctttaattccggacgcttccaagcaatttggttgtgaattttgcgatagaagatttaaaagacaagagcatttgaagaggcatgtcagatctttacatatgtgcgaaaaaccatttacatgccatatctgtaataagaacttcagcagaagcgataatttgaatcagcacgttaaaactcacgcttccttatga

SEQ ID NO: 3275 - DNA, 360 bp, Saccharomyces cerevisiae
atgccaaaaaagagagcttccaacggtagaaacaagaagggtagaggtcacgtcaagccagtgagatgtgttaactgttccaagtccattccaaaggataaggctatcaagagaatggctattagaaacattgttgaagctgctgccgtcagagatttgtccgaagcttctgtctacccagaatacgccttgccaaagacttacaacaagttgcactactgtgtctcctgtgctattcacgccagaattgttagagttagatccagagaagacagaaagaacagagctcctccacaaagaccaagatttaacagggataacaaagtttctccagcagctgccgcaaagaaagctttgtaa

SEQ ID NO: 3276 - DNA, 360 bp, Artificial Sequence
  Description of Artificial Sequence: Synthetic polynucleotide
atgccaaaaaagagagcttccaacggtagaaacaagaagggtagaggtcacgtcaagccagtgagatgtgttaactgttccaagtccattccaaaggataaggctatcaagagaatggctattagaaacattgttgaagctgctgccgtcagagatttgtccgaagcttctgtctacccagaatacgccttgccaaagacttacaacaagttgcactactgtgtctcctgtgctattcacgccagaattgttagagttagatccagagaagacagaaagaacagagctcctccacaaagaccaagatttaacagggataacaaagtttctccagcagctgccgcaaagaaagctttgtga

SEQ ID NO: 3277 - DNA, 5262 bp, Saccharomyces cerevisiae
atgaccgtattacaaccaccatctagtgtttgttatccgctcaacctccctattgtaccgaatcccaatctggatgaagcaacaaggaagaagctcactttggaatgcagaactggagctgcagtagaactagcccgttcaggtgtttttgtccatggtgggctcacactacctttaaatctgactattataaattcattacaactgcaaaaggagctaattctatattttggtaaacagaaggatagaaatgctgattttaaaacattagctgattggataagccctgagatatttttccttgatttaatttccagaacatggcaaagaataaatactacaatagatactacatcagaaaatgagttgaataacggcttaagctttaaagagagattgtttcattcgatgtgcttcacagaatccaacatttacattttcggtgggcttatggtgtcgcctcacaacggctatgagctgatagcaacaaacgaattatggaaattagatcttaaaacaaagtgctggtctttgataagtgaaaaccctcaaattacaagacgttttaatcatagtatgcacgtcctaaatgaaaataacgaaaatcaagatacgaagctaatcattgtaggtgggttagataatatggatattcctgttaaaaaaattgatatatttaacctacgtacaagtttatgggagtcagaatcgaaatcggacgaaaacccagcttcaaaggggtcgtcaaaaatactggttaatattgatgggatgccaatttctttatctcacgattccaacttctcagttctgattgaaaataatcaggcagaaattccgacattggcattatattaccctcaacgcgaggcaaacacgtccagaaggggaaccgacgatggtagtttctctacttacgctcatgatctagacgacaaatccaaactaccaaaacatcaccatcaccatcatggcgatcttaagtattttgaaagcgatgatgcagatgaaaacgcagtaaaaacacttatgtcgcctatcgtaattttgccactacttggaaactctcagggcgctaggatgacatcaaaccctacacaaaacaacaaagaaaactctattttacaagtaccttttcacttgcagtatccctcaggtaattactttaattataacattgttgtaataggattttatccagacccccaaccttccaatcttcattgtttcatttataatatcgctagtggaaaatggataagagtaaacatagcatgtactgagtgcagtattagtatgcatagattttggaagcttctgatttggaagtctcatcatcaagctttattacttggtaccagaacagatgatttttgttcacctagcgttcaaaaattcgatcacattttatcattctctttaccaatgttaaacggctataataaattagtgaataccaaacacacacgcactaataatggcatcgctaatagtcataacttaaacgtaaatctaagtctttatgatcatcttccatactctaattcatcaacgattgagcacacaaatccatacacagtaactcaaggatattccttagacgactcagggatcccccgcttgacttcgactgcgacctcacaatttgagaactattccagatatataactgtaccattagaaatggaatcaactagttctatatttccgccatatgctatggttttaggtaaagatgctctagaaatattcggcaagactttatctgatttcgaatttatcactgctgatggtgattctatcggtgttccagtatatttattgagaaaaagatgggggagatattttgattcactattatcaaacggctatgcaaatacatctttcaattatgagtttaatggagacacttctaatatcataagtttttcacctcatacagcctcaaaaactaccaagtttggtaactctagtcaatcatccaacggatccctagaaaaatacttttctaaaaacggaaatagtaaatcgaacagtaatacaagtcttaagaaaccacatagcgtagactttacttcatcaacatcgtcacccaagcagcgagccatctcgcataataaactatctccttcagaaccgatactttgtgcggatgaggaggacagtcggtcaaacacgttaaaacaacatgcaactggagatactggcctgaaagaaacaggcacctcgaacaaaaggccgatatccaccacttgctcttctacaggtatggtctttagggttccctttcaggacatgaaaaattcaaagctggggctttcagaacagtctggtcgctctactcgagcaagctctgtttcacctcctccggtatataaaaaatcaactaacgatggtaatgatagcaattgtacactttccaatacacctttagtttataggcgagcttccacagtgggaaccaccacgaatagttcggtagatgacggcttttcatccattcggagagcctcacaccctcttcaatcttacattatagccaaatcttcacccagtagtatatcaaaggctagtcccgcggaaaaagctttctcacgtagaaaatcatccgcattaaggtttatagcaagtccaaatcagtcgcgacagacttcatttgcatctactgccagcactgcctctgttgtaagttctacttcaggaagaaggcgcaactctaaccaaatttctcatttaggaagctctgcaagtttaccaaactcgcctatcttgcctgtgttgaatatcccattacccccacaagaaaagatcccactagaaccactaccgccggtgccaaaagcaccctcaagaagaagcagttccttggcggagtacgttcaatttggtagggatagtccagtcgcgtcaagaaggtcttctcattccaccagaaaatcgagctcctcggatgcaaggcgtatctctaactcttctttgctgaggaatactctagattcgcaactgctaagtaatagttatggcagtgacattccttacgaagcaagtattcaagaatatggcatgaacaatggaagagatgaagaggaagatggggacaatcaagactacggctgtatctcaccttccaatataaggcccatcttttccaccattaatgcaatcaatataaacggcaatttcaaagaaggtgaatttttttcttcaaaatcatatattaataatgaaaagagtagaagactttcttacatttcaaaccctgaaagtgtagaaagtacaaattcgaacaataacgccataatcgagttagaacccttattaaccccgagatcattgtatatgccttggtcgaccgcctctgtaagagcatttgcagagttcttttacaccgcacaaattaatggcaaatggctattagctcctgtgaccctggacctgcttatcatggctaaaatatacgaaattccaattttatacgaactgattacagaagtgctgtataagataatcagcaaaaaggaagaaggtctttcagttacttgcgaagcactactaaatctgttccagcaaaaggtttcgagatattgcaatgaaaatgagggcaaaataagaaagcagttggattctagcgaatcatatcaggacaccttagagataaaacgttccctagccaatatagacaacggatacgttgattcatatcttttgcgaaacacttcaatggcgcaatcaatacactacacggatgacagtaatggagaaaccgaaatagatatgcaccacacgggaatttctagcataggatcgcttgccaatagggctgttcctactgtttttgccggtggtcctagagacagccataattcgattggttcaattgcattccccagtaattcgggtgttcaaaatattcgccgctctgtgtccttatttagcccagcgacgaagaagaaatccagcttaagtagggaaacagatccattagatacctccgatcaatttactgatgatgttcctgatagtggaccagtcagccggcaacagaactttccaagaagaagtagtagttttactgaaacagttcccacagaacctacgagatataattaccaaaatttggactctagtaagtcaaacagagcttcggacgataaagaggaacaaaacgaacaagctacgctccaggacatttcgaacttcgataaatacaaggttgaaacgttgcaaaagagaaacagcaacgatgggaaagatttagaccgcactaatgatccattgaagaacagaggaacagaaatacctcaaaactcatccaatttagagacagacccgtttattcgtgatagttttgatagtgattcaggttcttccttccgctctgattctgatgaccttgattcacagctaggtattttgcctttcacaaaaatgaataaaaaattacaggagcagacatctcaagaatttgatgattctattgatcctttatataaaataggatccagcactccaggctcttcaagattacatggatcattttccaaatacattagacctaattcacaaagagaagatggttcggaatatgttaatatatctagcctggaaaatatggtctcacccaatgcactaccacctgtcgactatgtcatgaagtctatttatagaacttctgtattggttaatgacagtaacttgatgacgcgcacgaaggaagcaatcgaattatccaaagtcttgaaaaagttaaaaaaaaaggtattacaagacatttcacaaatggatgacgaaatgagagagactggaaaaccaatttttgcacgcggatcttcttctcctactctaagtaggcagcactctgatgtcgcgacaccgttaaaacagcaagaaaatacaagaccagctttaaaatttgcatcaagttccccgatctcggagggattcaggaaatcgtccatcaaattctcacaggcgccttccactcagatctcacctaggacttccgttacagatttcactgcatctcaacaacggagacaacatatgaataaaagattcagtactcagacgacacattccacatctgctctattcatgaatcctgcctttatgccttctgcagtgaatactggacgtaaggagagtgaagggcattgtgaggatagatcagcgactgccaacagaacaaataggaaagaagacgcaactacaaatgataacgataatattgccccatttccttttttcggtaaacgaagataa

SEQ ID NO: 3278 - DNA, 5262 bp, Artificial Sequence
  Description of Artificial Sequence: Synthetic polynucleotide
atgaccgtattacaaccaccatctagtgtttgttatccgctcaacctccctattgtaccgaatcccaatttggatgaagcaacaaggaagaagctcactttggaatgcagaactggagctgcagtagaattggcccgttctggtgtttttgtccatggtgggctcacattgcctttaaatttaactattataaattctttacaattacaaaaggagttgattctttattttggtaaacagaaggatagaaatgctgattttaaaacattagctgattggataagccctgagatatttttccttgatttaatttccagaacatggcaaagaataaatactacaatagatactacaagtgaaaatgagttgaataacggcttaagctttaaagagagattgtttcattctatgtgcttcacagaatccaacatttacattttcggtgggcttatggtgtctcctcacaacggctatgagttgatagcaacaaacgaattatggaaattagatcttaaaacaaagtgctggtctttgataagtgaaaaccctcaaattacaagacgttttaatcatagtatgcacgtcttgaatgaaaataacgaaaatcaagatacgaagttaatcattgtaggtgggttagataatatggatattcctgttaaaaaaattgatatatttaacttgcgtacaagtttatgggagagtgaaagtaaaagtgacgaaaacccagcttccaaggggtcttctaaaatattagttaatattgatgggatgccaatttctttatctcacgattccaacttctctgttttgattgaaaataatcaggcagaaattccgacattggcattatattaccctcaacgcgaggcaaacacgtccagaaggggaaccgacgatggtagtttctctacttacgctcatgatttggacgacaaatccaaattaccaaaacatcaccatcaccatcatggcgatcttaagtattttgaaagcgatgatgcagatgaaaacgcagtaaaaacacttatgtctcctatcgtaattttgccattacttggaaactctcagggcgctaggatgacaagtaaccctacacaaaacaacaaagaaaactctattttacaagtaccttttcacttgcagtatccctctggtaattactttaattataacattgttgtaataggattttatccagacccccaaccttccaatcttcattgtttcatttataatatcgctagtggaaaatggataagagtaaacatagcatgtactgagtgcagtattagtatgcatagattttggaagcttttgatttggaagtctcatcatcaagctttattacttggtaccagaacagatgatttttgttctcctagcgttcaaaaattcgatcacattttatctttctctttaccaatgttaaacggctataataaattagtgaataccaaacacacacgcactaataatggcatcgctaatagtcataacttaaacgtaaatttgagtctttatgatcatcttccatactctaattcttctacgattgagcacacaaatccatacacagtaactcaaggatattccttagacgacagtgggatcccccgcttgacttctactgcgacctctcaatttgagaactattccagatatataactgtaccattagaaatggaatctactagttctatatttccgccatatgctatggttttaggtaaagatgctttggaaatattcggcaagactttatctgatttcgaatttatcactgctgatggtgattctatcggtgttccagtatatttattgagaaaaagatgggggagatattttgattctttattatctaacggctatgcaaatacatctttcaattatgagtttaatggagacacttctaatatcataagtttttctcctcatacagcctccaaaactaccaagtttggtaactctagtcaatcttccaacggatccttagaaaaatacttttctaaaaacggaaatagtaaaagtaacagtaatacaagtcttaagaaaccacatagcgtagactttacttcttctacatcttctcccaagcagagagccatctctcataataaattatctccttctgaaccgatactttgtgcggatgaggaggacagtagatctaacacgttaaaacaacatgcaactggagatactggcttgaaagaaacaggcaccagtaacaaaaggccgatatccaccacttgctcttctacaggtatggtctttagggttccctttcaggacatgaaaaattctaagttagggctttctgaacagtctggtcgctctactagagcaagctctgtttctcctcctccggtatataaaaaatctactaacgatggtaatgatagcaattgtacactttccaatacacctttagtttataggagagcttccacagtgggaaccaccacgaatagttctgtagatgacggcttttcttccattagaagagcctctcaccctcttcaatcttacattatagccaaatcttctcccagtagtatatccaaggctagtcccgcggaaaaagctttctctcgtagaaaatcttccgcattaaggtttatagcaagtccaaatcagtctagacagacttcttttgcatctactgccagcactgcctctgttgtaagttctacttctggaagaaggcgcaactctaaccaaatttctcatttaggaagctctgcaagtttaccaaactctcctatcttgcctgtgttgaatatcccattacccccacaagaaaagatcccattggaaccattaccgccggtgccaaaagcacccagtagaagaagcagttccttggcggagtacgttcaatttggtagggatagtccagtcgcgtccagaaggtcttctcattccaccagaaaaagtagctccagtgatgcaaggcgtatctctaactcttctttgttgaggaatactttagattctcaattattaagtaatagttatggcagtgacattccttacgaagcaagtattcaagaatatggcatgaacaatggaagagatgaagaggaagatggggacaatcaagactacggctgtatctctccttccaatataaggcccatcttttccaccattaatgcaatcaatataaacggcaatttcaaagaaggtgaatttttttcttctaaaagttatattaataatgaaaagagtagaagactttcttacatttccaaccctgaaagtgtagaaagtacaaatagcaacaataacgccataatcgagttagaacccttattaaccccgagaagtttgtatatgccttggtctaccgcctctgtaagagcatttgcagagttcttttacaccgcacaaattaatggcaaatggttgttagctcctgtgaccttagacttacttatcatggctaaaatatacgaaattccaattttatacgaattgattacagaagtgctttataagataatcagcaaaaaggaagaaggtctttctgttacttgcgaagcattattgaatttattccagcaaaaggtttctagatattgcaatgaaaatgagggcaaaataagaaagcagttggattctagcgaaagttatcaggacaccttagagataaaacgttccttggccaatatagacaacggatacgttgattcttatcttttgagaaacacttctatggcgcaaagtatacactacacggatgacagtaatggagaaaccgaaatagatatgcaccacacgggaatttctagcataggatctcttgccaatagggctgttcctactgtttttgccggtggtcctagagacagccataattctattggttccattgcattccccagtaattctggtgttcaaaatattcgccgctctgtgtccttatttagcccagcgacgaagaagaaatccagcttaagtagggaaacagatccattagatacctccgatcaatttactgatgatgttcctgatagtggaccagtcagcagacaacagaactttccaagaagaagtagtagttttactgaaacagttcccacagaacctacgagatataattaccaaaatttggactctagtaagtctaacagagcttctgacgataaagaggaacaaaacgaacaagctacgctccaggacatttccaacttcgataaatacaaggttgaaacgttgcaaaagagaaacagcaacgatgggaaagatttagaccgcactaatgatccattgaagaacagaggaacagaaatacctcaaaactcttccaatttagagacagacccgtttattcgtgatagttttgatagtgattctggttcttccttccgctctgattctgatgaccttgattctcagttgggtattttgcctttcacaaaaatgaataaaaaattacaggagcagacatctcaagaatttgatgattctattgatcctttatataaaataggatccagcactccaggctcttctagattacatggaagtttttccaaatacattagacctaattctcaaagagaagatggttctgaatatgttaatatatctagcttggaaaatatggtctctcccaatgcattgccacctgtcgactatgtcatgaagtctatttatagaacttctgtattggttaatgacagtaacttgatgacgcgcacgaaggaagcaatcgaattatccaaagtcttgaaaaagttaaaaaaaaaggtattacaagacatttctcaaatggatgacgaaatgagagagactggaaaaccaatttttgcacgcggatcttcttctcctactttaagtaggcagcactctgatgtcgcgacaccgttaaaacagcaagaaaatacaagaccagctttaaaatttgcaagtagttccccgatctctgagggattcaggaaatcttccatcaaattctctcaggcgccttccactcagatctctcctaggacttccgttacagatttcactgcatctcaacaaagaagacaacatatgaataaaagattcagtactcagacgacacattccacatctgctttattcatgaatcctgcctttatgccttctgcagtgaatactggacgtaaggagagtgaagggcattgtgaggatagatctgcgactgccaacagaacaaataggaaagaagacgcaactacaaatgataacgataatattgccccatttccttttttcggtaaaagaagatga

SEQ ID NO: 3279 - DNA, 939 bp, Saccharomyces cerevisiae
atggactcacaaccagttgacgttgataatatcatcgatagattattggaagtaagaggatctaaacctggtcaacaagttgatctagaagaaaatgaaatcagatacttatgttcgaaagccagatctatattcataaagcaacccattttactagagttagaagccccaattaaaatatgtggtgacattcatgggcaatactatgatttactacgtctatttgagtacggtggattcccgccagaatctaattatctatttttgggtgattatgtcgaccgtggtaaacaatccttagagactatttgtctattactggcttacaaaattaagtatccagaaaactttttcattttaagagggaaccatgaatgtgcttccattaatagaatttacgggttttatgatgaatgtaagagacgttataatatcaaactttggaaaactttcacggattgtttcaattgtttaccaattgctgcaattattgatgagaaaatcttctgtatgcatggtggtctctcaccagatttgaatagtatggaacagatcagaagggtgatgaggccaacagatattcccgacgttggcttattatgtgacttattgtggtcagatccagataaagatatcgtaggttggagtgaaaatgatagaggtgtttctttcacttttggtcctgatgtagtgaacagatttttacagaaacaagatatggagttgatttgcagggcccatcaagttgtggaagatggttatgaattctttagtaaaagacaattggtgacacttttcagtgctccgaattattgtggtgaatttgataacgctggtgcaatgatgagtgttgatgaaagtttattatgttcttttcaaattttaaagccagcccaaaaaagtctaccaaggcaagctgggggtagaaagaaaaaataa

SEQ ID NO: 3280 - DNA, 939 bp, Artificial Sequence
  Description of Artificial Sequence: Synthetic polynucleotide
atggactctcaaccagttgacgttgataatatcatcgatagattattggaagtaagaggatctaaacctggtcaacaagttgatttggaagaaaatgaaatcagatacttatgttctaaagccagatctatattcataaagcaacccattttattggagttagaagccccaattaaaatatgtggtgacattcatgggcaatactatgatttattacgtttgtttgagtacggtggattcccgccagaatctaattatttatttttgggtgattatgtcgaccgtggtaaacaatccttagagactatttgtcttttattagcttacaaaattaagtatccagaaaactttttcattttaagagggaaccatgaatgtgcttccattaatagaatttacgggttttatgatgaatgtaagagacgttataatatcaaactttggaaaactttcacggattgtttcaattgtttaccaattgctgcaattattgatgagaaaatcttctgtatgcatggtggtctctctccagatttgaatagtatggaacagatcagaagggtgatgaggccaacagatattcccgacgttggcttattatgtgacttattgtggtctgatccagataaagatatcgtaggttggagtgaaaatgatagaggtgtttctttcacttttggtcctgatgtagtgaacagatttttacagaaacaagatatggagttgatttgcagggcccatcaagttgtggaagatggttatgaattctttagtaaaagacaattggtgacacttttcagtgctccgaattattgtggtgaatttgataacgctggtgcaatgatgagtgttgatgaaagtttattatgttcttttcaaattttaaagccagcccaaaaaagtttaccaaggcaagctgggggtagaaagaaaaaatga

SEQ ID NO: 3281 - DNA, 537 bp, Saccharomyces cerevisiae
atgactggataccctgacgtggccgccttcgatttggactacaccatttggccctgctattgtgatacccatttgcacggtccctttaagccagttaaaagtagtaatggcgaagttctcacaattatatgtagagatggttacgagctcacaatctacaaagatatcccacgtatactaggtgatcttaaagataatggagttaagttaatgaccgcgtcacgaacgtgggcacctgagattgcccaggaaatactgaaaatattcaaggtcaagtatgctggtgtcgtaaccccgttggccaacctgttcgatgaatttcagtggggagaaagaagtaaaattggccatttaagggacggtttgaaagatctttataataccagcgatttaaaatcgaaaaagatttgtttatttgatgatgaaagtagaaacaaagaagtggagaaatacggagtgaagtttgtttatgtaagagacccagagaatggaccatcttggaaactttatcaagattacctgagtggaaaggtttga

SEQ ID NO: 3282 - DNA, 537 bp, Artificial Sequence
  Description of Artificial Sequence: Synthetic polynucleotide
atgactggataccctgacgtggccgccttcgatttggactacaccatttggccctgctattgtgatacccatttgcacggtccctttaagccagttaaaagtagtaatggcgaagttctcacaattatatgtagagatggttacgagctcacaatctacaaagatatcccacgtatattaggtgatcttaaagataatggagttaagttaatgaccgcgtctaggacgtgggcacctgagattgcccaggaaatattgaaaatattcaaggtcaagtatgctggtgtcgtaaccccgttggccaacttgttcgatgaatttcagtggggagaaagaagtaaaattggccatttaagggacggtttgaaagatctttataataccagcgatttaaaatctaaaaagatttgtttatttgatgatgaaagtagaaacaaagaagtggagaaatacggagtgaagtttgtttatgtaagagacccagagaatggaccatcttggaaactttatcaagattacttgagtggaaaggtttga

SEQ ID NO: 3283 - DNA, 393 bp, Saccharomyces cerevisiae
atgacatggactttaagaaacttacataattcacagaaaaaggtcttggtcgatattacaatttggttagcactttctccatacggtgacatggcgttatttacaagttttgagaatataatcggcgaatattataggtactctatactaccgttacatcaaaacttacacaagttactattcactctttttctaatatgcctcgctagttggaaagagggaaacagatcttgcagatataaatggcagaaatttgtgtgcaacaagctaaattctcctgaaacaaatttcgtacccattcgcacctcagtgaataagaactctaaaatgattgttgaaaagcagataagcattcatatttctttaaagtgtattgtttacaaagaatactaa

SEQ ID NO: 3284 - DNA, 393 bp, Artificial Sequence
  Description of Artificial Sequence: Synthetic polynucleotide
atgacatggactttaagaaacttacataattctcagaaaaaggtcttggtcgatattacaatttggttagcactttctccatacggtgacatggcgttatttacaagttttgagaatataatcggcgaatattataggtactctatattaccgttacatcaaaacttacacaagttattattcactctttttttaatatgcctcgctagttggaaagagggaaacagatcttgcagatataaatggcagaaatttgtgtgcaacaagttgaattctcctgaaacaaatttcgtacccattcgcacctctgtgaataagaactctaaaatgattgttgaaaagcagataagcattcatatttctttaaagtgtattgtttacaaagaatactga

SEQ ID NO: 3285 - DNA, 1356 bp, Saccharomyces cerevisiae
atggatcaagaaacaatagacactgactacgacgtgattgtcttaggtaccggtattaccgaatgtatcttatctggtttactctctgtagatggaaaaaaggtattacatattgacaagcaagaccattatggtggcgaagctgcttctgtgaccttatctcaattgtatgaaaaatttaaacaaaatccgatcagtaaagaggaacgggagtccaagtttggtaaagatagagattggaatgtcgacttaattcctaaattcctgatggccaatggtgagctgacaaatattttaatacataccgatgtgaccagatatgtcgatttcaagcaagtttctggctcctacgtttttaagcaaggcaaaatttacaaagtgccagctaatgaaatagaagccatttcatcgccattgatgggtatttttgaaaaacgtagaatgaagaaatttttagaatggattagctcttacaaagaagatgacttgtccactcatcaaggattagacttagacaagaataccatggatgaagtgtattataaatttgggttaggcaattctaccaaagaattcatcggtcatgcaatggctttatggaccaatgatgactacttacaacaacctgctaggccatcgtttgagaggattttgttatattgccaaagtgttgcccgttacggtaaatcaccttatttgtatcctatgtatgggttaggcgaacttccacaaggatttgctcgtttgtcggctatttacggtggtacttacatgctagacactccaattgatgaagtattgtataaaaaagacacaggaaaatttgaaggggtcaagactaagctgggaactttcaaggccccattggttattgctgatccaacttattttcccgaaaaatgtaaatctactggtcaaagagttattagagccatctgtattcttaaccatccagttccgaacaccagtaacgcggattctttacaaattattatcccacaaagccaactgggaaggaaaagcgatatatacgttgcgattgtttcagatgcgcataacgtttgctccaagggtcactatttagcaattatttctacaatcattgaaactgataaaccacatatagaattagagcctgctttcaaacttctgggaccaatcgaagaaaaattcatgggaattgccgaattatttgaaccaagagaagacggctctaaggataacatttacttatccagatcatacgacgcatcctctcatttcgaatccatgactgacgatgttaaagatatttacttcagagtaacaggccacccattagttctaaaacaaagacaagaacaagaaaagcagtaa

SEQ ID NO: 3286 - DNA, 1356 bp, Artificial Sequence
  Description of Artificial Sequence: Synthetic polynucleotide
atggatcaagaaacaatagacactgactacgacgtgattgtcttaggtaccggtattaccgaatgtatcttatctggtttactctctgtagatggaaaaaaggtattacatattgacaagcaagaccattatggtggcgaagctgcttctgtgaccttatctcaattgtatgaaaaatttaaacaaaatccgatcagtaaagaggaaagagagtccaagtttggtaaagatagagattggaatgtcgacttaattcctaaattcttaatggccaatggtgagttgacaaatattttaatacataccgatgtgaccagatatgtcgatttcaagcaagtttctggctcctacgtttttaagcaaggcaaaatttacaaagtgccagctaatgaaatagaagccatttcttctccattgatgggtatttttgaaaaacgtagaatgaagaaatttttagaatggattagctcttacaaagaagatgacttgtccactcatcaaggattagacttagacaagaataccatggatgaagtgtattataaatttgggttaggcaattctaccaaagaattcatcggtcatgcaatggctttatggaccaatgatgactacttacaacaacctgctaggccatcttttgagaggattttgttatattgccaaagtgttgcccgttacggtaaatctccttatttgtatcctatgtatgggttaggcgaacttccacaaggatttgctcgtttgtctgctatttacggtggtacttacatgttggacactccaattgatgaagtattgtataaaaaagacacaggaaaatttgaaggggtcaagactaagttgggaactttcaaggccccattggttattgctgatccaacttattttcccgaaaaatgtaaatctactggtcaaagagttattagagccatctgtattcttaaccatccagttccgaacaccagtaacgcggattctttacaaattattatcccacaaagccaattaggaaggaaaagcgatatatacgttgcgattgtttctgatgcgcataacgtttgctccaagggtcactatttagcaattatttctacaatcattgaaactgataaaccacatatagaattagagcctgctttcaaacttttgggaccaatcgaagaaaaattcatgggaattgccgaattatttgaaccaagagaagacggctctaaggataacatttacttatccagatcttacgacgcatcctctcatttcgaatccatgactgacgatgttaaagatatttacttcagagtaacaggccacccattagttttgaaacaaagacaagaacaagaaaagcagtga

SEQ ID NO: 3287 - DNA, 447 bp, Saccharomyces cerevisiae
atgtgtgaatcatcaaataagactgaaaatgatatagtcagattgtcacaagctatggatgtcctggctaagttgatcatttcaaagcaaaaagatggatcacaattacaagttgagtacgagcataagttgaaagaattagagaaattcattaacctactactgggattgcatgaaagcactgtgggaagtatgatgaatactagtgttcttgacatggtactgcggaatggaatagagatcatggaaaaagacgatcaaaaatatgccctgataccgattaaagccaaggaagaggcagataaaactacgagcactattcagggagtaaccagcaaaaagagtagtaaaaagaaaaaaaataagataaaatgttcattttgtcacgaggctggccacacaagggcacactgcggtgcgagactgacagttatacccaagaaataa

SEQ ID NO: 3288 - DNA, 447 bp, Artificial Sequence
  Description of Artificial Sequence: Synthetic polynucleotide
atgtgtgaatcttccaataagactgaaaatgatatagtcagattgtctcaagctatggatgtcttggctaagttgatcatttccaagcaaaaagatggatctcaattacaagttgagtacgagcataagttgaaagaattagagaaattcattaacttattattaggattgcatgaaagcactgtgggaagtatgatgaatactagtgttcttgacatggtattgagaaatggaatagagatcatggaaaaagacgatcaaaaatatgccttaataccgattaaagccaaggaagaggcagataaaactacgagcactattcagggagtaaccagcaaaaagagtagtaaaaagaaaaaaaataagataaaatgttccttttgtcacgaggctggccacacaagggcacactgcggtgcgagattgacagttatacccaagaaatga

SEQ ID NO: 3289 - DNA, 105 bp, Saccharomyces cerevisiae
atgataataatatttatagaattgtgtagaattgcagattcccttttatggattcctaaatcctcgaggagaacttctagtatatctacatacctaatattataa

SEQ ID NO: 3290 - DNA, 105 bp, Artificial Sequence
  Description of Artificial Sequence: Synthetic polynucleotide
atgataataatatttatagaattgtgtagaattgcagattcccttttatggattcctaaatccagcaggagaacttctagtatatctacatacttgatattatga

SEQ ID NO: 3291 - DNA, 681 bp, Saccharomyces cerevisiae
atggcgacgattgaagatattaaggaaacggcgttaatccctttccaaaagcacaggcaactttccatgcatgaagcagaagttataactttagagattataggcttattatgtgattcagaatgcaaggatgagaaaacattgaaatatttgggccgatttctcacaccggatatgtatcaagacctagtagatgagaggaatctaaacaaaagatgcggatatcctctttgcggtaaatcgccagaaagaatacgtgatccattttcaatgaatgatactactaagaaatttttattagaaaacaatccgtatgcatatttgtcgcactattgcagtaagttccattttagatgttcccaattttatcaagtgcaactatctgatgaagctttatttgcaagaacaggggttcacctatttgaagatcctgaacaggacaaacacgatatagatttcaaagtgactttgtttgaagagttgctaagagaaaaggcatccgaagaagacattaaatcattgatatccggtctcaaaaagttaggattaaatcctgacagtgggactacagaaaaagatgatactgagctggaagatgatttatcgaagtggttggcacaaatcaaaattgttgagaatgataatcccagcattttgggtgatttcacaagggaagattga

SEQ ID NO: 3292 - DNA, 681 bp, Artificial Sequence
  Description of Artificial Sequence: Synthetic polynucleotide
atggcgacgattgaagatattaaggaaacggcgttaatccctttccaaaagcacaggcaactttccatgcatgaagcagaagttataactttagagattataggcttattatgtgattctgaatgcaaggatgagaaaacattgaaatatttgggcagatttctcacaccggatatgtatcaagacttggtagatgagaggaatttgaacaaaagatgcggatatcctctttgcggtaaatctccagaaagaatacgtgatccattttccatgaatgatactactaagaaatttttattagaaaacaatccgtatgcatatttgtctcactattgcagtaagttccattttagatgttcccaattttatcaagtgcaattatctgatgaagctttatttgcaagaacaggggttcacctttttgaagatcctgaacaggacaaacacgatatagatttcaaagtgactttgtttgaagagttgttaagagaaaaggcatccgaagaagacattaaatctttgatatccggtctcaaaaagttaggattaaatcctgacagtgggactacagaaaaagatgatactgagttagaagatgatttatccaagtggttggcacaaatcaaaattgttgagaatgataatcccagcattttgggtgatttcacaagggaagattga

SEQ ID NO: 3293 - DNA, 1671 bp, Saccharomyces cerevisiae
atgcaacacaaggatacggcagtagcgaaggacacagctaaaaaacgtttactgagaagaaatagtgcgccgtcagctatacatataatttcacgattagacaaaaagtggtccttcctatggaatactatagatagacacaatattgttgaagagcaagatgaaagtagcgctgcaaaaagcgaagaagaacatgaggatgattatgaattggaacaattactcaacatgataagaataccaatgttcctggaaaagttcatgctctttgcacttttaacaagcttggactgttttttgtattactttactgtattaccgatacgactgataaagggatatgtaaagcaattcaagagttatcgtcagcattatcgcctgcaacaacggtctgggcataagaataaaataccctttcgatatagaataacttcaagagaatataaagagagatgtatgatttttatcatcgtgatttcatccattttgttgagcaaactagacacctcaaaactatatcacaggataaaacggcaaagtacgatgaaattgtacatgctattcagtgtactggaaatggcggacaaaatgttggcaagtttgggccagagcttattaacggttatgctttctaggaaaaactcggaacggatattactgcataaatgtttgttagtgtcaatgagcttgacatatgtgactatacacggctatgtattggtttaccaggccatttcattaaacatagccgtgaattcgtattccaatgccttgctaactttattactatccatgcaatttgcagaaatcaaatcatcggttttaaagaaatttgataaggagggatttttccaaataaccattgcagacgtagtggaaagatttaagttgaccttattattgtcaataactggccttaggaacctccagtcgtggtcatcttcattatcgaacacaagcatcaatttctggagtccacgttccacattatcaatcgtcattaacatactttgtgggccgatggtaagcgtggtagggagtgaagtgttagtggattgggcaaagcatgcttacatcacaaaattcaatcggatccgcccacagatatatgataagttctattatataatatacaaggattattctacgagaacgcacaaattagaagatagattgggattgcctttacctgcattcgttgtcctttttattgtaatggtgaggccaacactttttaaatcatcggaaccttcttaccttccttcgctatttaggatcctcttcatgggggcatccgtgtttttactagcattgttggcaaaatttacactagatcttattttaatcaaatggagcaaacggatagagcaacggttcagagaccaagctttcaataccgttgtaactgaagaagaatacgtcccaggtttactctcgggcggtatgggtaaagtcgacgtgtctacaagaattgcattacattctgattacaataaagagaatcgtatagagaccgaaagtgtatcgccaatgcggaaaagaaaaactactttaactgctgaatgtactcctcctagcctaaatgatattagaagacagaaagattccaagaatccacgatcgcttgaaaatgtcgctcgctataaaatggtttctaaaagaatatggtaa

SEQ ID NO: 3294 - DNA, 1671 bp, Artificial Sequence
  Description of Artificial Sequence: Synthetic polynucleotide
atgcaacacaaggatacggcagtagcgaaggacacagctaaaaaacgtttattaagaagaaatagtgcgccgagtgctatacatataatttctagattagacaaaaagtggtccttcttatggaatactatagatagacacaatattgttgaagagcaagatgaaagtagcgctgcaaaaagcgaagaagaacatgaggatgattatgaattggaacaattactcaacatgataagaataccaatgttcttggaaaagttcatgctctttgcacttttaacaagcttggactgttttttgtattactttactgtattaccgataaggttgataaagggatatgtaaagcaattcaagagttatcgtcagcattatcgcttacaacaaagatctgggcataagaataaaataccctttagatatagaataacttccagagaatataaagagagatgtatgatttttatcatcgtgatttcttccattttgttgagcaaattagacacctccaaactttatcacaggataaaaagacaaagtacgatgaaattgtacatgcttttcagtgtattggaaatggcggacaaaatgttggcaagtttgggccagagcttattaacggttatgctttctaggaaaaactctgaaagaatattattacataaatgtttgttagtgtccatgagcttgacatatgtgactatacacggctatgtattggtttaccaggccatttctttaaacatagccgtgaattcttattccaatgccttgttgactttattattatccatgcaatttgcagaaatcaaaagctctgttttaaagaaatttgataaggagggatttttccaaataaccattgcagacgtagtggaaagatttaagttgaccttattattgagcataactggccttaggaacctccagagttggtcttcttctttatctaacacaagcatcaatttctggagtccacgttccacattatctatcgtcattaacatactttgtgggccgatggtaagcgtggtagggagtgaagtgttagtggattgggcaaagcatgcttacatcacaaaattcaatagaatccgcccacagatatatgataagttctattatataatatacaaggattattctacgagaacgcacaaattagaagatagattgggattgcctttacctgcattcgttgtcctttttattgtaatggtgaggccaacactttttaaaagctctgaaccttcttaccttccttctttatttaggatcctcttcatgggggcatccgtgtttttattggcattgttggcaaaatttacattagatcttattttaatcaaatggagcaaaagaatagagcaaagattcagagaccaagctttcaataccgttgtaactgaagaagaatacgtcccaggtttactcagcggcggtatgggtaaagtcgacgtgtctacaagaattgcattacattctgattacaataaagagaatcgtatagagaccgaaagtgtatctccaatgagaaaaagaaaaactactttaactgctgaatgtactcctcctagcttgaatgatattagaagacagaaagattccaagaatccaagatctcttgaaaatgtcgctcgctataaaatggtttctaaaagaatatggtga

SEQ ID NO: 3295 - DNA, 1461 bp, Saccharomyces cerevisiae
atgcttttcagaaacatagaagtgggcaggcaggcagctaagctattaacgagaacctcgagtcgtttggcctggcaaagtattggggcctcaaggaatatttctaccatcagacaacaaatcagaaagactcaactatataattttaagaaaactgtgagcatccgtccattttctctctcctcccctgtttttaaaccacatgttgcttcagaatcaaaccctatagaatcacgtttgaagacctcgaagaatgttgcttactggttaataggtacatccggtttggtatttggtattgttgttcttggtgggttgactagactaacagaatcggggctgagtattaccgaatggaaacctgtcacaggtactttgccccctatgaaccagaaggaatgggaagaagaatttatcaagtataaggaatcaccagaatttaaattgttgaattctcacattgatttagacgagttcaagtttatattttttatggagtggattcatagattgtggggtcgtgctatcggcgctgtttttatattacctgcagtttatttcgctgtatctaaaaaaacttcaggccatgtcaataagaggttgtttggtctcgcaggtttattaggattacaaggatttgttggttggtggatggtgaagtctggtcttgatcaagagcaactagacgcaagaaaatcaaagcctaccgtttctcaatatagacttactacgcatttgggtaccgccttctttttatacatgggtatgctctggactggtttggaaatattgagagaatgtaaatggattaagaaccctgttcaagccattagtctcttcaaaaaattagataatcccgcaattggcccaatgagaaagatttctttagctttgttagcggtgtctttccttaccgctatgagtggcggtatggttgccggtttggatgctggttgggtctataacacctggccaaaaatgggtgaacgatggttccctagttctcgtgaattaatggacgaaaacttctgtagaagagaggacaagaaagatctgtggtggaggaatttgctagaaaacccggttacagttcagttggtccataggacatgtgcgtacgttgcgtttacatcagtactagctgctcatatgtacgctatcaaaaagaaggccgtaattccaaggaacgcgatgacctctttgcatgttatgatgggcgtcgttactttacaagcaacacttggtattttaactatattgtacctagtcccaatatcgttagcttctatccatcaagctggtgctttggcgttgctaacaagttctttggtgtttgcctctcaattaaggaagccaagagctccgatgagaaacgtaatcattaccttgccacattcaagcaaagtaactagcggtaaaattttaagtgaagcgtcgaagttagcctcgaaaccattataa

SEQ ID NO: 3296 - DNA, 1461 bp, Artificial Sequence
  Description of Artificial Sequence: Synthetic polynucleotide
atgcttttcagaaacatagaagtgggcaggcaggcagctaagcttttaacgagaacctctagtcgtttggcctggcaaagtattggggcctctaggaatatttctaccatcagacaacaaatcagaaagactcaattatataattttaagaaaactgtgagcatccgtccattttctctctcctcccctgtttttaaaccacatgttgcttctgaatctaaccctatagaatcccgtttgaagacctccaagaatgttgcttactggttaataggtacatccggtttggtatttggtattgttgttcttggtgggttgactagattgacagaatctgggttgagtattaccgaatggaaacctgtcacaggtactttgccccctatgaaccagaaggaatgggaagaagaatttatcaagtataaggaatctccagaatttaaattgttgaattctcacattgatttagacgagttcaagtttatattttttatggagtggattcatagattgtggggtcgtgctatcggcgctgtttttatattacctgcagtttatttcgctgtatctaaaaaaacttctggccatgtcaataagaggttgtttggtctcgcaggtttattaggattacaaggatttgttggttggtggatggtgaagtctggtcttgatcaagagcaattggacgcaagaaaatccaagcctaccgtttctcaatatagacttactacgcatttgggtaccgccttctttttatacatgggtatgctctggactggtttggaaatattgagagaatgtaaatggattaagaaccctgttcaagccattagtctcttcaaaaaattagataatcccgcaattggcccaatgagaaagatttctttagctttgttagcggtgtctttccttaccgctatgagtggcggtatggttgccggtttggatgctggttgggtctataacacctggccaaaaatgggtgaaagatggttccctagttctcgtgaattaatggacgaaaacttctgtagaagagaggacaagaaagatttatggtggaggaatttgttggaaaacccggttacagttcagttggtccataggacatgtgcgtacgttgcgtttacatctgtattggctgctcatatgtacgctatcaaaaagaaggccgtaattccaaggaacgcgatgacctctttgcatgttatgatgggcgtcgttactttacaagcaacacttggtattttaactatattgtacttagtcccaatatctttagcttctatccatcaagctggtgctttggcgttgttgacaagttctttggtgtttgcctctcaattaaggaagccaagagctccgatgagaaacgtaatcattaccttgccacattctagcaaagtaactagcggtaaaattttaagtgaagcgtctaagttagcctccaaaccattatga

SEQ ID NO: 3297 - DNA, 891 bp, Saccharomyces cerevisiae
atgaaactaaaaagggagtatgatgagttaataaaagcagacgctgttaaggaaatagcaaaagaattagggtctcgacctctagaggttgctcttcctgagaaatatattgctagacatgaagaaaagttcaatatggcttgcgaacacattttagagaaagatccatcactttttcccatacttaagaataatgaatttacgttgtacttgaaggagactcaagtccctaatacactcgaagattattttattaggcttgcaagcacaattttgtctcaacagatcagtggccaagcagctgaaagcatcaaggcaagggttgtcagtctttatggcggtgcatttcctgattacaaaatccttttcgaagacttcaaagacccagcaaaatgtgcagaaatcgcaaaatgtggattgagtaaaaggaaaatgatatatctagagtctcttgctgtctattttactgaaaaatataaggatatcgaaaagctcttcggtcaaaaagataatgatgaggaagtgattgaaagtttagttacgaatgtaaaaggtataggcccatggagtgccaaaatgttcttgatctccggattgaaaagaatggatgtatttgctcctgaagatctaggtattgctaggggtttttcaaaatacctttcagataagccagaattggaaaaagaattaatgcgtgaaagaaaagtagttaaaaagagtaagattaagcataagaaatacaactggaaaatatatgacgacgacataatggaaaaatgctctgaaacattttctccgtataggtctgtgtttatgttcatactttggaggctcgcgagcacaaatacagatgccatgatgaaggcagaagaaaatttcgtgaaatcctaa

SEQ ID NO: 3298 - DNA, 891 bp, Artificial Sequence
  Description of Artificial Sequence: Synthetic polynucleotide
atgaaattgaaaagggagtatgatgagttaataaaagcagacgctgttaaggaaatagcaaaagaattagggtctagacctttagaggttgctcttcctgagaaatatattgctagacatgaagaaaagttcaatatggcttgcgaacacattttagagaaagatccaagtctttttcccatacttaagaataatgaatttacgttgtacttgaaggagactcaagtccctaatacactcgaagattattttattaggcttgcaagcacaattttgtctcaacagatcagtggccaagcagctgaaagcatcaaggcaagggttgtcagtctttatggcggtgcatttcctgattacaaaatccttttcgaagacttcaaagacccagcaaaatgtgcagaaatcgcaaaatgtggattgagtaaaaggaaaatgatatatttggagtctcttgctgtctattttactgaaaaatataaggatatcgaaaagctcttcggtcaaaaagataatgatgaggaagtgattgaaagtttagttacgaatgtaaaaggtataggcccatggagtgccaaaatgttcttgatctccggattgaaaagaatggatgtatttgctcctgaagatttaggtattgctaggggtttttccaaatacctttctgataagccagaattggaaaaagaattaatgcgtgaaagaaaagtagttaaaaagagtaagattaagcataagaaatacaactggaaaatatatgacgacgacataatggaaaaatgctctgaaacattttctccgtataggtctgtgtttatgttcatactttggaggctcgcgagcacaaatacagatgccatgatgaaggcagaagaaaatttcgtgaaatcctga

SEQ ID NO: 3299 - DNA, 1287 bp, Saccharomyces cerevisiae
atggatttaacaatttcaaacgaacttactggcgagatatacggcccaattgaagtcagtgaagatatggctttaactgatctaatagcattactgcaggccgattgcgggtttgacaaaacaaaacacgacttatattacaatatggacattctagactcaaacagaactcagtctttaaaagaactagggctcaaaaccgatgacttattattgattaggggtaagatttccaattccattcaaacagatgctgctactttgtccgacgaagcgttcatagagcaatttagacaagagctacttaataatcaaatgcttagatcacaactcattttgcaaatccctggattgaatgatttagtaaatgacccactgttgtttagggaaagattgggcccgctcatattacaaagacgttatggtggctataacaccgccatgaatccttttggcatcccccaagatgaatatactagactaatggccaaccccgatgatcctgacaacaagaagaggattgcagagcttttagaccaacaagctatcgatgaacagttgcgcaatgctatcgaatatacacctgaaatgtttacccaggtccctatgctttacattaatatcgaaataaataactaccccgtaaaggcatttgtagatacaggggctcaaacaacgattatgtccaccaggttagcgaagaaaactggcctgtcgagaatgattgacaagagatttattggagaagctcgtggcgtaggaaccggcaaaattattgggagaattcaccaagcccaagtcaaaatagaaacacaatatattccatgcagttttaccgtcttagatactgacatcgatgttttgataggactagacatgctgaaaaggcatttggcttgtgtggacttaaaggaaaacgttcttaggatagcagaagtggagacaagctttttgagtgaagcggaaatcccaaaaagttttcaagaaggacttccagcaccaacgtcagttacaacttcgtctgataagcccctaacacccaccaagactagttcaactctaccaccacaaccgggggctgttcctgcgcttgctccaaggactggtatggggccaacacctacgggaagaagtacagccggtgctacaacggcaaccgggagaacgtttcccgaacaaacgattaaacagcttatggatctaggtttccctagggatgctgtggtaaaggctcttaaacagactaacggaaatgcagaatttgctgcatccctccttttccaatga

SEQ ID NO: 3300 - DNA, 1287 bp, Artificial Sequence
  Description of Artificial Sequence: Synthetic polynucleotide
atggatttaacaatttccaacgaacttactggcgagatatacggcccaattgaagtcagtgaagatatggctttaactgatttgatagcattattgcaggccgattgcgggtttgacaaaacaaaacacgacttatattacaatatggacattttggactccaacagaactcagtctttaaaagaattggggctcaaaaccgatgacttattattgattaggggtaagatttccaattccattcaaacagatgctgctactttgtccgacgaagcgttcatagagcaatttagacaagagttgcttaataatcaaatgcttagatctcaactcattttgcaaatccctggattgaatgatttagtaaatgacccattgttgtttagggaaagattgggcccgctcatattacaaagacgttatggtggctataacaccgccatgaatccttttggcatcccccaagatgaatatactagattaatggccaaccccgatgatcctgacaacaagaagaggattgcagagcttttagaccaacaagctatcgatgaacagttgcgcaatgctatcgaatatacacctgaaatgtttacccaggtccctatgctttacattaatatcgaaataaataactaccccgtaaaggcatttgtagatacaggggctcaaacaacgattatgtccaccaggttagcgaagaaaactggcctttctagaatgattgacaagagatttattggagaagctcgtggcgtaggaaccggcaaaattattgggagaattcaccaagcccaagtcaaaatagaaacacaatatattccatgcagttttaccgtcttagatactgacatcgatgttttgataggattggacatgttgaaaaggcatttggcttgtgtggacttaaaggaaaacgttcttaggatagcagaagtggagacaagctttttgagtgaagcggaaatcccaaaaagttttcaagaaggacttccagcaccaacgtctgttacaacttcttctgataagcccttgacacccaccaagactagttctactttaccaccacaaccgggggctgttcctgcgcttgctccaaggactggtatggggccaacacctacgggaagaagtacagccggtgctacaacggcaaccgggagaacgtttcccgaacaaacgattaaacagcttatggatttaggtttccctagggatgctgtggtaaaggctcttaaacagactaacggaaatgcagaatttgctgcatccctccttttccaatga

SEQ ID NO: 3301 - DNA, 2418 bp, Saccharomyces cerevisiae
atgggctcagaacaagccttaagtgaggttgtcgaatctgctaaagagcggttcggcaggcttaggcatttagttcagaagtttcttgatgatgacgacgtgccacaagagtgtctgcctttgctccaagaatgcgcagaaatatggtctagttatgtggacgcatgccaggatataaccatgcaggcccctaaagaagatgcaaaccggttgtcaaaggggtttctccgattgaatgaaacagcttttttatattacatgatcgtatatacgctcttggaggatactctaccaagactaaaggaattttcgagcaacaaggaccagaatgttagaaatttgtacggggagagaatccagcttttgcataatgacccaaatattgagcggattcgaaatgtcattgaaaattaccctaaatttatacagttgcaaactatagagcctggaaaattaagttcaatgttgcattttcatggtgacgctctcttgcttatcgatgtacggcccaggtctgaattcgttagggcccatatcaaatgcaaaaacattatatgcatcgatcctgcctcatttaaggattcttttacagaccaacaaattgaaagtgtctctttgatcacttcgccgcactcagatatcactttcttttcaaatcgagacaagttcaagttcattattttatatactgacactcaattgcataataatttccagcaaaggcaaactcgcatccttgcgaagattctttcccaaaattcagtaattaaaccgctgagtgggacgaaaatactcattttggaaaatgggttctcaaactgggttaaattaggtggggcgtatcaatcatctgtcagtgaaacagcgcatcttacatcctcgtcttcaacgccagcttttggtagtccgcaagtcccaacaggcttgttcaatcagaaatctctatctccaaataaagataagagtatgccgatggtatccatgaatacgcagcctttgctaacaacggtgcaaaggcctcaattacccttatactattcagatttgcccattataccgcaaccaagccccaacagaaattctcccaccgttcaaaaatttagtccacatccaccaaccactctctcaaaactcaatacaccctcgaccattcaaaataaagcaaacactgtggaaagaatatcgccagatatccgcgctgcacaagcccatgcctatttgccccctgcatcgaatgtattctcgccacgtattccgcctttaccacaacagaacttgtcttcgtcgaggcagaccatcctaaacaactcacaagtgcttgatctagatcttatagtaggattggaaaatataggtaactgttgttatatgaactgtatacttcaatgtttggtgggaacacacgatttggttcgaatgtttttggataacacatatctgaattttattaattttgatagttcaagaggttctaaggggttgctagctaaaaatttcgccatcttggtcaataatatgcacagacacggtgcattcacacctcctaacgtaagaacgataccagttcagactattcagtttaaaaaaatttgcggccatatcaaccccatgtatagtgattcaatgcagcaagattgtcaagaattttgtcaatttttgcttgatggcttgcacgaggatttgaaccaaaacggcagcaaaaagcatcttaaacagttatcagatgaggaagaacgaatgagagaaaaaatgtccatacgcaaagctagtgctctcgagtgggaaagatttttgcttaccgacttcagtgcgataattgaccttttccaaggacagtacgcatctaggctacaatgtcaagtttgtgaacatacctccacaacttaccaaacattctctgttctttctgttcctgtcccacgcgttaaaacttgtaacatattagactgtttccgggaattcaccaaatgcgaaaggttaggtgtcgatgaacaatggtcatgtcctaaatgcttaaaaaagcagccttccactaaacaactgaagattactagattgcctaagaaactaattattaatttgaaacgatttgacaatcaaatgaataagaataatgtgtttgtccaatatccttactccttagatcttacaccatattgggcgagagattttaatcatgaagctattgttaatgaggacattcctaccaggggccaagtaccaccatttagatacagactgtatggggttgcatgtcattcggggagtttgtatgggggacactatacttcatacgtttataagggaccaaaaaaaggttggtattttttcgatgactcgctttatcgtcctataacgtttagtactgaatttatcacacccagtgcatatgttttattttacgaaagaattttttga

SEQ ID NO: 3302 - DNA, 2418 bp, Artificial Sequence
  Description of Artificial Sequence: Synthetic polynucleotide
atgggctctgaacaagccttaagtgaggttgtcgaatctgctaaagagagattcggcaggcttaggcatttagttcagaagtttcttgatgatgacgacgtgccacaagagtgtttacctttgctccaagaatgcgcagaaatatggtctagttatgtggacgcatgccaggatataaccatgcaggcccctaaagaagatgcaaacagattgtccaaggggtttctccgtttgaatgaaacagcttttttatattacatgatcgtatatacgctcttggaggatactttaccaagattaaaggaattttctagcaacaaggaccagaatgttagaaatttgtacggggagagaatccagcttttgcataatgacccaaatattgagagaattagaaatgtcattgaaaattaccctaaatttatacagttgcaaactatagagcctggaaaattaagttctatgttgcattttcatggtgacgctctcttgcttatcgatgtaagacccaggtctgaattcgttagggcccatatcaaatgcaaaaacattatatgcatcgatcctgcctcttttaaggattcttttacagaccaacaaattgaaagtgtctctttgatcacttctccgcacagtgatatcactttcttttctaatagagacaagttcaagttcattattttatatactgacactcaattgcataataatttccagcaaaggcaaactcgcatccttgcgaagattctttcccaaaattctgtaattaaaccgttaagtgggacgaaaatactcattttggaaaatgggttcagtaactgggttaaattaggtggggcgtatcaatcttctgtcagtgaaacagcgcatcttacatcctcttcttctacgccagcttttggtagtccgcaagtcccaacaggcttgttcaatcagaaatctttatctccaaataaagataagagtatgccgatggtatccatgaatacgcagcctttgttgacaacggtgcaaaggcctcaattacccttatactattctgatttgcccattataccgcaaccaagccccaacagaaattctcccaccgttcaaaaatttagtccacatccaccaaccactctctctaaactcaatacaccctctaccattcaaaataaagcaaacactgtggaaagaatatctccagatatccgcgctgcacaagcccatgcctatttgccccctgcatctaatgtattctctccacgtattccgcctttaccacaacagaacttgtcttcttccaggcagaccatcttgaacaactctcaagtgcttgatttggatcttatagtaggattggaaaatataggtaactgttgttatatgaactgtatacttcaatgtttggtgggaacacacgatttggttagaatgtttttggataacacatatttgaattttattaattttgatagtagtagaggttctaaggggttgttggctaaaaatttcgccatcttggtcaataatatgcacagacacggtgcattcacacctcctaacgtaagaacgataccagttcagactattcagtttaaaaaaatttgcggccatatcaaccccatgtatagtgattctatgcagcaagattgtcaagaattttgtcaatttttgcttgatggcttgcacgaggatttgaaccaaaacggcagcaaaaagcatcttaaacagttaagtgatgaggaagaaagaatgagagaaaaaatgtccatacgcaaagctagtgctctcgagtgggaaagatttttgcttaccgacttcagtgcgataattgaccttttccaaggacagtacgcatctaggttacaatgtcaagtttgtgaacatacctccacaacttaccaaacattctctgttctttctgttcctgtcccacgcgttaaaacttgtaacatattagactgtttcagagaattcaccaaatgcgaaaggttaggtgtcgatgaacaatggtcttgtcctaaatgcttaaaaaagcagccttccactaaacaattgaagattactagattgcctaagaaattgattattaatttgaaaagatttgacaatcaaatgaataagaataatgtgtttgtccaatatccttactccttagatcttacaccatattgggcgagagattttaatcatgaagctattgttaatgaggacattcctaccaggggccaagtaccaccatttagatacagattatatggggttgcatgtcattctgggagtttgtatgggggacactatacttcttacgtttataagggaccaaaaaaaggttggtattttttcgatgactctctttatcgtcctataacgtttagtactgaatttatcacacccagtgcatatgttttattttacgaaagaattttttga

SEQ ID NO: 3303 - DNA, 1215 bp, Saccharomyces cerevisiae
atgcctaacaaagtgtttaacgtggccgttttcttcgttgtgttcagagagtgcttggaagcagtgattgttatttccgtgctgctatcgtttttgaaacaggcaatcggggaacatgaccgggcgctgtaccgtaaattaaggattcaggtttgggtcggtgtgttactcgggttcatcatttgtctggccatcggtgcaggtttcatcggtgcgtactattcgctgcagaaggatattttcggaagcgcggaagacttgtgggaaggtatcttttgtatgattgcgacgataatgatctcgatgatgggtattcctatgttgagaatgaataagatgcagagtaagtggagagtgaagattgcgcggtcgttggtggagattcctcaccgtaagagagactatttcaagattgggttcttgagtagaagatatgctatgttccttttgccgtttattactgtcttgagagaaggtttggaagctgttgtgttcgttgccggtgcaggtattaccacacagggctcgcacgcctctgcttacccattgcccgttgtggttggtttgatatgtggtggtcttgttgggtatttgttgtactatggtgcttcgaaatcctcgctgcagattttcttgattttgtctacttcgatcttgtacctgatctccgccggtcttttctctcgtggtgcgtggtactttgaaaattacagattcaaccttgccagtggtggtgatgcttccgaaggcggtgatggtaatgggtcttataacatcagaaaggccgtttaccatgtcaattgttgcaacccagaactggacaatgggtgggatatcttcaatgctttgcttggatggcagaacaccggctacttgtcatccatgctttgttacaacatctattggttggttcttatcattgtgttgagtttaatgatattcgaagaaaggcgtggtcacttgcctttcaccaaaaacttacaattgaaacacttgaacccaggatactggatcaagaacaagaaaaagcaggagttgacggaagagcaaaagagacaactgtttgccaagatggagaacatcaacttcaatgaagatggtgagatcaatgtgcaagagaactacgaacttcccgagcaaactaccagtcattcctcgtctcaaaacgtcgccacagacaaggaagtcctccacgttaaagccgactctctttga

SEQ ID NO: 3304 - DNA, 1215 bp, Artificial Sequence
  Description of Artificial Sequence: Synthetic polynucleotide
atgcctaacaaagtgtttaacgtggccgttttcttcgttgtgttcagagagtgcttggaagcagtgattgttatttccgtgcttttatcttttttgaaacaggcaatcggggaacatgacagggcgttgtaccgtaaattaaggattcaggtttgggtcggtgtgttactcgggttcatcatttgtttggccatcggtgcaggtttcatcggtgcgtactattctttgcagaaggatattttcggaagcgcggaagacttgtgggaaggtatcttttgtatgattgcgacgataatgatctctatgatgggtattcctatgttgagaatgaataagatgcagagtaagtggagagtgaagattgcgagaagtttggtggagattcctcaccgtaagagagactatttcaagattgggttcttgagtagaagatatgctatgttccttttgccgtttattactgtcttgagagaaggtttggaagctgttgtgttcgttgccggtgcaggtattaccacacagggctctcacgcctctgcttacccattgcccgttgtggttggtttgatatgtggtggtcttgttgggtatttgttgtactatggtgcttccaaatcctctttgcagattttcttgattttgtctacttctatcttgtacttgatctccgccggtcttttctctcgtggtgcgtggtactttgaaaattacagattcaaccttgccagtggtggtgatgcttccgaaggcggtgatggtaatgggtcttataacatcagaaaggccgtttaccatgtcaattgttgcaacccagaattagacaatgggtgggatatcttcaatgctttgcttggatggcagaacaccggctacttgtcttccatgctttgttacaacatctattggttggttcttatcattgtgttgagtttaatgatattcgaagaaaggcgtggtcacttgcctttcaccaaaaacttacaattgaaacacttgaacccaggatactggatcaagaacaagaaaaagcaggagttgacggaagagcaaaagagacaattatttgccaagatggagaacatcaacttcaatgaagatggtgagatcaatgtgcaagagaactacgaacttcccgagcaaactaccagtcattcctcttctcaaaacgtcgccacagacaaggaagtcctccacgttaaagccgactctctttga

SEQ ID NO: 3305 - DNA, 438 bp, Saccharomyces cerevisiae
atggcaatattgttgccgcttaaaagcattctgccatggtgctgcataactttctcatttctgctctcgtcctcaggatcgataagccactcgacagcgtcttccagtataacgttgacgaagtcgtcgaaaccaactaacgtgccctcgaactcgcggttcgactgcagcacaatcaacactttctggttaattgttttatctatgacttccaaaggcaaaatctccggtagactcattttgcgcgcttctgtgtatgcttgtgagtgcacgtgtatacgctatgcttgttgtgagaccatctatccgccaaggaagcctttttcgctttctctgtattttttctacttcaataagaaagcaagtattctgttttgctacccggatgcaaagacaaaacccgagcatccgggtaataaaagagcagggtccggctga

SEQ ID NO: 3306 - DNA, 438 bp, Artificial Sequence
  Description of Artificial Sequence: Synthetic polynucleotide
atggcaatattgttgccgcttaaaagcattttaccatggtgctgcataactttctcctttttactctcttccagtggatccataagccactctacagcgtcttccagtataacgttgacgaagtcttctaaaccaactaacgtgccctctaactctagattcgactgcagcacaatcaacactttctggttaattgttttatctatgacttccaaaggcaaaatctccggtagactcattttgcgcgcttctgtgtatgcttgtgagtgcacgtgtatacgctatgcttgttgtgagaccatctatccgccaaggaagcctttttccctttctttgtattttttctacttcaataagaaagcaagtattttattttgctacccggatgcaaagacaaaacccgagcatccgggtaataaaagagcagggtccggctga

SEQ ID NO: 3307 - DNA, 282 bp, Saccharomyces cerevisiae
atgagtctaccggagattttgcctttggaagtcatagataaaacaattaaccagaaagtgttgattgtgctgcagtcgaaccgcgagttcgagggcacgttagttggtttcgacgacttcgtcaacgttatactggaagacgctgtcgagtggcttatcgatcctgaggacgagagcagaaatgagaaagttatgcagcaccatggcagaatgcttttaagcggcaacaatattgccatccttgtgccaggcggcaaaaagacccctacggaggcgttgtaa

SEQ ID NO: 3308 - DNA, 282 bp, Artificial Sequence
  Description of Artificial Sequence: Synthetic polynucleotide
atgagtttaccggagattttgcctttggaagtcatagataaaacaattaaccagaaagtgttgattgtgttacagtccaaccgcgagttcgagggcacgttagttggtttcgacgacttcgtcaacgttatattggaagacgctgtcgagtggcttatcgatcctgaggacgagagcagaaatgagaaagttatgcagcaccatggcagaatgcttttaagcggcaacaatattgccatccttgtgccaggcggcaaaaagacccctacggaggcgttgtga

SEQ ID NO: 3309 - DNA, 1875 bp, Saccharomyces cerevisiae
atggaaaatcttggcgacaaacttagtatttcacaagtataccacttagcacaggaatacagagaccatgcatattcaattgcgaataaaatcggttctgaggaagggttgaagcagtattatggcctcatgaacatgtctatccagatgtttcagctattgaaaacgaaatgtacgctttcagttctggaggatagtaaggtcacgtttgagatggtggagttattgatacaggagacgtataattttgacctagcagagctttacatttccagtttgaaagaacggttacaaacgcaccagagcgacacagatttggtagaagagatcatgcgttgcgagtttctgctgttacatgacttgccacttatgagagacagtaagttccactataagattgcactaagaaattgcaatgaattagtccagtacatggtaaatttgcaggatgagttgtatcaaaattgggcatccgtattccagtatgtcggcgtgatgctttgcattaagctgaaacagcaccgcagggtgaagacgagttttcatgggctactctcgcaatgtcgggaaaagtcacaatggaaatggtttctaaatctgtgttatgtgaattacttgctaaatgagaggttcccaatccccgaggatgctctgcaggagctgcgaagcacggagctgcacacggtggggcctgagctatatgcatggaagttggcattagagatggtaatccagctttgtaaagacgggaatattacggaccacttgaacgaattcaaaaatttctttgacacaaacaagcaatctctagtcactaatgaaggtaagggatgtgtgatcaaaatcatgccaaggatagcgctgaaagtagagttgcctatgattttccactacaaagaattaaagaacatactgttattattgcaaagtgtcagctacatcgtgaactgttatgacgaaaagggcaatttttccaggaagttcctccccaaagtctattctacaacgcagaaactgattaagaacattgccgctggcggtgtttcgatgaatgagctggactcacgaatccagacatacaagagcattcttgaattctgtgagttttacaaagtgtgggaacaaacactcttgaagggggccgtagtgacgaccgagtcacctaagttagggccctctccaggctacgtgaggctgctgcaagccatgaaggttcagtttgaaggcggcggggccgtagaagagtacacgcggcttgcacaatctggcggtacatccagcgaggtgaagatgatatcgcttctgaattgctacacagtgcaggcggcaagagtgagccgatgttcgggggacaaacagggcgaactcgtagagcaatgcaacaaggtgtggcttcaggtggagaaattgctacaagaaacggatctgcagttcaaccccatatgggagtgcacagtaacgatcctatggcttttcagccatttcgagccgttcagttggaacccgctgccatgtagtgacaagcagcgcgccgagtacgtgtcgaagctccgcgagttctactctagcaacaagttcgttgccggagaagccgttgcggacaaccgcttcaaattgaagaaggctctgttgctgcaaatactggtaaactacttaggcggtcgaatgctcgaacacgatctgggcgagatctatgcgatttcagcaaagtgtttcgatatgtgccgccagcagggcggcatgcgcaaggtccaatacgtgatcggaatatggcatttaatgaattgtacggtggcgatgcggggaaaagacgtcgctctcacgaacgcgaagctggaggcgctggttaagcaaatcaccagtgtcaaacaataa

SEQ ID NO: 3310 - DNA, 1875 bp, Artificial Sequence
  Description of Artificial Sequence: Synthetic polynucleotide
atggaaaatcttggcgacaaacttagtatttctcaagtataccacttagcacaggaatacagagaccatgcatattctattgcgaataaaatcggttctgaggaagggttgaagcagtattatggcctcatgaacatgtctatccagatgtttcagttattgaaaacgaaatgtacgctttctgttttggaggatagtaaggtcacgtttgagatggtggagttattgatacaggagacgtataattttgacttggcagagctttacatttccagtttgaaagaaagattacaaacgcaccagagcgacacagatttggtagaagagatcatgcgttgcgagtttttattattacatgacttgccacttatgagagacagtaagttccactataagattgcattgagaaattgcaatgaattagtccagtacatggtaaatttgcaggatgagttgtatcaaaattgggcatccgtattccagtatgtcggcgtgatgctttgcattaagttgaaacagcaccgcagggtgaagacgagttttcatgggttactctctcaatgtagagaaaagtctcaatggaaatggtttttgaatttatgttatgtgaattacttgttgaatgagaggttcccaatccccgaggatgctttacaggagttaagaagcacggagttgcacacggtggggcctgagttgtatgcatggaagttggcattagagatggtaatccagctttgtaaagacgggaatattacggaccacttgaacgaattcaaaaatttctttgacacaaacaagcaatctttggtcactaatgaaggtaagggatgtgtgatcaaaatcatgccaaggatagcgttgaaagtagagttgcctatgattttccactacaaagaattaaagaacatattattattattgcaaagtgtcagctacatcgtgaactgttatgacgaaaagggcaatttttccaggaagttcctccccaaagtctattctacaacgcagaaattgattaagaacattgccgctggcggtgtttctatgaatgagttggactctagaatccagacatacaagagcattcttgaattctgtgagttttacaaagtgtgggaacaaacactcttgaagggggccgtagtgacgaccgagtctcctaagttagggccctctccaggctacgtgaggttattacaagccatgaaggttcagtttgaaggcggcggggccgtagaagagtacacgagacttgcacaatctggcggtacatccagcgaggtgaagatgatatctcttttgaattgctacacagtgcaggcggcaagagtgagcagatgttctggggacaaacagggcgaactcgtagagcaatgcaacaaggtgtggcttcaggtggagaaattgttgcaagaaacggatttacagttcaaccccatatgggagtgcacagtaacgatcttatggcttttcagccatttcgagccgttcagttggaacccgttaccatgtagtgacaagcagcgcgccgagtacgtgagcaagctccgcgagttctactctagcaacaagttcgttgccggagaagccgttgcggacaaccgcttcaaattgaagaaggctttattgttgcaaatattagtaaactacttaggcggtagaatgctcgaacacgatttgggcgagatctatgcgatttctgcaaagtgtttcgatatgtgccgccagcagggcggcatgcgcaaggtccaatacgtgatcggaatatggcatttaatgaattgtacggtggcgatgagaggaaaagacgtcgctctcacgaacgcgaagttggaggcgttggttaagcaaatcaccagtgtcaaacaatga

SEQ ID NO: 3311 - DNA, 723 bp, Saccharomyces cerevisiae
atggccgatgaggaacgtttaaaggagtttaaagaggcaaacaagatagtgtttgatccaaataccagacaagtatgggaaaaccagaatcgagatggtacaaaaccagcaactactttccagagtgaagaggacataaaaagagctgccccagaatctgaaaaagacacctccgccacatcaggtattgttccaacactacaaaacattgtggcaactgtgactttggggtgcaggttagatctgaaaacagttgcgctacatgcccgtaatgcagaatataaccccaagcgttttgctgctgtcatcatgcgtattagagagccaaaaactacagctttaatttttgcctcagggaaaatggttgttaccggtgcaaaaagtgaggatgactcaaagctggccagtagaaaatatgcaagaattatccaaaaaatcgggtttgctgctaaattcacagacttcaaaatacaaaatattgtcggttcgtgtgacgttaaattccctatacgtctagaagggttagcattcagtcatggtactttctcctcctatgagccagaattgtttcctggtttgatctatagaatggtgaagccgaaaattgtgttgttaatttttgtttcaggaaagattgttcttactggtgcaaagcaaagggaagaaatttaccaagcttttgaagctatataccctgtgctaagtgaatttagaaaaatgtga

SEQ ID NO: 3312 - DNA, 723 bp, Artificial Sequence
  Description of Artificial Sequence: Synthetic polynucleotide
atggccgatgaggaacgtttaaaggagtttaaagaggcaaacaagatagtgtttgatccaaataccagacaagtatgggaaaaccagaatagagatggtacaaaaccagcaactactttccagagtgaagaggacataaaaagagctgccccagaatctgaaaaagacacctccgccacatctggtattgttccaacattacaaaacattgtggcaactgtgactttggggtgcaggttagatttgaaaacagttgcgttgcatgcccgtaatgcagaatataaccccaagcgttttgctgctgtcatcatgcgtattagagagccaaaaactacagctttaatttttgcctctgggaaaatggttgttaccggtgcaaaaagtgaggatgactccaagttggccagtagaaaatatgcaagaattatccaaaaaatcgggtttgctgctaaattcacagacttcaaaatacaaaatattgtcggttcttgtgacgttaaattccctatacgtttagaagggttagcattcagtcatggtactttctcctcctatgagccagaattgtttcctggtttgatctatagaatggtgaagccgaaaattgtgttgttaatttttgtttctggaaagattgttcttactggtgcaaagcaaagggaagaaatttaccaagcttttgaagctatataccctgtgttgagtgaatttagaaaaatgtga

SEQ ID NO: 3313 - DNA, 1263 bp, Saccharomyces cerevisiae
atgcataaatttgatctagagctctcgagaagagcgaaccctttgctttttagtgcagaacgatacgaagagtatccattgaaatacgatgaattgaaacagtaccttctctcccaaaatccgtcacatccgcatcacaatagtagaccatacacttccattgactattttgactatcttctgtatagaagtaaaaatgacgagtcagaaatagaccttgacaaaaagctagtgtctgagttcgccctatactacgttcaaaaagagcacttgaactctgatgatctaaatcccacactcaatgagttgctgaagctgcagccgaagtctgcggattggtatgaaatgatgctgaggatccttgaatccattaacactacagggatagaccagcttacgaaggaaaacaacaacagtttcccaaattctaaaagagcgaggtcttccactaatatgggtggcacagataaatttaacaagggtgcttaccatactgacaaagctgatgacgataaaaatgaaatacttcaagaattaacgtccttcttgatgtcaaactccattcagaaaggcattgatatcaagccaataccattagatgaccctgtgaagttcttgaaaaatgggataaattctatcttggatacctgcgtcagtctagaaaaaaatacgtcatcaccacctatttcgcctaacgccgctgcaattcaagaggaagactcctctaaaaaattagaagaactagaaacggcatttagtgatttgcaactggcacacaatttcttgactaagcaattcgagaatgaccgtgccgaatatgtacaagatatcgagaagctaacgcggactaacagagaattacaagataagttattaaacaaccactcgaatttgagtaaaactgaaaagaaattacacgaattggagcaggaaaataaagaacttgaaaaagccaacaacaagctgaattcaagcagacataatttcggcatgtcatcaccagcgagttcgccggtgacttgggatccaagttcaccttcctctgtaggaagccccacaagcggttctggatcacgttcactttcaataatgacaagtgagtttaaaaaagtgcttacgagtacacaaagaaagtatgaaaaagaattgtcggatgagcgtgaacatagattcaagctggaaagggagcttgctttgctgaaaaatgcagaggcaaacacctcgctggcgcttaatagagacgatccaccagatatgctatga

SEQ ID NO: 3314 - DNA, 1263 bp, Artificial Sequence
  Description of Artificial Sequence: Synthetic polynucleotide
atgcataaatttgatttagagctcagcagaagagcgaaccctttgctttttagtgcagaaagatacgaagagtatccattgaaatacgatgaattgaaacagtaccttctctcccaaaatccgtctcatccgcatcacaatagtagaccatacacttccattgactattttgactatcttttatatagaagtaaaaatgacgagagtgaaatagaccttgacaaaaagttagtgtctgagttcgccctttactacgttcaaaaagagcacttgaactctgatgatttgaatcccacactcaatgagttgttgaagttacagccgaagtctgcggattggtatgaaatgatgttaaggatccttgaatccattaacactacagggatagaccagcttacgaaggaaaacaacaacagtttcccaaattctaaaagagcgaggtcttccactaatatgggtggcacagataaatttaacaagggtgcttaccatactgacaaagctgatgacgataaaaatgaaatacttcaagaattaacgtccttcttgatgtccaactccattcagaaaggcattgatatcaagccaataccattagatgaccctgtgaagttcttgaaaaatgggataaattctatcttggatacctgcgtcagtttagaaaaaaatacgtcttctccacctatttctcctaacgccgctgcaattcaagaggaagactcctctaaaaaattagaagaattggaaacggcatttagtgatttgcaattggcacacaatttcttgactaagcaattcgagaatgaccgtgccgaatatgtacaagatatcgagaagttgacgagaactaacagagaattacaagataagttattaaacaaccactctaatttgagtaaaactgaaaagaaattacacgaattggagcaggaaaataaagaacttgaaaaagccaacaacaagttgaatagtagcagacataatttcggcatgtcttctccagcgagttctccggtgacttgggatccaagtagcccttcctctgtaggaagccccacaagcggttctggatcccgttctctttccataatgacaagtgagtttaaaaaagtgcttacgagtacacaaagaaagtatgaaaaagaattgagtgatgagcgtgaacatagattcaagttggaaagggagcttgctttgttgaaaaatgcagaggcaaacacctccttagcgcttaatagagacgatccaccagatatgctttga

SEQ ID NO: 3315 - DNA, 447 bp, Saccharomyces cerevisiae
atgttgtctaacgctaagctccttctatcattggccatggcctctacggctctcggattggtatctaattctagttcctctgtaatcgtggtaccatcaagcgatgctactattgccggtaacgatacagccacgccagcaccagagccatcatccgccgctccaatattctacaactcgactgctactgcaacacagtacgaagttgtcagtgaattcactacttactgcccagaaccaacgactttcgtaacgaatggcgctacattcactgttactgccccaactacgttaacaattaccaactgtccttgcactatcgagaagcctacttcagaaacatcggtttcttctacacatgatgtggagacaaattctaatgctgctaacgcaagagcaatcccaggagccctaggtttggctggtgcagttatgatgcttttatga

SEQ ID NO: 3316 - DNA, 447 bp, Artificial Sequence
  Description of Artificial Sequence: Synthetic polynucleotide
atgttgtctaacgctaagctccttttatctttggccatggcctctacggctctcggattggtatctaattctagttcctctgtaatcgtggtaccatccagcgatgctactattgccggtaacgatacagccacgccagcaccagagccatcttccgccgctccaatattctacaactctactgctactgcaacacagtacgaagttgtcagtgaattcactacttactgcccagaaccaacgactttcgtaacgaatggcgctacattcactgttactgccccaactacgttaacaattaccaactgtccttgcactatcgagaagcctacttctgaaacatctgtttcttctacacatgatgtggagacaaattctaatgctgctaacgcaagagcaatcccaggagcccttggtttggctggtgcagttatgatgcttttatga

SEQ ID NO: 3317 - DNA, 2739 bp, Saccharomyces cerevisiae
atgaacatgcaagacgctaacaaagaagagtcgtactcgatgtacccgaaaacctcttctccaccaccacctacgccaaccaatatgcagattcctatttatcaagcgcctttgcagatgtacggctacactcaggccccatatctataccccacacaaatacctgcctattcgtttaatatggtcaaccaaaaccagccaatctaccatcaaagtggcagcccacatcacttgcctccgcaaaacaatattaacggcggaagcactaccaataacaacaacattaacaagaagaagtggcactctaatggcattaccaataacaatggaagcagcggtaatcaaggcgccaactctagcggtagcggcatgagctacaacaaatcccacacctaccatcacaattactctaacaatcatatccccatgatggcctctccaaacagtggcagcaatgcgggcatgaaaaaacagaccaactcttccaacggcaacggttcttcggctacttcaccatcgtactcttcctacaactcttcttcacagtatgatttatacaagtttgatgtcactaaattaaagaatctcaaggaaaattcatcaaacttgattcaattgccactgttcataaacactacggaagcagaatttgctgcggcaagtgtccaaaggtacgaattaaacatgaaggctttgaacctaaactctgaaagcttagagaactcatctgtagaaaagagctctgcccatcatcacacaaaaagccatagtataccaaagcataatgaggaagtaaagacagaaacacatggggaagaagaagatgctcatgataaaaaaccacatgcgagcaaagatgcgcacgagcttaaaaagaaaactgaagtaaagaaagaggatgctaagcaagaccgtaacgaaaaagttatacaggaacctcaagctactgttttacctgtagtggataagaaggaaccagaggaatctgttgaagaaaatacttccaagacatcttcaccttcaccatctcctccagcagcaaaatcctggtccgccatagcatcagatgcgattaaaagtagacaagctagtaacaaaacagtctccggatcgatggtcactaaaacaccaatttctggtacgaccgcaggcgtttcatcaacaaacatggctgcggcgactataggtaaatccagctctcccctgttgtccaagcagcctcagaaaaaggataaaaaatacgttccaccttctacaaagggtattgagccactgggttcgattgcgttaagaatgtgttttgatcccgatttcattagttacgttttacggaataaagatgttgaaaacaaaataccagtccattccattattccaagaggcataattaacagagccaacatttgttttatgagttctgtgttacaagtgttactctactgtaagccatttattgatgtaattaacgttctcagtacacggaataccaattcaagagtcggcacatcatcctgtaaattattagatgcttgtttgactatgtataagcaattcgataaggaaacctatgagaaaaaattcctagagaatgctgatgatgctgaaaaaaccacggaaagtgatgcaaaaaaatcatcaaaatccaagagtttccaacactgcgccactgccgatgctgtcaaacctgacgaattttacaaaactttgtctactataccgaagttcaaagacttgcaatggggccatcaggaagacgcagaagaatttttgacccacttattggaccaattacacgaggaattaatttctgcaattgatggcttaaccgataatgaaattcaaaatatgctgcaaagtattaatgatgaacaattgaaagttttctttattagaaatttgtcacgttatggaaaagcagagtttatcaaaaatgctagtcctagactgaaggagttgatagaaaaatatggcgtgatcaatgatgactctaccgaagaaaatggttggcatgaagtgagcggatctagcaaaagaggcaagaaaactaagaccgctgccaagaggactgtcgagattgttccatcaccaatctccaaacttttcggtggccagttcagatctgtgttagatataccgaacaataaggaatctcaatcgattacactcgatccgttccaaacaattcaattggacatttcagatgctggtgtgaatgatctagaaactgcattcaaaaaatttagtgaatacgaattgctaccctttaagtcctcgtcagggaatgatgtcgaggccaagaagcagacttttattgataaattgccgcaagttcttttaatccaattcaaaagattctcattcataaataatgtgaacaaagacaacgcaatgacgaactataacgcgtacaatggacgtattgagaagatcaggaaaaaaattaaatatggtcacgagttaatcatacctgaagaatcaatgtcttccataacattgaaaaacaacacctcagggattgatgatagaagatataagctaaccggagttatataccatcatggggtaagttccgatggcggtcattacacagcggatgtttatcatagcgagcacaacaaatggtatagaatagatgatgtaaatattaccgaactagaggacgatgacgttttgaaaggtggcgaagaagcttctgattcgaggactgcctatattttaatgtatcaaaagagaaattaa

SEQ ID NO: 3318 - DNA, 2739 bp, Artificial Sequence
  Description of Artificial Sequence: Synthetic polynucleotide
atgaacatgcaagacgctaacaaagaagagagttactccatgtacccgaaaacctcttctccaccaccacctacgccaaccaatatgcagattcctatttatcaagcgcctttgcagatgtacggctacactcaggccccatatttgtaccccacacaaatacctgcctattcttttaatatggtcaaccaaaaccagccaatctaccatcaaagtggcagcccacatcacttgcctccgcaaaacaatattaacggcggaagcactaccaataacaacaacattaacaagaagaagtggcactctaatggcattaccaataacaatggaagcagcggtaatcaaggcgccaactctagcggtagcggcatgagctacaacaaatcccacacctaccatcacaattactctaacaatcatatccccatgatggcctctccaaacagtggcagcaatgcgggcatgaaaaaacagaccaactcttccaacggcaacggttcttctgctacttctccatcttactcttcctacaactcttcttctcagtatgatttatacaagtttgatgtcactaaattaaagaatctcaaggaaaattcttccaacttgattcaattgccattattcataaacactacggaagcagaatttgctgcggcaagtgtccaaaggtacgaattaaacatgaaggctttgaacttgaactctgaaagcttagagaactcttctgtagaaaagagctctgcccatcatcacacaaaaagccatagtataccaaagcataatgaggaagtaaagacagaaacacatggggaagaagaagatgctcatgataaaaaaccacatgcgagcaaagatgcgcacgagcttaaaaagaaaactgaagtaaagaaagaggatgctaagcaagaccgtaacgaaaaagttatacaggaacctcaagctactgttttacctgtagtggataagaaggaaccagaggaatctgttgaagaaaatacttccaagacatcttctccttctccatctcctccagcagcaaaatcctggtccgccatagcatctgatgcgattaaaagtagacaagctagtaacaaaacagtctccggatccatggtcactaaaacaccaatttctggtacgaccgcaggcgtttcttctacaaacatggctgcggcgactataggtaaatccagctctcccttattgtccaagcagcctcagaaaaaggataaaaaatacgttccaccttctacaaagggtattgagccattgggttccattgcgttaagaatgtgttttgatcccgatttcattagttacgttttaagaaataaagatgttgaaaacaaaataccagtccattccattattccaagaggcataattaacagagccaacatttgttttatgagttctgtgttacaagtgttactctactgtaagccatttattgatgtaattaacgttctcagtacaagaaataccaattctagagtcggcacatcttcctgtaaattattagatgcttgtttgactatgtataagcaattcgataaggaaacctatgagaaaaaattcttggagaatgctgatgatgctgaaaaaaccacggaaagtgatgcaaaaaaatcttctaaatccaagagtttccaacactgcgccactgccgatgctgtcaaacctgacgaattttacaaaactttgtctactataccgaagttcaaagacttgcaatggggccatcaggaagacgcagaagaatttttgacccacttattggaccaattacacgaggaattaatttctgcaattgatggcttaaccgataatgaaattcaaaatatgttacaaagtattaatgatgaacaattgaaagttttctttattagaaatttgtctcgttatggaaaagcagagtttatcaaaaatgctagtcctagattaaaggagttgatagaaaaatatggcgtgatcaatgatgactctaccgaagaaaatggttggcatgaagtgagcggatctagcaaaagaggcaagaaaactaagaccgctgccaagaggactgtcgagattgttccatctccaatctccaaacttttcggtggccagttcagatctgtgttagatataccgaacaataaggaatctcaatctattacactcgatccgttccaaacaattcaattggacatttctgatgctggtgtgaatgatttggaaactgcattcaaaaaatttagtgaatacgaattgttgccctttaagtcctcttctgggaatgatgtcgaggccaagaagcagacttttattgataaattgccgcaagttcttttaatccaattcaaaagattcagtttcataaataatgtgaacaaagacaacgcaatgacgaactataacgcgtacaatggacgtattgagaagatcaggaaaaaaattaaatatggtcacgagttaatcatacctgaagaaagtatgtcttccataacattgaaaaacaacacctctgggattgatgatagaagatataagttgaccggagttatataccatcatggggtaagttccgatggcggtcattacacagcggatgtttatcatagcgagcacaacaaatggtatagaatagatgatgtaaatattaccgaattagaggacgatgacgttttgaaaggtggcgaagaagcttctgatagtaggactgcctatattttaatgtatcaaaagagaaattga

SEQ ID NO: 3319 - DNA, 1332 bp, Saccharomyces cerevisiae
atgaaatacaaggaaatcaatttcttcaagggccatccgagctcgaggttgctgcctcgagaagcagtaattcaagcgactgcggctatattggggcccgagaccagggagtacgataacgacccctataacaggcatccgctgacgtacggttcggacgaaggtgccctgtgggtgcgagagcagatttgtacgtttctgaatgatcagctgtttaagttcgaaaatggggctcggagcaggacacgggcagactatttgaatctgaatagcggcgcttcgtatggcatgctgaacatccttctgcaaacaaccttgccacataacgggtataccaggcaggcgttcatcatcacgccaacatatttcttgatcaacaattgcttcacagatgcgggattcaaggggaaaatgaccgccatcaacgagcagggccacgactcgattgatttcgagtcgttgatttctgcccttgagcagcacgaggcggagccgcagccccatagtaccacagagatgattcaggggccaaagttgaccaagaaggtctacaggtacgttatgtactgcatcccgacgtttgcaaacccatcgggaaacacatactcgcttgagaccagacgcagacttatcgacatcgctcggaagtacgacatgctgataatcactgatgacgtgtacgatattctagattacacgacgccctcagatgagctgccctctccgcccctaaggatggtgcacatagacagaagtacagcgccctccggtgaggactcgttcgggaatacagtgtccaacgcaactttctccaagctgatcgcccctgggctcagatttggataccatgagtcaatcaacgcgaatctcgccagacagctatctaaaggtggtgcaaacgtctctggcggaactccctcacaactgaactccatgatcgtgggtgagatgctgcgtagtggtgccgcccagagatgcattgcacatctgagatccgtatactccgagagggccactgtcttgacctcggcgcttaagaaatacatgcccctaggaaccgagattatgccattgaagggcggctattttacttggatcactctcccaccagcgtacaatgccatggagatatccactattcttgccaagaaatttaatgtcatccttgccgacggctccaatttcgaggtcatcggcgatgagaaaaactggggtcagtcatgctttaggctttctattagtttcttagaagttgatgatatcgacaggggcattgagctgtttggtgctgtttgcaaatctcatgcgatcaccaataacataactatgtag

SEQ ID NO: 3320 - DNA, 1332 bp, Artificial Sequence
  Description of Artificial Sequence: Synthetic polynucleotide
atgaaatacaaggaaatcaatttcttcaagggccatccgagcagtaggttgttacctagagaagcagtaattcaagcgactgcggctatattggggcccgagaccagggagtacgataacgacccctataacaggcatccgttaacgtacggttctgacgaaggtgccttatgggtgagagagcagatttgtacgtttttgaatgatcagttatttaagttcgaaaatggggctagaagcaggacaagagcagactatttgaatttgaatagcggcgcttcttatggcatgttgaacatccttttacaaacaaccttgccacataacgggtataccaggcaggcgttcatcatcacgccaacatatttcttgatcaacaattgcttcacagatgcgggattcaaggggaaaatgaccgccatcaacgagcagggccacgacagtattgatttcgagtctttgatttctgcccttgagcagcacgaggcggagccgcagccccatagtaccacagagatgattcaggggccaaagttgaccaagaaggtctacaggtacgttatgtactgcatcccgacgtttgcaaacccatctggaaacacatactctcttgagaccagacgcagacttatcgacatcgctagaaagtacgacatgttgataatcactgatgacgtgtacgatattttagattacacgacgccctctgatgagttgccctctccgcccttgaggatggtgcacatagacagaagtacagcgccctccggtgaggactctttcgggaatacagtgtccaacgcaactttctccaagttaatcgcccctgggctcagatttggataccatgagagtatcaacgcgaatctcgccagacagctttctaaaggtggtgcaaacgtctctggcggaactccctctcaattgaactccatgatcgtgggtgagatgcttcgtagtggtgccgcccagagatgcattgcacatttaagatccgtatactccgagagggccactgtcttgacctctgcgcttaagaaatacatgcccttaggaaccgagattatgccattgaagggcggctattttacttggatcactctcccaccagcgtacaatgccatggagatatccactattcttgccaagaaatttaatgtcatccttgccgacggctccaatttcgaggtcatcggcgatgagaaaaactggggtcagagttgctttaggctttctattagtttcttagaagttgatgatatcgacaggggcattgagttatttggtgctgtttgcaaatctcatgcgatcaccaataacataactatgtga

SEQ ID NO: 3321 - DNA, 765 bp, Saccharomyces cerevisiae
atgttgactatcacgaaaagactggtgaccaccgatgtgcggtcgcgaatactgttaagcagtttaaacgggaaaatgtccgatgcactggcgctgctgcgtcagcagcagcagaccagcgtggatgtggagctgctgcacacgatgctagcgcgagccgctgcgcttgcccatgccgacactatagcatacatgtggtatcagcatgtgatgccacgccggttgccagtagagggccgcctgctatgtgaaatggctggcgtagcattgtaccaggacaggctcttcttacccgcgcagttcctccagcactaccaggcgatgaatcgcgatcgtcgcaccagcccagaagatgaactgattgagtatgagcttagacggattaaagtcgaagcgtttgcgcgtggcacaatgcactccacggcgctcagggaaaagtggaaggtattcttgcaggagatggatacgctaccagggcagccgccattaaggctgcgcgacttcccgcaaatgaccaaggctatgggcatagcattgatgcagcaagatgagcaagcagctgccctggcgttgtttggacgacagcccctagtgataaagaacgaatggtcactaccgctactactggctggtgtcctttggcatgttcccggcccagcgcaggcgcgacgtgtgctggcggagttccgtcaaagttatcgcgggctgccgctgctggatgccgaactagtgataaagagaagaggatttgaaatcaacacataa

SEQ ID NO: 3322 - DNA, 765 bp, Artificial Sequence
  Description of Artificial Sequence: Synthetic polynucleotide
atgttgactatcacgaaaagattagtgaccaccgatgtgagatctagaatattattaagcagtttaaacgggaaaatgtccgatgcattagcgttattacgtcagcagcagcagaccagcgtggatgtggagttattacacacgatgttggcgagggccgctgcgcttgcccatgccgacactatagcatacatgtggtatcagcatgtgatgccacgcagattgccagtagagggccgccttttatgtgaaatggctggcgtagcattgtaccaggacaggctcttcttacccgcgcagttcctccagcactaccaggcgatgaatcgcgatcgtcgcaccagcccagaagatgaattgattgagtatgagcttagaagaattaaagtcgaagcgtttgcgcgtggcacaatgcactccacggcgctcagggaaaagtggaaggtattcttgcaggagatggatacgttaccagggcagccgccattaaggttacgcgacttcccgcaaatgaccaaggctatgggcatagcattgatgcagcaagatgagcaagcagctgccttagcgttgtttggaaggcagcccttagtgataaagaacgaatggtctttaccgttgttgttggctggtgtcctttggcatgttcccggcccagcgcaggcgagacgtgtgttggcggagttccgtcaaagttatcgcgggttgccgttattagatgccgaattagtgataaagagaagaggatttgaaatcaacacatga

SEQ ID NO: 3323 - DNA, 1209 bp, Saccharomyces cerevisiae
atgttcaaactcacctctcgactcgtcacgtcaaggtttgctgcctcttccagactggccaccgctcgaaccatagtattgccccggccccatccgtcatggatctcttttcaggccaaaagatttaattcgacgggcccaaatgccaacgatgtctcggaaatccaaacccagttgccttccatcgatgaattaacctcttcagctccttctctttccgcttctacttcggaccttatcgctaacacgacccaaacagtgggcgagttgtcctcccatatagggtacttaaatagcattggcctggcccaaacctggtactggccctcggacattatccaacacgtcttggaggccgttcatgtttactctgggttgccttggtggggaactatcgcggccaccaccatcctcattcgatgcctgatgtttcccctctatgtcaagtcctctgatactgttgctagaaattcccatatcaagcccgagctggacgccttgaataataagctaatgtccactacagatttgcaacaaggtcagctagtcgccatgcaaaggaaaaaactgctctcctcgcacggcattaagaacagatggctggccgcacccatgctacaaattccaatcgcccttgggtttttcaacgcattgagacacatggctaactacccagtagatgggttcgctaatcaaggtgtcgcttggtttacagacttgactcaagcagacccttacttaggtttgcaagtaatcactgccgctgtgttcatctcatttacaaggctggggggtgagactggtgctcaacaattcagttctcccatgaagcgtcttttcactattctaccgatcatttctataccggccacaatgaacttatcgtccgctgtggtcctctactttgcctttaatggtgccttctccgtcctacagacaatgattttgagaaacaaatgggttcgttcgaaactgaagataacagaagtagctaaaccaaggactcctatcgctggcgcttcccccacagagaacatgggcatcttccaatcattaaaacataacattcaaaaggcaagagatcaggcggaaagaaggcaattgatgcaagataatgagaagaagttacaagaaagcttcaaggagaagaggcagaattccaaaatcaaaattgttcacaaatcaaacttcattaataacaaaaaatga

SEQ ID NO: 3324 - DNA, 1209 bp, Artificial Sequence
  Description of Artificial Sequence: Synthetic polynucleotide
atgttcaaactcacctctagactcgtcacgtctaggtttgctgcctcttccagattggccaccgctagaaccatagtattgcccaggccccatccgagctggatctcttttcaggccaaaagatttaattctacgggcccaaatgccaacgatgtcagtgaaatccaaacccagttgccttccatcgatgaattaacctcttctgctccttctctttccgcttctacttctgaccttatcgctaacacgacccaaacagtgggcgagttgtcctcccatatagggtacttaaatagcattggcttggcccaaacctggtactggccctctgacattatccaacacgtcttggaggccgttcatgtttactctgggttgccttggtggggaactatcgcggccaccaccatcctcattagatgcttgatgtttcccctctatgtcaagtcctctgatactgttgctagaaattcccatatcaagcccgagttggacgccttgaataataagttgatgtccactacagatttgcaacaaggtcagttggtcgccatgcaaaggaaaaaattactctcctcccacggcattaagaacagatggttggccgcacccatgttacaaattccaatcgcccttgggtttttcaacgcattgagacacatggctaactacccagtagatgggttcgctaatcaaggtgtcgcttggtttacagacttgactcaagcagacccttacttaggtttgcaagtaatcactgccgctgtgttcatctcttttacaaggttggggggtgagactggtgctcaacaattcagttctcccatgaagcgtcttttcactattttaccgatcatttctataccggccacaatgaacttatcttccgctgtggtcctctactttgcctttaatggtgccttctccgtcttacagacaatgattttgagaaacaaatgggttcgttctaaattgaagataacagaagtagctaaaccaaggactcctatcgctggcgcttcccccacagagaacatgggcatcttccaatctttaaaacataacattcaaaaggcaagagatcaggcggaaagaaggcaattgatgcaagataatgagaagaagttacaagaaagcttcaaggagaagaggcagaattccaaaatcaaaattgttcacaaaagtaacttcattaataacaaaaaatga

SEQ ID NO: 3325 - DNA, 6504 bp, Saccharomyces cerevisiae
atgaaaggtcttctctggtctaagaacaggaaatcttcaacggccagtgctagttcaagctcaacttccacgtctcataagacaactactgcgtctacagcatcgtcgtcgtcgccgtcatcatcctctcaaactattcgaaactcgacaagcggtgcttctccatacatgcattcccaccatcaccatggccagggacacagtcaccacagaggggaagacaacaacagagataagagaaaaagctccgtatttccaccctccaagcagtacacatccactagttccagtcaggtgaacttggggatgtatcattcggatactaacaccagatcttctagaagcatagcctctacgctaaaagacgattctccgtctgtctgctccgaagatgaaataagcaattcttctagccagaagtccaatgcccaggatgagactcccattgcgtacaagaagagtgcccattcgaaagactcattgttgccttcacgttcctcgtctttatcacctcctcagtctcgatgtagcactggaactacgctagagaaatcgttgaacacttcaggtatcagtaacagtagcggcactaataataacaatagcaataataacaacgataacgagcaaaagcaaagaaatgttatccacttaaactctgaaaactatgatacaactgtttttaagactggatgggttaataagtcccatggccagactgttgctacaaactataatagctcaatgacagccccttcctcttcctcttcgtcctcctctcagaatctccgtaatgatgcgtattctagaaacagggaaagcaggttttatgggaacgacggttcgtctttaaaaaatgatgacagcagtagtactacggccactaacagtggcaatgatgtggcctcagcaagaagcagcatggctatagatcctcaaatgctagtacctgattaccgtctttatagggctcaattgaaaggttgcgttctcaacctttacaaaagtggtttgaatagtaacattaagttttttgatccaactttaccagcttcaaatagtagtatagcaaatgaaaaccatcaacagaaaaaacaacaaacaaacaaccaagcacaagcggaagctctgcaccaaaagcaatcatttggccaaatgggtgaacctattacactggacctgaagtatttatctgaagtttacccgcacccagatttaagacaagacagtgatggtaaaattatatcaggcacaatagaaagtttatgtcacacagtcttattttaccccggtccaaagcaatcggacgtacctaatgagaaatcattatctaagacacatagagctgttattaatctgttattgatgtttccattactagatcatttcattaagtttctaaaggtattcaaccaattcggtctttcttttaccaagaataaatcaagattgacaaataattccacacaattctacaacatatcccctgctgtcgatgactccatgactcaaagattagctttaactgctaaaacaatccttgatgtatttccgggatttttgctggatgaaccaatgctgaagactataatttccttattagatactatatctttgcataacgatgaaatttccaacaatttgaaaattaaaatcgccaataaacataacgaattaatgaaacttaccgcattcactcgatctcttccaatggcaacatcatctacacatgaattagagattatattggatccaagtcatttcctgtctttagacattacaacattggctgatgaagttcatcatatcaatttaaagtttgataaagtatgggcaccgaaatttgactattctctgctgtatgattcgaagtttattaatcgaagaattgtctcgttaaatccattggtattcaacaacgaccaaaatatccattttcttggaaggctactaatatcacatttatttccaacaaatcctgagtttagtaaaaaagtgactccaaaagtgagagctgagttattagataaatgggtccaaattggctgtagatttgaacatttaggagacatggtatcatggctagctgtcgccactatcatttgttcaattcctgtactaaggtcatcttcatggaaatatgttcctgatcagtcattgaaaactatttttaaagattgggttcctaccattattcagttagagaggcgacaaaggacatctaaatctacaagtagtgttttcatactcgctcctccaaatctggatgacgactttacgagagctaacgtgatttcttattttggcgatttattaattcatgctgatgatttaccatctgatacgaaattcaagtacttggaaaagaaaattaacagaacaaaaaacgcttttcataaatggcaacaaagattacaagcaatcgactctacgagacataaaactaattcgacagaaaacgtcagggataatgattctcctaataacgttgtttatcagctctggaaatttcatttatcacaacctccgttgaacattgaaggaataatgaaattaagtgtccaacacgaacctccaataatcgaccagaaagcgtattctactattggttctcaaaggagtgctttagtaactggaagttatttacccattttattcaatgaactattcccaaattattcactatttcctaagaatacattagtgggtgctgccagtgatgcgaagttgccgcctccaagatcatccgcgcgcctctcaaaatcactttcaatcagtgaaccaattccaatagcttcaaacagtcacactatgggctcattaacagatgatgctatgtcctcaaaaaatgataataataaagttacaggtgttggaaaaattgacggacctgtgatcaaagagatgtcgtcaaaacaatcaaataaacagagactattaaaatctgtgagagatgtttttaatattgacatggatgtgtttcatatatcagatgagttagtatttaaatcggtatacgataatgatggtaaatcccgtcctgctagtatggtcatagaaacaccaaagagattctcacaacactcttccatgcttattaataatccagctactccaaaccaaaagatgagagattccttggataccactggaagactaagtaagacattagaaaatatggactttttcaacaatattggtcaagtatcagattcactaaaagaatcgattattcgtgtcgtattgaaatcgtcgtcgctagaaaagatttttgatttactggtattaacttcaaatatcttttcaaaattggtagacactaaagaccttgagaattattactatcatcaaagacaaaggggtcattctaccagagggctttccgatgataacataggactactagattatgcattcgttaaactaactatggacaatgatattttcacagaaacattcttcaacacttataaaagctttactactacaactacggtattagaaaatatggcaaaacggtatgttggtgcaaagagttgcagcgtgtcaatttccaagattttagatcgcagtgatgattctaaaatgaagataaatgaggatacaaatttagtgtcctcttcattatacgaccaaaattttcctgtttgggatatgaaagtaactgacgatgaaaacataaaccttatttatatggcaaaaatccaaatcggcgccgcggaagctatactacatttagtgaaaaatcattactctgactttactgacgatttatgtaacaactctactctattggatattataaaaataatggaacaagaagtatccactgaatggcctacgcgaattgcaaactcaaagttacaaaaaagcctaccagaaaattttgtgattgaaacagaaaatttgttgactacgttaactgatctatttcatggtattaaatcagcataccaaaagcaactatacagacctattggtgtcaatagaactcagaagagaataactgacattttgaattcctttaacacattctcttttacagatcttaacaacatcattgatgatccttcctttagcgatgacatgattagatcttttcaaaagttacactcaaccaattacgaagatatactagaatggatctaccagttagataactttatttctaagaagttcaatttagtttctaagaaagattggatagttcttttccaggagttggaattgctttcaaaggaatctctggtctcttttttcaattatccgctacattttaagtcaagcaaattgataaaccccggatatttgcaattgcacgagtttgaaatttccaatctttttacttggatttctacattgattcttaaggatgataatggtacggagagtcttttttttgaaaaactaccacaatctataaaattgttaataaagttacacacgagtctaactacgtttttcgtgatggaaatttcaaacgtcaacaaaagcagtagtgaaaggttaactacttgtaaagttatattacaaattttgaactacatccgctggaaaaacggaagtttggatttatttgattcagaggaggatgaaagtcctcatgctatttgtccacacattccagcttttattgaaactgctattgcgcatgccataatatcaccagagtctagaaactatgaactttcgtggatcaaagcttctgaaaaactttcggaccctactaaaggaacccaaaatctaagatcgattagtaacgttttagagaagatagatgacatacatataaagagattcattgagattgatgatgtattcagcaaaaactgcaagaatttatgcccctgccctggttggttcatttcaaggttactagaaatatctcagtttgtccctaacatgagtatcactaattcgaaacttattaattttgacaaaaggagatttgttaacaacataatatctaatgtcttggatttaattccgaacgaaagggagtttccacttgatattgaaatgagtgacgaaaatccttcgaaaagaactacatttggccgcattctgttcaataattttgaagatgttaataaagtatacagaaagaagactaaaaaagtatcagaatcagaagccatatcggagagatttcaagagcagggagtatttaatgaaatactagtcaatgaaattgaaaaaataaagagggaagccagaaaattagaggttttactcgatcaagaaaagatcttgaagaactctgctgctttacatcaggccgttccgaaaaagaataggaagtctgttattatctcaggtactcatagtgacaacgatcatagctataatatcaataagaacaccggtcaaacgccttctctaggtagtgttatggaaagcaataattcagcaaggaatagaagagattcaagggcctccttttccacaaatagatcatcagtagtgtcaaattccagccataatggtgttagtaaaaaaataggtggatttttcagaagaccattttcaatcggtggattcaacacatccagttctaattattcactcaacagtatattatcgcaagaagtttcaagtaacaaatccattctaccaagtatacttccagaggttgattccatgcaactacacgacttaaaacctagttatagtttgaagacctttgaaatcaagtcaataatggaaataatcaatcacagaaacattccggcttactactatgcgttcaagatagttatgcaaaatggccatgaatatctgattcaaacggctagttctagtgacctcacagaatggataaaaatgatcaaggcttccaagagattttcattccattcgaaaaaatataaaggtaaaactcataataagatatttggggtaccattagaagacgtttgtgaaagagagaataccttgatacctacaattgttgtgaaattgctggaagagattgagctgcgtgggctagatgaagtgggattgtacagaattcctggttccatcggcagtataaatgcactaaagaacgcatttgacgaagaaggtgcaacagataattcctttacattagaggacgatagatggtttgaagtgaatgcgatcgcaggctgttttaagatgtatttaagagagttaccagattctttattttctcatgctatggtgaacgactttaccgatttggcgattaagtataaagcacatgcaatggtaaatgaagaatacaagagaatgatgaatgagttactccaaaagttacctacatgctattaccaaactttgaaaagaattgtatttcatttgaataaagtacatcagcatgttgtaaataataaaatggacgcatcaaacttggctattgtattttccatgagttttataaaccaagaagacttagccaacagcatggggtccagattaggtgcagttcagacaatcctgcaagattttattaagaatccaaatgattatttcaagcaataa

SEQ ID NO: 3326 - DNA, 6504 bp, Artificial Sequence
  Description of Artificial Sequence: Synthetic polynucleotide
atgaaaggtcttctctggtctaagaacaggaaatcttctacggccagtgctagtagtagctctacttccacgtctcataagacaactactgcgtctacagcatcttcttcttctccgtcttcttcctctcaaactattagaaactccacaagcggtgcttctccatacatgcattcccaccatcaccatggccagggacacagtcaccacagaggggaagacaacaacagagataagagaaaaagctccgtatttccaccctccaagcagtacacatccactagttccagtcaggtgaacttggggatgtatcattctgatactaacaccagatcttctagaagcatagcctctacgttgaaagacgattctccgtctgtctgctccgaagatgaaataagcaattcttctagccagaagtccaatgcccaggatgagactcccattgcgtacaagaagagtgcccattctaaagactctttgttgccttctcgttcctcttctttatctcctcctcagtctcgttgtagcactggaactacgttggagaaatctttgaacacttctggtatcagtaacagtagcggcactaataataacaatagcaataataacaacgataacgagcaaaagcaaagaaatgttatccacttaaactctgaaaactatgatacaactgtttttaagactggatgggttaataagtcccatggccagactgttgctacaaactataatagcagtatgacagccccttcctcttcctcttcttcctcctctcagaatctccgtaatgatgcgtattctagaaacagggaaagcaggttttatgggaacgacggttcttctttaaaaaatgatgacagcagtagtactacggccactaacagtggcaatgatgtggcctctgcaagaagcagcatggctatagatcctcaaatgttggtacctgattaccgtctttatagggctcaattgaaaggttgcgttctcaacctttacaaaagtggtttgaatagtaacattaagttttttgatccaactttaccagcttctaatagtagtatagcaaatgaaaaccatcaacagaaaaaacaacaaacaaacaaccaagcacaagcggaagctttacaccaaaagcaaagttttggccaaatgggtgaacctattacattagacttgaagtatttatctgaagtttacccgcacccagatttaagacaagacagtgatggtaaaattatatctggcacaatagaaagtttatgtcacacagtcttattttaccccggtccaaagcaatctgacgtacctaatgagaaatctttatctaagacacatagagctgttattaatttattattgatgtttccattattagatcatttcattaagtttttgaaggtattcaaccaattcggtctttcttttaccaagaataaatctagattgacaaataattccacacaattctacaacatatcccctgctgtcgatgactccatgactcaaagattagctttaactgctaaaacaatccttgatgtatttccgggatttttgttggatgaaccaatgttgaagactataatttccttattagatactatatctttgcataacgatgaaatttccaacaatttgaaaattaaaatcgccaataaacataacgaattaatgaaacttaccgcattcactagatctcttccaatggcaacatcttctacacatgaattagagattatattggatccaagtcatttcttatctttagacattacaacattggctgatgaagttcatcatatcaatttaaagtttgataaagtatgggcaccgaaatttgactattctttattatatgattctaagtttattaatagaagaattgtctctttaaatccattggtattcaacaacgaccaaaatatccattttcttggaaggcttttgatatctcatttatttccaacaaatcctgagtttagtaaaaaagtgactccaaaagtgagagctgagttattagataaatgggtccaaattggctgtagatttgaacatttaggagacatggtaagctggttggctgtcgccactatcatttgttctattcctgtattgaggtcttcttcttggaaatatgttcctgatcagtctttgaaaactatttttaaagattgggttcctaccattattcagttagagaggagacaaaggacatctaaatctacaagtagtgttttcatactcgctcctccaaatttggatgacgactttacgagagctaacgtgatttcttattttggcgatttattaattcatgctgatgatttaccatctgatacgaaattcaagtacttggaaaagaaaattaacagaacaaaaaacgcttttcataaatggcaacaaagattacaagcaatcgactctacgagacataaaactaattctacagaaaacgtcagggataatgattctcctaataacgttgtttatcagctctggaaatttcatttatctcaacctccgttgaacattgaaggaataatgaaattaagtgtccaacacgaacctccaataatcgaccagaaagcgtattctactattggttctcaaaggagtgctttagtaactggaagttatttacccattttattcaatgaattattcccaaattattctttatttcctaagaatacattagtgggtgctgccagtgatgcgaagttgccgcctccaagaagttccgcgcgcctctctaaatctctttctatcagtgaaccaattccaatagcttctaacagtcacactatgggctctttaacagatgatgctatgtcctctaaaaatgataataataaagttacaggtgttggaaaaattgacggacctgtgatcaaagagatgtcttctaaacaaagcaataaacagagattattaaaatctgtgagagatgtttttaatattgacatggatgtgtttcatatatctgatgagttagtatttaaatctgtatacgataatgatggtaaatcccgtcctgctagtatggtcatagaaacaccaaagagattctctcaacactcttccatgcttattaataatccagctactccaaaccaaaagatgagagattccttggataccactggaagattaagtaagacattagaaaatatggactttttcaacaatattggtcaagtatctgattctttgaaagaaagtattattcgtgtcgtattgaaaagctcctctttggaaaagatttttgatttattggtattaacttccaatatcttttccaaattggtagacactaaagaccttgagaattattactatcatcaaagacaaaggggtcattctaccagagggctttccgatgataacataggattattagattatgcattcgttaaattaactatggacaatgatattttcacagaaacattcttcaacacttataaaagctttactactacaactacggtattagaaaatatggcaaaaagatatgttggtgcaaagagttgcagcgtgtccatttccaagattttagatcgcagtgatgattctaaaatgaagataaatgaggatacaaatttagtgtcctcttctttatacgaccaaaattttcctgtttgggatatgaaagtaactgacgatgaaaacataaaccttatttatatggcaaaaatccaaatcggcgccgcggaagctatattacatttagtgaaaaatcattactctgactttactgacgatttatgtaacaactctactttattggatattataaaaataatggaacaagaagtatccactgaatggcctacgagaattgcaaactccaagttacaaaaaagcttgccagaaaattttgtgattgaaacagaaaatttgttgactacgttaactgatttatttcatggtattaaatctgcataccaaaagcaattgtacagacctattggtgtcaatagaactcagaagagaataactgacattttgaattcctttaacacattctcttttacagatcttaacaacatcattgatgatccttcctttagcgatgacatgattagatcttttcaaaagttacacagcaccaattacgaagatatattggaatggatctaccagttagataactttatttctaagaagttcaatttagtttctaagaaagattggatagttcttttccaggagttggaattgctttccaaggaatctttggtctcttttttcaattatccgcttcattttaagagcagcaaattgataaaccccggatatttgcaattgcacgagtttgaaatttccaatctttttacttggatttctacattgattcttaaggatgataatggtacggagagtcttttttttgaaaaattaccacaatctataaaattgttaataaagttacacacgagtttgactacgtttttcgtgatggaaatttccaacgtcaacaaaagcagtagtgaaaggttaactacttgtaaagttatattacaaattttgaactacatccgctggaaaaacggaagtttggatttatttgattctgaggaggatgaaagtcctcatgctatttgtccacacattccagcttttattgaaactgctattgcgcatgccataatatctccagagtctagaaactatgaactttcttggatcaaagcttctgaaaaactttctgaccctactaaaggaacccaaaatttaagatctattagtaacgttttagagaagatagatgacatacatataaagagattcattgagattgatgatgtattcagcaaaaactgcaagaatttatgcccctgccctggttggttcatttctaggttattggaaatatctcagtttgtccctaacatgagtatcactaattctaaacttattaattttgacaaaaggagatttgttaacaacataatatctaatgtcttggatttaattccgaacgaaagggagtttccacttgatattgaaatgagtgacgaaaatccttccaaaagaactacatttggccgcattcttttcaataattttgaagatgttaataaagtatacagaaagaagactaaaaaagtatctgaaagtgaagccatatctgagagatttcaagagcagggagtatttaatgaaatattggtcaatgaaattgaaaaaataaagagggaagccagaaaattagaggttttactcgatcaagaaaagatcttgaagaactctgctgctttacatcaggccgttccgaaaaagaataggaagtctgttattatcagtggtactcatagtgacaacgatcatagctataatatcaataagaacaccggtcaaacgccttctttgggtagtgttatggaaagcaataattctgcaaggaatagaagagatagtagggcctccttttccacaaatagaagttctgtagtgagtaattccagccataatggtgttagtaaaaaaataggtggatttttcagaagaccattttctatcggtggattcaacacatccagttctaattattccctcaacagtatattatctcaagaagtttctagtaacaaatccattttaccaagtatacttccagaggttgattccatgcaattacacgacttaaaacctagttatagtttgaagacctttgaaatcaagagtataatggaaataatcaatcacagaaacattccggcttactactatgcgttcaagatagttatgcaaaatggccatgaatatttgattcaaacggctagttctagtgacctcacagaatggataaaaatgatcaaggcttccaagagattttctttccattctaaaaaatataaaggtaaaactcataataagatatttggggtaccattagaagacgtttgtgaaagagagaataccttgatacctacaattgttgtgaaattgttggaagagattgagttgcgtgggttagatgaagtgggattgtacagaattcctggttccatcggcagtataaatgcattgaagaacgcatttgacgaagaaggtgcaacagataattcctttacattagaggacgatagatggtttgaagtgaatgcgatcgcaggctgttttaagatgtatttaagagagttaccagattctttattttctcatgctatggtgaacgactttaccgatttggcgattaagtataaagcacatgcaatggtaaatgaagaatacaagagaatgatgaatgagttactccaaaagttacctacatgctattaccaaactttgaaaagaattgtatttcatttgaataaagtacatcagcatgttgtaaataataaaatggacgcatctaacttggctattgtattttccatgagttttataaaccaagaagacttagccaacagcatggggtccagattaggtgcagttcagacaatcttgcaagattttattaagaatccaaatgattatttcaagcaatga

SEQ ID NO: 3327 - DNA, 1017 bp, Saccharomyces cerevisiae
atgaatagcgtaaaaagagtaaagctaaattcaaaaatgtccaaacaaatatgcacgcattccggatcttttcacgcggacgagtcgttggcggtatacatgttaaggctactacccgaatttaaagatgctaagttggttagatcaagaaatcccaaggactgggaggctagtgacattctagtggatgtaggagctcagtatgacggcgtgaaattttttgaccaccaccagcgtggatttttcgaaactttcaacgagaaatacaagactaagctctcaagtgctggtctgatcttcaaacactacggtcgtgacattatcaaaacaattttgaacaacaaggttagcagctctgatttagatctgctctatgacaaggtatacaaacaatttgtcgaggcactggatgcaaacgacaacggtattagcaagtacacgattcctaaggattccaacttggaaccgaatttcagggataacgccatcagcattcccgggattatttcaggtatgaatcctaactggaacgaagacacttccgatgagtcttttgacagatgctttgctcgcgcaagtgagtttatcggtggggtctttgtcacattggtaagaggctacggtcaatcgtggttgccagccaaggcccttgtggcgcaagccattgatgaaagaatggatgttgataagagtggcaaaatcattgtcttgccccaattctgtccatggaaggagcatctatacgagctggaaagagagaagaacattgaaaagcaaatcgagtttgttctcttcacagactcttctggtgcctggagggtatctactgtaccaatcaactccacctccttccagtttaggagaggtttgccggagccattaagaggcctcagagacgaagagctgagcaccaagagcggtgtgccaggatgtatcttcattcatgcagcaggtttcattggaggtgccaagtccaaagaggctgtatatgagctggctaagatgtctttggcctag

SEQ ID NO: 3328 - DNA, 1017 bp, Artificial Sequence
  Description of Artificial Sequence: Synthetic polynucleotide
atgaatagcgtaaaaagagtaaagttgaattctaaaatgtccaaacaaatatgcacgcattccggatcttttcacgcggacgagtctttggcggtatacatgttaaggcttttgcccgaatttaaagatgctaagttggttagatctagaaatcccaaggactgggaggctagtgacattttggtggatgtaggagctcagtatgacggcgtgaaattttttgaccaccaccagcgtggatttttcgaaactttcaacgagaaatacaagactaagctctccagtgctggtttgatcttcaaacactacggtcgtgacattatcaaaacaattttgaacaacaaggttagcagctctgatttagatttactctatgacaaggtatacaaacaatttgtcgaggcattggatgcaaacgacaacggtattagcaagtacacgattcctaaggattccaacttggaaccgaatttcagggataacgccatcagcattcccgggattatttctggtatgaatcctaactggaacgaagacacttccgatgagtcttttgacagatgctttgctcgcgcaagtgagtttatcggtggggtctttgtcacattggtaagaggctacggtcaaagttggttgccagccaaggcccttgtggcgcaagccattgatgaaagaatggatgttgataagagtggcaaaatcattgtcttgccccaattctgtccatggaaggagcatctttacgagttagaaagagagaagaacattgaaaagcaaatcgagtttgttctcttcacagactcttctggtgcctggagggtatctactgtaccaatcaactccacctccttccagtttaggagaggtttgccggagccattaagaggcctcagagacgaagagttgagcaccaagagcggtgtgccaggatgtatcttcattcatgcagcaggtttcattggaggtgccaagtccaaagaggctgtatatgagttggctaagatgtctttggcctga

SEQ ID NO: 3329 - DNA, 2406 bp, Saccharomyces cerevisiae
atggcgagaagtagaaagaattcattggttcgagatattgcgtctcatccgactataccagaatctcagaccatagtgggtttactggacgattcgtacctttttgataagctaaaaaagctatctttggctgtggaaaattctgacagtctgcaaagaactgatgtctcagaaggttgttcagaggttaatggttctgaagctacgacttctgcggatgtaaaaaagacaaacaagtatttgtattatactacctatttggaccagttaaacattaagatagacgagtataaagttgttctggatcaaacacgccaggttaacgatcaattggatagttccatcaagaaatttcggaaaatctctcaggatactggagctttcattgaggaaacgaagacgatctatgaaaagcagtctaaattaagcaatctaactgagtcaatccctaaagctctccattattttgaagttttagaccctataatgcgtcgcttgaaccatgccacttctcccgctattgttaagaagagctcctttacgacaatgttggcgactatcgacgagtctttacgttttttggatgagaatagtgacctcaaggatgcggcagcgtacagaatcaagttcaagcaatgcttgatcagagcctgtgaattgatatctcactttttaacgaatctgttgaaacaaacaaatcaagaaattttggataaaaccaaaaacaaaaattcgttaactgggttgccgtcgactacaagagacgccttcttgtacagtaaattctataccatagctgatactttcaaaattcaggtttcggaaattgttaagagaagcaacgaaaaagcctacaacaagtatcacgatgaactgaattccattctttacgagtgtttcaaccactatttccaaacacgtttaagactgctaactccggtcatttggtcacacattgatgaaattgttgttaaagataaggaccagggcttggtcaaattcattcaagacggtaaggtttattttcagcagttatgcgcggacgaatacaaacttttcgtagaatttttccctgaaaaggaatgtcgtttcaagattaatcagtggttcttacagttatgtgaacccctttatgactccattagagtcagggttttgaaagagacagatatttgtactttgtgtgactcagtgactttgtttgctccatattatgaatttgaagaaggttcagaagaatacgtgaagcagtttaccgacattcagtatgataaactattcgaaccgattgtccaaaaagtgcaggctagattaattttaagagtgcaaatatatgtccaacaaaatattttgagctataggcccactagggacgttttcatgatttcaaatagaaggagaaaatcgaagaccagcttacaagggggtaacgaagatgctactactagtgatgacaatccagatcccttgttagaatcttatttatcttctttcaagaatagaagcatattgcccatatcccctaatgatgcagacgataaaagtattgattcagaagaatctactgataaaatttcacagttgcaaacatattatccgcccttgttaaagactttggctttattgtccaaaatttatgaaatgatcaattctgtggtatttgatgatttagctcaccatgtagtccacgactgtattgtatccttgagaaatgcctatgatatggttatcaaatcttcagcgggaaaatctgattttaacaacttagatatttcattagcgtacctaaaaaatttgttgatgttacgtgattccatacagaactttaatattcaatatacagttaatgaaacttatctggatttttctggtgttgaggggtttttcaaatcacttaaagaaaatggtagaaacgttttgaaaaagacaaagtcatcttcaatattgaccctggcaagagagctggttccaaaagttgtaaacaatatggtggacgcccgtacggaactcatatctgaattgagaaacgtcattaaagattttactgaaagcacttctttggagcttattgatgacactttagatatcaatagtgatgaagatctgttaagcaaaaacgtaaaattaagagagaatataaaggccagattaccaagaatatatgaacagatattgaactatatcgatgatcaagagattgttactaatttattagacgctgtgcaagagttaattacacaatcatattccaaatattatgaaactataactgaattggcagaaaatggaaagtttgctaaggatcaagtcgcagacgtaatgtacttggacgtcttcacagatttttttgccaaagaggtggcggatcttttaagaaatggtgatattgataccataacgaaataa

SEQ ID NO: 3330 - DNA, 2406 bp, Artificial Sequence
  Description of Artificial Sequence: Synthetic polynucleotide
atggcgagaagtagaaagaattctttggttagagatattgcgtctcatccgactataccagaatctcagaccatagtgggtttattagacgattcttacctttttgataagttgaaaaagttatctttggctgtggaaaattctgacagtttacaaagaactgatgtcagtgaaggttgttctgaggttaatggttctgaagctacgacttctgcggatgtaaaaaagacaaacaagtatttgtattatactacctatttggaccagttaaacattaagatagacgagtataaagttgttttggatcaaacacgccaggttaacgatcaattggatagttccatcaagaaatttagaaaaatctctcaggatactggagctttcattgaggaaacgaagacgatctatgaaaagcagtctaaattaagcaatttaactgagagtatccctaaagctctccattattttgaagttttagaccctataatgcgtcgcttgaaccatgccacttctcccgctattgttaagaagagctcctttacgacaatgttggcgactatcgacgagtctttacgttttttggatgagaatagtgacctcaaggatgcggcagcgtacagaatcaagttcaagcaatgcttgatcagagcctgtgaattgatatctcactttttaacgaatttattgaaacaaacaaatcaagaaattttggataaaaccaaaaacaaaaattctttaactgggttgccgtctactacaagagacgccttcttgtacagtaaattctataccatagctgatactttcaaaattcaggtttctgaaattgttaagagaagcaacgaaaaagcctacaacaagtatcacgatgaattgaattccattctttacgagtgtttcaaccactatttccaaacacgtttaagattattaactccggtcatttggtctcacattgatgaaattgttgttaaagataaggaccagggcttggtcaaattcattcaagacggtaaggtttattttcagcagttatgcgcggacgaatacaaacttttcgtagaatttttccctgaaaaggaatgtcgtttcaagattaatcagtggttcttacagttatgtgaacccctttatgactccattagagtcagggttttgaaagagacagatatttgtactttgtgtgactctgtgactttgtttgctccatattatgaatttgaagaaggttctgaagaatacgtgaagcagtttaccgacattcagtatgataaattattcgaaccgattgtccaaaaagtgcaggctagattaattttaagagtgcaaatatatgtccaacaaaatattttgagctataggcccactagggacgttttcatgatttctaatagaaggagaaaatccaagaccagcttacaagggggtaacgaagatgctactactagtgatgacaatccagatcccttgttagaatcttatttatcttctttcaagaatagaagcatattgcccatatcccctaatgatgcagacgataaaagtattgattctgaagaatctactgataaaatttctcagttgcaaacatattatccgcccttgttaaagactttggctttattgtccaaaatttatgaaatgatcaattctgtggtatttgatgatttagctcaccatgtagtccacgactgtattgtatccttgagaaatgcctatgatatggttatcaaatcttctgcgggaaaatctgattttaacaacttagatatttctttagcgtacttgaaaaatttgttgatgttacgtgattccatacagaactttaatattcaatatacagttaatgaaacttatttggatttttctggtgttgaggggtttttcaaatctcttaaagaaaatggtagaaacgttttgaaaaagacaaagtcttcttctatattgaccttggcaagagagttagttccaaaagttgtaaacaatatggtggacgcccgtacggaactcatatctgaattgagaaacgtcattaaagattttactgaaagcacttctttggagcttattgatgacactttagatatcaatagtgatgaagatttattaagcaaaaacgtaaaattaagagagaatataaaggccagattaccaagaatatatgaacagatattgaactatatcgatgatcaagagattgttactaatttattagacgctgtgcaagagttaattacacaaagttattccaaatattatgaaactataactgaattggcagaaaatggaaagtttgctaaggatcaagtcgcagacgtaatgtacttggacgtcttcacagatttttttgccaaagaggtggcggatcttttaagaaatggtgatattgataccataacgaaatga

SEQ ID NO: 3331 - DNA, 1722 bp, Saccharomyces cerevisiae
atgttacagcagggttcttcctcgaggaggagtttgcatggtaatgattttcacacgctcacttctccttcaaggagagactctttgagtattcctagggctgtggacgctagatctgcgtctacgattgatctgttctacataccggatgctaccgtctcaaggaggcactctactctggtggctaatagatcagacaataatggtaatggcgcaccgatgcgccagtacaataaacctaactttgcttcctcctcgacttcatctctgccttcaactagaaatcgcccctctcgctacgataacatgaatatgaatatgaatatgaatatgaacatgaacatgaacatgaacatgaacatgaacaaccatactaccagtgatcacaatgcgcacccgcaatatcgttgtagaccaaacccgtccagacgccactccttaatgaccattcccgaaaagtactctggtagtcgctacagtctccgatcatccccgcctacctattctaatccacgtgttaggaaggaacttactcctttccaattacaaagaaagcagatgaaaagcgcttttcaattccccaacggtgaaaatttcacgccaagaaaccagatagcaaggcttccgccatcttcgacttttcccgactctccttctagttcatcgttgcctttgacccagactggaggcccatcttccgcagataacgattccattgccactggcacgaacaatcgttctcctcaacaaacgaaagctgctgatgctaatcagaaatctgaatccgagtctccaaaggcaattagatcaaattctaaaaagatatctcgtttcttcaggaaaatctggtcgtccaagtcatcaaattctgcagattccgtagaagagaatagcaaaacaaagcagaaaaggaaaaatccggagagagttgtaccagaaccgataacgtcccttgaccaaccggttgaaattataaaacagagtttttcaaccgttaacaatcacgaaacggctgtaccttcaattaaggactctggcatagtacaagaattgacagcactcggagataataacaggataccagttcttccaccccctaggtcaccaaacagacctacactgtctgataaacgaactacaaagttatactactgtagtcaagattcgtctaatgaagatattgctccagaggaaaagagcaccgttttcttaaagcgtttgcaggatgaatggtctaccgtgtatttaaacaaattgcctttgactgcttctgtgccatcttctctctctaccactactgatgctgcgaactcttcgttcataaactcttcaatatcatcgccggctccttcttcttcgtcctcgtcatcgttggtttcccgtggaccaatgcaatccatatcttcttcgccaacacctgccccttcttcagggtcatcgaaatctaaaaatgccgtcaaatccttacgctttgcggatgagatttatgtaaacgatacgtggtccgccgcggactattgcaggtgtgataatacctttttgaataatttctttaaaggaaagagccaagacattaccaatccttctacttttgtcggtaataatctctcatccacaaaaaatatatccaatattgaaatcaaaatggaggtgaatgagttcaaaagaaaggaaatgcgcgttcaccaggatagcgctaagtatacacattactacttataa

SEQ ID NO: 3332 - DNA, 1722 bp, Artificial Sequence
  Description of Artificial Sequence: Synthetic polynucleotide
atgttacagcagggttcttccagcaggaggagtttgcatggtaatgattttcacacgctcacttctccttctaggagagactctttgagtattcctagggctgtggacgctagatctgcgtctacgattgatcttttctacataccggatgctaccgtctccaggaggcactctactttggtggctaatagaagtgacaataatggtaatggcgcaccgatgcgccagtacaataaacctaactttgcttcctccagcacttcttctttgccttccactagaaatcgcccctctcgctacgataacatgaatatgaatatgaatatgaatatgaacatgaacatgaacatgaacatgaacatgaacaaccatactaccagtgatcacaatgcgcacccgcaatatcgttgtagaccaaacccgtccagacgccactccttaatgaccattcccgaaaagtactctggtagtcgctacagtctcagaagttccccgcctacctattctaatccacgtgttaggaaggaacttactcctttccaattacaaagaaagcagatgaaaagcgcttttcaattccccaacggtgaaaatttcacgccaagaaaccagatagcaaggcttccgccatcttctacttttcccgactctccttctagttcttctttgcctttgacccagactggaggcccatcttccgcagataacgattccattgccactggcacgaacaatcgttctcctcaacaaacgaaagctgctgatgctaatcagaaatctgaatccgagtctccaaaggcaattagatctaattctaaaaagatatctcgtttcttcaggaaaatctggtcttccaagagtagtaattctgcagattccgtagaagagaatagcaaaacaaagcagaaaaggaaaaatccggagagagttgtaccagaaccgataacgtcccttgaccaaccggttgaaattataaaacagagtttttccaccgttaacaatcacgaaacggctgtaccttctattaaggactctggcatagtacaagaattgacagcactcggagataataacaggataccagttcttccaccccctaggtctccaaacagacctacattatctgataaaagaactacaaagttatactactgtagtcaagattcttctaatgaagatattgctccagaggaaaagagcaccgttttcttaaagcgtttgcaggatgaatggtctaccgtgtatttaaacaaattgcctttgactgcttctgtgccatcttctctctctaccactactgatgctgcgaactcttctttcataaactcttctatatcttctccggctccttcttcttcttcctcttcttctttggtttcccgtggaccaatgcaatccatatcttcttctccaacacctgccccttcttctgggtcttctaaatctaaaaatgccgtcaaatccttacgctttgcggatgagatttatgtaaacgatacgtggtccgccgcggactattgcaggtgtgataatacctttttgaataatttctttaaaggaaagagccaagacattaccaatccttctacttttgtcggtaataatctctcttccacaaaaaatatatccaatattgaaatcaaaatggaggtgaatgagttcaaaagaaaggaaatgcgcgttcaccaggatagcgctaagtatacacattactacttatga

SEQ ID NO: 3333 - DNA, 429 bp, Saccharomyces cerevisiae
atggcagatcaagtaccagttacaacacaactaccaccaataaaacctgaacatgaggtaccacttgatgctggagggagtccagtaggtaacatgggtaccaactcgaataacaacaacgagctaggtgatgtattcgacagaataaagacacacttccctccggccaaggtaaagaaaataatgcagacagacgaggatataggaaaagtttcacaagccacgcccgtaatagcgggcaggtccctagagttttttatagcgttattggtgaaaaaaagcggggagatggcaagaggacaaggaaccaagagaataaccgccgaaatactaaaaaaaacaattttaaacgacgaaaaattcgatttcttaagggaaggtctatgcgtagaagaaggccaaacacaaccggaggaagagagtgcctga

SEQ ID NO: 3334 - DNA, 429 bp, Artificial Sequence
  Description of Artificial Sequence: Synthetic polynucleotide
atggcagatcaagtaccagttacaacacaattaccaccaataaaacctgaacatgaggtaccacttgatgctggagggagtccagtaggtaacatgggtaccaacagtaataacaacaacgagttaggtgatgtattcgacagaataaagacacacttccctccggccaaggtaaagaaaataatgcagacagacgaggatataggaaaagtttctcaagccacgcccgtaatagcgggcaggtccttggagttttttatagcgttattggtgaaaaaaagcggggagatggcaagaggacaaggaaccaagagaataaccgccgaaatattgaaaaaaacaattttaaacgacgaaaaattcgatttcttaagggaaggtctttgcgtagaagaaggccaaacacaaccggaggaagagagtgcctga

SEQ ID NO: 3335 - DNA, 1002 bp, Saccharomyces cerevisiae
atgagttttctttccaaactttcccaaatacgaaaatcaacgactgcatcaaaagcccaagtgcaagatccattacccaagaagaatgacgaagagtattccttgttacccaaaaattacataagagacgaagatcctgcagtaaaaagattgaaggagctgaggcggcaggaactgttaaagaatggtgctttggctaaaaaaagtggtgtaaaacggaaacgtggcacctcatctggatctgagaaaaagaaaatagaaaggaatgacgatgatgaaggtggccttggaattaggtttaagaggtctattggagcaagtcatgcgccactcaagccagttgtaaggaagaaacctgaacctatcaaaaagatgtcatttgaagagctaatgaaacaagcggaaaataatgagaaacagcccccaaaagttaagtcatcggaacccgtaactaaggaacgcccacattttaacaagccaggtttcaaaagttcaaaaagaccacaaaagaaagcatcccctggcgcaacattgcgtggagtatcttctggaggcaatagcataaaatcatcagactcacccaagcccgtcaagctcaacttgcccacaaatggatttgctcaacctaataggagattaaaagaaaagttagaatctagaaaacagaaatcaagataccaggatgactatgatgaagaagataacgatatggatgattttatagaagacgatgaagatgaaggttaccacagcaaatcgaaacacagcaatggtcccggatatgatcgtgacgaaatttgggctatgttcaatagaggcaagaagcggtcagaatacgattacgatgagcttgaggatgatgatatggaagcaaatgagatggaaatcttggaagaggaggaaatggcaagaaaaatggcaaggttagaggataaacgtgaggaagcttggttaaaaaagcatgaagaggagaagagacgccgtaagaagggcatacgctaa

SEQ ID NO: 3336 - DNA, 1002 bp, Artificial Sequence
  Description of Artificial Sequence: Synthetic polynucleotide
atgagttttctttccaaactttcccaaataagaaaatctacgactgcatccaaagcccaagtgcaagatccattacccaagaagaatgacgaagagtattccttgttacccaaaaattacataagagacgaagatcctgcagtaaaaagattgaaggagttgaggaggcaggaattattaaagaatggtgctttggctaaaaaaagtggtgtaaaaagaaaacgtggcacctcttctggatctgagaaaaagaaaatagaaaggaatgacgatgatgaaggtggccttggaattaggtttaagaggtctattggagcaagtcatgcgccactcaagccagttgtaaggaagaaacctgaacctatcaaaaagatgagttttgaagagttgatgaaacaagcggaaaataatgagaaacagcccccaaaagttaagtcttctgaacccgtaactaaggaacgcccacattttaacaagccaggtttcaaaagttctaaaagaccacaaaagaaagcatcccctggcgcaacattgcgtggagtatcttctggaggcaatagcataaaatcttctgactctcccaagcccgtcaagctcaacttgcccacaaatggatttgctcaacctaataggagattaaaagaaaagttagaatctagaaaacagaaatctagataccaggatgactatgatgaagaagataacgatatggatgattttatagaagacgatgaagatgaaggttaccacagcaaatctaaacacagcaatggtcccggatatgatcgtgacgaaatttgggctatgttcaatagaggcaagaagagaagtgaatacgattacgatgagcttgaggatgatgatatggaagcaaatgagatggaaatcttggaagaggaggaaatggcaagaaaaatggcaaggttagaggataaacgtgaggaagcttggttaaaaaagcatgaagaggagaagagacgccgtaagaagggcatacgctga

SEQ ID NO: 3337 - DNA, 2265 bp, Saccharomyces cerevisiae
atgaatgaagacctgcccaaggaatattttgaactaataaggaaggctcttaacgagaaagaggcagaaaaagcgcccctgagtagaagaagaagagtcagaaggaagaaccagcccctaccagatgccaagaagaagtttaaaacagggttgaatgaattgccacgagaaagcgttgttactgtaaacttagattcttcagatgatggcgtcgttacggtaccgacggatgatagtgtagaggaaatccagtcatctgaagaagattatgattcggaggaatttgaagacgtgacagatggaaatgaggtggccggtgtagaagatatatctgttgaaattaagccctctagtaaaaggaatagtgatgctagaaggacaagccgcaacgtttgttctaatgaagaacggaaaaggagaaaatatttccacatgttgtatctagtttgcttgatggttcatggatttatacgaaatgaatggattaacagcaagcgcttgtctagaaaactgagcaacttagttcctgagaaagtgtttgagctactgcatcctcagaaagatgaggaactcccacttaggagtactaggaaattattagatgggttgaagaaatgcatggagttatggcaaaaacactggaagatcactaaaaaatatgataatgtgggactttatatgagaacctggaaagaaattgaaatgagcgccaataacaaaagaaaattcaagacgttgaaaagatctgactttttaagggccgtcagtaaaggtcacggagatcctgatatttcagtgcaaggtttcgttgcgatgctcagggcttgtaatgttaacgcacgacttatcatgtcatgtcaaccgccagattttaccaatatgaagattgacacttctttgaatggaaacaatgcgtacaaagatatggtcaagtatccgattttttggtgtgaagtgtgggacaaattctctaagaaatggataactgttgacccagtaaatctcaaaaccattgaacaggtcagacttcattccaagttggcaccgaaaggcgtggcgtgctgcgaaagaaatatgttgaggtacgtgattgcttacgatcggaagtatggctgtagagatgtaactcgaagatatgcccaatggatgaactctaaagtaagaaaaagaagaattactaaagatgactttggtgagaaatggttcagaaaagtgataacagcacttcaccatagaaagagaaccaaaattgatgattacgaagatcaatatttttttcagagagatgaaagtgaaggcataccagattcggtgcaggatttgaaaaaccacccatattatgttttagaacaagatatcaaacagactcaaattgtaaagccaggatgtaaagagtgtggatatttaaaagtacatggaaaagttgggaaggttttgaaagtttatgcaaaaagagatattgcggatttgaaaagtgctagacaatggtacatgaacggccgaattttaaaaactggtagcaggtgtaaaaaggtgataaagaggacagttggaaggcctaagggcgaagcagaagaagaagatgaaagattatatagctttgaagacacagaattatacatccctccattagccagtgcgagcggtgaaataaccaagaatacatttggaaacatcgaagtttttgcaccaacgatgatacctggtaactgttgtttggttgagaatcctgtggcaattaaagctgctaggtttttgggggtggaatttgcacctgctgtaacttcttttaagtttgaacgcggcagtacagttaagccagttttaagtggcattgttgttgcaaagtggctcagagaagctattgaaaccgctattgatggaatagagtttattcaagaggatgataataggaaggaacatttgcttggtgctttggagagttggaatactttactgctaaaactgcgtattcgtagcaagctgaactccacatatggtaaaattgccgaggaagaacctaacgttacgaaggaacagaatattgcggacaatcacgataatacggagacttttatgggaggtgggttcctaccaggtatagcaaaccacgaagcaaggccgtatagtgaaccttcagagccagaagatagtttagattatgtttctgttgacaaagcggaggaaagtgctacagacgacgatgtcggggaggattattcggattttatgaaagaactagagatgtcagaggaatcagactga

SEQ ID NO: 3338 - DNA, 2265 bp, Artificial Sequence
  Description of Artificial Sequence: Synthetic polynucleotide
atgaatgaagacttgcccaaggaatattttgaattgataaggaaggctcttaacgagaaagaggcagaaaaagcgcccttgagtagaagaagaagagtcagaaggaagaaccagcccttaccagatgccaagaagaagtttaaaacagggttgaatgaattgccaagagaaagcgttgttactgtaaacttagattcttctgatgatggcgtcgttacggtaccgacggatgatagtgtagaggaaatccagtcttctgaagaagattatgattctgaggaatttgaagacgtgacagatggaaatgaggtggccggtgtagaagatatatctgttgaaattaagccctctagtaaaaggaatagtgatgctagaaggacaagccgcaacgtttgttctaatgaagaaagaaaaaggagaaaatatttccacatgttgtatttggtttgcttgatggttcatggatttataagaaatgaatggattaacagcaagcgcttgtctagaaaattaagcaacttagttcctgagaaagtgtttgagttattacatcctcagaaagatgaggaactcccacttaggagtactaggaaattattagatgggttgaagaaatgcatggagttatggcaaaaacactggaagatcactaaaaaatatgataatgtgggactttatatgagaacctggaaagaaattgaaatgagcgccaataacaaaagaaaattcaagacgttgaaaagatctgactttttaagggccgtcagtaaaggtcacggagatcctgatatttctgtgcaaggtttcgttgcgatgctcagggcttgtaatgttaacgcaagacttatcatgtcctgtcaaccgccagattttaccaatatgaagattgacacttctttgaatggaaacaatgcgtacaaagatatggtcaagtatccgattttttggtgtgaagtgtgggacaaattctctaagaaatggataactgttgacccagtaaatctcaaaaccattgaacaggtcagacttcattccaagttggcaccgaaaggcgtggcgtgctgcgaaagaaatatgttgaggtacgtgattgcttacgatagaaagtatggctgtagagatgtaactagaagatatgcccaatggatgaactctaaagtaagaaaaagaagaattactaaagatgactttggtgagaaatggttcagaaaagtgataacagcacttcaccatagaaagagaaccaaaattgatgattacgaagatcaatatttttttcagagagatgaaagtgaaggcataccagattctgtgcaggatttgaaaaaccacccatattatgttttagaacaagatatcaaacagactcaaattgtaaagccaggatgtaaagagtgtggatatttaaaagtacatggaaaagttgggaaggttttgaaagtttatgcaaaaagagatattgcggatttgaaaagtgctagacaatggtacatgaacggcagaattttaaaaactggtagcaggtgtaaaaaggtgataaagaggacagttggaaggcctaagggcgaagcagaagaagaagatgaaagattatatagctttgaagacacagaattatacatccctccattagccagtgcgagcggtgaaataaccaagaatacatttggaaacatcgaagtttttgcaccaacgatgatacctggtaactgttgtttggttgagaatcctgtggcaattaaagctgctaggtttttgggggtggaatttgcacctgctgtaacttcttttaagtttgaacgcggcagtacagttaagccagttttaagtggcattgttgttgcaaagtggctcagagaagctattgaaaccgctattgatggaatagagtttattcaagaggatgataataggaaggaacatttgcttggtgctttggagagttggaatactttattattgaaattacgtattcgtagcaagttgaactccacatatggtaaaattgccgaggaagaacctaacgttacgaaggaacagaatattgcggacaatcacgataatacggagacttttatgggaggtgggttcttaccaggtatagcaaaccacgaagcaaggccgtatagtgaaccttctgagccagaagatagtttagattatgtttctgttgacaaagcggaggaaagtgctacagacgacgatgtcggggaggattattctgattttatgaaagaattagagatgtctgaggaaagtgactga

SEQ ID NO: 3339 - DNA, 699 bp, Saccharomyces cerevisiae
atgactaatgacaacagtggtatctgggtcctaggctacggatctctgatttacaagcctccgtctcattacacgcatagaataccggcaataattcacggttttgctcgtcggttctggcaaagttccactgatcataggggtacacctgcaaacccaggaagagtggccacactaatcccgtatgaggatattataaggcaaactgccttcttgaagaatgtgaatttgtatagtgaaagtgcacctatccaggatcccgacgacttagtcaccataggggtagtgtattatataccaccagaacatgctcaagaggttagagagtatttgaacgtaagagaacaaaacgggtacactctacatgaggttgaggtgcatctagaaactaatcgggagcacgaggcagaattgggtgaagcattagaacagttgcctcggcacaacaaatcgggtaaacgggtactacttacttcggtgtacattggtacaatagataatgaggccttcgtcggaccagagaccgtggatgaaactgcgaaagtaattgccgtgtcgcatggacctagtggatctaactatgaataccttgcaaaactggagcaagcgctagcgcaaatgcccatcatgaaagagcgagggcgtattaccgatcattatctgactgctctattggagactgtaaataaatacaggtga

SEQ ID NO: 3340 - DNA, 699 bp, Artificial Sequence
  Description of Artificial Sequence: Synthetic polynucleotide
atgactaatgacaacagtggtatctgggtccttggctacggatctttgatttacaagcctccgtctcattacacgcatagaataccggcaataattcacggttttgctcgtagattctggcaaagttccactgatcataggggtacacctgcaaacccaggaagagtggccacattgatcccgtatgaggatattataaggcaaactgccttcttgaagaatgtgaatttgtatagtgaaagtgcacctatccaggatcccgacgacttagtcaccataggggtagtgtattatataccaccagaacatgctcaagaggttagagagtatttgaacgtaagagaacaaaacgggtacactttacatgaggttgaggtgcatttggaaactaatagagagcacgaggcagaattgggtgaagcattagaacagttgcctcgtcacaacaaatctggtaaaagagtattgcttacttctgtgtacattggtacaatagataatgaggccttcgtcggaccagagaccgtggatgaaactgcgaaagtaattgccgtgtctcatggacctagtggatctaactatgaataccttgcaaaattagagcaagcgttagcgcaaatgcccatcatgaaagagagagggcgtattaccgatcattatttgactgctttattggagactgtaaataaatacaggtga

SEQ ID NO: 3341 - DNA, 4407 bp, Saccharomyces cerevisiae
atggcagccaaggatatttctactgaagtgctgcaaaatcctgaactatatgggctgaggcggtcacatagagctgctgcgcatcaacaaaactacttcaacgatagcgatgatgaggacgatgaagataatattaaacagtcgaggaggaagagaatgaccacgattgaagacgacgaagacgaatttgaagatgaagaaggcgaagaagattctggagaggacgaagatgaggaagattttgaagaagatgatgattattatggctctcctataaaacaaaatcgatcaaaaccgaaatcaagaacaaaatcaaagtctaaatctaagccaaaatctcaatctgaaaagcaatctacagtgaaaataccaacaaggttttctaatcgtcaaaacaaaacggtaaattataacatcgattatagcgatgatgacctcttagaatctgaagatgactatggttccgaggaggctttatcagaggaaaatgtgcatgaagcatctgccaatcctcaaccagaggacttccacggtattgatattgttatcaatcacagactaaagacatctttggaagaaggaaaggtcttggaaaagactgttcctgacctcaataactgcaaggaaaattatgaattcttaatcaaatggacagatgaatctcatctccacaatacctgggaaacttatgaatccattggccaagtccgtggattgaagaggttggacaactattgtaagcaattcatcatcgaagatcaacaagtaagattagatccatacgttaccgccgaagatatagagatcatggacatggaacgtgaacgtaggcttgatgaatttgaggagttccacgtgccagaaaggattattgatagccaacgtgcttcgttggaagacggcacctcacaattacagtatttagttaaatggcgtcgtctaaattacgacgaggctacttgggagaatgccacagatatcgtgaaattggcacctgaacaagtgaaacattttcaaaacagagaaaactctaagatcctcccacaatattccagtaattatacttcacagagaccgcgttttgagaagttaagcgtgcaacctccgttcattaaaggtggggaattaagagattttcaactaactggtattaattggatggcatttttgtggtccaaaggtgataatggtatactggcagatgagatgggcctgggaaaaacggtccagactgtcgcctttatcagttggctgatatttgctcgtagacaaaacggacctcacatcattgtcgttcctttatcgacaatgcctgcctggttggatacttttgagaaatgggcgcctgatttgaattgtatatgctatatgggcaaccaaaaatcaagagataccattcgagaatatgaattttacaccaatccaagggcaaaagggaaaaaaacaatgaaatttaatgttttattaacaacatacgagtacatcttaaaggatcgtgctgaattaggaagtataaaatggcaatttatggccgttgacgaagctcatagactaaaaaatgctgaatcatccctttatgaatcattaaacagtttcaaggtcgccaaccgtatgttaatcacaggcacacctcttcagaataatattaaagagttagctgcgttggttaatttcctaatgcccggaaggtttacgattgatcaggagattgattttgaaaaccaagatgaagagcaagaagaatatattcatgatttacaccgaagaatacagccttttattcttcgtcggttgaagaaagacgtagaaaaatcacttccatcaaagacagagcgtattttaagagttgaattgtccgacgtacagactgagtactataaaaatattctgactaaaaactactctgctttaactgctggagctaaagggggtcatttctctttactgaatattatgaacgagttgaaaaaggcatcgaaccatccatatctcttcgataatgctgaagagcgcgtcttacagaaatttggggatggtaaaatgactcgagaaaacgtactaagaggtttgatcatgtcttcgggtaagatggttcttttagaccaattattgaccagattgaagaaagatgggcaccgcgtgttgattttttcacaaatggtcagaatgcttgacattttaggcgactatttatccattaaaggtattaacttccaaaggttagatggtacagtaccatctgctcaaagaaggatatctattgatcatttcaactctccggattcaaacgacttcgtatttttactttctactcgtgctggtggtttgggtatcaacttaatgaccgccgataccgttgtgatttttgattccgattggaatccgcaagccgatttacaagcaatggctagagctcatcgtattggccaaaaaaatcacgttatggtgtataggttggtttcaaaagacacagtagaggaagaggtattagaaagagcacggaagaaaatgattctggaatatgctattatttctcttggagtgacagatggtaacaaatacactaagaagaatgaaccaaatgccggtgaattatcggcaatcctgaagttcggtgcaggcaatatgttcactgccacagacaaccagaaaaaattggaggatcttaacttggatgatgttttgaatcatgcagaggatcacgttactactccagacttaggagagtcgcatcttggcggtgaagagtttttgaagcaattcgaagtgactgattataaagctgatatagattgggatgatatcattccagaagaagaactaaaaaaactccaagatgaagagcagaaacgcaaggatgaagaatatgttaaagaacaacttgaaatgatgaatagaagggataacgccctaaaaaaaataaaaaacagtgttaatggtgatgggaccgccgcaaactcagattctgacgacgatagtacttccagatcttctagaagaagagcaagagctaatgacatggactctattggtgaatcggaggtgagagctttgtataaagctattttaaaatttggcaacctaaaggagattttggacgagttgattgcagatggaaccctgccggtcaaatcatttgaaaaatacggtgaaacttacgatgaaatgatggaagcagctaaagactgtgtacacgaggaagagaaaaatagaaaagaaatcttggagaaacttgagaagcatgctaccgcctatagagcaaagctaaaaagcggtgaaataaaagcagagaaccaaccaaaggataatccgttgactagattatctttaaaaaaaagagaaaagaaagccgtccttttcaactttaaaggtgttaaatctttaaacgccgaatctttactaagtagagtggaggatttaaagtacttgaagaacttgataaattcaaactacaaagatgatccattaaagtttagcctaggcaacaacacacctaagcctgtacagaattggtcatctaattggacgaaagaggaagatgagaagctattgattggtgttttcaaatatggatatggttcctggacacaaataagagacgatccatttctaggcattactgataaaatattcttgaatgaagttcacaatccggtagcaaaaaagtcggcaagctcctctgatacaacaccaacaccctcaaagaaaggaaagggaataacgggttcttcaaaaaaagtacctggtgccattcacttgggcagaagagttgattatctattatccttcttaagaggaggcctaaatacaaagagtcccagtgctgacataggctcgaaaaaactccctactggtccttccaaaaagagacaaagaaaacctgctaatcacagcaaatccatgactccagaaattacaagttctgagcctgcaaatggcccgccaagcaaacgtatgaaagccctcccaaaaggtcctgccgccttaataaataacacgagattgtctccaaacagccccacgcccccattaaagtccaaggtttccagagataatggtacaaggcaatcaagcaaccccagtagcggcagcgctcacgaaaaagaatatgacagcatggatgaagaagactgtcgacacacaatgagtgcaatacgtacttctttgaagcgacttagaagaggcggcaaaagtcttgatcgtaaggaatgggccaaaattttgaagaccgaattaactacgattggtaatcatatcgaatcgcaaaagggctcatcgagaaaggcaagcccagaaaaatatcgcaagcacctttggtcttacagtgccaacttttggcctgccgacgttaagagtacaaagctgatggcaatgtacgacaagataacagagtctcaaaagaagtga

SEQ ID NO: 3342 - DNA, 4407 bp, Artificial Sequence
  Description of Artificial Sequence: Synthetic polynucleotide
atggcagccaaggatatttctactgaagtgttgcaaaatcctgaattgtatgggttaaggagaagccatagagctgctgcgcatcaacaaaactacttcaacgatagcgatgatgaggacgatgaagataatattaaacagtctaggaggaagagaatgaccacgattgaagacgacgaagacgaatttgaagatgaagaaggcgaagaagattctggagaggacgaagatgaggaagattttgaagaagatgatgattattatggctctcctataaaacaaaatagaagtaaaccgaaatctagaacaaaatccaagtctaaatctaagccaaaatctcaatctgaaaagcaatctacagtgaaaataccaacaaggttttctaatcgtcaaaacaaaacggtaaattataacatcgattatagcgatgatgacctcttagaatctgaagatgactatggttccgaggaggctttatctgaggaaaatgtgcatgaagcatctgccaatcctcaaccagaggacttccacggtattgatattgttatcaatcacagattaaagacatctttggaagaaggaaaggtcttggaaaagactgttcctgacctcaataactgcaaggaaaattatgaattcttaatcaaatggacagatgaatctcatctccacaatacctgggaaacttatgaatccattggccaagtccgtggattgaagaggttggacaactattgtaagcaattcatcatcgaagatcaacaagtaagattagatccatacgttaccgccgaagatatagagatcatggacatggaacgtgaacgtaggcttgatgaatttgaggagttccacgtgccagaaaggattattgatagccaacgtgcttctttggaagacggcacctctcaattacagtatttagttaaatggcgtcgtttgaattacgacgaggctacttgggagaatgccacagatatcgtgaaattggcacctgaacaagtgaaacattttcaaaacagagaaaactctaagatcctcccacaatattccagtaattatacttctcagagaccgcgttttgagaagttaagcgtgcaacctccgttcattaaaggtggggaattaagagattttcaattgactggtattaattggatggcatttttgtggtccaaaggtgataatggtatattggcagatgagatgggcttgggaaaaacggtccagactgtcgcctttatcagttggttgatatttgctcgtagacaaaacggacctcacatcattgtcgttcctttatctacaatgcctgcctggttggatacttttgagaaatgggcgcctgatttgaattgtatatgctatatgggcaaccaaaaatctagagataccattagagaatatgaattttacaccaatccaagggcaaaagggaaaaaaacaatgaaatttaatgttttattaacaacatacgagtacatcttaaaggatcgtgctgaattaggaagtataaaatggcaatttatggccgttgacgaagctcatagattgaaaaatgctgaatcttccctttatgaatctttaaacagtttcaaggtcgccaaccgtatgttaatcacaggcacacctcttcagaataatattaaagagttagctgcgttggttaatttcttaatgcccggaaggtttacgattgatcaggagattgattttgaaaaccaagatgaagagcaagaagaatatattcatgatttacacagaagaatacagccttttattcttcgtcgtttgaagaaagacgtagaaaaatctcttccatctaagacagagcgtattttaagagttgaattgtccgacgtacagactgagtactataaaaatattttgactaaaaactactctgctttaactgctggagctaaagggggtcatttctctttattgaatattatgaacgagttgaaaaaggcatctaaccatccatatctcttcgataatgctgaagagcgcgtcttacagaaatttggggatggtaaaatgactagagaaaacgtattaagaggtttgatcatgtcttctggtaagatggttcttttagaccaattattgaccagattgaagaaagatgggcaccgcgtgttgattttttctcaaatggtcagaatgcttgacattttaggcgactatttatccattaaaggtattaacttccaaaggttagatggtacagtaccatctgctcaaagaaggatatctattgatcatttcaactctccggattccaacgacttcgtatttttactttctactcgtgctggtggtttgggtatcaacttaatgaccgccgataccgttgtgatttttgattccgattggaatccgcaagccgatttacaagcaatggctagagctcatcgtattggccaaaaaaatcacgttatggtgtataggttggtttccaaagacacagtagaggaagaggtattagaaagagcaagaaagaaaatgattttggaatatgctattatttctcttggagtgacagatggtaacaaatacactaagaagaatgaaccaaatgccggtgaattaagtgcaatcttgaagttcggtgcaggcaatatgttcactgccacagacaaccagaaaaaattggaggatcttaacttggatgatgttttgaatcatgcagaggatcacgttactactccagacttaggagagtctcatcttggcggtgaagagtttttgaagcaattcgaagtgactgattataaagctgatatagattgggatgatatcattccagaagaagaattgaaaaaactccaagatgaagagcagaaacgcaaggatgaagaatatgttaaagaacaacttgaaatgatgaatagaagggataacgccttgaaaaaaataaaaaacagtgttaatggtgatgggaccgccgcaaacagtgattctgacgacgatagtacttccagatcttctagaagaagagcaagagctaatgacatggactctattggtgaaagtgaggtgagagctttgtataaagctattttaaaatttggcaacttgaaggagattttggacgagttgattgcagatggaaccttaccggtcaaaagttttgaaaaatacggtgaaacttacgatgaaatgatggaagcagctaaagactgtgtacacgaggaagagaaaaatagaaaagaaatcttggagaaacttgagaagcatgctaccgcctatagagcaaagttgaaaagcggtgaaataaaagcagagaaccaaccaaaggataatccgttgactagattatctttaaaaaaaagagaaaagaaagccgtccttttcaactttaaaggtgttaaatctttaaacgccgaatctttattaagtagagtggaggatttaaagtacttgaagaacttgataaatagcaactacaaagatgatccattaaagtttagcttgggcaacaacacacctaagcctgtacagaattggtcttctaattggacgaaagaggaagatgagaagttgttgattggtgttttcaaatatggatatggttcctggacacaaataagagacgatccatttttgggcattactgataaaatattcttgaatgaagttcacaatccggtagcaaaaaagtctgcaagctcctctgatacaacaccaacaccctccaagaaaggaaagggaataacgggttcttctaaaaaagtacctggtgccattcacttgggcagaagagttgattatcttttatccttcttaagaggaggcttgaatacaaagagtcccagtgctgacataggctctaaaaaactccctactggtccttccaaaaagagacaaagaaaacctgctaatcacagcaaatccatgactccagaaattacaagttctgagcctgcaaatggcccgccaagcaaacgtatgaaagccctcccaaaaggtcctgccgccttaataaataacacgagattgtctccaaacagccccacgcccccattaaagtccaaggtttccagagataatggtacaaggcaaagcagcaaccccagtagcggcagcgctcacgaaaaagaatatgacagcatggatgaagaagactgtcgtcacacaatgagtgcaatacgtacttctttgaagagacttagaagaggcggcaaaagtcttgatcgtaaggaatgggccaaaattttgaagaccgaattaactacgattggtaatcatatcgaatctcaaaagggctccagcagaaaggcaagcccagaaaaatatcgcaagcacctttggtcttacagtgccaacttttggcctgccgacgttaagagtacaaagttgatggcaatgtacgacaagataacagagtctcaaaagaagtga

SEQ ID NO: 3343 - DNA, 1734 bp, Saccharomyces cerevisiae
atggctgatattactgataagacagctgaacaattggaaaacttgaatattcaagatgaccaaaagcaagccgccactggttcagaaagccaatctgttgaaaactcttctgcatcattatatgttggtgacttagaaccttctgtttccgaagcccacttatatgatatcttctctccaatcggttcagtctcctccattcgtgtctgtcgtgatgccatcactaagacctctttgggctatgcttatgttaactttaacgaccatgaagccggcagaaaagcaattgagcaattgaactacactccaatcaagggtagattatgccgtattatgtggtctcaacgtgacccatcattgagaaagaagggttctggtaacatctttatcaagaacttgcaccctgatattgacaacaaggctttgtatgacactttctctgtgtttggtgacatcttgtccagcaagattgccaccgacgaaaacggaaaatccaagggttttgggtttgttcacttcgaagaagaaggtgctgccaaggaagctattgatgctttgaatggtatgctgttgaacggtcaagaaatttatgttgctcctcacttgtccagaaaggaacgtgactctcaattggaagagactaaggcacattacactaacctttatgtgaaaaacatcaactccgaaactactgacgaacaattccaagaattgtttgccaaatttggtccaattgtttctgcctctttggaaaaggatgctgatggaaaattgaagggtttcgggtttgttaactacgaaaagcatgaagacgctgtgaaagctgttgaagctttgaatgactctgaactaaatggagaaaagttatacgttggtcgtgcccaaaagaagaatgaacgtatgcatgtcttgaagaagcaatacgaagcttacagattggaaaaaatggccaagtaccaaggtgttaatttgtttgttaagaacttagatgacagcgttgatgacgaaaagttggaagaagaatttgctccatatggtactatcacttctgcaaaggttatgagaaccgaaaacggtaagtctaagggttttggttttgtttgtttctcaactccagaggaagctactaaggccattacagaaaagaaccaacaaattgttgctggtaagccattatacgttgccattgctcaaagaaaagacgtaagacgttctcaattggctcaacaaatccaagccagaaatcaaatgagataccagcaagctactgctgccgctgccgccgccgctgccggtatgccaggtcaattcatgcctccaatgttctatggtgttatgccaccaagaggtgttccattcaacggtccaaacccacaacaaatgaacccaatgggcggtatgccaaagaacggcatgccacctcaatttagaaatggtccggtttacggcgtccccccacaaggtggtttcccaagaaatgccaacgataacaaccaattttatcaacaaaagcaaagacaagctttgggtgaacaattatacaagaaggtttctgctaagacttcaaatgaagaagcagctggtaaaattactggtatgattttggatttgccacctcaagaggtcttcccattgttggaaagtgatgaattgttcgaacaacactacaaagaagcttctgctgcctatgagtctttcaaaaaggagcaagaacaacaaactgagcaagcttaa

SEQ ID NO: 3344 - DNA, 1734 bp, Artificial Sequence
  Description of Artificial Sequence: Synthetic polynucleotide
atggctgatattactgataagacagctgaacaattggaaaacttgaatattcaagatgaccaaaagcaagccgccactggttctgaaagccaatctgttgaaaactcttctgcatctttatatgttggtgacttagaaccttctgtttccgaagcccacttatatgatatcttctctccaatcggttctgtctcctccattcgtgtctgtcgtgatgccatcactaagacctctttgggctatgcttatgttaactttaacgaccatgaagccggcagaaaagcaattgagcaattgaactacactccaatcaagggtagattatgccgtattatgtggtctcaacgtgacccatctttgagaaagaagggttctggtaacatctttatcaagaacttgcaccctgatattgacaacaaggctttgtatgacactttctctgtgtttggtgacatcttgtccagcaagattgccaccgacgaaaacggaaaatccaagggttttgggtttgttcacttcgaagaagaaggtgctgccaaggaagctattgatgctttgaatggtatgcttttgaacggtcaagaaatttatgttgctcctcacttgtccagaaaggaacgtgactctcaattggaagagactaaggcacattacactaacctttatgtgaaaaacatcaactccgaaactactgacgaacaattccaagaattgtttgccaaatttggtccaattgtttctgcctctttggaaaaggatgctgatggaaaattgaagggtttcgggtttgttaactacgaaaagcatgaagacgctgtgaaagctgttgaagctttgaatgactctgaattgaatggagaaaagttatacgttggtcgtgcccaaaagaagaatgaacgtatgcatgtcttgaagaagcaatacgaagcttacagattggaaaaaatggccaagtaccaaggtgttaatttgtttgttaagaacttagatgacagcgttgatgacgaaaagttggaagaagaatttgctccatatggtactatcacttctgcaaaggttatgagaaccgaaaacggtaagtctaagggttttggttttgtttgtttctctactccagaggaagctactaaggccattacagaaaagaaccaacaaattgttgctggtaagccattatacgttgccattgctcaaagaaaagacgtaagacgttctcaattggctcaacaaatccaagccagaaatcaaatgagataccagcaagctactgctgccgctgccgccgccgctgccggtatgccaggtcaattcatgcctccaatgttctatggtgttatgccaccaagaggtgttccattcaacggtccaaacccacaacaaatgaacccaatgggcggtatgccaaagaacggcatgccacctcaatttagaaatggtccggtttacggcgtccccccacaaggtggtttcccaagaaatgccaacgataacaaccaattttatcaacaaaagcaaagacaagctttgggtgaacaattatacaagaaggtttctgctaagacttccaatgaagaagcagctggtaaaattactggtatgattttggatttgccacctcaagaggtcttcccattgttggaaagtgatgaattgttcgaacaacactacaaagaagcttctgctgcctatgagtctttcaaaaaggagcaagaacaacaaactgagcaagcttga

SEQ ID NO: 3345 - DNA, 4716 bp, Saccharomyces cerevisiae
atgtctggaacttttcatggcgatgggcatgctcccatgtcgccctttgaagatacatttcaatttgaagataatagcagtaatgaagatacacatattgcacctacccattttgatgatggtgcaacaagcaacaaatacagccggccacaggtcagcttcaatgatgaaacacccaaaaataaacgtgaagatgcagaagaattcacatttaacgatgacacagaatatgacaatcattcctttcagccaacaccgaaacttaataatggatctgggacgtttgatgatgtggaattagacaatgatagtggtgaaccgcacactaactacgatggtatgaaaagattccggatgggtacaaaaaggaataaaaaaggaaacccaataatgggaagatctaagaccttgaaatgggctaggaagaacattccaaacccatttgaagactttacgaaggatgatattgaccctggtgccataaatcgtgcgcaagaactaaggactgtgtattacaatatgcccttaccaaaagatatgatagatgaagaaggcaaccccattatgcagtatcctcgtaataaaatcagaactaccaaatataccccgttaacattcttaccaaaaaacattctatttcagtttcataatttcgccaacgtttatttcttagttttaataattttaggtgcatttcaaatttttggtgtcacgaaccctggtttaagtgcggttccgttagttgtcattgttataatcactgcgatcaaggatgctattgaagactcaagaagaaccgtcctagatttagaggtgaataataccaagacacatattttagaaggtgttgagaacgaaaatgtctcaaccgataatatttcattgtggagaaggtttaagaaagcaaactctagactccttttcaagtttatacaatattgtaaagaacatttaactgaagagggcaaaaagaagagaatgcagagaaagcgtcatgaactaagagtacaaaaaactgttggaacgagtggacccagatcctctctagactccattgacagttacagagtatctgcagattatggccgtccttcattggattatgataatttggaacaaggggccggtgaagccaatatagttgatagatccctaccacccagaactgattgtaaatttgccaagaattattggaaaggtgtcaaggttggtgatattgttcgtatccataacaatgatgaaatccctgctgacattatcttactttcaacgtcggatacagatggtgcctgctacgtagaaactaaaaatttggatggtgaaacaaacttaaaggtacgccaatccttgaagtgtaccaatactataagaacgtcaaaagatattgctagaacaaaattctggatcgaaagtgaagggccccactcaaatttgtacacttatcaaggtaatatgaaatggagaaatcttgcagatggcgagatacgaaatgagccaattactattaataacgttctgcttcgtggttgcactcttagaaatactaagtgggcaatgggtgttgtaatgtttaccggtggtgacacaaaaatcatgttaaactctggcattacacccaccaagaagtccaggatttcaagagaactaaacttctctgtggtgataaatttcgtgctacttttcatcttatgttttgtttctggtattgcaaatggtgtatattacgacaaaaaaggcagatcacggttttcctatgaatttggaacaattgctgggtcagcggcgacaaacggtttcgtctcattttgggttgctgttattctttaccaatctttagtcccaatctctttgtacatttctgtggagatcatcaaaactgcacaagcggccttcatttacggagacgttttactctacaatgccaaattggattatccttgtacaccaaaatcctggaatatttctgacgatttaggtcaagtggaatatatattttctgataaaacaggtacattaactcaaaatgtaatggagtttaaaaaatgtactatcaatggtgtttcatatggaagagcttacaccgaagcgttagcgggattaagaaaaagacaaggtatcgacgtcgaaaccgaaggtaggcgtgagaaggccgaaattgccaaggatagggatacaatgatcgatgaactgagagctttatcaggaaattcacaattttatcccgaagaagttacctttgtatcaaaggagttcgttcgcgatttgaaaggggctagtggtgaagtacaacaaagatgctgtgagcactttatgttagcattagctttatgtcactccgtccttgtagaagcaaacccggacaatccaaaaaaactggatttaaaagctcaatctccagacgaagcagcgttagtagccacagctagagatgtaggattcagttttgttggaaaaaccaaaaaagggttgataattgaaatgcaaggtattcaaaaagaatttgagattctaaatattttggagtttaattcatcgagaaaaagaatgtcctgtattgtcaaaattccgggtctgaacccaggggacgagcctagagcacttttaatttgtaaaggtgcagattccattatatactcaagattaagtcgccagagtggtagcaatagtgaagctattttggaaaaaactgctttgcatttagagcagtacgctactgaaggtttaagaacgttatgcatagctcaaagggagttaagttggtctgaatacgaaaaatggaacgaaaagtacgatattgctgctgcatcattagcaaacagagaggatgaattagaagttgttgcagattccattgaacgcgaattgatattattgggcggtacagctatcgaagatcgtttacaagatggtgttccggattgtatagagttgcttgcagaggcaggaattaaattatgggttcttacgggtgataaagttgaaacagctataaacattggattttcttgcaaccttttgaataatgaaatggaattgttagttattaaaacaactggtgatgacgtgaaagaattcggatcagaaccaagtgaaattgtggatgctttactctccaaatacttgaaggagtatttcaacttaaccggttcagaagaagagatttttgaagctaaaaaggatcacgaatttccgaagggtaattacgccatcgttatcgatggtgatgctttgaaattggcgctatatggtgaagatataagaagaaagtttcttttactctgcaagaattgtagagctgtcttatgctgtagagtatctccatctcaaaaagcagccgttgttaagttagtcaaggattctctagatgtcatgacactagccatcggcgatggttccaacgacgtcgccatgattcaatctgcggatgttggtattggtattgccggtgaagaaggtcgacaagctgttatgtgctcagactacgccattggacaattcagatatttggctagattggtcctcgttcacggtaggtggtcttataagagactggcagaaatgattcctgagtttttttacaaaaacatgatttttgctttggcattgttctggtatggtatctataatgattttgatgggtcttacctgtatgaatacacatacatgatgttctataatttggcatttacatccctaccagtcatcttcttaggtattctggaccaggacgtgaatgacacaatatcattagtggtccctcagttataccgtgttggaattttaaggaaagaatggaaccaaagaaagttcttatggtatatgttggacggattatatcagtctattatctgtttttttttcccttacttggtttatcacaaaaatatgatagttacgagcaatgggttaggattggatcatcgttattttgtcggtgtttatgtgaccactattgctgtaatttcgtgtaacacatatgttttattacaccaatatagatgggattggtttagtggattattcattgcactgtcttgcctcgtagtttttgcatggacgggaatatggtcttctgcgatagctagtagagaatttttcaaagctgcagcgcgtatctatggagcaccttcattttgggctgttttctttgttgccgtgctgttctgcttactgccccgtttcacatatgacagttttcaaaaatttttctacccaactgatgtggaaatagtaagagagatgtggcaacatggccatttcgatcattatcctcctggttacgatccaacagatcccaacagacccaaggtcacaaaagctgggcaacacggagagaagattatagaaggcatagcactttccgacaacttaggaggatcgaactattcaagggatagtgttgtcacagaggagattccaatgactttcatgcacggtgaagatggaagtcctagcggatatcagaagcaagaaacctggatgacttcacccaaggaaacacaagatcttcttcaatcgccccaatttcagcaggcccaaacgttcggaagaggcccatcaaccaacgtcaggtcatccttggaccgcacaagagaacagatgatcgccactaaccaactagataaccgctactctgtggaaagagcgagaacatctctagatctaccaggcgtaactaacgcagcctccttaatcggaacacaacagaacaattaa

SEQ ID NO: 3346 - DNA, 4716 bp, Artificial Sequence
  Description of Artificial Sequence: Synthetic polynucleotide
atgtctggaacttttcatggcgatgggcatgctcccatgtctccctttgaagatacatttcaatttgaagataatagcagtaatgaagatacacatattgcacctacccattttgatgatggtgcaacaagcaacaaatacagcagaccacaggtcagcttcaatgatgaaacacccaaaaataaacgtgaagatgcagaagaattcacatttaacgatgacacagaatatgacaatcattcctttcagccaacaccgaaacttaataatggatctgggacgtttgatgatgtggaattagacaatgatagtggtgaaccgcacactaactacgatggtatgaaaagattccgcatgggtacaaaaaggaataaaaaaggaaacccaataatgggaagatctaagaccttgaaatgggctaggaagaacattccaaacccatttgaagactttacgaaggatgatattgaccctggtgccataaatcgtgcgcaagaattgaggactgtgtattacaatatgcccttaccaaaagatatgatagatgaagaaggcaaccccattatgcagtatcctcgtaataaaatcagaactaccaaatataccccgttaacattcttaccaaaaaacattttatttcagtttcataatttcgccaacgtttatttcttagttttaataattttaggtgcatttcaaatttttggtgtcacgaaccctggtttaagtgcggttccgttagttgtcattgttataatcactgcgatcaaggatgctattgaagacagtagaagaaccgtcttggatttagaggtgaataataccaagacacatattttagaaggtgttgagaacgaaaatgtctccaccgataatatttctttgtggagaaggtttaagaaagcaaactctagactccttttcaagtttatacaatattgtaaagaacatttaactgaagagggcaaaaagaagagaatgcagagaaagcgtcatgaattgagagtacaaaaaactgttggaacgagtggacccagatcctctttggactccattgacagttacagagtatctgcagattatggccgtccttctttggattatgataatttggaacaaggggccggtgaagccaatatagttgatagatccttgccacccagaactgattgtaaatttgccaagaattattggaaaggtgtcaaggttggtgatattgttcgtatccataacaatgatgaaatccctgctgacattatcttactttctacgtctgatacagatggtgcctgctacgtagaaactaaaaatttggatggtgaaacaaacttaaaggtacgccaatccttgaagtgtaccaatactataagaacgtccaaagatattgctagaacaaaattctggatcgaaagtgaagggccccactctaatttgtacacttatcaaggtaatatgaaatggagaaatcttgcagatggcgagataagaaatgagccaattactattaataacgttttacttcgtggttgcactcttagaaatactaagtgggcaatgggtgttgtaatgtttaccggtggtgacacaaaaatcatgttaaactctggcattacacccaccaagaagtccaggatttctagagaattgaacttctctgtggtgataaatttcgtgttgcttttcatcttatgttttgtttctggtattgcaaatggtgtatattacgacaaaaaaggcagatctagattttcctatgaatttggaacaattgctgggtctgcggcgacaaacggtttcgtcagtttttgggttgctgttattctttaccaatctttagtcccaatctctttgtacatttctgtggagatcatcaaaactgcacaagcggccttcatttacggagacgttttactctacaatgccaaattggattatccttgtacaccaaaatcctggaatatttctgacgatttaggtcaagtggaatatatattttctgataaaacaggtacattaactcaaaatgtaatggagtttaaaaaatgtactatcaatggtgtttcttatggaagagcttacaccgaagcgttagcgggattaagaaaaagacaaggtatcgacgtcgaaaccgaaggtaggcgtgagaaggccgaaattgccaaggatagggatacaatgatcgatgaattgagagctttatctggaaattctcaattttatcccgaagaagttacctttgtatccaaggagttcgttcgcgatttgaaaggggctagtggtgaagtacaacaaagatgctgtgagcactttatgttagcattagctttatgtcactccgtccttgtagaagcaaacccggacaatccaaaaaaattggatttaaaagctcaatctccagacgaagcagcgttagtagccacagctagagatgtaggattcagttttgttggaaaaaccaaaaaagggttgataattgaaatgcaaggtattcaaaaagaatttgagattttgaatattttggagtttaattcttctagaaaaagaatgtcctgtattgtcaaaattccgggtttgaacccaggggacgagcctagagcacttttaatttgtaaaggtgcagattccattatatactctagattaagtcgccagagtggtagcaatagtgaagctattttggaaaaaactgctttgcatttagagcagtacgctactgaaggtttaagaacgttatgcatagctcaaagggagttaagttggtctgaatacgaaaaatggaacgaaaagtacgatattgctgctgcatctttagcaaacagagaggatgaattagaagttgttgcagattccattgaacgcgaattgatattattgggcggtacagctatcgaagatcgtttacaagatggtgttccggattgtatagagttgcttgcagaggcaggaattaaattatgggttcttacgggtgataaagttgaaacagctataaacattggattttcttgcaaccttttgaataatgaaatggaattgttagttattaaaacaactggtgatgacgtgaaagaattcggatctgaaccaagtgaaattgtggatgctttactctccaaatacttgaaggagtatttcaacttaaccggttctgaagaagagatttttgaagctaaaaaggatcacgaatttccgaagggtaattacgccatcgttatcgatggtgatgctttgaaattggcgttatatggtgaagatataagaagaaagtttcttttactctgcaagaattgtagagctgtcttatgctgtagagtatctccatctcaaaaagcagccgttgttaagttagtcaaggattctttagatgtcatgacattggccatcggcgatggttccaacgacgtcgccatgattcaatctgcggatgttggtattggtattgccggtgaagaaggtagacaagctgttatgtgctctgactacgccattggacaattcagatatttggctagattggtcctcgttcacggtaggtggtcttataagagattagcagaaatgattcctgagtttttttacaaaaacatgatttttgctttggcattgttctggtatggtatctataatgattttgatgggtcttacttatatgaatacacatacatgatgttctataatttggcatttacatccttgccagtcatcttcttaggtattttggaccaggacgtgaatgacacaatatctttagtggtccctcagttataccgtgttggaattttaaggaaagaatggaaccaaagaaagttcttatggtatatgttggacggattatatcagtctattatctgtttttttttcccttacttggtttatcacaaaaatatgatagttacgagcaatgggttaggattggatcatcgttattttgtcggtgtttatgtgaccactattgctgtaattagttgtaacacatatgttttattacaccaatatagatgggattggtttagtggattattcattgcattatcttgcctcgtagtttttgcatggacgggaatatggtcttctgcgatagctagtagagaatttttcaaagctgcagcgcgtatctatggagcaccttctttttgggctgttttctttgttgccgtgcttttctgcttattgccccgtttcacatatgacagttttcaaaaatttttctacccaactgatgtggaaatagtaagagagatgtggcaacatggccatttcgatcattatcctcctggttacgatccaacagatcccaacagacccaaggtcacaaaagctgggcaacacggagagaagattatagaaggcatagcactttccgacaacttaggaggaagtaactattctagggatagtgttgtcacagaggagattccaatgactttcatgcacggtgaagatggaagtcctagcggatatcagaagcaagaaacctggatgacttctcccaaggaaacacaagatcttcttcaatctccccaatttcagcaggcccaaacgttcggaagaggcccatctaccaacgtcaggtcttccttggaccgcacaagagaacagatgatcgccactaaccaattggataaccgctactctgtggaaagagcgagaacatctttagatttaccaggcgtaactaacgcagcctccttaatcggaacacaacagaacaattga

SEQ ID NO: 3347 - DNA, 2556 bp, Saccharomyces cerevisiae
atgccgaagaatagtcaccaccatcgttccagttcggttaattccacaaagagtcgttctacggaatctacgaataaatggaaaattccgcactattatcgcagatccgctagcggcagcacacaagcttcgccggacaggaactcctcaacaggctcatgtagcactccagtattacctactatgaatgttatgtctagcccgaaaaaagttttgctagaggatcccagagacaaccatactaaggcgaagaagagtagtagaaagaaatcaggtgaaatggtcttcgtcaattatactgtacaggacacggctaacgaaaatgatactgacttgcaaacccagccggtttctgtgccagcaccaaaggcgaaattaaagaagaaatcctccaaaaggagaatgctgaagatatttggatcgtcaaagaacgaacacatagaggacatcgttgaagagcaaccaatggtgcttcaaatggattcagaatctaaacccctttcgggaacccctatctcagaaagcggaatcgacgcctcgtcactaacaaccaaaagatcttataactcgttcttaaaacacaataggctaaacggtaaaactccgttctctggaaacttgtcctttccatcattaaacatgatgggtaacactactgatctgcctattgacaataacgatttttgttccgagaaagaagtcgttccgaaatcaactcatgatccttcactagcaaaaccgccatcaaggttcactgaaagcgaaacaaattctactcccaacttatcaagtatacctctcatgaacacaaaaaatacaagattgaagtacaataaagtggcgcctcagagttcagaccgacaaaagtcacaggaaagtgggctatatcattctaccgaatcattcaacttcaaagatcaaaactacagtaacaataaatcctctttaagtctgaactccgatttaagtacaccccactttgcaaagcattcacctgattcaccaagaacttcaagatctttcaactgcggagactcacaaagtaaagttaaattaccggaagaaaatgacgcttctattgcatttagtaagatgtttactagaaaacgagccaacactggcgggtccacgtgttcgctagcctcacccactattgcacaaactattcagcaatcaaatataaaagttaataaattgccaactcagcgaaccacttcagttggctcattatcatccatgtcaaatcgttattcaccaataagagttgcatcgccaggaagagcaagatccgcaactcgtgggtcttccctttatagattatccagagaccttaattctttaccaagcgtcactgatctaccagaaatggatagtacaaccccagttaacgaaatattcttggatggccaaccacagcataaaagtggcagtgtcaaaggagggcataggaagaaacaagaatctatctctgatgctcaaagaattcaacattctaattcgtacattacaacaccttcatcttctctggtgactcctccttactacatgacaggttacacattaccaagttctgcatctgcttcttcaactccaaatgtgcttgaaacacacaatatgaactttgttccaagtaccagtactgttacaagttatcgcccatctagcaatttttcctcatttgacaaagaatacagtaacgaaaacgacgctagtggggaattctctgctttcaatactccaatggagaatataccggcactaaaaggtatacctagatccacgttagaagaaaatgaagaagaggatgtcctagtacaagatattccgaatacggcacacttccaaagaagggatattatggggatggatactcacagaaaggatgacagtttagattttaactctttgatgccacacggtagtacaactagtagcagcatcgtagattctgttatgacgaactcaatatccactacaacaagcaacgcgaccggaaactactttcaagatcaagataagtatacattggtaaatacgggattgggattgagtgatgcaaacctcgatcattttattagatctcaatggaaacacgcttctcgatcagaatccaataataataccggaaatcgcgtttcttacagtggctcaacaccaaacaatgttgatacaacaaagactaatttgcaagtgtataccgagttcgattttgaaaacccagagtcgtttttccatgagcaatcgaagctactaggtgagatgggccacagcaataacaacagcaacagcgccatcaacatgaatgaacccaagtctgcggatacatacattggaaatatatctccggatacttcagcaactgtttcattaggcgacctgatgggctcaaacgtttcaaacaacagtgaaagaaatttttacgatggtcatactttcgttccacagtatcaggcgaactcatctgtggaaaactcaaataatcaaaatgcagcaccaattgcaaataacgacattgataataatttacagtctttttattttgataatagcaactaa

SEQ ID NO: 3348 - DNA, 2556 bp, Artificial Sequence
  Description of Artificial Sequence: Synthetic polynucleotide
atgccgaagaatagtcaccaccatcgttccagttctgttaattccacaaagagtcgttctacggaatctacgaataaatggaaaattccgcactattatcgcagatccgctagcggcagcacacaagcttctccggacaggaactcctctacaggctcttgtagcactccagtattacctactatgaatgttatgtctagcccgaaaaaagttttgttggaggatcccagagacaaccatactaaggcgaagaagagtagtagaaagaaatctggtgaaatggtcttcgtcaattatactgtacaggacacggctaacgaaaatgatactgacttgcaaacccagccggtttctgtgccagcaccaaaggcgaaattaaagaagaaatcctccaaaaggagaatgttgaagatatttggaagttccaagaacgaacacatagaggacatcgttgaagagcaaccaatggtgcttcaaatggattctgaatctaaacccctttctggaacccctatcagtgaaagcggaatcgacgcctcttctttaacaaccaaaagatcttataactctttcttaaaacacaataggttaaacggtaaaactccgttctctggaaacttgtcctttccatctttaaacatgatgggtaacactactgatttacctattgacaataacgatttttgttccgagaaagaagtcgttccgaaatctactcatgatccttctttggcaaaaccgccatctaggttcactgaaagcgaaacaaattctactcccaacttatccagtatacctctcatgaacacaaaaaatacaagattgaagtacaataaagtggcgcctcagagtagtgacagacaaaagtctcaggaaagtgggttatatcattctaccgaatctttcaacttcaaagatcaaaactacagtaacaataaatcctctttaagtttgaactccgatttaagtacaccccactttgcaaagcattctcctgattctccaagaacttccagatctttcaactgcggagactctcaaagtaaagttaaattaccggaagaaaatgacgcttctattgcatttagtaagatgtttactagaaaaagagccaacactggcgggtccacgtgttctttggcctctcccactattgcacaaactattcagcaaagcaatataaaagttaataaattgccaactcagcgtaccacttctgttggctctttatcttccatgagtaatcgttattctccaataagagttgcatctccaggaagagcaagatccgcaactcgtgggtcttccctttatagattatccagagaccttaattctttaccaagcgtcactgatttaccagaaatggatagtacaaccccagttaacgaaatattcttggatggccaaccacagcataaaagtggcagtgtcaaaggagggcataggaagaaacaagaatctatctctgatgctcaaagaattcaacattctaattcttacattacaacaccttcttcttctttggtgactcctccttactacatgacaggttacacattaccaagttctgcatctgcttcttctactccaaatgtgcttgaaacacacaatatgaactttgttccaagtaccagtactgttacaagttatcgcccatctagcaatttttcctcttttgacaaagaatacagtaacgaaaacgacgctagtggggaattctctgctttcaatactccaatggagaatataccggcattgaaaggtatacctagatccacgttagaagaaaatgaagaagaggatgtcttggtacaagatattccgaatacggcacacttccaaagaagggatattatggggatggatactcacagaaaggatgacagtttagattttaactctttgatgccacacggtagtacaactagtagcagcatcgtagattctgttatgacgaacagcatatccactacaacaagcaacgcgaccggaaactactttcaagatcaagataagtatacattggtaaatacgggattgggattgagtgatgcaaacctcgatcattttattagatctcaatggaaacacgcttctagaagtgaatccaataataataccggaaatcgcgtttcttacagtggctctacaccaaacaatgttgatacaacaaagactaatttgcaagtgtataccgagttcgattttgaaaacccagagtcttttttccatgagcaatccaagttattgggtgagatgggccacagcaataacaacagcaacagcgccatcaacatgaatgaacccaagtctgcggatacatacattggaaatatatctccggatacttctgcaactgtttctttaggcgacttgatgggctctaacgtttctaacaacagtgaaagaaatttttacgatggtcatactttcgttccacagtatcaggcgaactcttctgtggaaaacagtaataatcaaaatgcagcaccaattgcaaataacgacattgataataatttacagtctttttattttgataatagcaactga

SEQ ID NO: 3349 - DNA, 1641 bp, Saccharomyces cerevisiae
atgctacggtctactatatctctactgatgaatagtgctgctcagaaaacgatgacgaattctaattttgttctaaatgcacccaaaatcaccttaaccaaagtggaacagaacatctgtaacttgctgaacgattatacagacttgtacaatcaaaagtaccacaataagcctgagccattgactcttcggatcacgggcggatgggtgcgtgacaagcttctgggacaaggttctcacgacttggatattgccatcaatgtgatgtcaggtgagcaatttgctactggtttgaacgagtatttgcaacaacattacgccaaatatggagccaagcctcataatatccacaagattgacaagaatcccgagaaatccaagcatctggaaactgccactactaagctctttggcgttgaagtggattttgtcaatttaagatctgaaaagtatactgaactttccaggatacctaaagtgtgctttggcacacccgaggaagacgctttaagaagggatgctacattgaacgctcttttctataacattcataaaggtgaagtggaagatttcaccaagagaggtctgcaagatctaaaagatggcgttctccgtactccgcttcctgcaaaacaaacatttttggatgatcccttgagggttttgaggttgatccgttttgcttctagattcaactttaccatagatccggaagtgatggctgaaatgggcgatcctcagattaatgttgcattcaattcaaaaatttctagagagcgagttggtgtggagatggagaaaatattagtaggaccaacccctttattggctttgcagctgattcaaagggctcatcttgaaaatgttatctttttttggcataatgatagctccgtcgtaaaattcaacgaagagaattgtcaagatatggacaaaattaatcatgtatacaatgataacatactaaactcacacttgaaaagttttattgaattatatccaatgtttttagagaagcttcctatcttaagggaaaaaattggtcgttcgccaggatttcagcaaaattttatattgagtgcgatcctgtcccccatggctaatttacaaataatcgggaacccaaagaagaaaattaacaacctggtttcggtgacagaaagcattgtgaaggaaggattgaagctgagtaaaaatgatgcagcagttattgccaagaccgtagattcaatatgttcatatgaggaaatacttgctaagtttgcagatcgttcccagctaaaaaaatccgaaatcggtatatttctacggaactttaatggcgaatgggaaacagcacattttgcatctctatcagatgcatttttaaagattcccaagcttgaaactaaaaaaattgaattacttttccaaaattacaatgaattttattcttacatatttgacaataatttgaataattgtcatgaactaaaaccaatagtggacggaaaacaaatggcaaaactacttcaaatgaagccaggtccatggctgggtaaaattaataacgaagcgattaggtggcagtttgataatcctacagggactgatcaagaattaataactcatttaaaagccatactaccaaaatacctgtag

SEQ ID NO: 3350 - DNA, 1641 bp, Artificial Sequence
  Description of Artificial Sequence: Synthetic polynucleotide
atgttgagatctactatatctttattgatgaatagtgctgctcagaaaacgatgacgaattctaattttgttttgaatgcacccaaaatcaccttaaccaaagtggaacagaacatctgtaacttgttgaacgattatacagacttgtacaatcaaaagtaccacaataagcctgagccattgactcttcgtatcacgggcggatgggtgcgtgacaagcttttgggacaaggttctcacgacttggatattgccatcaatgtgatgagtggtgagcaatttgctactggtttgaacgagtatttgcaacaacattacgccaaatatggagccaagcctcataatatccacaagattgacaagaatcccgagaaatccaagcatttggaaactgccactactaagctctttggcgttgaagtggattttgtcaatttaagatctgaaaagtatactgaactttccaggatacctaaagtgtgctttggcacacccgaggaagacgctttaagaagggatgctacattgaacgctcttttctataacattcataaaggtgaagtggaagatttcaccaagagaggtttacaagatttgaaagatggcgttctccgtactccgcttcctgcaaaacaaacatttttggatgatcccttgagggttttgaggttgatccgttttgcttctagattcaactttaccatagatccggaagtgatggctgaaatgggcgatcctcagattaatgttgcattcaattctaaaatttctagagagagagttggtgtggagatggagaaaatattagtaggaccaacccctttattggctttgcagttgattcaaagggctcatcttgaaaatgttatctttttttggcataatgatagctccgtcgtaaaattcaacgaagagaattgtcaagatatggacaaaattaatcatgtatacaatgataacatattaaactctcacttgaaaagttttattgaattatatccaatgtttttagagaagcttcctatcttaagggaaaaaattggtcgttctccaggatttcagcaaaattttatattgagtgcgatcttgtcccccatggctaatttacaaataatcgggaacccaaagaagaaaattaacaacttggtttctgtgacagaaagcattgtgaaggaaggattgaagttgagtaaaaatgatgcagcagttattgccaagaccgtagattctatatgttcttatgaggaaatacttgctaagtttgcagatcgttcccagttgaaaaaatccgaaatcggtatatttttaagaaactttaatggcgaatgggaaacagcacattttgcatctttaagtgatgcatttttaaagattcccaagcttgaaactaaaaaaattgaattacttttccaaaattacaatgaattttattcttacatatttgacaataatttgaataattgtcatgaattgaaaccaatagtggacggaaaacaaatggcaaaattacttcaaatgaagccaggtccatggttaggtaaaattaataacgaagcgattaggtggcagtttgataatcctacagggactgatcaagaattaataactcatttaaaagccatattgccaaaatacttgtga

SEQ ID NO: 3351 - DNA, 2391 bp, Saccharomyces cerevisiae
atgacgaaactaatcgctccttcagaaatcgtgggcggagtgcccgtcttcaaacccacatacgagcaattcgaagatttctatgcatactgcaaggccataaacaaatatggcatgaaaagtggtgttgtgaaagtaatcccacctaaagaatggaaagacaaattagatctgccttattctgcggaaacgctccaaaagatcaagattaaatcacctattcagcagcatatttctggtaataaaggtctttttatggtgcagaacgtggagaaaaacaagacctataacattatacagtggaaagatctttctaaggactatgtgcctccggaggatcctaaagcaagacgtaattctaggaaaggctccgtttccaaatccacgaagttgaaactgaaaaattttgaatcgtcttttaatattgatgattttgaacagttcaggacggagtatacaatagatttatctgacttccaaaatacggagagattaaagttcttggaagagtattattggaaaacgctaaattttactacgcctatgtacggcgcagatacaccaggatcaatctttcctgaagggctgaacgtttggaatgttgccaaactaccgaacatcttggaccatatggaaacaaaggttcctggggtgaatgactcctatctatacgctggtctatggaaggcttctttttcttggcacttggaagatcaggacctgtattccataaattatattcatttcggtgccccaaaacagtggtattcgataccgcaagaggataggttcaaattctacaaattcatgcaggagcaatttcccgaagaagccaaaaattgtcctgaatttttaagacataaaatgtttttggcttcgcccaaactgctgcaggaaaatggcatacgatgcaatgaaattgtccaccatgaaggcgaattcatgatcacttatccctatggttaccatgcagggttcaattatggatataacttggcagaatccgtcaactttgctttggaggagtggctaccgattgggaagaaagctggaaaatgccactgcatttcagactcagtggaaatagatgttaagaaactcgctaaatcttggagggacaataataaagagtcgaaaggaacgccacccctcaatcaattacccaatcctgccatgcccttacttcacaggccaactttaaaagaaatggaaagcagctcgcttagatctacaagcccagatgtgggtcatttttcaaactttaaatccaagagctctggtgtttcttctcccttattatcacgtatgaaagattattccaacattgtcgagcccacactagaagatccaactttgaaattaaaaagaatctcttcttttcaagaacagcccttaaacaaacttttgaaaagagaaacttcgcaaacggcgatgctcacagatcacgaagacaacatagtggccatgagccttacttcaatggcaaacagtgcggcgtcttctccgaggttgccactgtcaagattgaattcatctaatgaactctcaaatgcccaaccattgcttgacatgacaaacaatactcttgccttcccgcgacctaatggaccatctggattgaaccctttattatatatctctaacaagaatattagcgggatatctcactcggctccacattctccagtgaatccaaatatatcgctgataaaacgagttaagtctcccaacattgtaacattaaatatatccagggaatcgtcaagaagccctatagctctgaattacgaggcaagacaacaacattcgcaacaacattcattctccacaccatcaaccgtgtcaaatctctctacttctgtgctcgggccactgagtgacacaaacgacataaaaacaccgcaccctgaaagaccaaatcacaagacagcaaatagaatactcaaaaaggaatctcctgtcgagacatcaaaatcaaatcttatactttcaaaggttgcatccactcgccaagaggattcttttacaagccgaaatgacgatctggacaaagaacaaggctcttctccattaaactctaagtttgcgcccgaagaaatcgtgttatcaggtaagaacaagatttatatttgtaaggaatgccaaagaaagttctcttctggtcaccatcttacaagacacaaaaaatccgtccactctggtgagaaacctcattcttgtcccaaatgtggcaaaagatttaaaaggagagatcacgttctgcagcacttgaataagaaaataccgtgtatttcaaacgaaacaacagtagatgctccaataatgaaccctacagtgcaaccgcaggacgggaaagcggccattaatcaacagagtacacctttaaactga

SEQ ID NO: 3352 - DNA, 2391 bp, Artificial Sequence
  Description of Artificial Sequence: Synthetic polynucleotide
atgacgaaattaatcgctccttctgaaatcgtgggcggagtgcccgtcttcaaacccacatacgagcaattcgaagatttctatgcatactgcaaggccataaacaaatatggcatgaaaagtggtgttgtgaaagtaatcccacctaaagaatggaaagacaaattagatttaccttattctgcggaaacgctccaaaagatcaagattaaatctcctattcagcagcatatttctggtaataaaggtctttttatggtgcagaacgtggagaaaaacaagacctataacattatacagtggaaagatctttctaaggactatgtgcctccggaggatcctaaagcaagacgtaattctaggaaaggctccgtttccaaatccacgaagttgaaattgaaaaattttgaaagctcttttaatattgatgattttgaacagttcaggacggagtatacaatagatttatctgacttccaaaatacggagagattaaagttcttggaagagtattattggaaaacgttgaattttactacgcctatgtacggcgcagatacaccaggatctatctttcctgaagggttgaacgtttggaatgttgccaaattaccgaacatcttggaccatatggaaacaaaggttcctggggtgaatgactcctatttgtacgctggtttatggaaggcttctttttcttggcacttggaagatcaggacctttattccataaattatattcatttcggtgccccaaaacagtggtattctataccgcaagaggataggttcaaattctacaaattcatgcaggagcaatttcccgaagaagccaaaaattgtcctgaatttttaagacataaaatgtttttggcttctcccaaattattgcaggaaaatggcataagatgcaatgaaattgtccaccatgaaggcgaattcatgatcacttatccctatggttaccatgcagggttcaattatggatataacttggcagaatccgtcaactttgctttggaggagtggcttccgattgggaagaaagctggaaaatgccactgcatttctgactctgtggaaatagatgttaagaaactcgctaaatcttggagggacaataataaagagagtaaaggaacgccacccctcaatcaattacccaatcctgccatgcccttacttcacaggccaactttaaaagaaatggaaagcagctctcttagatctacaagcccagatgtgggtcatttttccaactttaaatccaagagctctggtgtttcttctcccttattatctcgtatgaaagattattccaacattgtcgagcccacattagaagatccaactttgaaattaaaaagaatctcttcttttcaagaacagcccttaaacaaacttttgaaaagagaaacttctcaaacggcgatgctcacagatcacgaagacaacatagtggccatgagccttacttctatggcaaacagtgcggcgtcttctccgaggttgccattatctagattgaattcttctaatgaactctctaatgcccaaccattgcttgacatgacaaacaatactcttgccttcccgagacctaatggaccatctggattgaaccctttattatatatctctaacaagaatattagcgggatatctcactctgctccacattctccagtgaatccaaatatatctttgataaaaagagttaagtctcccaacattgtaacattaaatatatccagggaatcttctagaagccctatagctttgaattacgaggcaagacaacaacattctcaacaacattctttctccacaccatctaccgtgagtaatctctctacttctgtgctcgggccattaagtgacacaaacgacataaaaacaccgcaccctgaaagaccaaatcacaagacagcaaatagaatactcaaaaaggaatctcctgtcgagacaagtaaatctaatcttatactttccaaggttgcatccactcgccaagaggattcttttacaagcagaaatgacgatttggacaaagaacaaggctcttctccattaaactctaagtttgcgcccgaagaaatcgtgttatctggtaagaacaagatttatatttgtaaggaatgccaaagaaagttctcttctggtcaccatcttacaagacacaaaaaatccgtccactctggtgagaaacctcattcttgtcccaaatgtggcaaaagatttaaaaggagagatcacgttttacagcacttgaataagaaaataccgtgtatttccaacgaaacaacagtagatgctccaataatgaaccctacagtgcaaccgcaggacgggaaagcggccattaatcaacagagtacacctttaaactga

SEQ ID NO: 3353 - DNA, 678 bp, Saccharomyces cerevisiae
atgaaagcagacgcgaaacaaataacacatctactcaaacctcttcgacttttattattgggggctccagggtcaggtaaagggacacagacttcgagattactaaagcaaattccacaattatcttcaatttcgtcaggcgacattttacgtcaggaaataaaatctgaatctaccctaggccgagaggctactacctacattgctcaaggcaagttattaccggatgatctcataacgcgtctgataacttttcgtctttcggcattgggttggttaaaaccatctgccatgtggttgctcgatggatttcctcgaactactgcgcaagcttctgccttagacgagctgctgaaacagcatgacgccagcttgaatctagtggtagagctagatgtacccgaatccaccatattagaaaggatcgagaacagatatgttcacgttcctagtgggagagtgtataacttacaatataatcctcccaaagtgccaggattagacgatatcaccggagaaccattgaccaagaggcttgatgacacagcggaagtgtttaaaaaaaggctagaagagtacaagaaaacaaatgagcctttaaaagattattacaaaaaaagtgggatttttggtaccgtctctggggaaacatcagatattatcttccgaaattattga

SEQ ID NO: 3354 - DNA, 678 bp, Artificial Sequence
  Description of Artificial Sequence: Synthetic polynucleotide
atgaaagcagacgcgaaacaaataacacatcttctcaaacctcttagacttttattattgggggctccagggtctggtaaagggacacagacttccagattattgaagcaaattccacaattatcttccatttcttctggcgacattttacgtcaggaaataaaatctgaatctaccttaggcagagaggctactacctacattgctcaaggcaagttattaccggatgatctcataacgcgtttaataacttttcgtctttctgcattgggttggttaaaaccatctgccatgtggttgctcgatggatttcctcgtactactgcgcaagcttctgccttagacgagttattgaaacagcatgacgccagcttgaatttggtggtagagttagatgtacccgaatccaccatattagaaaggatcgagaacagatatgttcacgttcctagtgggagagtgtataacttacaatataatcctcccaaagtgccaggattagacgatatcaccggagaaccattgaccaagaggcttgatgacacagcggaagtgtttaaaaaaaggttagaagagtacaagaaaacaaatgagcctttaaaagattattacaaaaaaagtgggatttttggtaccgtctctggggaaacatctgatattatcttcagaaattattga

SEQ ID NO: 3355 - DNA, 2337 bp, Saccharomyces cerevisiae
atgaagttttatatagatgatttaccagtgctttttccataccccaagatatatccagagcagtataattatatgtgcgatattaaaaagactctggatgtaggtggaaatagtatcttggagatgccttcaggaacaggtaaaacggtctcattactatccctcacaattgcctaccagatgcactacccagaacatagaaagatcatatattgttctcgtactatgtctgaaattgaaaaagctttagtagagttagagaaccttatggattacagaactaaagaactaggctatcaagaggattttcgaggtcttggcttgacatcaagaaaaaatttgtgtttgcatcccgaagtgagtaaggaacgaaaaggtacagtagtcgatgaaaagtgccgtagaatgacaaatgggcaggcgaagagaaaattagaagaggatccagaggcaaatgtagaattgtgtgaataccatgagaatttgtacaatattgaagtagaggattatcttccaaaaggcgtattttcttttgaaaaacttttgaaatactgcgaagaaaaaacactttgtccatattttattgttcgtcgtatgatttctctttgtaacattattatttattcttaccattatctattagatcctaaaattgctgaaagagtttccaacgaggtttctaaagatagcattgtcatttttgatgaagcgcacaatattgataatgtgtgtatcgaatcgctgtcattagacttgacaacggatgcattgagaagagccacacgaggtgctaatgcgttagatgaacgtatttctgaggtcagaaaggttgactcacagaaattacaggatgaatacgaaaaactagttcaaggtctccattctgcagatattcttaccgaccaggaagagccatttgtggaaacacctgtattgccccaagatcttctaacagaagcaatcccgggaaatatacgaagagccgagcattttgtttcatttttgaaaagattgatagaatatctgaagaccagaatgaaagttcttcacgttatttcagaaacgccaaaatcatttctacagcatttaaaacagttaactttcatagaaaggaaacctcttcggttttgctcagaaaggctatcattacttgtaagaactttagaagttacagaggtagaagattttactgcattgaaagacatagcaacttttgctactcttatatcaacatatgaggaagggtttttactaattattgaaccgtatgaaatcgaaaatgctgcagttccgaatccgattatgagatttacttgcttagatgcatcgattgccatcaaaccagtctttgagagattttcttccgttattatcacttcagggaccatatcaccattagacatgtatccaagaatgttaaactttaaaactgttttacaaaaatcatatgccatgaccttagccaaaaaatcatttctaccaatgattattaccaagggttctgatcaagttgcaatttcttcaagatttgaaatcagaaacgatcctagtattgttcgtaattacggttctatgctagtagagtttgccaagatcacacctgatggaatggttgtttttttcccctcatatctatatatggaaagtattgtttcaatgtggcaaacaatgggtattcttgacgaagtttggaaacataaattaattttagttgagactcctgatgctcaagaaacttctttagccttagaaacctatagaaaggcttgctcaaatgggcgtggggcaattttgctttctgttgctagaggaaaggtatctgaaggtatcgattttgatcatcaatatggcagaactgtgctgatgataggtatcccgtttcaatacacagaatcgcgtattttgaaagctcgcctagaattcatgagggagaactatcgcatcagagaaaacgacttcttatctttcgatgcgatgagacatgcagctcaatgtctggggagagtactgagagggaaggacgactatggtgtaatggtactagcagaccgtaggttttcaagaaaaagaagccagttaccaaaatggattgctcaaggtttgtctgacgccgatttgaacctttcgactgacatggccatatccaataccaaacaattcttgagaacaatggcacaacccacagaccctaaagaccaagagggtgtatctgtttggagttatgaagatttaataaagcaccagaatagcagaaaagatcaaggtggatttattgaaaacgaaaacaaagaaggagaacaggatgaagatgaagatgaagatatagaaatgcagtga

SEQ ID NO: 3356 - DNA, 2337 bp, Artificial Sequence
  Description of Artificial Sequence: Synthetic polynucleotide
atgaagttttatatagatgatttaccagtgctttttccataccccaagatatatccagagcagtataattatatgtgcgatattaaaaagactttagatgtaggtggaaatagtatcttggagatgccttctggaacaggtaaaacggtctctttattatccctcacaattgcctaccagatgcactacccagaacatagaaagatcatatattgttctcgtactatgtctgaaattgaaaaagctttagtagagttagagaaccttatggattacagaactaaagaattaggctatcaagaggattttagaggtcttggcttgacatctagaaaaaatttgtgtttgcatcccgaagtgagtaaggaaagaaaaggtacagtagtcgatgaaaagtgccgtagaatgacaaatgggcaggcgaagagaaaattagaagaggatccagaggcaaatgtagaattgtgtgaataccatgagaatttgtacaatattgaagtagaggattatcttccaaaaggcgtattttcttttgaaaaacttttgaaatactgcgaagaaaaaacactttgtccatattttattgttcgtcgtatgatttctctttgtaacattattatttattcttaccattatcttttagatcctaaaattgctgaaagagtttccaacgaggtttctaaagatagcattgtcatttttgatgaagcgcacaatattgataatgtgtgtatcgaatctttatctttagacttgacaacggatgcattgagaagagccacaagaggtgctaatgcgttagatgaacgtatttctgaggtcagaaaggttgactctcagaaattacaggatgaatacgaaaaattggttcaaggtctccattctgcagatattcttaccgaccaggaagagccatttgtggaaacacctgtattgccccaagatcttttaacagaagcaatcccgggaaatataagaagagccgagcattttgtttcttttttgaaaagattgatagaatatttgaagaccagaatgaaagttcttcacgttatttctgaaacgccaaaaagttttttgcagcatttaaaacagttaactttcatagaaaggaaacctcttagattttgcagtgaaaggttatctttacttgtaagaactttagaagttacagaggtagaagattttactgcattgaaagacatagcaacttttgctactcttatatctacatatgaggaagggtttttattgattattgaaccgtatgaaatcgaaaatgctgcagttccgaatccgattatgagatttacttgcttagatgcatctattgccatcaaaccagtctttgagagattttcttccgttattatcacttctgggaccatatctccattagacatgtatccaagaatgttaaactttaaaactgttttacaaaaaagttatgccatgaccttagccaaaaaaagttttttaccaatgattattaccaagggttctgatcaagttgcaatttcttctagatttgaaatcagaaacgatcctagtattgttcgtaattacggttctatgttggtagagtttgccaagatcacacctgatggaatggttgtttttttcccctcttatttgtatatggaaagtattgtttctatgtggcaaacaatgggtattcttgacgaagtttggaaacataaattaattttagttgagactcctgatgctcaagaaacttctttagccttagaaacctatagaaaggcttgctccaatgggcgtggggcaattttgctttctgttgctagaggaaaggtatctgaaggtatcgattttgatcatcaatatggcagaactgtgttgatgataggtatcccgtttcaatacacagaatcccgtattttgaaagctcgcttagaattcatgagggagaactatcgcatcagagaaaacgacttcttatctttcgatgcgatgagacatgcagctcaatgtttagggagagtattaagagggaaggacgactatggtgtaatggtattggcagaccgtaggttttccagaaaaagaagccagttaccaaaatggattgctcaaggtttgtctgacgccgatttgaacctttctactgacatggccatatccaataccaaacaattcttgagaacaatggcacaacccacagaccctaaagaccaagagggtgtatctgtttggagttatgaagatttaataaagcaccagaatagcagaaaagatcaaggtggatttattgaaaacgaaaacaaagaaggagaacaggatgaagatgaagatgaagatatagaaatgcagtga

SEQ ID NO: 3357 - DNA, 6492 bp, Saccharomyces cerevisiae
atgactgagcatgaaacgaaggataaggccaaaaaaattagagaaatttatcgttatgatgagatgtccaataaggtgttgaaagttgataaacgctttatgaataccagccaaaatcctcaaagggatgcggaaatatcacaaccaaaatccatgagtggtagaattagtgctaaggatatgggacagggcctgtgcaataacattaataaaggactaaaagaaaatgatgtagccgttgaaaaaactggaaagagcgcatcattgaaaaaaattcagcagcataacaccattttgaattcttcctccgatttcaggttacattattatccaaaggatccctcaaatgtcgaaacttacgagcagattttgcagtgggttacagaagttttaggcaatgatataccccatgatcttattattggaactgctgatatattcatcagacaattgaaagaaaatgaggaaaatgaggatggtaatattgaagagcgaaaggaaaagatccagcatgagctaggcatcaatatagactccctgaagtttaacgaattagttaaacttatgaaaaacattaccgattatgaaacacatcctgacaatagcaataaacaagcagtagcaattcttgccgatgatgaaaaatcagatgaagaagaagtaacagaaatgtccaacaatgctaatgttcttgggggagaaatcaatgataatgaagatgatgatgaggaatatgattacaatgacgttgaagtcaattctaaaaaaaaaaacaagagggcattgccaaacattgaaaacgatataattaaactctccgatagtaaaacaagtaatatcgagagcgttccgatatactcaatcgatgaattttttttgcagagaaaacttcggtcagagcttggttacaaggatacctctgtaatacaagacctgtcagaaaaaattttgaatgatattgaaacacttgagcataatccagtagcgttggagcagaagttggttgatctgcttaaattcgagaatatatcactggctgaatttattctcaagaatagatctacaattttttggggcatacgactggcgaagagcacagagaatgaaataccgaacttaatagagaaaatggttgcaaaaggtttgaatgatcttgtggaacagtataaatttagagaaactacacactcaaagcgtgaactcgattccggtgacgaccagccacagtcttcggaagcaaaaagaacaaaattcagtaatccagcaataccgcccgtcatagatttggaaaagattaaattcgacgaaagttctaaattaatgaccgtgacaaaagtatccctaccggaaggatcattcaaaagggtgaaaccacaatatgacgaaatacatattccagctcctagcaaacctgttattgattatgagttgaaagaaattacttctctaccagattggtgtcaggaggcgtttccttcatcggaaacaacgtccttaaaccctatacaatcaaaggtttttcacgcagcatttgaaggtgattcaaacatgctaatatgtgcacccactggttcaggtaagacgaatatcgcgttattgacggtattgaaagccttatcccatcattataacccgaaaactaagaaattaaacctttctgcatttaaaattgtttatatagcacccttgaaagccttagtacaggaacaagtccgagaatttcaaaggaggttggcttttctaggtataaaagtcgctgaattgactggtgattctaggcttagtagaaagcaaattgacgagacgcaggttttggtgtctacgccagagaaatgggacataactactagaaattcaaataatttggccatcgtagaacttgttcgtttgttgattatagatgaaatacatttgttacatgatgacaggggaccagtattggaaagcatcgtggctaggacattttgggcttccaaatatggccaggaataccccagaataataggcctttctgccaccttaccaaattatgaggatgtcggtaggtttttaagagttccgaaggaaggattgttttattttgactcctcatttagaccgtgtcctctatctcaacagttttgtggcattaaggaacggaactccttgaaaaagctgaaggctatgaatgatgcttgttatgaaaaggtattggaatccatcaatgaaggtaatcaaataatcgtgtttgttcattctcgaaaagaaacatcacgaacagcaacatggttgaaaaataaatttgctgaagagaacattactcataaattaaccaaaaatgatgcaggatcgaagcagattttaaagacagaagcagccaacgtactcgatccaagtctacgaaagttgattgaaagcggtatagggacgcatcacgcagggctgaccagaagtgacagatccttatctgaagatttatttgcagacgggttgttgcaagtattggtatgcactgcgacgttagcatggggtgttaatctacctgctcatacagtgattataaaaggaacagatgtctattcacctgaaaaggggtcctgggaacaactttctccacaagatgtacttcaaatgttaggtagagcaggcagaccgagatatgacacatttggcgagggtattataataacagaccaatcgaatgttcaatattatctctcggttttaaatcaacaattaccaatagaatcgcaatttgtttcaaaattagttgacaacttaaatgcagaagttgtcgcgggtaacattaagtgcaggaatgatgctgtgaattggttggcgtatacttacctatatgtcagaatgttagcttcccctatgctttacaaagtacctgatatttcaagtgatgggcaattgaaaaagtttagagaaagcttagtccattcggccctatgcattttaaaagaacaagagttggtgttatatgatgctgaaaatgatgtaattgaggcgaccgatctaggaaatatagcgtcgtcattttacataaatcatgcttccatggatgtttacaatagagagttagatgaacatacaactcagattgatctttttagaatattctcaatgtcggaagagtttaagtacgtatcggtgagatatgaagagaaaagagaactaaaacaacttctagagaaagcacccattcctatcagagaagatattgatgatcctttagcaaaagtgaatgtactactgcagtcttatttttcccagctaaagttcgaaggttttgcacttaattctgatatagtgtttattcaccaaaatgctggtaggttattgcgtgctatgtttgaaatatgcttgaagagaggatggggacatcccacacggatgttgttaaatctttgcaaatctgccacaactaaaatgtggccaacaaactgtcctttaagacagtttaaaacatgccctgtcgaagtgattaaaaggctggaagcctctacagtaccgtggggagattatctacagctagaaacacctgccgaagttggtcgtgcaatcagatctgaaaaatatggaaaacaggtttacgatttattgaaaagatttcccaaaatgtccgtaacatgcaacgctcagccaattacccgtagcgttatgaggttcaacattgaaataatagccgactggatatgggatatgaatgtacacggttcccttgaaccttttttgctcatgctagaagacactgatggtgattcaatactttattatgacgtactattcatcactccagatatagttggtcatgaatttaccttatcctttacttatgagttaaagcagcacaatcaaaataacttaccacctaatttcttccttactttgatatcagaaaattggtggcacagtgaattcgagattccagtttccttcaatggatttaaacttccgaaaaaatttcctcctcctactccccttctggagaatattagtatttcaacatcagagcttggcaatgatgatttttccgaagtatttgaatttaaaactttcaacaagattcagagccaggtcttcgagtctctctacaattcgaatgactcggtctttgtaggttcaggaaagggcacaggtaaaacagctatggctgaattagcactgttaaatcattggagacagaataaaggaagagcggtttatatcaatccgtctggggaaaaaattgattttttgctatctgattggaataaaaggttctctcatcttgctggtggtaagataataaataagctaggaaatgatccttcactaaatttaaaattattagcaaaaagccatgttctcttggctacccccgtgcaatttgagcttttgtcacgtcgttggagacaaaggaagaacatccaaagtttagaattaatgatatatgatgacgctcatgagattagccaaggtgtttacggtgctgtgtatgaaacgctaatttctagaatgatatttatagcaacccaacttgaaaagaaaattcgatttgtttgcctttcgaactgtttggcaaatgctcgtgattttggtgaatgggctggtatgacgaagtcaaacatctacaacttttctccaagcgaaagaattgagcctcttgaaattaatattcagtcatttaaagatgttgagcacatatcattcaatttttcgatgcttcaaatggcatttgaagcatctgctgctgcagcgggaaatcgtaattccagttcggtgttcttaccatctagaaaggattgtatggaagttgcgtctgcatttatgaagttttcaaaagcaattgaatgggatatgttgaacgttgaagaagagcaaattgtaccatacattgaaaagttaacagatggtcatctaagagcacctttaaaacacggtgttggtattttgtataaggggatggcatcaaatgatgaaagaattgtgaaaaggttatacgaatatggtgcggtatcggttttactcatttctaaggattgttctgcattcgcttgtaaaactgatgaagtgattattttaggaaccaacctttatgatggtgcagagcataaatatatgccatataccataaatgaacttctagaaatggtgggactagctagtggtaacgattcaatggcaggcaaggttttaattttgacaagtcacaacatgaaggcctactacaaaaaattcttaattgagcctttgcctactgagagttacctacagtatattattcatgatactctgaacaacgagatagcaaattctattatacaaagcaaacaagattgtgttgactggtttacatattcgtatttctatcgtcgtatccatgtgaatccaagctattatggcgtaagggatacgtctccacatggaatttcagtttttttgagtaatttagttgaaacttgtttgaatgacttagttgaatcatccttcattgaaattgacgatacagaagctgaagtaaccgcagaagttaatggaggagatgatgaagcaactgaaatcatttctaccttgagcaacgggctaattgcttctcactatggcgtatcattttttactattcagtcattcgtttcttctttatcgaatacgtcaacgctcaaaaacatgctgtatgttctttcaacagcagtagaattcgaaagtgttccactcagaaaaggagacagagcattacttgtcaaattaagtaaaagactaccattgagattccctgaacacacctcttctggttcggtgagctttaaagttttcttattgttacaagcatatttttcacgtcttgaattacctgtcgactttcaaaatgatttaaaagacattctagaaaaggttgttccactaattaacgtagtggttgatatcctttcagcaaacgggtatttgaatgctactaccgccatggatttggcgcagatgttgattcagggtgtatgggacgttgataatccgttgagacagattccacacttcaacaacaaaattttggaaaaatgtaaagaaattaacgtcgagacggtctatgatataatggcccttgaggatgaagagagggatgaaattttaacgcttactgattcacagcttgcgcaggtcgccgcgtttgttaacaattaccccaacgttgaacttacttattcgttgaataattctgattcgttaatttcaggtgtaaaacagaaaattaccattcaattgacaagagatgttgaacctgagaacttacaagtaacatctgaaaagtatccgtttgataagctagaaagttggtggttggttttaggtgaagtatctaaaaaagagctttatgcgatcaagaaagttactttaaataaagagactcagcaatatgaattggaatttgacactccgacatctggtaaacataacttaacaatttggtgtgtctgtgattcatatcttgacgcagataaagagttgtcctttgaaataaatgtgaaataa

SEQ ID NO: 3358 - DNA, 6492 bp, Artificial Sequence
  Description of Artificial Sequence: Synthetic polynucleotide
atgactgagcatgaaacgaaggataaggccaaaaaaattagagaaatttatcgttatgatgagatgtccaataaggtgttgaaagttgataaacgctttatgaataccagccaaaatcctcaaagggatgcggaaatatctcaaccaaaatccatgagtggtagaattagtgctaaggatatgggacagggcttatgcaataacattaataaaggattgaaagaaaatgatgtagccgttgaaaaaactggaaagagcgcaagtttgaaaaaaattcagcagcataacaccattttgaattcttcctccgatttcaggttacattattatccaaaggatccctccaatgtcgaaacttacgagcagattttgcagtgggttacagaagttttaggcaatgatataccccatgatcttattattggaactgctgatatattcatcagacaattgaaagaaaatgaggaaaatgaggatggtaatattgaagagagaaaggaaaagatccagcatgagttgggcatcaatatagactccttgaagtttaacgaattagttaaacttatgaaaaacattaccgattatgaaacacatcctgacaatagcaataaacaagcagtagcaattcttgccgatgatgaaaaatctgatgaagaagaagtaacagaaatgtccaacaatgctaatgttcttgggggagaaatcaatgataatgaagatgatgatgaggaatatgattacaatgacgttgaagtcaattctaaaaaaaaaaacaagagggcattgccaaacattgaaaacgatataattaaactctccgatagtaaaacaagtaatatcgagagcgttccgatatactctatcgatgaattttttttgcagagaaaacttcgtagtgagcttggttacaaggatacctctgtaatacaagacttatctgaaaaaattttgaatgatattgaaacacttgagcataatccagtagcgttggagcagaagttggttgatttacttaaattcgagaatatatctttggctgaatttattctcaagaatagatctacaattttttggggcataaggttagcgaagagcacagagaatgaaataccgaacttaatagagaaaatggttgcaaaaggtttgaatgatcttgtggaacagtataaatttagagaaactacacactccaagcgtgaactcgattccggtgacgaccagccacagtcttctgaagcaaaaagaacaaaattcagtaatccagcaataccgcccgtcatagatttggaaaagattaaattcgacgaaagttctaaattaatgaccgtgacaaaagtatccttaccggaaggaagtttcaaaagggtgaaaccacaatatgacgaaatacatattccagctcctagcaaacctgttattgattatgagttgaaagaaattacttctttaccagattggtgtcaggaggcgtttccttcttctgaaacaacgtccttaaaccctatacaatccaaggtttttcacgcagcatttgaaggtgattccaacatgttgatatgtgcacccactggttctggtaagacgaatatcgcgttattgacggtattgaaagccttatcccatcattataacccgaaaactaagaaattaaacctttctgcatttaaaattgtttatatagcacccttgaaagccttagtacaggaacaagtcagagaatttcaaaggaggttggcttttttaggtataaaagtcgctgaattgactggtgattctaggcttagtagaaagcaaattgacgagacgcaggttttggtgtctacgccagagaaatgggacataactactagaaatagtaataatttggccatcgtagaacttgttcgtttgttgattatagatgaaatacatttgttacatgatgacaggggaccagtattggaaagcatcgtggctaggacattttgggcttccaaatatggccaggaataccccagaataataggcctttctgccaccttaccaaattatgaggatgtcggtaggtttttaagagttccgaaggaaggattgttttattttgactcctcttttagaccgtgtcctttatctcaacagttttgtggcattaaggaaagaaactccttgaaaaagttgaaggctatgaatgatgcttgttatgaaaaggtattggaatccatcaatgaaggtaatcaaataatcgtgtttgttcattctagaaaagaaacatctcgcacagcaacatggttgaaaaataaatttgctgaagagaacattactcataaattaaccaaaaatgatgcaggatccaagcagattttaaagacagaagcagccaacgtactcgatccaagtcttagaaagttgattgaaagcggtatagggacgcatcacgcagggttaaccagaagtgacagatccttatctgaagatttatttgcagacgggttgttgcaagtattggtatgcactgcgacgttagcatggggtgttaatttacctgctcatacagtgattataaaaggaacagatgtctattctcctgaaaaggggtcctgggaacaactttctccacaagatgtacttcaaatgttaggtagagcaggcagaccgagatatgacacatttggcgagggtattataataacagaccaaagcaatgttcaatattatctcagtgttttaaatcaacaattaccaatagaatctcaatttgtttccaaattagttgacaacttaaatgcagaagttgtcgcgggtaacattaagtgcaggaatgatgctgtgaattggttggcgtatacttacttatatgtcagaatgttagcttcccctatgctttacaaagtacctgatatttccagtgatgggcaattgaaaaagtttagagaaagcttagtccattctgccctttgcattttaaaagaacaagagttggtgttatatgatgctgaaaatgatgtaattgaggcgaccgatttgggaaatatagcgagttctttttacataaatcatgcttccatggatgtttacaatagagagttagatgaacatacaactcagattgatctttttagaatattctccatgtctgaagagtttaagtacgtatctgtgagatatgaagagaaaagagaattgaaacaacttttggagaaagcacccattcctatcagagaagatattgatgatcctttagcaaaagtgaatgtattgttacagtcttatttttcccagttgaagttcgaaggttttgcacttaattctgatatagtgtttattcaccaaaatgctggtaggttattgcgtgctatgtttgaaatatgcttgaagagaggatggggacatcccacaagaatgttgttaaatctttgcaaatctgccacaactaaaatgtggccaacaaactgtcctttaagacagtttaaaacatgccctgtcgaagtgattaaaaggttagaagcctctacagtaccgtggggagattatttacagttagaaacacctgccgaagttggtcgtgcaatcagatctgaaaaatatggaaaacaggtttacgatttattgaaaagatttcccaaaatgtccgtaacatgcaacgctcagccaattacccgtagcgttatgaggttcaacattgaaataatagccgactggatatgggatatgaatgtacacggttcccttgaaccttttttgctcatgttggaagacactgatggtgattctatactttattatgacgtattattcatcactccagatatagttggtcatgaatttaccttatcctttacttatgagttaaagcagcacaatcaaaataacttaccacctaatttcttccttactttgatatctgaaaattggtggcacagtgaattcgagattccagtttccttcaatggatttaaacttccgaaaaaatttcctcctcctactccccttttggagaatattagtatttctacaagtgagcttggcaatgatgatttttccgaagtatttgaatttaaaactttcaacaagattcagagccaggtcttcgagtctctctacaatagtaatgactctgtctttgtaggttctggaaagggcacaggtaaaacagctatggctgaattagcattattaaatcattggagacagaataaaggaagagcggtttatatcaatccgtctggggaaaaaattgattttttgttatctgattggaataaaaggttctctcatcttgctggtggtaagataataaataagttgggaaatgatccttctttgaatttaaaattattagcaaaaagccatgttctcttggctacccccgtgcaatttgagcttttgtctcgtcgttggagacaaaggaagaacatccaaagtttagaattaatgatatatgatgacgctcatgagattagccaaggtgtttacggtgctgtgtatgaaacgttgatttctagaatgatatttatagcaacccaacttgaaaagaaaattagatttgtttgcctttccaactgtttggcaaatgctcgtgattttggtgaatgggctggtatgacgaagtctaacatctacaacttttctccaagcgaaagaattgagcctcttgaaattaatattcagtcttttaaagatgttgagcacatatctttcaatttttccatgcttcaaatggcatttgaagcatctgctgctgcagcgggaaatcgtaattccagttctgtgttcttaccatctagaaaggattgtatggaagttgcgtctgcatttatgaagttttccaaagcaattgaatgggatatgttgaacgttgaagaagagcaaattgtaccatacattgaaaagttaacagatggtcatttaagagcacctttaaaacacggtgttggtattttgtataaggggatggcatctaatgatgaaagaattgtgaaaaggttatacgaatatggtgcggtatctgttttactcatttctaaggattgttctgcattcgcttgtaaaactgatgaagtgattattttaggaaccaacctttatgatggtgcagagcataaatatatgccatataccataaatgaacttttagaaatggtgggattggctagtggtaacgattctatggcaggcaaggttttaattttgacaagtcacaacatgaaggcctactacaaaaaattcttaattgagcctttgcctactgagagttacttacagtatattattcatgatactttgaacaacgagatagcaaattctattatacaaagcaaacaagattgtgttgactggtttacatattcttatttctatcgtcgtatccatgtgaatccaagctattatggcgtaagggatacgtctccacatggaatttctgtttttttgagtaatttagttgaaacttgtttgaatgacttagttgaatcttccttcattgaaattgacgatacagaagctgaagtaaccgcagaagttaatggaggagatgatgaagcaactgaaatcatttctaccttgagcaacgggttgattgcttctcactatggcgtatccttttttactattcagtctttcgtttcttctttatccaatacgtccacgctcaaaaacatgctttatgttctttctacagcagtagaattcgaaagtgttccactcagaaaaggagacagagcattacttgtcaaattaagtaaaagattaccattgagattccctgaacacacctcttctggttctgtgagctttaaagttttcttattgttacaagcatatttttctcgtcttgaattacctgtcgactttcaaaatgatttaaaagacattttggaaaaggttgttccattgattaacgtagtggttgatatcctttctgcaaacgggtatttgaatgctactaccgccatggatttggcgcagatgttgattcagggtgtatgggacgttgataatccgttgagacagattccacacttcaacaacaaaattttggaaaaatgtaaagaaattaacgtcgagacggtctatgatataatggcccttgaggatgaagagagggatgaaattttaacgcttactgattctcagcttgcgcaggtcgccgcgtttgttaacaattaccccaacgttgaacttacttattctttgaataattctgattctttaatttctggtgtaaaacagaaaattaccattcaattgacaagagatgttgaacctgagaacttacaagtaacatctgaaaagtatccgtttgataagttggaaagttggtggttggttttaggtgaagtatctaaaaaagagctttatgcgatcaagaaagttactttaaataaagagactcagcaatatgaattggaatttgacactccgacatctggtaaacataacttaacaatttggtgtgtctgtgattcttatcttgacgcagataaagagttgtcctttgaaataaatgtgaaatga

SEQ ID NO: 3359 - DNA, 1980 bp, Saccharomyces cerevisiae
atggatagtacgaatttgaacaaacggcccttattacaatatagtctcagttcattgggctcgcaaataacaaaatggagctcatctagaccgacttcgccagttcgtaaggcgagaagcactgaaaatgactttctttccaagcaagatacgtctagtatcctcccaagtatcaacgacgacggcggtgaacagtggtacgaaaagttcaagcccaattgtttggagcaagtggccatacataaaagaaaacttaaagatgtacaagaagctttagatgccatgtttttacctaacgccaagcataggatcctactactgtctggccccagtggatgctctaaaagtacggtcataaaagaactctcaaaaatcttagttcctaaatacagacaaaacagcaacggaacgtcctttcgaagcaccccgaacgagcataaagtgaccgagtttagaggtgattgtatagtcaacgatcttcctcagatggaaagctttagtgagttcttaaaaggcgcacggtatcttgtgatgtccaacctgtcattaatacttatcgaggaccttcccaacgtcttccatatagataccagacgtcgatttcaacaacttatattacagtggctatatagttcggagcctctattacctccccttgttatatgtataactgaatgtgaaattccagagaacgataataattatcgcaaatttggtattgattatacatttagtgcagaaaccataatgaacaaagaaatattgatgcatccaaggttgaaaagaattaagtttaatccaattaacagcactttattaaaaaagcacttgaaatttatttgtgtacagaatatgaaaatgttgaaggagaaaaataaatggaataaaagacaggaagtcatagattatattgcgcaagagactggtgatattaggtcggccattacgacccttcaattttgggcgacatcaagtggaagtttgccgatttcaacccgagaatccaccatatcatactttcatgccattgggaaggtgatacatggttcccatagcacgaataacgataacgaaatgattaataacctcttcgaaaattcgaacaatttgttatcgaaagaggatttcaaattaggaatattagagaactataacacatttaataaaggcgaattcagcatttctgatgcatcatcaattgtggattgcctgagcgagtgtgataatatgaatggtctaccagaatccaatgagtatggtttacgagaagtgcgcaaaacctttcgtaacatcagtaaacaaggccataatcatggaacggtttattttccaagagaatggaaagtaagaaaattacaaaattcatttaaagttcaagctgaagattggttaaatgttagtctttataagtacaacgcggtacattctttcaggaatataactctagaatttggctactacgcacctctaattagaaagtgtcagagttataaaaaaaaatacattctctattatttgaagaatcttccgagtggctcctcggggcccaaacaaaccatggacaaatttagtgatataatgaaagttgagaacggaatcgacgttgtggatcggataggcgggcctatcgaagcactatctgtggaggatggactagcaccattgatggataatgatagcaataattgtgaccatttagaggatcaaaaaaaggaaagggacagaaggcttcgcatgttgattgaccaatatgaaagaaatgtgatgatggctaacgacgatcttgaagacgaagaaacttcttttaatgatgaccctattgtcgatagcgatagcgataacagcaataatattggcaatgaaacatttggtagaagcgacgaagacgagtctctatgtgaaattctgtcccagagacagccgcgtaaagcgccagttatcagtgagtccctttcagattcagatctggaaatactctaa

SEQ ID NO: 3360 - DNA, 1980 bp, Artificial Sequence
  Description of Artificial Sequence: Synthetic polynucleotide
atggatagtacgaatttgaacaaaaggcccttattacaatatagtctcagttctttgggctctcaaataacaaaatggagctcttctagaccgacttctccagttcgtaaggcgagaagcactgaaaatgactttctttccaagcaagatacgtctagtatcctcccaagtatcaacgacgacggcggtgaacagtggtacgaaaagttcaagcccaattgtttggagcaagtggccatacataaaagaaaacttaaagatgtacaagaagctttagatgccatgtttttacctaacgccaagcataggatcttattattatctggccccagtggatgctctaaaagtacggtcataaaagaactctctaaaatcttagttcctaaatacagacaaaacagcaacggaacgtcctttagaagcaccccgaacgagcataaagtgaccgagtttagaggtgattgtatagtcaacgatcttcctcagatggaaagctttagtgagttcttaaaaggcgcaagatatcttgtgatgtccaacttatctttaatacttatcgaggaccttcccaacgtcttccatatagataccagacgtagatttcaacaacttatattacagtggttatatagtagtgagcctttattacctccccttgttatatgtataactgaatgtgaaattccagagaacgataataattatcgcaaatttggtattgattatacatttagtgcagaaaccataatgaacaaagaaatattgatgcatccaaggttgaaaagaattaagtttaatccaattaacagcactttattaaaaaagcacttgaaatttatttgtgtacagaatatgaaaatgttgaaggagaaaaataaatggaataaaagacaggaagtcatagattatattgcgcaagagactggtgatattaggtctgccattacgacccttcaattttgggcgacatctagtggaagtttgccgatttctaccagagaatccaccatatcttactttcatgccattgggaaggtgatacatggttcccatagcacgaataacgataacgaaatgattaataacctcttcgaaaatagcaacaatttgttatccaaagaggatttcaaattaggaatattagagaactataacacatttaataaaggcgaattcagcatttctgatgcatcttccattgtggattgcttaagcgagtgtgataatatgaatggtttgccagaatccaatgagtatggtttaagagaagtgcgcaaaacctttcgtaacatcagtaaacaaggccataatcatggaacggtttattttccaagagaatggaaagtaagaaaattacaaaattcttttaaagttcaagctgaagattggttaaatgttagtctttataagtacaacgcggtacattctttcaggaatataactttggaatttggctactacgcacctttgattagaaagtgtcagagttataaaaaaaaatacattctctattatttgaagaatcttccgagtggctccagtgggcccaaacaaaccatggacaaatttagtgatataatgaaagttgagaacggaatcgacgttgtggatagaataggcgggcctatcgaagcattatctgtggaggatggattagcaccattgatggataatgatagcaataattgtgaccatttagaggatcaaaaaaaggaaagggacagaaggcttcgcatgttgattgaccaatatgaaagaaatgtgatgatggctaacgacgatcttgaagacgaagaaacttcttttaatgatgaccctattgtcgatagcgatagcgataacagcaataatattggcaatgaaacatttggtagaagcgacgaagacgagtctttatgtgaaattttatcccagagacagccgcgtaaagcgccagttatcagtgagtccctttctgattctgatttggaaatactctga

SEQ ID NO: 3361 - DNA, 735 bp, Saccharomyces cerevisiae
atgactgtggttgaaataaaaagccaggaccaatttacgcaactaaccactacaaacgctgctaataaactcattgtcttatattttaaagctcaatgggctgatccttgcaaaactatgagccaggtgctagaagctgttagtgaaaaagttaggcaagaggatgtccggtttttatcaatagatgcagacgaacatccagaaatatcagacctttttgagattgcagccgtaccatacttcgtcttcattcaaaatggtactattgtaaaagaaatatcagccgcagatcctaaggagtttgtgaaaagcttagaaattctttcgaatgcttctgcctcactagcgaacaatgccaagggtcctaaatctacgtctgatgaggaaagcagcgggtcttccgatgatgaagaggacgaaactgaagaagaaataaatgctaggctggtgaagctagtacaagctgcacctgtgatgctattcatgaaaggaagcccatcagaacctaaatgcggattttctagacagttagttggtatcctcagagaacaccaaataaggttcggattttttgatatattaagagacgaaaacgttagacaaagcttgaagaagttttctgattggcctacttttcctcagttatatatcaatggggagttccagggaggtttggatattatcaaggaatctatagaagaagatcctgaatatttccaacatgctctacagtaa

SEQ ID NO: 3362 - DNA, 735 bp, Artificial Sequence
  Description of Artificial Sequence: Synthetic polynucleotide
atgactgtggttgaaataaaaagccaggaccaatttacgcaattgaccactacaaacgctgctaataaactcattgtcttatattttaaagctcaatgggctgatccttgcaaaactatgagccaggtgttggaagctgttagtgaaaaagttaggcaagaggatgtcagatttttatctatagatgcagacgaacatccagaaatatctgacctttttgagattgcagccgtaccatacttcgtcttcattcaaaatggtactattgtaaaagaaatatctgccgcagatcctaaggagtttgtgaaaagcttagaaattctttctaatgcttctgcctctttagcgaacaatgccaagggtcctaaatctacgtctgatgaggaaagcagcgggtcttccgatgatgaagaggacgaaactgaagaagaaataaatgctaggttggtgaagttggtacaagctgcacctgtgatgcttttcatgaaaggaagcccatctgaacctaaatgcggattttctagacagttagttggtatcctcagagaacaccaaataaggttcggattttttgatatattaagagacgaaaacgttagacaaagcttgaagaagttttctgattggcctacttttcctcagttatatatcaatggggagttccagggaggtttggatattatcaaggaatctatagaagaagatcctgaatatttccaacatgctttacagtga

SEQ ID NO: 3363 - DNA, 900 bp, Saccharomyces cerevisiae
atgtctaccttttctgcttctgatttcaactcagaaagatattcatcttcaagaccttcttatccctccgatttttacaagatgattgatgaataccacgacggagaaaggaaattactcgtagatgttggctgtggaccaggtactgccactttacaaatggctcaggagttaaaaccattcgaacaaattatcggaagcgatctctccgctaccatgattaagactgcagaagtaataaaggaaggaagtcctgatacatacaaaaacgtttcatttaagatttcttcaagtgatgattttaaattcctaggcgcggattcagtagacaaacagaaaattgatatgattaccgcagtagaatgtgctcattggttcgatttcgaaaaatttcagcgatctgcttatgccaatttgagaaaagatggtactatcgctatttggggttatgcggacccaattttcccggactaccctgaatttgatgatctgatgattgaagttccttacgggaagcaaggactgggaccctattgggaacaaccggggagatctcgccttcgtaatatgctgaaagactctcacttagacccagaacttttccatgatatacaagtttcatatttttgtgcagaagatgtgagagacaaagtaaaactccaccagcatacaaagaagccattgctaatcagaaagcaggtcaccctagtggagtttgcagattatgtcagaacctggagcgcttaccatcagtggaagcaggatccaaagaacaaagataaagaagatgtagcagattggtttattaaagagtcactaaggaggaggccggaactttccaccaacaccaaaattgaagttgtttggaatactttttacaaacttggcaaaagggtctga

SEQ ID NO: 3364 - DNA, 900 bp, Artificial Sequence
  Description of Artificial Sequence: Synthetic polynucleotide
atgtctaccttttctgcttctgatttcaactctgaaagatattcttcttctagaccttcttatccctccgatttttacaagatgattgatgaataccacgacggagaaaggaaattactcgtagatgttggctgtggaccaggtactgccactttacaaatggctcaggagttaaaaccattcgaacaaattatcggaagcgatctctccgctaccatgattaagactgcagaagtaataaaggaaggaagtcctgatacatacaaaaacgtttcttttaagatttcttccagtgatgattttaaattcttgggcgcggattctgtagacaaacagaaaattgatatgattaccgcagtagaatgtgctcattggttcgatttcgaaaaatttcagagatctgcttatgccaatttgagaaaagatggtactatcgctatttggggttatgcggacccaattttcccggactaccctgaatttgatgatttgatgattgaagttccttacgggaagcaaggacttggaccctattgggaacaaccggggagatctcgccttcgtaatatgttgaaagactctcacttagacccagaacttttccatgatatacaagtttcttatttttgtgcagaagatgtgagagacaaagtaaaactccaccagcatacaaagaagccattgttgatcagaaagcaggtcaccttagtggagtttgcagattatgtcagaacctggagcgcttaccatcagtggaagcaggatccaaagaacaaagataaagaagatgtagcagattggtttattaaagagtctttgaggaggaggccggaactttccaccaacaccaaaattgaagttgtttggaatactttttacaaacttggcaaaagggtctga

SEQ ID NO: 3365 - DNA, 165 bp, Saccharomyces cerevisiae
atgagactacataaaacatttatctgttttagtcaaaacaaacgtggttgtagaaatattctgcaagaaaattcgcggatgatatttgagaataaaatactcataatgatattgaggcagggtatattttttaatattagcgtgagcaccaagatcagtttctaa

SEQ ID NO: 3366 - DNA, 165 bp, Artificial Sequence
  Description of Artificial Sequence: Synthetic polynucleotide
atgagattacataaaacatttatctgttttagtcaaaacaaacgtggttgtagaaatattttacaagaaaattccagaatgatatttgagaataaaatactcataatgatattgaggcagggtatattttttaatattagcgtgagcaccaagatcagtttctga

SEQ ID NO: 3367 - DNA, 3366 bp, Saccharomyces cerevisiae
atggattttcagtgcagaacgtgtagccaggcttatgatgctgagcagatgatgaagcatctctcaagtacgaggcataaaactgtattcgacacttcaaatgatgaagatatttgctgtgaggaatgtcaagataaaaatatacaccaacttcaaatcatcaggtttgggggtgaagacatggttttactttgtaattcgtgttttcggaaagaatattcagaaacggagcgtccatcaactagctactcattacaaaacggctctatattgaaattttgggaaaagtacgtgaaagtcagggaatgttgttgtgatgagtgtggggaagagtctaacttgaatgcaaatagaaatggagaagtattatgtgacaagtgcttgcccaaatcgaatagagctaaagactttgtttctgaaaaaagtggaagattcctatacatctacttgggactgaatgaaacacagaatagcactagaaagcctagaaaaaagggcggcagaagagttggtagaggaaagaagggcaggaagggtgctaagattaagaaggagaaaaaggaaactttcgaggccaaaataagtagaatcgcttatgaagtcaagaaagaaaatagtaccattcaaagctctagtagttccaatctaagaaacttcaaaggtttcaaagcggtggaaagcgatccagtagttgcagcaaaagtaagcaaatcagagactagtagaagtaatcctggcccatcaaatcgaaacaaagggaaaggaaataaggcaaaccacaaaaagaatagtggaaatgggataggaaaagagaaagagaggaaaacaaacattagaaataatgtccgtaacagccaacctataccagaggacagaaaaaataccaatagccacgttacaacaaactctggagggaaaggcaagaacgaatcagtggataagcaccaattaccgcaaccaaaagctttgaatggaaacgggtcgggcagtactaatactactggtttgaaaaaagggaaaaaagaccatgctggccagaagactaagggcaatgataaaacgggtaataagaatccgcgagaggccaaactaaattcagctggcagaaagaatgcacttggcaaaaaatcaaataaccagccaaataagggaactagcaggtggacaattggatctgatactgaatcttctagagaacctagtattagcccaaacgagaacacaacttcaattactaaatcgcgaaaccgcaataagaaggctagcaagccgacgctgaatgaaaaatcaaaaacaacaacgatgccaaaaaagttggagacaaaaaatcaagagaaaaataatggaaaaactaaggacgggaaacttatttacgaagaaggtgaaccactcacaaggtataatacctttaagtcaaccttatcataccccgatttgaacacatacctaaatgattactcatttgccctttttttggaacagaaattagagaacgaatttgttcaaaacttcaacatactatggcctcgcaatgaaaaagatacagcttttataatcaacgttgagaagaataataattcagaacttgagaaattactacctgcaaatttgcttgcactcggtagaccggcatttaatgaaaggcaaccatttttcttttgtactcaggatgaacaaaaagtttggtatatttttatcaaagaactttctattcaaaggggtaaatacgtgttgttagtggagcttttttcgtggaataatttgagtttgccaacgaaaaatggttcatctcaatttaagctattgccaacttctgcgcagacaagtagaattctatttgccatgacgcgtattacaaacccaaaatttattgacctattactaggccaaaagcctattaaagagatttattttgataacaggctaaaattttccagtgacaagttgaaccgatctcagaagactgcagtggaacatgttctaaacaacagtatcacaattctacaaggcccacctggtacaggtaaaacatcaacaatagaggagataatcatccaagtaattgaaagatttcacgcattcccaatattgtgtgttgccgcgtcaaatattgctattgataacattgccgagaagattatggagaatagaccgcagataaagatcttaagaattttgtcaaagaagaaagaacaacagtatagtgatgaccacccattgggcgaaatttgtctccacaatattgtatacaaaaatctttccccagacatgcaagtcgtggcaaacaaaacccgcaggggcgaaatgatctccaaatcagaggacacgaagttttataaagagaaaaaccgtgtcaccaacaaggtcgtatctcaatcgcaaataattttcacgacaaacattgctgcaggtggtcgtgaattgaaggttataaaagaatgtcccgtggtaataatggatgaggctacacaatcatcagaggcttcaacactagtcccactttcgttaccaggtataagaaattttgtcttcgttggggacgaaaagcaattgtcaagtttcagcaacatccctcaactggaaacctcactattcgaaagagtcctatctaatggcacgtacaaaaacccactaatgctggatacgcagtacagaatgcacccaaaaattagcgaattccccattaagaaaatatacaatggtgaattgaaggacggtgtcacggacgaacaaaaggcatggcctggcgtgcagcatccgttgtttttttatcagtgcgatttggggcccgagagcagagtgagaagcacgcaaagagacatagtcgggtttacgtacgaaaacaaacacgaatgtgtagaaatcgtgaagattatccaaatactaatgttggacaagaaggttccgctggaagaaattggtgtcataacgccctattctgcacagcgtgatctgctgtctgacatcttgaccaaaaacgtagttatcaaccccaaacagatttctatgcaacaagaatacgatgaaattgagctatttaacgcggctggttctcaaggaaccgccggcagtctacaaaacaatgtgattaacatcatcaacggcctacacgtcgcgaccgtagactcctttcaaggccacgaaaaatctttcatcatattttcatgtgtcagaaataacaccgaaaacaaaatcggctttttacgtgacaaaagaaggttaaacgtggcattgacaagagccaagcacggactaattgtggtgggcaacaagaatgtcttaagaaaaggagaccccctatggaaagactacattacctacctcgaggaacaagaggtcatattcactgatctcacagcttactag

SEQ ID NO: 3368 - DNA, 3366 bp, Artificial Sequence
  Description of Artificial Sequence: Synthetic polynucleotide
atggattttcagtgcagaacgtgtagccaggcttatgatgctgagcagatgatgaagcatctctccagtacgaggcataaaactgtattcgacacttccaatgatgaagatatttgctgtgaggaatgtcaagataaaaatatacaccaacttcaaatcatcaggtttgggggtgaagacatggttttactttgtaattcttgttttagaaaagaatattctgaaacggagcgtccatctactagctactctttacaaaacggctctatattgaaattttgggaaaagtacgtgaaagtcagggaatgttgttgtgatgagtgtggggaagagtctaacttgaatgcaaatagaaatggagaagtattatgtgacaagtgcttgcccaaatctaatagagctaaagactttgtttctgaaaaaagtggaagattcttgtacatctacttgggattgaatgaaacacagaatagcactagaaagcctagaaaaaagggcggcagaagagttggtagaggaaagaagggcaggaagggtgctaagattaagaaggagaaaaaggaaactttcgaggccaaaataagtagaatcgcttatgaagtcaagaaagaaaatagtaccattcaaagctctagtagttccaatttaagaaacttcaaaggtttcaaagcggtggaaagcgatccagtagttgcagcaaaagtaagcaaaagtgagactagtagaagtaatcctggcccatccaatagaaacaaagggaaaggaaataaggcaaaccacaaaaagaatagtggaaatgggataggaaaagagaaagagaggaaaacaaacattagaaataatgtccgtaacagccaacctataccagaggacagaaaaaataccaatagccacgttacaacaaactctggagggaaaggcaagaacgaatctgtggataagcaccaattaccgcaaccaaaagctttgaatggaaacgggtctggcagtactaatactactggtttgaaaaaagggaaaaaagaccatgctggccagaagactaagggcaatgataaaacgggtaataagaatccgagagaggccaaattgaattctgctggcagaaagaatgcacttggcaaaaaatctaataaccagccaaataagggaactagcaggtggacaattggatctgatactgaatcttctagagaacctagtattagcccaaacgagaacacaacttctattactaaatctagaaaccgcaataagaaggctagcaagccgacgttgaatgaaaaatctaaaacaacaacgatgccaaaaaagttggagacaaaaaatcaagagaaaaataatggaaaaactaaggacgggaaacttatttacgaagaaggtgaaccactcacaaggtataatacctttaagtctaccttatcttaccccgatttgaacacatacttgaatgattactcttttgccctttttttggaacagaaattagagaacgaatttgttcaaaacttcaacatattatggcctcgcaatgaaaaagatacagcttttataatcaacgttgagaagaataataattctgaacttgagaaattattgcctgcaaatttgcttgcactcggtagaccggcatttaatgaaaggcaaccatttttcttttgtactcaggatgaacaaaaagtttggtatatttttatcaaagaactttctattcaaaggggtaaatacgtgttgttagtggagcttttttcttggaataatttgagtttgccaacgaaaaatggttcttctcaatttaagttgttgccaacttctgcgcagacaagtagaattttatttgccatgacgcgtattacaaacccaaaatttattgacttattattaggccaaaagcctattaaagagatttattttgataacaggttgaaattttccagtgacaagttgaacagatctcagaagactgcagtggaacatgttttgaacaacagtatcacaattttacaaggcccacctggtacaggtaaaacatctacaatagaggagataatcatccaagtaattgaaagatttcacgcattcccaatattgtgtgttgccgcgtctaatattgctattgataacattgccgagaagattatggagaatagaccgcagataaagatcttaagaattttgtccaagaagaaagaacaacagtatagtgatgaccacccattgggcgaaatttgtctccacaatattgtatacaaaaatctttccccagacatgcaagtcgtggcaaacaaaacccgcaggggcgaaatgatctccaaaagtgaggacacgaagttttataaagagaaaaaccgtgtcaccaacaaggtcgtatctcaatctcaaataattttcacgacaaacattgctgcaggtggtcgtgaattgaaggttataaaagaatgtcccgtggtaataatggatgaggctacacaatcttctgaggcttctacattggtcccactttctttaccaggtataagaaattttgtcttcgttggggacgaaaagcaattgagcagtttcagcaacatccctcaattggaaacctctttattcgaaagagtcttgtctaatggcacgtacaaaaacccattaatgcttgatacgcagtacagaatgcacccaaaaattagcgaattccccattaagaaaatatacaatggtgaattgaaggacggtgtcacggacgaacaaaaggcatggcctggcgtgcagcatccgttgtttttttatcagtgcgatttggggcccgagagcagagtgagaagcacgcaaagagacatagtcgggtttacgtacgaaaacaaacacgaatgtgtagaaatcgtgaagattatccaaatattaatgttggacaagaaggttccgttggaagaaattggtgtcataacgccctattctgcacagcgtgatttattatctgacatcttgaccaaaaacgtagttatcaaccccaaacagatttctatgcaacaagaatacgatgaaattgagttatttaacgcggctggttctcaaggaaccgccggcagtttacaaaacaatgtgattaacatcatcaacggcttgcacgtcgcgaccgtagactcctttcaaggccacgaaaaatctttcatcatattttcttgtgtcagaaataacaccgaaaacaaaatcggctttttacgtgacaaaagaaggttaaacgtggcattgacaagagccaagcacggattgattgtggtgggcaacaagaatgtcttaagaaaaggagaccccctttggaaagactacattacctacctcgaggaacaagaggtcatattcactgatctcacagcttactga

SEQ ID NO: 3369 - DNA, 804 bp, Saccharomyces cerevisiae
atgtcaaccagtcgtgaagattctgtgtacctagccaagttggctgaacaggccgaacgttatgaagaaatggtcgaaaacatgaagactgttgcctcctctggccaagagttgtcggtcgaagagcgtaatttgttgtctgttgcttataagaacgttattggtgctcgtcgtgcctcttggagaattgtttcttctattgagcaaaaggaggagtccaaggagaagtccgaacaccaggtcgagttgatttgttcgtaccgttcgaagattgagaccgaactaactaagatctccgacgatattttgtccgtgctagactcccacttaattccatcagccaccactggcgagtccaaggttttctactataagatgaagggtgactaccaccgttatttggctgaattttctagtggcgatgctagagaaaaggccacaaacgcctctttagaagcatacaagaccgcttctgaaattgccaccacagagttacccccaactcacccaatccgtctaggtttggctcttaacttctctgtcttctattatgaaattcaaaactctccagacaaagcctgccatttggccaagcaagcttttgacgacgctattgctgagttggacactctgtctgaagaatcatacaaagatagcacacttatcatgcaactgctaagggacaatttaaccttatggacttcagacatgtccgagtccggtcaagctgaagaccaacaacaacaacaacaacatcagcaacagcagccacctgctgccgccgaaggtgaagcaccaaagtaa

SEQ ID NO: 3370 - DNA, 804 bp, Artificial Sequence
  Description of Artificial Sequence: Synthetic polynucleotide
atgtctaccagtcgtgaagattctgtgtacttggccaagttggctgaacaggccgaacgttatgaagaaatggtcgaaaacatgaagactgttgcctcctctggccaagagttgtctgtcgaagagcgtaatttgttgtctgttgcttataagaacgttattggtgctcgtcgtgcctcttggagaattgtttcttctattgagcaaaaggaggagtccaaggagaagtccgaacaccaggtcgagttgatttgttcttaccgttccaagattgagaccgaattgactaagatctccgacgatattttgtccgtgcttgactcccacttaattccatctgccaccactggcgagtccaaggttttctactataagatgaagggtgactaccaccgttatttggctgaattttctagtggcgatgctagagaaaaggccacaaacgcctctttagaagcatacaagaccgcttctgaaattgccaccacagagttacccccaactcacccaatccgtttgggtttggctcttaacttctctgtcttctattatgaaattcaaaactctccagacaaagcctgccatttggccaagcaagcttttgacgacgctattgctgagttggacactttatctgaagaatcttacaaagatagcacacttatcatgcaattattgagggacaatttaaccttatggacttctgacatgtccgagtccggtcaagctgaagaccaacaacaacaacaacaacatcagcaacagcagccacctgctgccgccgaaggtgaagcaccaaagtga

SEQ ID NO: 3371 - DNA, 1263 bp, Saccharomyces cerevisiae
atgcttgctgcttcattcaaacgccaaccatcacaattggtccgcgggttaggagctgttcttcgcactcccaccaggataggtcatgttcgtaccatggcaactttaaaaacaactgataagaaggcccctgaggacatcgagggctcggacacagtgcaaattgagttgcctgaatcttccttcgagtcgtatatgctagagcctccagacttgtcttatgagacttcgaaagccaccttgttacagatgtataaagatatggtcatcatcagaagaatggagatggcttgtgacgccttgtacaaggccaagaaaatcagaggtttttgccatctatctgttggtcaggaggccattgctgtcggtatcgagaatgccatcacaaaattggattccatcatcacatcttacagatgtcacggtttcacttttatgagaggtgcctcagtgaaagccgttctggctgaattgatgggtagaagagccggtgtctcttatggtaagggtggttccatgcacctttacgctccaggcttctatggtggtaatggtatcgtgggtgcccaggttcctttaggtgcaggtttagcttttgctcaccaatacaagaacgaggacgcctgctctttcactttgtatggtgatggtgcctctaatcaaggtcaagtttttgaatctttcaacatggccaaattatggaatttgcccgtcgtgttttgctgtgagaacaacaagtacggtatgggtaccgccgcttcaagatcctccgcgatgactgaatatttcaagcgtggtcaatatattccaggtttaaaagttaacggtatggatattctagctgtctaccaagcatccaagtttgctaaggactggtgtctatccggcaaaggtcctctcgttctagaatatgaaacctataggtacggtggccattctatgtctgatcccggtactacctacagaactagagacgagattcagcatatgagatccaagaacgatccaattgctggtcttaagatgcatttgattgatctaggtattgccactgaagctgaagtcaaagcttacgacaagtccgctagaaaatacgttgacgaacaagttgaattagctgatgctgctcctcctccagaagccaaattatccatcttgtttgaagacgtctacgtgaaaggtacagaaactccaaccctaagaggtaggatccctgaagatacttgggacttcaaaaagcaaggttttgcctctagggattaa

SEQ ID NO: 3372 - DNA, 1263 bp, Artificial Sequence
  Description of Artificial Sequence: Synthetic polynucleotide
atgcttgctgcttctttcaaacgccaaccatctcaattggtccgcgggttaggagctgttcttcgcactcccaccaggataggtcatgttcgtaccatggcaactttaaaaacaactgataagaaggcccctgaggacatcgagggctctgacacagtgcaaattgagttgcctgaatcttccttcgagtcttatatgttagagcctccagacttgtcttatgagacttctaaagccaccttgttacagatgtataaagatatggtcatcatcagaagaatggagatggcttgtgacgccttgtacaaggccaagaaaatcagaggtttttgccatttatctgttggtcaggaggccattgctgtcggtatcgagaatgccatcacaaaattggattccatcatcacatcttacagatgtcacggtttcacttttatgagaggtgcctctgtgaaagccgttttggctgaattgatgggtagaagagccggtgtctcttatggtaagggtggttccatgcacctttacgctccaggcttctatggtggtaatggtatcgtgggtgcccaggttcctttaggtgcaggtttagcttttgctcaccaatacaagaacgaggacgcctgctctttcactttgtatggtgatggtgcctctaatcaaggtcaagtttttgaatctttcaacatggccaaattatggaatttgcccgtcgtgttttgctgtgagaacaacaagtacggtatgggtaccgccgcttccagatcctccgcgatgactgaatatttcaagcgtggtcaatatattccaggtttaaaagttaacggtatggatattttggctgtctaccaagcatccaagtttgctaaggactggtgtttatccggcaaaggtcctctcgttttggaatatgaaacctataggtacggtggccattctatgtctgatcccggtactacctacagaactagagacgagattcagcatatgagatccaagaacgatccaattgctggtcttaagatgcatttgattgatttaggtattgccactgaagctgaagtcaaagcttacgacaagtccgctagaaaatacgttgacgaacaagttgaattagctgatgctgctcctcctccagaagccaaattatccatcttgtttgaagacgtctacgtgaaaggtacagaaactccaaccttgagaggtaggatccctgaagatacttgggacttcaaaaagcaaggttttgcctctagggattga

SEQ ID NO: 3373 - DNA, 1005 bp, Saccharomyces cerevisiae
atgtctgttacaggaactgagatcgatagtgatacagcaaaaaatattcttagtgtagatgaattacagaactatggtattaatgcctcagatcttcaaaaattgaagtctggtgggatatacacagtcaataccgttttgtcaacaacaagaagacatctatgtaaaattaaagggttaagtgaggtgaaagtggaaaaaattaaagaagctgctggaaaaatcatacaggtgggatttatccccgctactgtacaattagatataagacagcgtgtgtactccttatcaactggatctaagcaactagattcaatcctaggtggtggaataatgacaatgagtatcactgaagtatttggtgaatttaggtgtggtaagacacagatgtctcatactttgtgtgttaccacgcagcttccgagggaaatgggtggtggtgaagggaaagtagcatatattgatacagaaggcactttcaggcccgagaggattaagcaaattgcagaaggttatgaattggatcccgagtcatgtttggcaaacgtttcatatgctagagccttgaatagtgaacatcaaatggaacttgttgaacaattgggtgaagaacttagttctggagattatcgccttatcgtggtagattctataatggcaaacttcagagtagactactgcggtagaggtgaactaagcgaaagacagcaaaagctaaatcaacatcttttcaaattgaatagattggcagaggaatttaatgttgcagtatttctgacaaaccaagttcaatcagacccaggtgcttctgcattatttgcctcggcagatggtaggaaaccaattggagggcacgttctggcacatgcgtcagcaacaaggattttgttgagaaaagggcgtggtgacgaaagagttgccaagttacaagattccccagatatgcctgaaaaagaatgtgtctacgtaattggtgaaaaaggtattaccgattcaagtgactag

SEQ ID NO: 3374 - DNA, 1005 bp, Artificial Sequence
  Description of Artificial Sequence: Synthetic polynucleotide
atgtctgttacaggaactgagatcgatagtgatacagcaaaaaatattcttagtgtagatgaattacagaactatggtattaatgcctctgatcttcaaaaattgaagtctggtgggatatacacagtcaataccgttttgagtacaacaagaagacatttatgtaaaattaaagggttaagtgaggtgaaagtggaaaaaattaaagaagctgctggaaaaatcatacaggtgggatttatccccgctactgtacaattagatataagacagcgtgtgtactccttatctactggatctaagcaattggattctatcttgggtggtggaataatgacaatgagtatcactgaagtatttggtgaatttaggtgtggtaagacacagatgtctcatactttgtgtgttaccacgcagcttccgagggaaatgggtggtggtgaagggaaagtagcatatattgatacagaaggcactttcaggcccgagaggattaagcaaattgcagaaggttatgaattggatcccgagagttgtttggcaaacgtttcttatgctagagccttgaatagtgaacatcaaatggaacttgttgaacaattgggtgaagaacttagttctggagattatcgccttatcgtggtagattctataatggcaaacttcagagtagactactgcggtagaggtgaattgagcgaaagacagcaaaagttgaatcaacatcttttcaaattgaatagattggcagaggaatttaatgttgcagtatttttaacaaaccaagttcaatctgacccaggtgcttctgcattatttgcctctgcagatggtaggaaaccaattggagggcacgttttagcacatgcgtctgcaacaaggattttgttgagaaaagggcgtggtgacgaaagagttgccaagttacaagattccccagatatgcctgaaaaagaatgtgtctacgtaattggtgaaaaaggtattaccgattctagtgactga

SEQ ID NO: 3375 - DNA, 804 bp, Saccharomyces cerevisiae
atggatgtcgatgagaggttgcatcaagatgaaaatcaaacccaccctttttcgcaaaagaagtcaagcagtttcttgataaaggaaaaagctgctacaaaatccaaggatcttgaacatataaggcttcgtgacctaaatttcaatcatagaaaaaagctagatgacaaaaaattggcaaagcaaatcccagttaaggcaaatttcaagaagcctaacgaaattgaagctcgcgctaacctaaattcaaatgaattaacagatatcaaccttgactatataccggattccccatctatagagaaaatatcagggcctgaggattctattgttgtaacgccaagaaatatcatacatttacaatctgattcagatattattctcgaggaatgcgagcataattatgactgtagccctttttaccgtctgttcaactacgaaaatagaattgagcccgatgactacgaggctattataaacgctataataactgacgaaattgctggcacatatccggttttcgaacgggaattagagtaccaagaactgaaaagtcttgtcagaaagcgagattatattatgtattatttcttgtcaagggattatcgggggttttttcagttgaaagaggaacgtactttattttataggtacccttcaattgcgtacactagcccgttgaggtatctggataatggatctgaaaccgagcagtttaccggggatgatgatgaggagctccaatcatttgattttgaaaacacatcatctgtgaggactttagatagtaatatatggcgttag

SEQ ID NO: 3376 - DNA, 804 bp, Artificial Sequence
  Description of Artificial Sequence: Synthetic polynucleotide
atggatgtcgatgagaggttgcatcaagatgaaaatcaaacccaccctttttctcaaaagaagagcagcagtttcttgataaaggaaaaagctgctacaaaatccaaggatcttgaacatataaggcttcgtgacttgaatttcaatcatagaaaaaagttggatgacaaaaaattggcaaagcaaatcccagttaaggcaaatttcaagaagcctaacgaaattgaagctcgcgctaacttgaatagtaatgaattaacagatatcaaccttgactatataccggattccccatctatagagaaaataagcgggcctgaggattctattgttgtaacgccaagaaatatcatacatttacaatctgattctgatattattctcgaggaatgcgagcataattatgactgtagccctttttaccgtttattcaactacgaaaatagaattgagcccgatgactacgaggctattataaacgctataataactgacgaaattgctggcacatatccggttttcgaaagagaattagagtaccaagaattgaaaagtcttgtcagaaagagagattatattatgtattatttcttgagtagggattatagagggttttttcagttgaaagaggaacgtactttattttataggtacccttctattgcgtacactagcccgttgaggtatttggataatggatctgaaaccgagcagtttaccggggatgatgatgaggagctccaaagttttgattttgaaaacacatcttctgtgaggactttagatagtaatatatggcgttga

SEQ ID NO: 3377 - DNA, 258 bp, Saccharomyces cerevisiae
atgtcagcggagaacattagtactggctcgccgacgggcaagcagccatcctctgaagttaatcttggcgaaagagaagctggaacaaaaaatgagaggatgatgcgccaaaccaaacttctgaaggatacattagacttgttgtggaataaaaccttagagcagcaagaggtgtgtgagcaactaaagcaagaaaatgattatctagaagattacattggcaatttgatgagatccagtaatgtgttggaaaaataa

SEQ ID NO: 3378 - DNA, 258 bp, Artificial Sequence
  Description of Artificial Sequence: Synthetic polynucleotide
atgagtgcggagaacattagtactggctctccgacgggcaagcagccatcctctgaagttaatcttggcgaaagagaagctggaacaaaaaatgagaggatgatgcgccaaaccaaacttttgaaggatacattagacttgttgtggaataaaaccttagagcagcaagaggtgtgtgagcaattgaagcaagaaaatgattatttggaagattacattggcaatttgatgagatccagtaatgtgttggaaaaatga

SEQ ID NO: 3379 - DNA, 324 bp, Saccharomyces cerevisiae
atgctaatactgttacgtttatctgaggtttgtgtgaattttgtgataattatcgggattccattgttgatagaggcttcaatactatgtatacagaacatactagaacttctcctcaagggtatagggatcctcaaatttaatcggtatttgcatacaataatattacgattatttttcctatcgttttatatgcttcattttcccattacattatcaattcttgcatttcagcttccattaaacttgctaactctttctcaagcttcatttcatcttcctagatctcatatgatactataccagcagcaagaatgctactaa

SEQ ID NO: 3380 - DNA, 324 bp, Artificial Sequence
  Description of Artificial Sequence: Synthetic polynucleotide
atgttgatattattacgtttatctgaggtttgtgtgaattttgtgataattatcgggattccattgttgatagaggcttctatattatgtatacagaacatattggaacttctcctcaagggtatagggatcctcaaatttaatagatatttgcatacaataatattaagattatttttcttgagtttttatatgcttcattttcccattacattatccattcttgcatttcagcttccattaaacttgttgactctttctcaagcttcttttcatcttcctagatctcatatgatattataccagcagcaagaatgctactga

SEQ ID NO: 3381 - DNA, 735 bp, Saccharomyces cerevisiae
atgtttaaaagaatcgcaatagcccagataagaacgtatacaaatggcgttgttttcaagacagcctctaaacccaaaagaagatggattccatggacaatttttgggggaagttttcttggagggtggtacttgacacagcatatgacgttcacggacttactagcttattggagatatgatgccctacccaagaacgcagatgaagtcgtcaaatatcacgctgatctgaatagacgtttaaatggcctacccatagtaaaacagttggagaatgctggttttgtacaagtgattgctaatgaagaggagaacttgttagtgtcaagggcattaaatacaccaggtggcgtcgctataccaccaagagtttactacaaccccagtaggcgtgaaactgtcgggctataccatttaggaatgaaacttactggttatcctttcttaattcacggaggcattttagcaacagttattgaagatttaatgaaggaggccattagactcgaaaaaggaacaaaaaatataaaccaagaaaccaagaatttgagtatctcgtacaagttccccacgttagctaatcaatttgttgtagtaagaaccaccgatcttcagcaatacggtaacaaaactaaattaaaggctgaacttatggaccaaagtggcaacaggacattggtcaaagctaatgccacgttttctagcgaacaagggaatccaaaagaagaaaaatag

SEQ ID NO: 3382 - DNA, 735 bp, Artificial Sequence
  Description of Artificial Sequence: Synthetic polynucleotide
atgtttaaaagaatcgcaatagcccagataagaacgtatacaaatggcgttgttttcaagacagcctctaaacccaaaagaagatggattccatggacaatttttgggggaagttttcttggagggtggtacttgacacagcatatgacgttcacggacttattagcttattggagatatgatgccttgcccaagaacgcagatgaagtcgtcaaatatcacgctgatttgaatagacgtttaaatggcttgcccatagtaaaacagttggagaatgctggttttgtacaagtgattgctaatgaagaggagaacttgttagtgtctagggcattaaatacaccaggtggcgtcgctataccaccaagagtttactacaaccccagtaggcgtgaaactgtcgggttataccatttaggaatgaaacttactggttatcctttcttaattcacggaggcattttagcaacagttattgaagatttaatgaaggaggccattagactcgaaaaaggaacaaaaaatataaaccaagaaaccaagaatttgagtatctcctacaagttccccacgttagctaatcaatttgttgtagtaagaaccaccgatcttcagcaatacggtaacaaaactaaattaaaggctgaacttatggaccaaagtggcaacaggacattggtcaaagctaatgccacgttttctagcgaacaagggaatccaaaagaagaaaaatga

SEQ ID NO: 3383 - DNA, 636 bp, Saccharomyces cerevisiae
atggccactaagcaattactgagacgtcaaatcaaaagggtaataaatgctcttgactacgatattatcgctgcagagtcgcatactatttctcaagcagtacgctcattgatcgcttccgccaattctaggcgtgtagcgtgttatatgagcatggataaaggagaagtaacgactggagaaatcattaagaatttatttcaagatggccaggaggtctttctgccaagatgtactcatacttctgaatcgaaacacttcaaattacgggaagatcatcatccacatttaatattccatcgaatgagtagtttgaaaatggttcgtgatttgaagcctcaaggtccatatcaactaaaagagcctgaaccgcatattgaggaatcagatattctagatgtcgtattggtgcctggagtggcgtttgatattaaaactggtgcaaggatgggtcacggtgctgggtattatgacgattttttccaacggtataagatactgcatgaaggccaaaagcccctcctagttggactatgtcttatggaacaggtggcctctccaattcctttagaaaaacatgattattccatggattgtatagtatgcggagatggatccatacattggtttcaataa

SEQ ID NO: 3384 - DNA, 636 bp, Artificial Sequence
  Description of Artificial Sequence: Synthetic polynucleotide
atggccactaagcaattattaagacgtcaaatcaaaagggtaataaatgctcttgactacgatattatcgctgcagagtctcatactatttctcaagcagtacgctctttgatcgcttccgccaattctaggcgtgtagcgtgttatatgagcatggataaaggagaagtaacgactggagaaatcattaagaatttatttcaagatggccaggaggtctttttaccaagatgtactcatacttctgaaagtaaacacttcaaattaagagaagatcatcatccacatttaatattccatagaatgagtagtttgaaaatggttcgtgatttgaagcctcaaggtccatatcaattgaaagagcctgaaccgcatattgaggaaagtgatattttagatgtcgtattggtgcctggagtggcgtttgatattaaaactggtgcaaggatgggtcacggtgctgggtattatgacgattttttccaaagatataagatattacatgaaggccaaaagcccctcttggttggattatgtcttatggaacaggtggcctctccaattcctttagaaaaacatgattattccatggattgtatagtatgcggagatggatccatacattggtttcaatga

SEQ ID NO: 3385 - DNA, 2385 bp, Saccharomyces cerevisiae
atggcagcaaaaagaggattagccaaacaaaaatctagggtaaccaaggcctgtgatagatgccataggaaaaagattaagtgcaacagtaagaagccatgttttgggtgtattgggtctcaatcaaaatgtacgtatagaaatcaatttcgtgaaccgattgaggcttttttcaattatactggtagtctcagtaatgatttggataatgctaagtgcagcatagcaaaattgaaggcacagttacctccaagcgcaccggcctctttacagaaaggcctagcaaacatttgcactgagcttgaaaaaatacaacctcagctttacctcaatctggacagtaaggaaattagctcgtatggtggcctgaaatcgatagaaacagaaattatcgggaaacagtcaaaatctttgaataggttctccaacgcttttgaaagcaatactgcacaaaatgtcagtatgtactttggggtctattcaccgttgctatattttgcctctacgggtattagctggataactaaaaaattgatttcatgttcgaatgatagggagacgagagaaactatctatttatttttgaagtttcttgacgctagctctgctagccatgctggtcctaaagtaacttcgatatctcctttagagtattattcaaagctaaacggactttcatgtgggaacgacgtacttattcaacacattatgtcaaatatatcgaatgaaatcaaaggaaatacaaacattaaccaaacaatcaaattcaataaaccaacagactggtttatgtacggagtacaattgatggaacagcaccacaaggcgttggatcgtaaaagttccaaaaaattacttcctttgaaatattttcttgagcaagatgagttgattttttgtctctgtcttgaatattttgaaagatccctattttcgacaatgtacgacttgactattttaaagggcttagtctcgttgatgaaacacagatattggatagacgatccttttgtgctgggaagaattatttccacgatgtccaggcgaagtttggatgctggtttgaatcgttgggaatattatattggtcaggatgaggacactgccgaagaatatcgtaagttatggtgggactgctactggtgggatagatggtattcattggtcaccggtaagcagccattgataccacatgaaatgacttcgtgtctctttcccaaggatgtggttggattaggggtagatgattcgatggactgttttactttaataaacttggtggagctcgacccaagtaagtttgatatttgtatctctttcggctatattctattaacgaaaattattacagcggtattctctggtttgctttataatcgacactttacagactacagattatttgcaactcctaacgctaaagacctaaatggaaccgcacgacagcttatggtagagttttcaaaaatatgtaaaatttttcagtgcatacaagacaaactaatccctttcctcaaacaatattctgaaaatagtaatgtatttgaactatacacccatttcggatttgcaaaggtttgttgttttcagggaatggagagtttaattttaaggatacaaaatcttctacaagaaagagagagaattgaacttgattcctgcgtaaaggacatcaggcttcaaacctttgaagcatctgtagatattttgacggatgttctcaagcacgaagatacgttctatattttccgttgttcgtggttcatatatgccatcttgatgaatattaccttgaattttatcgagacccctagaaggaactcgatatgttatttatccttgatgtgccgcatgatagcctcatataatgacttatttgtgagctctggcaatgttaatttcaagggcaacaacgccttctctaaaaagttggaaaatggaacagcggtttctttcatcctaacacgcatctgctgtcagatgtacacacgttcacagaaaatggctaaggaatcgctgttttgtgaattgaaaaaatatggccaggcttgctcagatgctggtcaagctgcgttggacattgaatgtatctggtacaggaatattataggcgaacacaaagaatcaagcttccgtaaagaaattctcagcattcttgatagggaaatgggtgatttggtgaataatagagttattggcgtacagggaaaaaatcaagaaggtgcttgttatgagaagttgtcacccagcagcaccagtgtttcagttggcatggacttttgtagcctcgaaaattttgtgactgcagaatctctaccagaccttctcaatctattttgggaggacactgaatttggtattactaaagaaaacctcggagagtaa

SEQ ID NO: 3386 - DNA, 2385 bp, Artificial Sequence
  Description of Artificial Sequence: Synthetic polynucleotide
atggcagcaaaaagaggattagccaaacaaaaatctagggtaaccaaggcctgtgatagatgccataggaaaaagattaagtgcaacagtaagaagccatgttttgggtgtattgggtctcaaagtaaatgtacgtatagaaatcaatttcgtgaaccgattgaggcttttttcaattatactggtagtctcagtaatgatttggataatgctaagtgcagcatagcaaaattgaaggcacagttacctccaagcgcaccggcctctttacagaaaggcttggcaaacatttgcactgagcttgaaaaaatacaacctcagctttacctcaatttggacagtaaggaaattagctcttatggtggcttgaaatctatagaaacagaaattatcgggaaacagtccaaatctttgaataggttctccaacgcttttgaaagcaatactgcacaaaatgtcagtatgtactttggggtctattctccgttgttatattttgcctctacgggtattagctggataactaaaaaattgattagttgttctaatgatagggagacgagagaaactatctatttatttttgaagtttcttgacgctagctctgctagccatgctggtcctaaagtaacttccatatctcctttagagtattattccaagttgaacggactttcctgtgggaacgacgtacttattcaacacattatgagtaatatatccaatgaaatcaaaggaaatacaaacattaaccaaacaatcaaattcaataaaccaacagactggtttatgtacggagtacaattgatggaacagcaccacaaggcgttggatcgtaaaagttccaaaaaattacttcctttgaaatattttcttgagcaagatgagttgattttttgtctctgtcttgaatattttgaaagatccttattttctacaatgtacgacttgactattttaaagggcttagtctctttgatgaaacacagatattggatagacgatccttttgtgttgggaagaattatttccacgatgtccaggagaagtttggatgctggtttgaatcgttgggaatattatattggtcaggatgaggacactgccgaagaatatcgtaagttatggtgggactgctactggtgggatagatggtattctttggtcaccggtaagcagccattgataccacatgaaatgacttcttgtctctttcccaaggatgtggttggattaggggtagatgattctatggactgttttactttaataaacttggtggagctcgacccaagtaagtttgatatttgtatctctttcggctatattttattaacgaaaattattacagcggtattctctggtttgctttataatagacactttacagactacagattatttgcaactcctaacgctaaagacttgaatggaaccgcaagacagcttatggtagagttttccaaaatatgtaaaatttttcagtgcatacaagacaaattaatccctttcctcaaacaatattctgaaaatagtaatgtatttgaattatacacccatttcggatttgcaaaggtttgttgttttcagggaatggagagtttaattttaaggatacaaaatcttttacaagaaagagagagaattgaacttgattcctgcgtaaaggacatcaggcttcaaacctttgaagcatctgtagatattttgacggatgttctcaagcacgaagatacgttctatattttccgttgttcttggttcatatatgccatcttgatgaatattaccttgaattttatcgagacccctagaaggaacagcatatgttatttatccttgatgtgccgcatgatagcctcttataatgacttatttgtgagctctggcaatgttaatttcaagggcaacaacgccttctctaaaaagttggaaaatggaacagcggtttctttcatcttaacacgcatctgctgtcagatgtacacacgttctcagaaaatggctaaggaatctttattttgtgaattgaaaaaatatggccaggcttgctctgatgctggtcaagctgcgttggacattgaatgtatctggtacaggaatattataggcgaacacaaagaaagtagcttccgtaaagaaattctcagcattcttgatagggaaatgggtgatttggtgaataatagagttattggcgtacagggaaaaaatcaagaaggtgcttgttatgagaagttgagccccagcagcaccagtgtttctgttggcatggacttttgtagcctcgaaaattttgtgactgcagaatctttaccagaccttctcaatttattttgggaggacactgaatttggtattactaaagaaaacctcggagagtga

SEQ ID NO: 3387 - DNA, 912 bp, Saccharomyces cerevisiae
atgtccacaactgattcggggttcgtactttaccactatacgccaagtaaagcggctgcaatcgtatttgtcgtactcttcattataatgacagtcatttttgccgttcaaactttatatgctgcgagaaaatcttctaaggcattgaaaaataatccatttgagtcatctgatgataaggtcgatagtcttgaggatgctgaatacaagcaactaaaaatcacacccacagtttttgcgtttatacctttcttcactggctgcatcatggaagctgtcgggtatatcgggagggctctatccagttccaatcctgaaagaacgaccccatatattatccaatctgttcttttattagtcgctccagcactaatagctgcgacgatttatatgatttttggaaggttattacatgttatgaggtgccaatctttaattttgatttctgcacgctttggtacgactttctttgttgtgggagatgtgtttagtttctttttacaagctgcaggtggcggactaatgtctaaggcaggatcaacgaagactggttcaggactcataactgcgggtctttttgtacaggtaattttttttggatttttcattatcaatgagataagattcacagtaaatgttaaaaggagatgcttattttacgaagatatttccagaaagtggatctttgtgaatgctaccctattattaagcagtatgttgatcctactacgttcaattgtccgaatagttgaatttattcagggattcaatggctatataatctctcatgagtatttcatatatgtcttcgatgctgtacctatgttattggtaataatagcatttagtgtgggatcctttttcggcaacgtattcgatgttataaaggagtgtcaaacgttaagtaattag

SEQ ID NO: 3388 - DNA, 912 bp, Artificial Sequence
  Description of Artificial Sequence: Synthetic polynucleotide
atgtccacaactgattctgggttcgtactttaccactatacgccaagtaaagcggctgcaatcgtatttgtcgtactcttcattataatgacagtcatttttgccgttcaaactttatatgctgcgagaaaatcttctaaggcattgaaaaataatccatttgagtcttctgatgataaggtcgatagtcttgaggatgctgaatacaagcaattgaaaatcacacccacagtttttgcgtttatacctttcttcactggctgcatcatggaagctgtcgggtatatcgggagggctttgtccagttccaatcctgaaagaacgaccccatatattatccaatctgttcttttattagtcgctccagcattaatagctgcgacgatttatatgatttttggaaggttattacatgttatgaggtgccaatctttaattttgatttctgcacgctttggtacgactttctttgttgtgggagatgtgtttagtttctttttacaagctgcaggtggcggattaatgtctaaggcaggaagtacgaagactggttctggactcataactgcgggtctttttgtacaggtaattttttttggatttttcattatcaatgagataagattcacagtaaatgttaaaaggagatgcttattttacgaagatatttccagaaagtggatctttgtgaatgctaccttattattaagcagtatgttgatcttattacgttctattgtcagaatagttgaatttattcagggattcaatggctatataatctctcatgagtatttcatatatgtcttcgatgctgtacctatgttattggtaataatagcatttagtgtgggatcctttttcggcaacgtattcgatgttataaaggagtgtcaaacgttaagtaattga

SEQ ID NO: 3389 - DNA, 921 bp, Saccharomyces cerevisiae
atgctgtggcatcctgatggttacgagcctcgagtaaaggctatagaagaagaaatctacgctaacgaagacaggaaggatgttccggataagtttaaatttgatactgtaacgaaaactggaatggtcaagcttcgtgttttcaaagacgatctaatattcaaatcacaacgatctataaatctgtttgcaagtaggaagcatcccttcaagtcatttacggcggatggagagggcttgccgttatttgccttccgcactaagaagcctttttttgttaggcgagattatgtgggttttcttttttatcaatacgagatattgaaaaatggggacttccctgaagagtcggattatgaggtaaaaggagagtgcgacggtttcactctgtttaaagttcttttttgcactgttaaggtgaagaaaacaagctattatcgcaataaggagagaatatcccacatactagagctcaacttcggaaaaaaggaagattttaggatattgacactggttagatgctctgaaattagatcagtatatgttgtagaggataaaaaggttattatgaaatgggttttcacctcagagagtaaatttaatttgaattcctcactgttcatcataaaggccgcaattggctgtttaccagaggtgggtgatagcatagaggacatacctaaatttgattgggactcctgccctactattggatgtatgtgcagaactaaggaggctctttttcaacctgagtctcgaaaagatatgcatatatgccctcaattatttttaggggaaaccggaccgccacattataatgagagttcagttccgtggctaacaaaaatgaatatatgcatttcagtgctaataaatttccttgaatataccgatttcatgtcttggatgcaggataattag

SEQ ID NO: 3390 - DNA, 921 bp, Artificial Sequence
  Description of Artificial Sequence: Synthetic polynucleotide
atgttatggcatcctgatggttacgagcctagagtaaaggctatagaagaagaaatctacgctaacgaagacaggaaggatgttccggataagtttaaatttgatactgtaacgaaaactggaatggtcaagcttcgtgttttcaaagacgatttgatattcaaatctcaaagatctataaatttatttgcaagtaggaagcatcccttcaagagctttacggcggatggagagggcttgccgttatttgccttccgcactaagaagcctttttttgttaggagagattatgtgggttttcttttttatcaatacgagatattgaaaaatggggacttccctgaagagtctgattatgaggtaaaaggagagtgcgacggtttcactttatttaaagttcttttttgcactgttaaggtgaagaaaacaagctattatcgcaataaggagagaatatcccacatattggagctcaacttcggaaaaaaggaagattttaggatattgacattagttagatgctctgaaattagatctgtatatgttgtagaggataaaaaggttattatgaaatgggttttcacctctgagagtaaatttaatttgaattcctctttattcatcataaaggccgcaattggctgtttaccagaggtgggtgatagcatagaggacatacctaaatttgattgggactcctgccctactattggatgtatgtgcagaactaaggaggctctttttcaacctgagtctagaaaagatatgcatatatgccctcaattatttttaggggaaaccggaccgccacattataatgagagttctgttccgtggttgacaaaaatgaatatatgcatttctgtgttgataaatttccttgaatataccgatttcatgtcttggatgcaggataattga

SEQ ID NO: 3391 - DNA, 426 bp, Saccharomyces cerevisiae
atgctcatcgatcaaatcgtggcagcggtaccaggggtacctgatataagtggcaacgcttcggccctatcgttacagagacgcagtcaagagttcgccacctcatggatatcaatgacatatagtcagagttatggtgacctggcacagaactggcagaatgacgaaggtggagcaggaaattttgattcttatgctgaagagaagttacagaatttcttttcaggtaatagggattggaaatactgctttgctgctgaggacacgaaaaacggtgagccacttgattacgatgacatacctggtgacggtgcaggcacgggttcggcattcaagtctgagatatattttaacacttacggtggtatagataattattgtaatgacgagcatatcggtgctcagaacactggagatggtcgataa

SEQ ID NO: 3392 - DNA, 426 bp, Artificial Sequence
  Description of Artificial Sequence: Synthetic polynucleotide
atgctcatcgatcaaatcgtggcagcggtaccaggggtacctgatataagtggcaacgcttctgccctttctttacagagacgcagtcaagagttcgccaccagttggatatccatgacatatagtcagagttatggtgacttggcacagaactggcagaatgacgaaggtggagcaggaaattttgattcttatgctgaagagaagttacagaatttcttttctggtaatagggattggaaatactgctttgctgctgaggacacgaaaaacggtgagccacttgattacgatgacatacctggtgacggtgcaggcacgggttctgcattcaagtctgagatatattttaacacttacggtggtatagataattattgtaatgacgagcatatcggtgctcagaacactggagatggtcgttga

SEQ ID NO: 3393 - DNA, 720 bp, Saccharomyces cerevisiae
atgatgcctacctacctaggaaagttaacgtggtcatacttttttaccactttaggactagcttgtgcttacaacgtaacagaacaaatggaatttgatcagttcaaatcagattaccttgcctgtctcgcaccagaacacagaaacattgtagtcgatttggctagtaatggattcataacaatttcaccgatggcgaatgcaacaattgactttgaggatgtaactagtgattattttaactgcactgacgtcaatactaacgtacaggttacgatcgcgtcattttacaatgaatacggttttgggcccgatgataacggctattatcacgctatggaagaaccctcagaatttgaacggcatgacatggatgttaggctctacagaccatactatccaggtgagtttgtcatgggaagacgttcagatgcacttggagtgactggttttgaccaaaaggactgcgcaggtgagggtttttacgacgaacaaactgcagcaacgtcatgtcaaaatataggctccactcagtacgccaagtcggtcaggtcttataactatggatgctgcggcggggcggtctggatcaggatttggccgcatcacaattgttcaaaaggtcatgatcaccatttcaagataaggccaggccagatgctatgctggaatgtcaacccatattcttggatgcaaccagaatccggatggaatccgtaa

SEQ ID NO: 3394 - DNA, 720 bp, Artificial Sequence
  Description of Artificial Sequence: Synthetic polynucleotide
atgatgcctacctacttgggaaagttaacgtggagttacttttttaccactttaggattggcttgtgcttacaacgtaacagaacaaatggaatttgatcagttcaaatctgattaccttgcctgtctcgcaccagaacacagaaacattgtagtcgatttggctagtaatggattcataacaatttctccgatggcgaatgcaacaattgactttgaggatgtaactagtgattattttaactgcactgacgtcaatactaacgtacaggttacgatcgcgtctttttacaatgaatacggttttgggcccgatgataacggctattatcacgctatggaagaacccagtgaatttgaaagacatgacatggatgttaggctctacagaccatactatccaggtgagtttgtcatgggaagacgttctgatgcacttggagtgactggttttgaccaaaaggactgcgcaggtgagggtttttacgacgaacaaactgcagcaacgtcctgtcaaaatataggctccactcagtacgccaagtctgtcaggtcttataactatggatgctgcggcggggcggtctggatcaggatttggccgcatcacaattgttctaaaggtcatgatcaccatttcaagataaggccaggccagatgttgtgctggaatgtcaacccatattcttggatgcaaccagaatccggatggaatccgtga

SEQ ID NO: 3395 - DNA, 300 bp, Saccharomyces cerevisiae
atggcccatctctcactaaatcagtacaaatgcactcacatcattatgcacggcacttgcctcagcggtttataccctgtgccatttacccataaagcccacgattatccacattttaatatctatatctcattcggcggccccaaatattgtataactgcccttaatacatacgttataccactttttcaccatctactatccactcaatttatatacacttatgtcaatattacaaaaaaatcaccactaaaatcacctaaacataaaaatattctatccttcaacgataatacataa

SEQ ID NO: 3396 - DNA, 300 bp, Artificial Sequence
  Description of Artificial Sequence: Synthetic polynucleotide
atggcccatctctccttgaatcagtacaaatgcactcacatcattatgcacggcacttgcctcagcggtttataccctgtgccatttacccataaagcccacgattatccacattttaatatctatatctctttcggcggccccaaatattgtataactgcccttaatacatacgttataccactttttcaccatttattatccactcaatttatatacacttatgtcaatattacaaaaaaatctccattgaaatctcctaaacataaaaatattttatccttcaacgataatacatga

SEQ ID NO: 3397 - DNA, 369 bp, Saccharomyces cerevisiae
atgaaagtttccgataggcgtaagtttgaaaaagcaaactttgacgagtttgagtcggctctaaataacaaaaacgacttggtacattgtccctcaataactttatttgaatcgatccccacggaagtgcggtcattctacgaagacgaaaagtctggcctaatcaaagtggtaaaattcagaactggtgcaatggataggaaaaggtcttttgaaaaaattgtcatttccgtcatggtcgggaaaaatgtacaaaagttcctgacgtttgttgaagacgaaccagatttccagggcggaccaatcccttcaaacaaaccacgtgatggtctacacgttgtttcaagtgcatactttgaaattcaatag

SEQ ID NO: 3398 - DNA, 369 bp, Artificial Sequence
  Description of Artificial Sequence: Synthetic polynucleotide
atgaaagtttccgataggcgtaagtttgaaaaagcaaactttgacgagtttgagtctgctttgaataacaaaaacgacttggtacattgtccctccataactttatttgaaagtatccccacggaagtgagatctttctacgaagacgaaaagtctggcttaatcaaagtggtaaaattcagaactggtgcaatggataggaaaaggtcttttgaaaaaattgtcatttccgtcatggtcgggaaaaatgtacaaaagttcttgacgtttgttgaagacgaaccagatttccagggcggaccaatcccttccaacaaaccacgtgatggtttacacgttgtttctagtgcatactttgaaattcaatga

SEQ ID NO: 3399 - DNA, 5046 bp, Saccharomyces cerevisiae
atggtctacacgttgtttcaagtgcatactttgaaattcaatagaaaggattacgataccctttctcttttttacctcaacagaggatactataatgagttgagtttccgtgtcctggaacgttgtcacgaaaaagcgagtgctaggccgaacgacagctctacgatgcgtactttcactgactttgtttccggcgcacctattgtaaggagtcttcagaaaagtaccataaggaaatatgggtacaatttggcaccctacatgtttttgttactacacgtagatgagctatcgattttttctgcataccaagcaagtttacctggcgaaaagaaagtcgacacagagcggctgaagcgtgatctatgcccacgtaaacccactgagataaagtacttttcacagatatgtaacgatatgatgaacaaaaaggaccgattgggtgatattttgcatattatcttgcgagcatgtgcgctcaatttcggggcgggtccccgtggtggcgctggtgacgaagaggatcgatccattacgaatgaagaacccattattccctctgtggacgagcatggcttgaaagtatgtaagttgcgcagtcctaacactccacgaagactcagaaaaacactagatgccgtgaaagctttattggtgtcgtcttgtgcttgtaccgcaagggatttagatatatttgatgacaacaacggcgttgcgatgtggaaatggatcaaaattctgtaccacgaagtagcgcaggaaaccgcgctgaaggactcttatagaataactttggtaccttcttctgatggtgtatcagtatgtggaaaactgtttaatcgcgagtatgtccgcggcttttactttgcatgcaaggctcagtttgataacctttgggaagaattgaacgactgcttttatatgcctacagtggttgatattgccagcctcattttgcgtaatcgagaagttttgttcagagagccaaagcgaggaattgacgagtatctggagaacgattctttccttcaaatgatacctgttaaatatcgtgaaattgtgctgcccaagttgagaagagatactaacaaaatgaccgcggctcttaaaaataaagtcactgttgcaattgacgagcttacggtgccacttatgtggatgatccattttgccgtaggatacccttaccgttatccagagcttcagctactcgcttttgccggtcctcagcgcaacgtatacgtcgatgatacaacaagacgcatccaactgtacactgattacaacaagaacggttcatcggagcctcgacttaagacgcttgacggactcacttcagattacgtgttttattttgtcactgtgctaaggcaaatgcaaatatgtgcgcttggtaacagttatgacgcttttaatcatgatccttggatggatgtggtgggatttgaggatccagatcaagtaacaaatcgagacatttcgaggatagttttgtattcctacatgtttctgaataccgcgaagggctgtctggttgaatacgcaacttttcggcagtacatgagggaacttccgaagaatgcacctcagaagctgaattttcgggagatgcgtcaggggttgattgccctaggacggcactgcgtaggtagcagatttgaaacagatttgtacgagtcggcgacgagtgaactcatggccaatcattccgttcaaacagggcgaaatatttacggtgtggattccttttcgttaactagtgtcagtgggacgaccgccactttattgcaggaacgagcttccgagcgctggattcaatggttaggccttgaaagcgactaccattgttcattctctagtactcggaatgcggaagacgtagtggcaggtgaggcggcgagttcagatcatcatcaaaaaatttcaagagtaacgcgaaaaaggccccgagagcccaagagtacaaacgatatcctcgtcgcaggccagaaactctttggcagctcctttgaattcagggacttgcatcagttgcgcttatgtcatgaaatatacatggcagacacaccctctgtggcagtacaggccccaccgggctatggtaagacggagttatttcatctccccttgatagcactggcgtctaagggcgacgtgaaatatgtgtcgtttctgtttgtaccgtacacagtgttgcttgctaattgcatgatcaggttgagccgatgcggttgcttgaatgtggcccctgtaagaaactttattgaagaaggttgcgatggcgttactgatttatacgtggggatctacgatgatcttgctagcactaatttcacagacaggatagctgcgtgggagaatattgttgagtgcacctttaggaccaacaacgtaaaattgggttacctcattgtagatgagtttcacaactttgaaacggaggtctaccggcagtcgcaatttgggggcataactaaccttgattttgacgcttttgagaaagcaatctttttgagcggcacagcacctgaggctgtagctgatgctgcgttgcagcgtattgggcttacgggactggccaagaagtcgatggacatcaacgagctcaaacggtcggaagatctcagcagaggtctatccagctatccaacacggatgtttaatctaatcaaggagaaatccgaggtgcctttagggcatgttcataaaatttggaagaaagtggaatcacagcccgaagaagcactgaagcttcttttagccctctttgaaattgaaccagagtcgaaggccattgtagttgcaagcacaaccaacgaagtggaagaattggcctgctcttggagaaagtattttagggtggtatggatacacgggaagctgggtgctgcagaaaaggtgtctcgcacaaaggagtttgtcactgacggtagcatgcgagttctcatcggaacgaaattagtgactgaaggaattgacattaagcaattgatgatggtgatcatgcttgataatagacttaatattattgagctcattcaaggcgtagggagactaagagatgggggcctctgttatctattatctagaaaaaacagttgggcggcaaggaatcgtaagggtgaattaccaccgattaaggaaggctgtataaccgaacaggtacgcgagttctatggacttgaatcaaagaaaggaaaaaagggccagcatgttggatgctgtggctccaggacagacctgtctgctgacacagtggaactgatagaaagaatggacagattggctgaaaaacaggcgacagcttccatgtcgatcgttgcgttaccgtctagcttccaggagagcaatagcagtgacaggtgcagaaagtattgcagcagtgatgaggacagcgacacgtgcattcatggtagtgctaatgccagtaccaatgcgactaccaactccagcactaatgctactaccactgccagcaccaacgtcaggactagtgctactaccactgccagcatcaacgtcaggactagtgcgactaccactgaaagtaccaactccagcactaatgctactaccactgccagcaccaacgtcaggactagtgctactaccactgccagcatcaacgtcaggactagtgcgactaccactgaaagtaccaactccaacactagtgctactaccaccgaaagtaccgactccaacactagtgctactaccaccgaaagtaccgactccaacactagtgctactaccactgctagcaccaactccagcactaatgccactaccactgctagcaccaactccagcactaatgccactaccactgaaagtaccaacgctagtgccaaggaggacgccaataaagatggcaatgctgaggataatagattccatccagtcaccgacattaacaaagagtcgtataagcggaaagggagtcaaatggttttgctagagagaaagaaactgaaagcacaatttcccaatacttccgagaatatgaatgtcttacagtttcttggatttcggtctgacgaaattaaacatcttttcctctatggtattgacgtatacttctgcccagagggagtattcacacaatacggattatgcaagggctgtcaaaagatgttcgagctctgtgtctgttgggctggccagaaagtatcgtatcggaggatggcttgggaagcactagctgtggagagaatgctgcgaaatgacgaggaatacaaagaatacttggaagacatcgagccatatcatggggaccctgtaggatatttgaaatattttagcgtaaaaaggggagagatctactctcagatacagagaaattatgcttggtacctggccattactagaagaagagaaacaattagtgtattggattcgacaagaggcaagcaagggagccaagttttccgcatgtctggaaggcagatcaaagagttgtattataaagtatggagcaacttgcgtgaatcgaagacagaggtgctgcagtactttttgaactgggacgaaaaaaagtgccgggaagaatgggaggcaaaagacgatacggtctttgtggaagcgctcgagaaagttggagtttttcagcgtttgcgttccatgacgagcgctggactgcagggtccgcagtacgtcaagctgcagtttagcaggcatcatcgacagttgaggagcagatatgaattaagtctaggaatgcacttgcgagatcagcttgcgctgggagttaccccatctaaagtgccgcattggacggcattcctgtcgatgctgatagggctgttctgcaataaaacatttcggcagaaactggaatatcttttggagcagatttcggaggtgtggttgttaccacattggcttgatttggcaaacgttgaagttctcgctgcagataacacgagggtaccgctgtacatgctgatggtagcggttcacaaagagctggatagcgatgatgttccagacggtagatttgatatattattatgtagagattcgagcagagaagttggagagtga

SEQ ID NO: 3400 - DNA, 5046 bp, Artificial Sequence
  Description of Artificial Sequence: Synthetic polynucleotide
atggtctacacgttgtttcaagtgcatactttgaaattcaatagaaaggattacgataccctttctcttttttacctcaacagaggatactataatgagttgagtttccgtgtcttggaacgttgtcacgaaaaagcgagtgctaggccgaacgacagctctacgatgcgtactttcactgactttgtttccggcgcacctattgtaaggagtcttcagaaaagtaccataaggaaatatgggtacaatttggcaccctacatgtttttgttattacacgtagatgagttatccattttttctgcataccaagcaagtttacctggcgaaaagaaagtcgacacagagaggttaaagcgtgatttatgcccacgtaaacccactgagataaagtacttttcccagatatgtaacgatatgatgaacaaaaaggacagattgggtgatattttgcatattatcttgagagcatgtgcgctcaatttcggggcgggtccccgtggtggcgctggtgacgaagaggatagatccattacgaatgaagaacccattattccctctgtggacgagcatggcttgaaagtatgtaagttgcgcagtcctaacactccaagaagactcagaaaaacattagatgccgtgaaagctttattggtgtcttcttgtgcttgtaccgcaagggatttagatatatttgatgacaacaacggcgttgcgatgtggaaatggatcaaaattttataccacgaagtagcgcaggaaaccgcgttaaaggactcttatagaataactttggtaccttcttctgatggtgtatctgtatgtggaaaattatttaatcgcgagtatgtccgcggcttttactttgcatgcaaggctcagtttgataacctttgggaagaattgaacgactgcttttatatgcctacagtggttgatattgccagcctcattttgcgtaatagagaagttttgttcagagagccaaagagaggaattgacgagtatttggagaacgattctttccttcaaatgatacctgttaaatatcgtgaaattgtgttacccaagttgagaagagatactaacaaaatgaccgcggctcttaaaaataaagtcactgttgcaattgacgagcttacggtgccacttatgtggatgatccattttgccgtaggatacccttaccgttatccagagcttcagttgctcgcttttgccggtcctcagcgcaacgtatacgtcgatgatacaacaagacgcatccaattgtacactgattacaacaagaacggttcttctgagcctcgtcttaagacgcttgacggactcacttctgattacgtgttttattttgtcactgtgttaaggcaaatgcaaatatgtgcgcttggtaacagttatgacgcttttaatcatgatccttggatggatgtggtgggatttgaggatccagatcaagtaacaaatagagacatttctaggatagttttgtattcctacatgtttttgaataccgcgaagggctgtttggttgaatacgcaacttttagacagtacatgagggaacttccgaagaatgcacctcagaagttgaattttagagagatgcgtcaggggttgattgccttaggaagacactgcgtaggtagcagatttgaaacagatttgtacgagtctgcgacgagtgaactcatggccaatcattccgttcaaacagggagaaatatttacggtgtggattccttttctttaactagtgtcagtgggacgaccgccactttattgcaggaaagagcttccgagcgctggattcaatggttaggccttgaaagcgactaccattgttctttctctagtactagaaatgcggaagacgtagtggcaggtgaggcggcgagttctgatcatcatcaaaaaatttctagagtaacgagaaaaaggcccagagagcccaagagtacaaacgatatcctcgtcgcaggccagaaactctttggcagctcctttgaattcagggacttgcatcagttgcgcttatgtcatgaaatatacatggcagacacaccctctgtggcagtacaggccccaccgggctatggtaagacggagttatttcatctccccttgatagcattagcgtctaagggcgacgtgaaatatgtgtcctttttgtttgtaccgtacacagtgttgcttgctaattgcatgatcaggttgagcagatgcggttgcttgaatgtggcccctgtaagaaactttattgaagaaggttgcgatggcgttactgatttatacgtggggatctacgatgatcttgctagcactaatttcacagacaggatagctgcgtgggagaatattgttgagtgcacctttaggaccaacaacgtaaaattgggttacctcattgtagatgagtttcacaactttgaaacggaggtctacagacagtctcaatttgggggcataactaaccttgattttgacgcttttgagaaagcaatctttttgagcggcacagcacctgaggctgtagctgatgctgcgttgcagcgtattgggcttacgggattggccaagaagtctatggacatcaacgagctcaaaagaagtgaagatctcagcagaggtttatccagctatccaacaagaatgtttaatttgatcaaggagaaatccgaggtgcctttagggcatgttcataaaatttggaagaaagtggaatctcagcccgaagaagcattgaagcttcttttagccctctttgaaattgaaccagagtctaaggccattgtagttgcaagcacaaccaacgaagtggaagaattggcctgctcttggagaaagtattttagggtggtatggatacacgggaagttgggtgctgcagaaaaggtgtctcgcacaaaggagtttgtcactgacggtagcatgagagttctcatcggaacgaaattagtgactgaaggaattgacattaagcaattgatgatggtgatcatgcttgataatagacttaatattattgagctcattcaaggcgtagggagattgagagatgggggcctctgttatcttttatctagaaaaaacagttgggcggcaaggaatcgtaagggtgaattaccaccgattaaggaaggctgtataaccgaacaggtacgcgagttctatggacttgaatccaagaaaggaaaaaagggccagcatgttggatgctgtggctccaggacagacttgtctgctgacacagtggaattgatagaaagaatggacagattggctgaaaaacaggcgacagcttccatgtccatcgttgcgttaccgtctagcttccaggagagcaatagcagtgacaggtgcagaaagtattgcagcagtgatgaggacagcgacacgtgcattcatggtagtgctaatgccagtaccaatgcgactaccaactccagcactaatgctactaccactgccagcaccaacgtcaggactagtgctactaccactgccagcatcaacgtcaggactagtgcgactaccactgaaagtaccaactccagcactaatgctactaccactgccagcaccaacgtcaggactagtgctactaccactgccagcatcaacgtcaggactagtgcgactaccactgaaagtaccaactccaacactagtgctactaccaccgaaagtaccgactccaacactagtgctactaccaccgaaagtaccgactccaacactagtgctactaccactgctagcaccaactccagcactaatgccactaccactgctagcaccaactccagcactaatgccactaccactgaaagtaccaacgctagtgccaaggaggacgccaataaagatggcaatgctgaggataatagattccatccagtcaccgacattaacaaagagtcttataagagaaaagggagtcaaatggttttgttggagagaaagaaattgaaagcacaatttcccaatacttccgagaatatgaatgtcttacagtttcttggatttagatctgacgaaattaaacatcttttcctctatggtattgacgtatacttctgcccagagggagtattcacacaatacggattatgcaagggctgtcaaaagatgttcgagctctgtgtctgttgggctggccagaaagtatcttatagaaggatggcttgggaagcattggctgtggagagaatgttaagaaatgacgaggaatacaaagaatacttggaagacatcgagccatatcatggggaccctgtaggatatttgaaatattttagcgtaaaaaggggagagatctactctcagatacagagaaattatgcttggtacttggccattactagaagaagagaaacaattagtgtattggattctacaagaggcaagcaagggagccaagttttccgcatgtctggaaggcagatcaaagagttgtattataaagtatggagcaacttgcgtgaatccaagacagaggtgttacagtactttttgaactgggacgaaaaaaagtgcagagaagaatgggaggcaaaagacgatacggtctttgtggaagcgctcgagaaagttggagtttttcagcgtttgcgttccatgacgagcgctggattacagggtccgcagtacgtcaagttacagtttagcaggcatcatagacagttgaggagcagatatgaattaagtttgggaatgcacttgagagatcagcttgcgttgggagttaccccatctaaagtgccgcattggacggcattcttgtccatgttgatagggcttttctgcaataaaacatttagacagaaattagaatatcttttggagcagatttctgaggtgtggttgttaccacattggcttgatttggcaaacgttgaagttctcgctgcagataacacgagggtaccgttgtacatgttaatggtagcggttcacaaagagttagatagcgatgatgttccagacggtagatttgatatattattatgtagagattctagcagagaagttggagagtga

SEQ ID NO: 3401 - DNA, 483 bp, Saccharomyces cerevisiae
atgatgcctgctaaactgcagcttgacgtactgcggaccctgcagtccagcgctcgtcatggaacgcaaacgctgaaaaactccaactttctcgagcgcttccacaaagaccgtatcgtcttttgcctcccattcttcccggcactttttttcgtcccagttcaaaaagtactgcagcacctctgtcttcgattcacgcaagttgctccatactttataatacaactctttgatctgccttccagacatgcggaaaacttggctcccttgcttgcctcttgtcgaatccaatacactaattgtttctcttcttctagtaatggccaggtaccaagcataatttctctgtatctgagagtagatctctcccctttttacgctaaaatatttcaaatatcctacagggtccccatgatatggctcgatgtcttccaagtattctttgtattcctcgtcatttcgcagcattctctccacagctag

SEQ ID NO: 3402 - DNA, 483 bp, Artificial Sequence
  Description of Artificial Sequence: Synthetic polynucleotide
atgatgcctgctaaattacagcttgacgtattgagaaccttgcagtccagcgctcgtcatggaacgcaaacgttgaaaaactccaactttctcgagcgcttccacaaagaccgtatcgtcttttgcctcccattcttcccggcactttttttcgtcccagttcaaaaagtattacagcacctctgtcttcgtttcacgcaagttgctccatactttataatacaactctttgatttaccttccagacatgcggaaaacttggctcccttgcttgcctcttgtcgtatccaatacactaattgtttctcttcttctagtaatggccaggtaccaagcataatttctttgtatttaagagtagatctctcccctttttacgctaaaatatttcaaatatcctacagggtccccatgatatggctcgatgtcttccaagtattctttgtattcctcgtcatttctcagcattctctccacagctga

SEQ ID NO: 3403 - DNA, 483 bp, Saccharomyces cerevisiae
atgatgcctgctaaactgcagcttgacgtactgcggaccctgcagtccagcgctcgtcatggaacgcaaacgctgaaaaactccaactttctcgagcgcttccacaaagaccgtatcgtcttttgcctcccattcttcccggcactttttctcgtcccagttcaaaaagtactgcagcacctctgtcttcgattcacgcaagttgctccatactttataatacaactctttgatctgccttccagacatgcggaaaacttggctcccttgcttgcctcttgtcgaatccaatacactaattgtttctcttcttctagtaatggccaggtaccaagcataatttctctgtatctgagagtagatctctcccctttttacgctaaaaaatttcaaataccctacagggtccccatgatatggctcgatgtcttccaagtattctttgtattcctcgtcatttcgcagcattctctccacagctag

SEQ ID NO: 3404 - DNA, 483 bp, Artificial Sequence
  Description of Artificial Sequence: Synthetic polynucleotide
atgatgcctgctaaattacagcttgacgtattgagaaccttgcagtccagcgctcgtcatggaacgcaaacgttgaaaaactccaactttctcgagcgcttccacaaagaccgtatcgtcttttgcctcccattcttcccggcactttttctcgtcccagttcaaaaagtattacagcacctctgtcttcgtttcacgcaagttgctccatactttataatacaactctttgatttaccttccagacatgcggaaaacttggctcccttgcttgcctcttgtcgtatccaatacactaattgtttctcttcttctagtaatggccaggtaccaagcataatttctttgtatttaagagtagatctctcccctttttacgctaaaaaatttcaaataccctacagggtccccatgatatggctcgatgtcttccaagtattctttgtattcctcgtcatttctcagcattctctccacagctga

SEQ ID NO: 3405 - DNA, 528 bp, Saccharomyces cerevisiae
atggaatctattatcctcagcattgccatctttattggcgtcctccttggcactagcgttggtgctggcagtggtagtagcattagtcctgacgttgatgctggcagtggtagtcgcactagtcctgacgttgatgctggcagtggtagtcgcattagtgctggagttggtactttcagtggtagtagcactagtcctgacgttgatgctggcagtggtagtagcactagtcctgacgttggtgctggcagtggtagtagcattagtgctggagttggtagtcgcattggtactggcattggtagtcgcattggtactggcattggtactggcattggtagtcgcattagtactagcattggtagtcgcattagtcctgacgttggtactagcagtggtaatcgcattagtactggcgttagtactggcattagcactaccatgaatgcacgtgtcgctgtcctcatcactgctgcaatactttctgcacctgtcactgctattgctctcctggaagctagacggtaa

SEQ ID NO: 3406 - DNA, 528 bp, Artificial Sequence
  Description of Artificial Sequence: Synthetic polynucleotide
atggaatctattatcctcagcattgccatctttattggcgtcctccttggcactagcgttggtgctggcagtggtagtagcattagtcctgacgttgatgctggcagtggtagtcgcactagtcctgacgttgatgctggcagtggtagtcgcattagtgctggagttggtactttcagtggtagtagcactagtcctgacgttgatgctggcagtggtagtagcactagtcctgacgttggtgctggcagtggtagtagcattagtgctggagttggtagtcgcattggtactggcattggtagtcgcattggtactggcattggtactggcattggtagtcgcattagtactagcattggtagtcgcattagtcctgacgttggtactagcagtggtaatcgcattagtactggcgttagtactggcattagcactaccatgaatgcacgtgtcgctgtcctcatcactgctgcaatactttctgcacctgtcactgctattgctctcttggaagctagaagatga

SEQ ID NO: 3407 - DNA, 1179 bp, Saccharomyces cerevisiae
atggcagacacaccctctgtggcagtacaggccccaccgggctatggtaagacggagttatttcatctccccttgatagcactggcgtctaagggcgacgtgaaatatgtgtcgtttctgtttgtaccgtacacagtgttgcttgctaattgcatgatcaggttgggccgacgcggttgcttgaatgtggcccctgtaagaaactttattgaagaaggttacgatggcgttactgatttatacgtggggatctacgatgatcttgctagcactaatttcacagacaggatagctgcgtgggagaatattgttgagtgcacctttaggaccaacaacgtaaaattgggttacctcattgtagatgagtttcacaactttgaaacggaggtctaccggcagtcgcaatttgggggcataactaaccttgattttgacgcttttgagaaagcaatctttttgagcggcacagcccctgaggctgtagctgatgctgcgttgcagcgtattgggcttacgggactggccaagaagtcgatggacatcaacgagctcaaacggtcggaagatctcagcagaggtctatccagctatccaacacggatgtttaatctaatcaaggagaaatccgaggtgcctttagggcatgttcataaaatttggaagaaagtggaatcacagcccgaagaagcactgaagcttcttttagccctctttgaaattgaaccagagtcgaaggccattgtagttgcaagcacaaccaacgaagtggaagaattggcctgctcttggagaaagtattttagggtggtatggatacacgggaagctgggtgctgcagaaaaggtgtctcgcacaaaggagtttgtcactgacggtagcatgcaagttctcatcggaacgaaattagtgactgaaggaattgacattaagcaattgatgatggtgatcatgcttgataatagacttaatattattgagctcattcaaggtgtagggagactaagagatgggggcctctgttatctattatctagaaaaaacagttgggcggcaaggaatcgtaagggtgaattaccaccaattaaggaaggctgtataaccgaacaggtacgcgagttctatggacttgaatcaaagaaaggaaaaaagggccagcatgttggatgctgtgtctgctga

SEQ ID NO: 3408 - DNA, 1179 bp, Artificial Sequence
  Description of Artificial Sequence: Synthetic polynucleotide
atggcagacacaccctctgtggcagtacaggccccaccgggctatggtaagacggagttatttcatctccccttgatagcattagcgtctaagggcgacgtgaaatatgtgtcctttttgtttgtaccgtacacagtgttgcttgctaattgcatgatcaggttgggcaggcgcggttgcttgaatgtggcccctgtaagaaactttattgaagaaggttacgatggcgttactgatttatacgtggggatctacgatgatcttgctagcactaatttcacagacaggatagctgcgtgggagaatattgttgagtgcacctttaggaccaacaacgtaaaattgggttacctcattgtagatgagtttcacaactttgaaacggaggtctacagacagtctcaatttgggggcataactaaccttgattttgacgcttttgagaaagcaatctttttgagcggcacagcccctgaggctgtagctgatgctgcgttgcagcgtattgggcttacgggattggccaagaagtctatggacatcaacgagctcaaaagaagtgaagatctcagcagaggtttatccagctatccaacaagaatgtttaatttgatcaaggagaaatccgaggtgcctttagggcatgttcataaaatttggaagaaagtggaatctcagcccgaagaagcattgaagcttcttttagccctctttgaaattgaaccagagtctaaggccattgtagttgcaagcacaaccaacgaagtggaagaattggcctgctcttggagaaagtattttagggtggtatggatacacgggaagttgggtgctgcagaaaaggtgtctcgcacaaaggagtttgtcactgacggtagcatgcaagttctcatcggaacgaaattagtgactgaaggaattgacattaagcaattgatgatggtgatcatgcttgataatagacttaatattattgagctcattcaaggtgtagggagattgagagatgggggcctctgttatcttttatctagaaaaaacagttgggcggcaaggaatcgtaagggtgaattaccaccaattaaggaaggctgtataaccgaacaggtacgcgagttctatggacttgaatccaagaaaggaaaaaagggccagcatgttggatgctgtgtctgctga

SEQ ID NO: 3409 - DNA, 309 bp, Saccharomyces cerevisiae
atgcgtactttcactgactttgtttctggcgcacctattgtaaggagtcttcagaaaagcaccataaggaaatatgggtacaatttggcaccccacatgtttttgttactacacgtagatgagctatcgattttttctgcataccaagcaagtttacctggcgaaaagaaagtcgacacagagcggctgaagcgtgatctatgcccacgtaaacccattgagataaagtacttttcacagatatgtaacgatatgatgaacaaaaaggaccgattgggtgatgttttgcgtgtgtgctgcccaagttga

SEQ ID NO: 3410 - DNA, 309 bp, Artificial Sequence
  Description of Artificial Sequence: Synthetic polynucleotide
atgcgtactttcactgactttgtttctggcgcacctattgtaaggagtcttcagaaaagcaccataaggaaatatgggtacaatttggcaccccacatgtttttgttattacacgtagatgagttatccattttttctgcataccaagcaagtttacctggcgaaaagaaagtcgacacagagaggttaaagcgtgatttatgcccacgtaaacccattgagataaagtacttttcccagatatgtaacgatatgatgaacaaaaaggacagattgggtgatgttttgcgtgtgtgctgcccaagttga

SEQ ID NO: 3411 - DNA, 525 bp, Saccharomyces cerevisiae
atgaaagtttccgataggcgtaagtttgaaaaagcaaactttgacgagtttgagtcggctctaaataacaaaaacgacttggtacattgtccctcaataactttatttgaatcgatccccacggaagtgcggtcattctacgaagacgaaaagtctggcctaatcaaagtggtaaaattcagaactggtgcaatgaataggaaaaggtcttttgaaaaaattgtcatttccgtcatggtcgggaaaaatgtacaaaagttcctgacatttgttgaagacgaaccagatttccagggcggaccaatcccttcaaagtatcttattcccaagaaaatcaacttgatggtctacacgttgtttcaagtgcatactttgaaattcaatagaaaggattacgataccctttctcttttttacctcaacagaggatactataatgagttgagttttccgtgtcctggaacgttgtcacgaaatagcgagtgccaggccgaacgacagctctacgatgcgtactttcactga

SEQ ID NO: 3412 - DNA, 525 bp, Artificial Sequence
  Description of Artificial Sequence: Synthetic polynucleotide
atgaaagtttccgataggcgtaagtttgaaaaagcaaactttgacgagtttgagtctgctttgaataacaaaaacgacttggtacattgtccctccataactttatttgaaagtatccccacggaagtgagatctttctacgaagacgaaaagtctggcttaatcaaagtggtaaaattcagaactggtgcaatgaataggaaaaggtcttttgaaaaaattgtcatttccgtcatggtcgggaaaaatgtacaaaagttcttaacatttgttgaagacgaaccagatttccagggcggaccaatcccttctaagtatcttattcccaagaaaatcaacttgatggtctacacgttgtttcaagtgcatactttgaaattcaatagaaaggattacgataccctttctcttttttacctcaacagaggatactataatgagttgagttttccgtgtcctggaacgttgagcagaaatagcgagtgccaggccgaaagacagctctacgatgcgtactttcactga

SEQ ID NO: 3413 - DNA, 1140 bp, Saccharomyces cerevisiae
atgaaagaaaatgaacttaaaaatgagaaaagtgtagatgtattatctttcaaacagctcgaatctcaaaagattgttctacctcaagatcttttcagaagcagctttacctggttttgttatgaaatttacaagtccttagcgtttcgcatctggatgctattatggctaccacttagcgtctggtggaagctttccaacaattggatttacccgcttatggtttcacttcttgtcctgttttggggaccagtatttgttcttgttatttttagactttctcgtaaacgttccttatcgaaacaactcactcagttttgcaaagagattactaaaagcacaccaagttcggatcctcatgattgggaagttgttgcagcaaatctaaattcgtacttatatgaaaataaggcttggaatattaggtactttttcttcaatgccatgggctgccaagaagcgttcagaacaacccttctcgaacccttctctttgaaaaaagacgaagctgccaaggttaagtcatttaaggattccgtcccttacattgaagaagcattgggagtttattttagagaagttgaaaaacaatggaagttgtttaattctgagaaatcatggagccctgttggcctggaagatgctaaacttcccaaggaagcttaccgatttaagcttacttggtttttaaagaggatttccaatatttttatgttgataccattccttaattttttgtgctgcatatatgtgtcacggggaatgtgccttctattacgcaccttgtatctcgggtggattcttttcatgttggtacaaggtttccaaaatataagggttttgattatgagcatggaacacaagatgcagttcttgtcgactattataaatgagcaagaaagtggtgcgaatggatgggacgaaattgcaaggaaaatgaataggtacttgtttgagaaaaaagtctggaagaatgaagagtttttctttgacgggattgactgtgaatggttttttagccacttcttctaccgcgttctatctgcgaagaaatctatgcgggctctatcattgaatgtggaactatggccatatattaaagaagcgcaattatcctgcagtgaggagtccttagcgtaa

SEQ ID NO: 3414 - DNA, 1140 bp, Artificial Sequence
  Description of Artificial Sequence: Synthetic polynucleotide
atgaaagaaaatgaacttaaaaatgagaaaagtgtagatgtattatctttcaaacagctcgaatctcaaaagattgttttacctcaagatcttttcagaagcagctttacctggttttgttatgaaatttacaagtccttagcgtttcgcatctggatgcttttatggttaccacttagcgtctggtggaagctttccaacaattggatttacccgcttatggtttcccttcttgtcttgttttggggaccagtatttgttcttgttatttttagactttctcgtaaacgttccttatccaaacaactcactcagttttgcaaagagattactaaaagcacaccaagttctgatcctcatgattgggaagttgttgcagcaaatttgaattcttacttatatgaaaataaggcttggaatattaggtactttttcttcaatgccatgggctgccaagaagcgttcagaacaacccttctcgaacccttctctttgaaaaaagacgaagctgccaaggttaagagctttaaggattccgtcccttacattgaagaagcattgggagtttattttagagaagttgaaaaacaatggaagttgtttaattctgagaaaagttggagccctgttggccttgaagatgctaaacttcccaaggaagcttacagatttaagcttacttggtttttaaagaggatttccaatatttttatgttgataccattccttaattttttgtgctgcatatatgtgtccagaggaatgtgccttttattacgcaccttgtatctcgggtggattcttttcatgttggtacaaggtttccaaaatataagggttttgattatgagcatggaacacaagatgcagttcttgtctactattataaatgagcaagaaagtggtgcgaatggatgggacgaaattgcaaggaaaatgaataggtacttgtttgagaaaaaagtctggaagaatgaagagtttttctttgacgggattgactgtgaatggttttttagccacttcttctaccgcgttttatctgcgaagaaatctatgagagctttatctttgaatgtggaattatggccatatattaaagaagcgcaattatcctgcagtgaggagtccttagcgtga

SEQ ID NO: 3415 - DNA, 678 bp, Saccharomyces cerevisiae
atgtcacagtacggatttgtaagagttcctagagaggtagaaaaggccattccagtggtgaatgcacctagaccacgggccgttgttccgcctccaaacagtgaaactgctaggcttgttcgggaatatgccgctaaagaattgactgcccccgttctaaaccactctttgcgtgtttttcaatatagtgtagctatcataagagaccaatttccagcatgggacttggatcaggaagttttgtacgtcacctgcttacttcatgatattgcaacaacagataagaatatgagagccacgaagatgtcatttgagtattatggtggcatactttcaagggagcttgtatttaatgcgacaggtggaaatcaggactatgcagatgcagtaactgaggccatcattcgtcaccaggatttgactgggactggctacattaccaccttggggctcattctgcagattgctactacgcttgacaatgtcggatccaataccgatctgattcatatcgatacagttagtgccattaacgagcaatttccaagactgcactggttatcatgttttgctacggtggtggacactgaaaactcgagaaaaccgtggggccacaccagttctttgggtgatgatttttcaaagaaagtcatatgcaatacatttgggtataactaa

SEQ ID NO: 3416 - DNA, 678 bp, Artificial Sequence
  Description of Artificial Sequence: Synthetic polynucleotide
atgtctcagtacggatttgtaagagttcctagagaggtagaaaaggccattccagtggtgaatgcacctagaccaagagccgttgttccgcctccaaacagtgaaactgctaggcttgttagagaatatgccgctaaagaattgactgcccccgttttgaaccactctttgcgtgtttttcaatatagtgtagctatcataagagaccaatttccagcatgggacttggatcaggaagttttgtacgtcacctgcttacttcatgatattgcaacaacagataagaatatgagagccacgaagatgagttttgagtattatggtggcatactttctagggagcttgtatttaatgcgacaggtggaaatcaggactatgcagatgcagtaactgaggccatcattcgtcaccaggatttgactgggactggctacattaccaccttggggctcattttacagattgctactacgcttgacaatgtcggatccaataccgatttgattcatatcgatacagttagtgccattaacgagcaatttccaagattgcactggttaagttgttttgctacggtggtggacactgaaaactctagaaaaccgtggggccacaccagttctttgggtgatgatttttccaagaaagtcatatgcaatacatttgggtataactga

SEQ ID NO: 3417 - DNA, 669 bp, Saccharomyces cerevisiae
atgaccgtcgttatcggagtcttggcattacagggtgcgttcattgaacatgtgcgacacgtagaaaaatgcatcgtcgaaaacagggatttctatgaaaaaaaactatctgtgatgacagtgaaggataaaaatcaactagctcaatgtgatgcattgatcatacctgggggagagtcgactgcaatgtcccttattgcagaaagaacaggattttacgacgatctctacgcattcgtacacaacccaagcaaggtaacctggggtacttgtgcaggtttgatttatatttcacaacaattatctaacgaagcaaaactggtcaagacgctgaatttactaaaggttaaagtaaaaagaaatgcatttgggagacaagctcagtcttctacccggatttgcgacttttcaaactttattcctcactgcaatgattttcctgctacttttataagagccccagtaatagaagaggtgctggatcctgaacatgtgcaggtcctgtacaaattagatgggaaggataatggtggtcaagaactaattgttgccgctaagcaaaaaaacaatattcttgcgacatcatttcatccggaattggcagaaaacgatatacggtttcacgactggttcatcagagaatttgttcttaaaaactacagtaaataa

SEQ ID NO: 3418 - DNA, 669 bp, Artificial Sequence
  Description of Artificial Sequence: Synthetic polynucleotide
atgaccgtcgttatcggagtcttggcattacagggtgcgttcattgaacatgtgagacacgtagaaaaatgcatcgtcgaaaacagggatttctatgaaaaaaaattatctgtgatgacagtgaaggataaaaatcaattggctcaatgtgatgcattgatcatacctgggggagagtctactgcaatgtcccttattgcagaaagaacaggattttacgacgatctctacgcattcgtacacaacccaagcaaggtaacctggggtacttgtgcaggtttgatttatatttctcaacaattatctaacgaagcaaaattggtcaagacgttgaatttattgaaggttaaagtaaaaagaaatgcatttgggagacaagctcagtcttctaccagaatttgcgacttttccaactttattcctcactgcaatgattttcctgctacttttataagagccccagtaatagaagaggtgttggatcctgaacatgtgcaggtcttgtacaaattagatgggaaggataatggtggtcaagaattgattgttgccgctaagcaaaaaaacaatattcttgcgacatcttttcatccggaattggcagaaaacgatataagatttcacgactggttcatcagagaatttgttcttaaaaactacagtaaatga

SEQ ID NO: 3419 - DNA, 897 bp, Saccharomyces cerevisiae
atgtcagaattcaaggttaaaactgggcttgcccaaatgttaaagggcggtgtgattatggacgtcgtcacacctgaacaggctattatcgcagaaagagcgggcgcttgtgctgtaatggcattggaacgcattccagctgacatgcgcaagtctggccaagtatgccgtatgtcagatcctcgcatgatcaaagaaattatggaagctgtttcaattccggtgatggcaaaggtccgtattggacacttcgtggaggcacagatcctggaagagctgcaagtagactacattgacgaaagtgaggttttgactccagctgattggacacatcacattgagaagcataacttcaaggtgccatttgtttgcggtgccaaggatctaggtgaggctttgagaagaataaacgaaggtgctgcaatgatccgtaccaaaggtgaagcaggtaccggtgacgtttccgaggccgtcaagcacatcaccaagattaaggcggagatccagcagtataaagagaatttgaagaccgaatccgattttgcagctaaggccacagaattacgcgtccctgtcgacttgctgaagacaacactatcagagggaaagctacctgtagtcaattttgctgctggtggagttgctactccagcagacgctgctctattgatgcaattgggttgtgaaggtgttttcgtcggctcaggtatattcaaatcgtcagatcctgagaagttagcatgtgctatcgttgaagccacgactcactacgataacccagcaaaactattgcaagtttccagcgatttgggtgacttgatgggtggtatttccatccaatcaattaatgaagcaggaggcaaaaacggtgcaagactttctgaaatcggatggtag

SEQ ID NO: 3420 - DNA, 897 bp, Artificial Sequence
  Description of Artificial Sequence: Synthetic polynucleotide
atgtctgaattcaaggttaaaactgggcttgcccaaatgttaaagggcggtgtgattatggacgtcgtcacacctgaacaggctattatcgcagaaagagcgggcgcttgtgctgtaatggcattggaacgcattccagctgacatgcgcaagtctggccaagtatgccgtatgagtgatcctcgcatgatcaaagaaattatggaagctgtttctattccggtgatggcaaaggtccgtattggacacttcgtggaggcacagatcttggaagagttacaagtagactacattgacgaaagtgaggttttgactccagctgattggacacatcacattgagaagcataacttcaaggtgccatttgtttgcggtgccaaggatttaggtgaggctttgagaagaataaacgaaggtgctgcaatgatccgtaccaaaggtgaagcaggtaccggtgacgtttccgaggccgtcaagcacatcaccaagattaaggcggagatccagcagtataaagagaatttgaagaccgaatccgattttgcagctaaggccacagaattacgcgtccctgtcgacttgttgaagacaacattatctgagggaaagttacctgtagtcaattttgctgctggtggagttgctactccagcagacgctgctttattgatgcaattgggttgtgaaggtgttttcgtcggcagtggtatattcaaatcttctgatcctgagaagttagcatgtgctatcgttgaagccacgactcactacgataacccagcaaaacttttgcaagtttccagcgatttgggtgacttgatgggtggtatttccatccaatctattaatgaagcaggaggcaaaaacggtgcaagactttctgaaatcggatggtga

SEQ ID NO: 3421 - DNA, 1023 bp, Saccharomyces cerevisiae
atgtctacagacaagatcacatttttgttgaactggcaaccaaccccataccatattccaattttcttggctcaaaccaaaggttacttcaaggagcaaggtctagacatggccatcctagaaccaaccaatccttccgatgtcactgagttaattggatctggtaaggtcgacatgggtttgaaagccatgatccacaccttggctgccaaggcccgtggtttcccagtgacctctgttgcctctttgttggacgaaccatttaccggtgtcttgtacttaaagggcagtggtatcactgaagacttccagtccctaaagggtaagaagatcggttacgttggtgaattcggtaagatccaaatcgatgaattgaccaagcactacggtatgaagccagaagactacaccgccgtcagatgtggtatgaatgtcgccaagtacatcatcgaaggtaagattgatgccggtattggtatcgaatgtatgcaacaagtcgaattggaagagtacttggccaagcaaggcagaccagcttctgatgctaaaatgttgagaattgacaagttggcttgcttgggttgctgttgcttctgtaccgttctttacatctgcaacgatgaatttttgaagaagaaccctgaaaaggtcagaaagttcttgaaagccatcaagaaggcaaccgactacgttctagccgaccctgtgaaggcttggaaagaatacatcgacttcaagcctcaattgaacaacgatctatcctacaagcaataccaaagatgttacgcttacttctcttcatctttgtacaatgttcaccgtgactggaagaaggttaccggttacggtaagagattagccatcttgccaccagactatgtctcgaactacactaatgaatacttgtcctggccagaaccagaagaggtttctgatcctttggaagctcaaagattgatggctattcatcaagaaaaatgcagacaggaaggtactttcaagagattggctcttccagcttaa

SEQ ID NO: 3422 - DNA, 1023 bp, Artificial Sequence
  Description of Artificial Sequence: Synthetic polynucleotide
atgtctacagacaagatcacatttttgttgaactggcaaccaaccccataccatattccaattttcttggctcaaaccaaaggttacttcaaggagcaaggtttggacatggccatcttggaaccaaccaatccttccgatgtcactgagttaattggatctggtaaggtcgacatgggtttgaaagccatgatccacaccttggctgccaaggcccgtggtttcccagtgacctctgttgcctctttgttggacgaaccatttaccggtgtcttgtacttaaagggcagtggtatcactgaagacttccagtccttgaagggtaagaagatcggttacgttggtgaattcggtaagatccaaatcgatgaattgaccaagcactacggtatgaagccagaagactacaccgccgtcagatgtggtatgaatgtcgccaagtacatcatcgaaggtaagattgatgccggtattggtatcgaatgtatgcaacaagtcgaattggaagagtacttggccaagcaaggcagaccagcttctgatgctaaaatgttgagaattgacaagttggcttgcttgggttgctgttgcttctgtaccgttctttacatctgcaacgatgaatttttgaagaagaaccctgaaaaggtcagaaagttcttgaaagccatcaagaaggcaaccgactacgttttggccgaccctgtgaaggcttggaaagaatacatcgacttcaagcctcaattgaacaacgatttatcctacaagcaataccaaagatgttacgcttacttctcttcttctttgtacaatgttcaccgtgactggaagaaggttaccggttacggtaagagattagccatcttgccaccagactatgtctccaactacactaatgaatacttgtcctggccagaaccagaagaggtttctgatcctttggaagctcaaagattgatggctattcatcaagaaaaatgcagacaggaaggtactttcaagagattggctcttccagcttga

SEQ ID NO: 3423 - DNA, 1677 bp, Saccharomyces cerevisiae
atggcagtccttaacttgaaacgtgaaactgtcgacattgaagagacagcgaagaaagatatcaaaccttattttgcttcgaatgttgaagcggttgatattgatgaagatcccgatgtttcaagatacgatccccagacaggagtgaaaagggcgctcaaaaataggcatatctcattgctagctttgggtggtgttattggcccaggttgtcttgttggtgcaggaaacgcactcaacaaaggtgggccacttgctttacttttaggctttagtattattgggatcattgctttctcagtgatggaatctataggtgaaatgatcactttatatccctcgggcggtggatttaccactttggctcgaagatttcatagcgatgcactgcctgcagtttgcggttatgcttacgttgttgtgttcttcgcagttttggcaaatgagtacaacactctctcctccatactacagttttggggcccacaagtccctctatatggttacatcttgatattctggtttgcatttgaaatttttcaactagttggcgttggtctttttggtgaaacggagtactggcttgcttggttgaaaatagtaggattagtagcctattatattttctcgattgtttacatatctggggatattaggaatagaccagctttcggctttcattattggaatagtccaggtgcattatcacatgggtttaagggaattgcgatagtgtttgtgttttgttcgaccttctattctggaacggaatcagttgccttggctgcaacggaatcaaaaaaccctgggaaggctgtgccacttgctgttcgacaaactctgtggagaattttagttgtttatattggaattgctgttttctatggagcaactgttccgtttgacgacccaaacctctctgcttctaccaaagtcctaaaatctcccattgctatcgccatatctcgtgctggttgggccggcggagctcatctggttaatgccttcattttgataacttgcatctccgccattaatgggtcactttatatagggagcagaaccttgacgcatttagcacatgaaggcctagctccaaaaattctggcttggaccgatcgaagaggcgttcccatccccgccatcactgttttcaacgccttgggcctaatatcattgatgaatgtgagcgttggagctgcaaatgcgtactcttatatcgttaatctttctggtgttggcgtctttattgtctggggtgtaataagttatacgcacctgagaataaggaaggcgtgggttgctcaaggaagatccatagaagagctaccttatgaagcgctattttatccgtggacgccagtacttagtctggccgctaacatttttctagcactcatccaaggatggagctatttcgtaccttttgatgcgggcaattttgttgatgcttatatccttctgcctgttggaattttattgtatattggcatatgtgtttttaagagcaatcattttagaactgttgatttgcggtcaatcaacctagacgaaggacgaagaaaagacatggaggctgatctttctgatcaagagagtagcttagcatcttcggaaacgatgaaggattataaaagtgcaacttttttcagatacctcagcaacattttcacctga

SEQ ID NO: 3424 - DNA, 1677 bp, Artificial Sequence
  Description of Artificial Sequence: Synthetic polynucleotide
atggcagtccttaacttgaaacgtgaaactgtcgacattgaagagacagcgaagaaagatatcaaaccttattttgcttctaatgttgaagcggttgatattgatgaagatcccgatgtttctagatacgatccccagacaggagtgaaaagggcgctcaaaaataggcatatctctttgttggctttgggtggtgttattggcccaggttgtcttgttggtgcaggaaacgcactcaacaaaggtgggccacttgctttacttttaggctttagtattattgggatcattgctttctctgtgatggaatctataggtgaaatgatcactttatatccctctggcggtggatttaccactttggctagaagatttcatagcgatgcattacctgcagtttgcggttatgcttacgttgttgtgttcttcgcagttttggcaaatgagtacaacactctctcctccatattacagttttggggcccacaagtccctttatatggttacatcttgatattctggtttgcatttgaaatttttcaattggttggcgttggtctttttggtgaaacggagtactggcttgcttggttgaaaatagtaggattagtagcctattatattttctccattgtttacatatctggggatattaggaatagaccagctttcggctttcattattggaatagtccaggtgcattatctcatgggtttaagggaattgcgatagtgtttgtgttttgttctaccttctattctggaacggaatctgttgccttggctgcaacggaaagtaaaaaccctgggaaggctgtgccacttgctgttcgtcaaactttatggagaattttagttgtttatattggaattgctgttttctatggagcaactgttccgtttgacgacccaaacctctctgcttctaccaaagtcttgaaatctcccattgctatcgccatatctcgtgctggttgggccggcggagctcatttggttaatgccttcattttgataacttgcatctccgccattaatgggtctctttatatagggagcagaaccttgacgcatttagcacatgaaggcttagctccaaaaattttggcttggaccgatagaagaggcgttcccatccccgccatcactgttttcaacgccttgggcttgatatctttgatgaatgtgagcgttggagctgcaaatgcgtactcttatatcgttaatctttctggtgttggcgtctttattgtctggggtgtaataagttatacgcacttgagaataaggaaggcgtgggttgctcaaggaagatccatagaagagcttccttatgaagcgttattttatccgtggacgccagtacttagtttggccgctaacatttttttggcactcatccaaggatggagctatttcgtaccttttgatgcgggcaattttgttgatgcttatatccttttacctgttggaattttattgtatattggcatatgtgtttttaagagcaatcattttagaactgttgatttgagatctatcaacttggacgaaggaagaagaaaagacatggaggctgatctttctgatcaagagagtagcttagcatcttctgaaacgatgaaggattataaaagtgcaacttttttcagatacctcagcaacattttcacctga

SEQ ID NO: 3425 - DNA, 1941 bp, Saccharomyces cerevisiae
atgagttacgaatctgggaggtcatcctcctcttccgagagtacacggccaccaacgctaaaagaagaacctaatggtaaaatagcttgggaagaaagtgtcaaaaaatctagggaaaataacgaaaatgacagcactctcttgaggcgaaagctaggtgagactcgaaaagcaattgaaactggaggatcatcgagaaataaactttctgctttgacacccttgaaaaaagtggttgacgagaggaaggattcggtacaaccacaggtcccttccatgggttttacttattctttgcctaatttgaagactttaaacagtttttcagatgctgagcaagcacgtataatgcaagattatctatccaggggggtaaatcaaggcaacagtaataattatgtagacccactatatcggcaattaaatccaactatgggtagtagcaggaacaggcctgtttggagtttaaatcagccgttaccgcatgtattggatcgaggcttggcagcaaagatgatacaaaagaatatggatgcaaggtcccgcgcatcatcgagacgagggtcgaccgatatttcaagggggggttctactacgtcagtgaaagactggaaaaggctccttagaggtgcagcaccgggtaaaaagcttggtgacatcgaagctcaaacgcaacgcgataatactgttggtgcagatgtgaaacctactaagttagagcctgaaaacccacaaaagccctctaacacgcatattgagaatgtttcacgtaagaaaaagcgtacttcgcataatgtcaatttttcattaggcgatgaaagctacgcatcctccatagccgatgcagaatccagaaaattaaagaacatgcaaaccctcgatggttctactccggtttatacgaagcttcctgaagaacttattgaagaggaaaataaaagtacgagtgcattagatggtaatgaaattggtgcctcagaagatgaagacgcggatataatgacatttcctaacttttgggcaaaaattcgctatcatatgcgagaaccgtttgcggagtttctcgggacactagttcttgtcatttttggtgttggtggtaatcttcaagcaactgtaacaaaaggtagtggtggttcctatgaatccctatcatttgcatgggggttcggttgtatgcttggtgtttacgtcgcaggcggtattagtggtggtcatattaaccctgctgttacgatttcaatggcaatttttcgaaaattcccctggaaaaaggtgcccgtatatattgttgctcagattatcggtgcatattttggaggagctatggcttatggttatttttggagctctatcacagaatttgagggaggtccgcacataagaacaacggcgaccggtgcgtgtttgtttactgatccaaagtcttacgtcacgtggagaaatgccttctttgacgaattcataggagcctctatacttgtgggttgtttgatggcgctattggatgatagtaatgctccacctggcaatggtatgaccgcattaattattggattcttagtcgctgcaattggtatggcccttggatatcaaacaagtttcacaatcaatcctgcaagagatctcggtcctcgcatatttgcttccatgattggctatggtccacatgcttttcatctcacacattggtggtggacatggggagcctggggtggtccaattgccggcggtattgctggagcactcatatatgacattttcatttttactggatgcgaatccccagtcaactacccagacaacggttatattgagaatagggtaggtaaacttttacatgcggagttccaccagaatgatggcactgtctcagatgaatctggtgttaacagcaacagcaacactggcagcaagaaatctgtgcctacttcgtcataa

SEQ ID NO: 3426 - DNA, 1941 bp, Artificial Sequence
  Description of Artificial Sequence: Synthetic polynucleotide
atgagttacgaatctgggaggtcttcctcctcttccgagagtacaagaccaccaacgttgaaagaagaacctaatggtaaaatagcttgggaagaaagtgtcaaaaaatctagggaaaataacgaaaatgacagcactctcttgaggcgtaagttgggtgagactagaaaagcaattgaaactggaggatcttctagaaataaactttctgctttgacacccttgaaaaaagtggttgacgagaggaaggattctgtacaaccacaggtcccttccatgggttttacttattctttgcctaatttgaagactttaaacagtttttctgatgctgagcaagcacgtataatgcaagattatttatccaggggggtaaatcaaggcaacagtaataattatgtagacccattgtatagacaattaaatccaactatgggtagtagcaggaacaggcctgtttggagtttaaatcagccgttaccgcatgtattggatagaggcttggcagcaaagatgatacaaaagaatatggatgcaaggtcccgcgcatcttctagaagagggtccaccgatatttctagggggggttctactacgtctgtgaaagactggaaaaggctccttagaggtgcagcaccgggtaaaaagcttggtgacatcgaagctcaaacgcaacgcgataatactgttggtgcagatgtgaaacctactaagttagagcctgaaaacccacaaaagccctctaacacgcatattgagaatgtttctcgtaagaaaaagcgtacttctcataatgtcaatttttctttaggcgatgaaagctacgcatcctccatagccgatgcagaatccagaaaattaaagaacatgcaaaccctcgatggttctactccggtttatacgaagcttcctgaagaacttattgaagaggaaaataaaagtacgagtgcattagatggtaatgaaattggtgccagtgaagatgaagacgcggatataatgacatttcctaacttttgggcaaaaattcgctatcatatgagagaaccgtttgcggagtttctcgggacattagttcttgtcatttttggtgttggtggtaatcttcaagcaactgtaacaaaaggtagtggtggttcctatgaatccttatcttttgcatgggggttcggttgtatgcttggtgtttacgtcgcaggcggtattagtggtggtcatattaaccctgctgttacgatttccatggcaatttttagaaaattcccctggaaaaaggtgcccgtatatattgttgctcagattatcggtgcatattttggaggagctatggcttatggttatttttggagctctatcacagaatttgagggaggtccgcacataagaacaacggcgaccggtgcgtgtttgtttactgatccaaagtcttacgtcacgtggagaaatgccttctttgacgaattcataggagcctctatacttgtgggttgtttgatggcgttattggatgatagtaatgctccacctggcaatggtatgaccgcattaattattggattcttagtcgctgcaattggtatggcccttggatatcaaacaagtttcacaatcaatcctgcaagagatctcggtcctcgcatatttgcttccatgattggctatggtccacatgcttttcatctcacacattggtggtggacatggggagcctggggtggtccaattgccggcggtattgctggagcactcatatatgacattttcatttttactggatgcgaatccccagtcaactacccagacaacggttatattgagaatagggtaggtaaacttttacatgcggagttccaccagaatgatggcactgtctctgatgaatctggtgttaacagcaacagcaacactggcagcaagaaatctgtgcctacttcttcttga

SEQ ID NO: 3427 - DNA, 1776 bp, Saccharomyces cerevisiae
atgtctcacaaacaattcaaatcagatggaaacatcgttactccctacctacttggccttgctcgaagcaatcccggccttacagtgattaagcacgacagagtggttttccggactgcgtcagctcctaattcagggaaccctcctaaagtttcattggtttctggaggtggcagtggtcatgagccaacgcatgccggttttgttggtgaaggtgccttagatgcgattgcagcaggtgccatttttgcttctccttcaactaaacagatctattctgctattaaagctgttgaatctcctaagggtaccttgatcattgtaaaaaattacaccggtgatattatacattttggtctcgctgctgaaagagctaaagctgctggaatgaaagtcgaactggttgctgtaggagatgatgtctctgtcggtaagaagaaaggttctttagtcgggcgtcgaggtctcggagccaccgtattggtgcataaaattgctggggcagccgcttctcatggactggagttggcagaagttgccgaagttgctcagtcagtagttgacaatagtgtcacaattgcggcatctcttgatcactgcacggttcctggccacaaacctgaagccattttgggcgagaatgagtatgaaatcggtatgggtattcataacgagtctggtacctataagtcttctccgctgccatcgatttctgagctcgtttcccagatgcttcctcttcttctcgatgaggatgaagaccgttcttatgtgaagtttgagcccaaagaggacgtagttcttatggttaacaacatgggtggtatgtctaatctagaattgggttatgctgcagaggtcatttctgaacaattgattgataagtatcaaattgtgcccaagagaacgattactggagcattcattactgcattgaatggtcctgggtttggtatcactcttatgaacgcttcaaaagctggtggcgatatccttaagtatttcgattatcctaccacagcgagtggatggaatcaaatgtaccattctgccaaagattgggaggtacttgccaaagggcaggttcccaccgccccctctttaaagacattgaggaatgaaaaaggttcgggtgtgaaagctgattatgacacttttgctaaaattttgcttgctgggattgcaaaaattaacgaggttgaaccaaaggttacttggtacgataccattgcaggagatggtgattgcggaactactcttgtgtccggtggtgaagcattggaagaagctattaaaaaccatacgttgcgcctcgaggatgctgctcttggtatcgaagatattgcgtatatggttgaggattctatgggtggtacgtccggtggtctgtactctatctatctttctgctctcgcacaaggagttagggattctggggacaaggaacttactgcggaaactttcaaaaaggcatcaaacgttgcactagatgctttgtataagtatacgagagcccgtcctggttacaggactctgatcgatgctctgcaaccttttgtcgaagcgctgaaagccgggaagggtcccagagccgccgcccaagctgcttatgatggtgccgaaaagacaaggaagatggatgcccttgttgggcgtgcttcttacgtggctaaggaggagctgagaaaactcgacagcgaaggtggattaccagatccaggagcagttggtcttgctgcactactcgatggatttgttacagctgctgggtactag

SEQ ID NO: 3428 - DNA, 1776 bp, Artificial Sequence
  Description of Artificial Sequence: Synthetic polynucleotide
atgtctcacaaacaattcaaatctgatggaaacatcgttactccctacttacttggccttgctagaagcaatcccggccttacagtgattaagcacgacagagtggttttcagaactgcgtctgctcctaatagtgggaaccctcctaaagtttctttggtttctggaggtggcagtggtcatgagccaacgcatgccggttttgttggtgaaggtgccttagatgcgattgcagcaggtgccatttttgcttctccttccactaaacagatctattctgctattaaagctgttgaatctcctaagggtaccttgatcattgtaaaaaattacaccggtgatattatacattttggtctcgctgctgaaagagctaaagctgctggaatgaaagtcgaattggttgctgtaggagatgatgtctctgtcggtaagaagaaaggttctttagtcgggcgtcgtggtctcggagccaccgtattggtgcataaaattgctggggcagccgcttctcatggattggagttggcagaagttgccgaagttgctcagtctgtagttgacaatagtgtcacaattgcggcatctcttgatcactgcacggttcctggccacaaacctgaagccattttgggcgagaatgagtatgaaatcggtatgggtattcataacgagtctggtacctataagtcttctccgttaccatctatttctgagctcgtttcccagatgcttcctcttcttctcgatgaggatgaagaccgttcttatgtgaagtttgagcccaaagaggacgtagttcttatggttaacaacatgggtggtatgtctaatttggaattgggttatgctgcagaggtcatttctgaacaattgattgataagtatcaaattgtgcccaagagaacgattactggagcattcattactgcattgaatggtcctgggtttggtatcactcttatgaacgcttccaaagctggtggcgatatccttaagtatttcgattatcctaccacagcgagtggatggaatcaaatgtaccattctgccaaagattgggaggtacttgccaaagggcaggttcccaccgccccctctttaaagacattgaggaatgaaaaaggttctggtgtgaaagctgattatgacacttttgctaaaattttgcttgctgggattgcaaaaattaacgaggttgaaccaaaggttacttggtacgataccattgcaggagatggtgattgcggaactactcttgtgtccggtggtgaagcattggaagaagctattaaaaaccatacgttgcgcctcgaggatgctgctcttggtatcgaagatattgcgtatatggttgaggattctatgggtggtacgtccggtggtttatactctatctatctttctgctctcgcacaaggagttagggattctggggacaaggaacttactgcggaaactttcaaaaaggcatctaacgttgcattggatgctttgtataagtatacgagagcccgtcctggttacaggactttgatcgatgctttacaaccttttgtcgaagcgttgaaagccgggaagggtcccagagccgccgcccaagctgcttatgatggtgccgaaaagacaaggaagatggatgcccttgttgggcgtgcttcttacgtggctaaggaggagttaagaaaactcgacagcgaaggtggattaccagatccaggagcagttggtcttgctgcattgctcgatggatttgttacagctgctgggtactga

SEQ ID NO: 3429 - DNA, 1398 bp, Saccharomyces cerevisiae
atggcccgcaatagacaagcgtgcgactgttgttgcattcgtcgagtaaagtgtgatcgtaaaaaaccatgtaaatgttgtcttcaacacaatctgcaatgtacatatcttcgacctttgaagaaaagaggtccaaaacccgtcaaggtgagaaatttaaagaaagtagatgatgtacaggtatttagtaaaagtagtagtggtggcataatgaaggttccaaaggcactaattgatcagtgtctgcggctctataatgataagttgtatgtgatctggcctttgctgtgttatgatgatctttacgaacttttagagaaaagatatgacgaaacctgtgtgtattggttcctggtatctctttctgccgccacgcttagcgatttgcagactgaaattgagtcggaaggaggggttacctttactgggatacagttatccagtttctgcatgtcatcacgccaagaatttgacgattttaacggtagtgatatattcaagattatgacgtactattgtctaaaccgctgctacgcacagatgtccaactcaagaacttcgtatcggctttcttgtgaagccgtggggctcattaagttggcggggttccatcgcgaggaaactttgaaacttcttcctttcgatgagcagcagcttggaaggaaagtttattatttgcttctcttaacggaaagatacttttctgtgtatacgcattgcgccacgagcctggataccacgattgctccaccacaaccggagaacgtaacggacccccgactatctctcgacagcttcttggagatgattagggtatttactgtaccgggaaaatgcttctttgatgctctagctaccgactctgctaatgtaacctgtactgaagactcccttaaaaagatatggagggaacttcatacggtgccacttgagatagaaccatggtcttacggctatgtagacatatctttttcacggcattggattagaacacttgcttggaagctagtgcttcaaataagcggtatgcgaatcagtttcctttcaaatagcaagaatacgcatattccagtagaaattgctagagacatgttagaagacacatttttaatcccaaaaaatctttatgcagttcacggtccagggatatcagtgaaagcactagaaatagccgacgcattggtagatgttgtgaatcagtacgatcaaaatgcagagtcggaggcttggaattttttgttcgatatatccaaatttgtcttctctcttaagcattgtgatagcacattagttgataagtttacgacaaagtgtcagtgtgcgcttatcacgcttcctctttctaatccgcttgaatcgacagatggttctaaagaagatgtagatgcgcttccttaa

SEQ ID NO: 3430 - DNA, 1398 bp, Artificial Sequence
  Description of Artificial Sequence: Synthetic polynucleotide
atggcccgcaatagacaagcgtgcgactgttgttgcattcgtcgtgtaaagtgtgatcgtaaaaaaccatgtaaatgttgtcttcaacacaatttacaatgtacatatcttagacctttgaagaaaagaggtccaaaacccgtcaaggtgagaaatttaaagaaagtagatgatgtacaggtatttagtaaaagtagtagtggtggcataatgaaggttccaaaggcattgattgatcagtgtttgaggctctataatgataagttgtatgtgatctggcctttgttatgttatgatgatctttacgaacttttagagaaaagatatgacgaaacctgtgtgtattggttcttagtatctctttctgccgccacgcttagcgatttgcagactgaaattgagagtgaaggaggggttacctttactgggatacagttatccagtttctgcatgtcttctcgccaagaatttgacgattttaacggtagtgatatattcaagattatgacgtactattgtttgaaccgctgctacgcacagatgtccaactctagaacttcttatagactttcttgtgaagccgtggggctcattaagttggcggggttccatcgcgaggaaactttgaaacttcttcctttcgatgagcagcagcttggaaggaaagtttattatttgcttctcttaacggaaagatacttttctgtgtatacgcattgcgccacgagcttagataccacgattgctccaccacaaccggagaacgtaacggaccccaggttatctctcgacagcttcttggagatgattagggtatttactgtaccgggaaaatgcttctttgatgctttggctaccgactctgctaatgtaacctgtactgaagactcccttaaaaagatatggagggaacttcatacggtgccacttgagatagaaccatggtcttacggctatgtagacatatctttttctagacattggattagaacacttgcttggaagttagtgcttcaaataagcggtatgagaatcagtttcctttctaatagcaagaatacgcatattccagtagaaattgctagagacatgttagaagacacatttttaatcccaaaaaatctttatgcagttcacggtccagggatatctgtgaaagcattggaaatagccgacgcattggtagatgttgtgaatcagtacgatcaaaatgcagagagtgaggcttggaattttttgttcgatatatccaaatttgtcttctctcttaagcattgtgatagcacattagttgataagtttacgacaaagtgtcagtgtgcgcttatcacgcttcctctttctaatccgcttgaatctacagatggttctaaagaagatgtagatgcgcttccttga

SEQ ID NO: 3431 - DNA, 483 bp, Saccharomyces cerevisiae
atgtctataccccattccgtattttcggcactcttggtcttcgtggcgctagctactacaaccttagccagtacagaagcttgcttaccaacaaacaaaagggaagatggtatgaatattaatttttatgagtacacaataggcgaccaaaccacatacttggagcctgaatatatgggctatgaatactccaatacaaagaagttaggttccgttagcggacagaccaatctctccatatactatagtccgccttgtgagagcactcctacctgtgtgacttatgcagttttgaagcgtgatgaggatggatatgatccttgcggacctctttatgaaactaaaaaacgtgacactgaatactgtgacccaaatactgcctattggagttctgatctttttggtttctatactactccaactaatgtaactgtggaaatgacagggtacttaatatggagtatgggcaaccgacgccgttga

SEQ ID NO: 3432 - DNA, 483 bp, Artificial Sequence
  Description of Artificial Sequence: Synthetic polynucleotide
atgtctataccccattccgtattttctgcactcttggtcttcgtggcgttagctactacaaccttagccagtacagaagcttgcttaccaacaaacaaaagggaagatggtatgaatattaatttttatgagtacacaataggcgaccaaaccacatacttggagcctgaatatatgggctatgaatactccaatacaaagaagttaggttccgttagcggacagaccaatctctccatatactatagtccgccttgtgagagcactcctacctgtgtgacttatgcagttttgaagcgtgatgaggatggatatgatccttgcggacctctttatgaaactaaaaaacgtgacactgaatactgtgacccaaatactgcctattggagttctgatctttttggtttctatactactccaactaatgtaactgtggaaatgacagggtacttaatatggagtatgggcaaccgtcgccgttga

SEQ ID NO: 3433 - DNA, 2577 bp, Saccharomyces cerevisiae
atgtcgtccttatccacttcatttgattcatcgtcagatttaccaaggtcaaaatccgttgacaatacggcggcttccatgaagacaggcaagtacccaaaattagagaactataggcagtattctgatgcacaaccaatacgtcacgaagcgcttgcattgaaagtggacgaaacgaaagattctagacacaaatttagttcctctaacggggagaatagtggagtggaaaatggaggctatgtggagaaaacgaatatatccacaagtggccgcatggattttgaaggtgaagcagaagcagaagcagtgaaacgttaccagttaagatctttcgcgcttttaagttctaatgcgaggccatccaggctagcaaagtctgaaactcaccaaaagcagattcatgtagagagcatcgctccctctttgccaaagaatgcggctttagagagaggccatgatacggcgttacctgccggtacgtcaagtaacagatgcaacttagaagcctcctcctcggcaagaacttttacaagcgctcgtaaggcttcgctagttagcgcaatctttgaaacatcggctgaatcagagcatggtacgcatcccaaacaggcgaaacttaagagaagaacctattctacaatatcgacacattcatcagtcaatcctacaacgttgttgacaagaactgcatcgcaaaagtccgatatgggaaatgacacacgaagaattaaaccgttacgtatggatagcagggtatctttccatagtgagatatcgcaagcatccagggattctcaagaaacagaagaagacgtttgttttccaatgtttcgactattacatacaagagttaatggtgttgattttgatgagttggaagaatatgcccagatttcaaatgctgaaagaaatctgtctttggcgaaccatcaaaggcacagtgaacgaacatacaatcataccgaccaagatactggatttactaactctgcttccacttcaggatcctcagcagctctgaaatatacacctgaaatttcacggactcttgaaaaaaattgcagcgttaatgagatgtacgtatctgaaaacaatgaatctgtgagggaagatgataaacctgatctacaccctgacgtaacatttggtagaaataagattgaaggtgaaaaagaaggaaatgattcgagttatagccgggcgtattataccctccaaaatacagaatatcaaattcctagtagattttcgttcttccgctctgaatctgatgaaactgtgcatgctagtgatatcccttctttgatatccgagggacagacgttttatgagttattcaagggaggcgatccaacgtggtggttggattgcagttgtccaactgatgatgaaatgcgttgcatagcaaaaacatttggaatccatcctttgaccgcggaagatatcaggatgcaagaaacgcgtgaaaaggtagagcttttcaaatcctattactttgtctgtttccatacatttgaaaatgataaagaatcggagaattatcttgaacctataaatgtttacatcgttgtttttaggtcaggtgtcttgacttttcattttgacccaatatcacactgtgccaatgtaagaagacgtgtaagacaattacgtgactatgtcagtgtcaattcagattggttatgttatgctttaatcgatgatatcacagatagttttgctccggttattcaatccatcgagtatgaagctgattcgattgatgattcagtgtttatgacccgtgatatggattttgcagccatgttacaaaggattggtgaaagtaggcgtaagacaatgacgctgatgagactcttgagcggtaaagcagatgttatcaaaatgttcgccaaaagatgtcaagatgaaactaatggtattgggccagtgcttaaatctcaaactaacatggtgaacttacaagcggaacaagagaatgtgaaccagaataatagtaataaccaaataagcttatcaaatagctatatgcaaacaacatcacaaccaaggggagatattgctttatacttaggtgatattcaggatcatttgttgacgatgtttcaaaatttattggcgtacgaaaagattttttctagatcacatgcaaactacctggcccaattacaagtggaatcatttaactctaataataaagttacagaaatgttgggtaaagttactatgttaggtacaatgttagttccattaaatgttattactggtctgttcggtatgaatgtaaaagttccaggaagaaatggaagtattgcgtggtggtatggaattttgggggtactgcttttactagctgtcataagctggtttttagctagctattggatcaaaaaaatagacccacctgcaacgctcaacgaagccgcaggtagtggggccaaatcagtcatatctagttttttaccgaaaagagataaaagatttaacgatgattctaaaaatggcaatgcgagagttggcgttcgaaggaaatcaactgtcagtctacccagtagatatagccgttacaattaa

SEQ ID NO: 3434 - DNA, 2577 bp, Artificial Sequence
  Description of Artificial Sequence: Synthetic polynucleotide
atgtcttccttatccacttcttttgattcttcttctgatttaccaaggtccaaatccgttgacaatacggcggcttccatgaagacaggcaagtacccaaaattagagaactataggcagtattctgatgcacaaccaatacgtcacgaagcgcttgcattgaaagtggacgaaacgaaagattctagacacaaatttagttcctctaacggggagaatagtggagtggaaaatggaggctatgtggagaaaacgaatatatccacaagtggccgcatggattttgaaggtgaagcagaagcagaagcagtgaaacgttaccagttaagatctttcgcgcttttaagttctaatgcgaggccatccaggttagcaaagtctgaaactcaccaaaagcagattcatgtagagagcatcgctccctctttgccaaagaatgcggctttagagagaggccatgatacggcgttacctgccggtacgtccagtaacagatgcaacttagaagcctcctcctctgcaagaacttttacaagcgctcgtaaggcttctttggttagcgcaatctttgaaacatctgctgaaagtgagcatggtacgcatcccaaacaggcgaaacttaagagaagaacctattctacaatatctacacattcttctgtcaatcctacaacgttgttgacaagaactgcatctcaaaagtccgatatgggaaatgacacaagaagaattaaaccgttacgtatggatagcagggtatctttccatagtgagatatctcaagcatccagggattctcaagaaacagaagaagacgtttgttttccaatgtttagattattacatacaagagttaatggtgttgattttgatgagttggaagaatatgcccagatttctaatgctgaaagaaatttatctttggcgaaccatcaaaggcacagtgaaagaacatacaatcataccgaccaagatactggatttactaactctgcttccacttctggatcctctgcagctttgaaatatacacctgaaattagtagaactcttgaaaaaaattgcagcgttaatgagatgtacgtatctgaaaacaatgaatctgtgagggaagatgataaacctgatttacaccctgacgtaacatttggtagaaataagattgaaggtgaaaaagaaggaaatgattctagttatagcagagcgtattataccctccaaaatacagaatatcaaattcctagtagattttctttcttccgctctgaatctgatgaaactgtgcatgctagtgatatcccttctttgatatccgagggacagacgttttatgagttattcaagggaggcgatccaacgtggtggttggattgcagttgtccaactgatgatgaaatgcgttgcatagcaaaaacatttggaatccatcctttgaccgcggaagatatcaggatgcaagaaacgcgtgaaaaggtagagcttttcaaatcctattactttgtctgtttccatacatttgaaaatgataaagaaagtgagaattatcttgaacctataaatgtttacatcgttgtttttaggtctggtgtcttgacttttcattttgacccaatatctcactgtgccaatgtaagaagacgtgtaagacaattacgtgactatgtcagtgtcaattctgattggttatgttatgctttaatcgatgatatcacagatagttttgctccggttattcaatccatcgagtatgaagctgattctattgatgattctgtgtttatgacccgtgatatggattttgcagccatgttacaaaggattggtgaaagtaggcgtaagacaatgacgttgatgagactcttgagcggtaaagcagatgttatcaaaatgttcgccaaaagatgtcaagatgaaactaatggtattgggccagtgcttaaatctcaaactaacatggtgaacttacaagcggaacaagagaatgtgaaccagaataatagtaataaccaaataagcttatccaatagctatatgcaaacaacatctcaaccaaggggagatattgctttatacttaggtgatattcaggatcatttgttgacgatgtttcaaaatttattggcgtacgaaaagattttttctagaagccatgcaaactacttggcccaattacaagtggaaagttttaactctaataataaagttacagaaatgttgggtaaagttactatgttaggtacaatgttagttccattaaatgttattactggtcttttcggtatgaatgtaaaagttccaggaagaaatggaagtattgcgtggtggtatggaattttgggggtattgcttttattagctgtcataagctggtttttagctagctattggatcaaaaaaatagacccacctgcaacgctcaacgaagccgcaggtagtggggccaaatctgtcatatctagttttttaccgaaaagagataaaagatttaacgatgattctaaaaatggcaatgcgagagttggcgttagaaggaaatctactgtcagtttacccagtagatatagccgttacaattga

SEQ ID NO: 3435 - DNA, 1872 bp, Saccharomyces cerevisiae
atgcttggcgaagatgaagggaataccgttcttgaaaagggaaataatccttctgtaaaacaaggagaggttggagctgtatttatagtacccaaaatacttatcagagaacatgaaagagtgatacttaagcaaattctgcaaatcctggatcaagatgaattggttcaacctcccttagacaaatttccctacaaaaaattagaattaccgaaatatatagatgaacttaagacgagagacgctactaatacatcctacaagatgatacaattggatgcttatggtgagaaaaaagtgggttcgaacggtgaattatttggcggtagacattatttgttcaacaccttcacattcacggctcatatgggtgttcttctggtacttttacaagatgtcattaaagtgttataccaaagcaacgcaacgcatgacgaggacgagtttattgtccagcatgatcaaattctggtaatggaaacttctgaggaacaaacaaaatttttggccaaaaatggtgtcattcctgaagaatccaaaggatcttttaagtatataactgccaggtcagcctttgttgaattcggtgcttctgttattgccggtggtcaacgcatcgttgatgattattgggaatctttagctaaaaagcaaaatttgtcgtctcaccaaagggttttcaaattatcaacaaatttaatttctaaaatctcacttttacgcccctccttccaaaataacaggattagcaatgccaatgaaattagtgcgaacactaataatacctgtacgatttctacttcaaaattcgaatcacagtatccaatagtcacggaacaaccgtcagcggagattagagaagcctatattgaaaactttgccaaaggtgagcacatttcggcaattgttcctggtcaaagcattagtggaacattggaactcagtgcacaatttagagtaccgcgttatcacagcaaaaactcatttcaacaagctctgcaaatgaaggcaatggacataccaatcggaagacatgaagaattacttgcgcaatatgaaagtcaagctcctgatggttccgcttcaatttcacttcctaaccatattccatctgtcaatcctagcaataaaccaatcaaacgaatgctaagtagcattcttgatattaacgtttcctcatcaaaaaacaagaagtctgaggagaacgaaatgataaaacccatgaacaagggccaacacaaaaataatacatcgttaaacataaacggctggaaatttgaatctttgccattaaaatccgccgagaattcaggtaaacagcaatattatagaggattgccgttatatgaaaaaaacacgctgctagaaaggttgaaacagctgacaccgaacgaaattaaagaactagagcatttacacgatgccgtttttgttaataccggtttgcagaacgttagaaaagttaggacaaaaaaatggaaaaagtactggcagtacaaggcaggtattcctatcggtttgaaacggtctcaattggatgaattcaaaaataaatatttgaaagatgtgttggcgcaaacgagtgttactacaaattttaacgaaataacgaatacggatgaaacaataacaacaaagagggtaccgaacccaaacttcctaggaaattgtaacattaaggattttaaacctccatacatttattctcatgtgaacaaagtaccacaaaatgtcgctggggataaaacggctgttaagctggacactgaagtaaagaacacaaatgctaatccagtggtggcgacggatccggtcgccgctaaaccggacaacctggctaacttcagcaacgaagtagctatgaataattga

SEQ ID NO: 3436 - DNA, 1872 bp, Artificial Sequence
  Description of Artificial Sequence: Synthetic polynucleotide
atgcttggcgaagatgaagggaataccgttcttgaaaagggaaataatccttctgtaaaacaaggagaggttggagctgtatttatagtacccaaaatacttatcagagaacatgaaagagtgatacttaagcaaattttacaaatcttagatcaagatgaattggttcaacctcccttagacaaatttccctacaaaaaattagaattaccgaaatatatagatgaacttaagacgagagacgctactaatacatcctacaagatgatacaattggatgcttatggtgagaaaaaagtgggttccaacggtgaattatttggcggtagacattatttgttcaacaccttcacattcacggctcatatgggtgttcttttggtacttttacaagatgtcattaaagtgttataccaaagcaacgcaacgcatgacgaggacgagtttattgtccagcatgatcaaattttagtaatggaaacttctgaggaacaaacaaaatttttggccaaaaatggtgtcattcctgaagaatccaaaggatcttttaagtatataactgccaggtctgcctttgttgaattcggtgcttctgttattgccggtggtcaacgcatcgttgatgattattgggaatctttagctaaaaagcaaaatttgtcttctcaccaaagggttttcaaattatctacaaatttaatttctaaaatctctcttttacgcccctccttccaaaataacaggattagcaatgccaatgaaattagtgcgaacactaataatacctgtacgatttctacttctaaattcgaatctcagtatccaatagtcacggaacaaccgtctgcggagattagagaagcctatattgaaaactttgccaaaggtgagcacatttctgcaattgttcctggtcaaagcattagtggaacattggaactcagtgcacaatttagagtaccgcgttatcacagcaaaaactcttttcaacaagctttacaaatgaaggcaatggacataccaatcggaagacatgaagaattacttgcgcaatatgaaagtcaagctcctgatggttccgcttccatttctcttcctaaccatattccatctgtcaatcctagcaataaaccaatcaaaagaatgttaagtagcattcttgatattaacgtttcctcttctaaaaacaagaagtctgaggagaacgaaatgataaaacccatgaacaagggccaacacaaaaataatacaagtttaaacataaacggctggaaatttgaatctttgccattaaaatccgccgagaattctggtaaacagcaatattatagaggattgccgttatatgaaaaaaacacgttattggaaaggttgaaacagttgacaccgaacgaaattaaagaattagagcatttacacgatgccgtttttgttaataccggtttgcagaacgttagaaaagttaggacaaaaaaatggaaaaagtactggcagtacaaggcaggtattcctatcggtttgaaaagatctcaattggatgaattcaaaaataaatatttgaaagatgtgttggcgcaaacgagtgttactacaaattttaacgaaataacgaatacggatgaaacaataacaacaaagagggtaccgaacccaaacttcttgggaaattgtaacattaaggattttaaacctccatacatttattctcatgtgaacaaagtaccacaaaatgtcgctggggataaaacggctgttaagttggacactgaagtaaagaacacaaatgctaatccagtggtggcgacggatccggtcgccgctaaaccggacaacttggctaacttcagcaacgaagtagctatgaataattga

SEQ ID NO: 3437 - DNA, 1338 bp, Saccharomyces cerevisiae
atgatgatgttaattactatgaaaagtacagtactgttgagtgtttttaccgtcttagcgacatgggctggattgctagaagctcatccattgggtgacacttcagatgcatccaaattaagctcagactactcgctccctgatctcattaatgcacgtaaagtgcccaataactggcaaactggagaacaagctagtctagaggaagggagaattgtattgacttctaagcaaaattccaagggttcactttggttgaagcaaggattcgatttgaaggattcttttactatggagtggacatttaggagtgttggttattctggccaaaccgacggtggcatatcattttggtttgttcaagattctaacgtaccacgcgataagcagttatacaatgggccagtgaactatgatggtttacaattattagtggataacaatggtccattgggcccaacacttcgtggtcaactaaatgatggtcaaaagcctgtagataagacgaaaatctatgatcagagttttgcatcttgtttgatgggttatcaggattcctccgttccttccacgatcagagtaacttatgatttggaagacgacaacttattaaaagttcaggtggacaataaagtctgtttccaaactaggaaggttcgctttccctctgggtcttaccgtattggtgtcaccgctcaaaatggagcagtgaataataatgcagagtcttttgaaatattcaaaatgcaattttttaatggcgtgattgaagattctttgatccctaatgtgaatgcaatgggtcagccaaaactgatcaccaaatacattgaccaacaaaccggcaaagaaaaattgattgaaaaaacagcatttgacgctgacaaagacaaaattacaaactatgaattgtataagaaactggatagagttgaaggtaaaattcttgcgaacgatatcaatgctttagaaacaaagctaaatgatgtcattaaggtccaacaagagctattatcattcatgactacgataactaaacagctctcttctaagccaccagctaataatgaaaagggaacgtccaccgatgatgcaatcgctgaggataaagaaaatttcaaagacttcttatcaatcaatcagaaattggagaaagtcctggttgaacaagaaaagtatagggaagctaccaaacgtcatggacaagatggtcctcaggtcgacgaaattgccagaaaactaatgatttggttacttccattaattttcattatgttggttatggcatattacacattcagaatcagacaagagatcataaagaccaaactgctatga

SEQ ID NO: 3438 - DNA, 1338 bp, Artificial Sequence
  Description of Artificial Sequence: Synthetic polynucleotide
atgatgatgttaattactatgaaaagtacagtacttttgagtgtttttaccgtcttagcgacatgggctggattgttggaagctcatccattgggtgacacttctgatgcatccaaattaagcagtgactactccctccctgatctcattaatgcacgtaaagtgcccaataactggcaaactggagaacaagctagtttggaggaagggagaattgtattgacttctaagcaaaattccaagggttctctttggttgaagcaaggattcgatttgaaggattcttttactatggagtggacatttaggagtgttggttattctggccaaaccgacggtggcatatccttttggtttgttcaagattctaacgtaccacgcgataagcagttatacaatgggccagtgaactatgatggtttacaattattagtggataacaatggtccattgggcccaacacttcgtggtcaattgaatgatggtcaaaagcctgtagataagacgaaaatctatgatcagagttttgcatcttgtttgatgggttatcaggattcctccgttccttccacgatcagagtaacttatgatttggaagacgacaacttattaaaagttcaggtggacaataaagtctgtttccaaactaggaaggttcgctttccctctgggtcttaccgtattggtgtcaccgctcaaaatggagcagtgaataataatgcagagtcttttgaaatattcaaaatgcaattttttaatggcgtgattgaagattctttgatccctaatgtgaatgcaatgggtcagccaaaattaatcaccaaatacattgaccaacaaaccggcaaagaaaaattgattgaaaaaacagcatttgacgctgacaaagacaaaattacaaactatgaattgtataagaaattggatagagttgaaggtaaaattcttgcgaacgatatcaatgctttagaaacaaagttgaatgatgtcattaaggtccaacaagagttattatctttcatgactacgataactaaacagctctcttctaagccaccagctaataatgaaaagggaacgtccaccgatgatgcaatcgctgaggataaagaaaatttcaaagacttcttatctatcaatcagaaattggagaaagtcttggttgaacaagaaaagtatagggaagctaccaaacgtcatggacaagatggtcctcaggtcgacgaaattgccagaaaattaatgatttggttacttccattaattttcattatgttggttatggcatattacacattcagaatcagacaagagatcataaagaccaaattactttga

SEQ ID NO: 3439 - DNA, 2145 bp, Saccharomyces cerevisiae
atgctatcattttgcgactatttttggtctgaagaccttgtctcaggtctagatgtgctttttgatagattataccatggttgtgagcaatgcgacttgttcattcaattatttgcgtcaagaatgcaatttgaagtcagtcacgggaggcagttgtttggtatagaagccggtatggacaatctgaaggcagtgcaggaagatgaagatgaaggggtgacagtttcgagggccctgaggggaattctacaggaaatgtctcaggaagggacgcatcacttgacaatagcgtcgaacatagaaagtttggtgctgcagccattcagtaaatggtgcatagaacatagggagagaattcaatactccgagaagactttgttgaccaatgtaaataatttcaggaagtctaaaaagtacgtcggtaagctggagaaggaatattttaataaatgtaggcagctagaagaatttaaaagaactcatttcaacgaagatgagctagcaaatgcaatgaaatcattgaaaatacaaaataaatacgaagaagatgtggccagggaaaaggatcacagatttttcaacaggatagcgggaatagattttgattataagacaatgaaggagacgcttcagctgttactgaccaagcttcctaaaacggactataagctacctctcattagttattctttgagcaacaccaacaatggtggagaaataacgaagtttctgcttgaccacatgtcgttaaaggatattgatcaagctgaaacgtttggccaagatttgttgaatttagggtttttgaaatattgcaacggtgttggtaatacatttgtcaactctaaaaaatttcaataccaatggaagaataccgcgtacatgtttgccaatgtgccaatgcccggttcagaggagcctaccactggtgaatccttaatatcccggttcaacaactgggatggttcatctgcaaaggaaattattcaatccaagattggtaacgaccagggggcagcgaagatccaagctccgcatatatccgataatgaaaggacgcttttcagaatgatggatgcgcttgcagcgtcagataagaagtattaccaggagtgcttcaagatggatgccttgagatgctcggttgaggagttgttgattgaccatttgtcgtttatggaaaaatgtgagtccgatagactgaatgcgatcaagaaagcgacactagatttttgttctaccttgggtaacaagatttcttcgttaagactgtgcatagataaaatgctcacgctagaaaacgatattgatcccactgcagaccttttgcaacttttagttaagtacaagacgggcagtttcaagccgcaagccattgtttataataattactacaatcctggttcatttcaaaactttggtgttgatctagaaactcgttgtagactagacaagaaagtcgttccgttgataatttcttcgatattctcatatatggacaaaatatatcctgacttacctaatgataaagtaagaacttcaatttggactgattcggtgaaattaagtttaacacatcagcttcgaaacctattgaacaaacaacagttccacaacgaaggggaaatatttgatatactttctacgtccaagttggagccaagcaccatcgccagtgttgttaaaatttatttattagaattaccagacccactaattcccaatgatgtctctgatattcttcgggtgctttaccttgactatccacctttagttgaaactgcgttgcaaaattctacatcatctcccgagaatcagcaggacgatgacaacgaagaaggctttgataccaagagaataagaggcctttatactactctgtcctctctaagcaaaccacacatagcgacactagacgctattacaactcatttttacagattaattaaaattctgaaaatgggagagaacggtaatgaagtagcagatgagtttaccgtctcaatttcacaagaatttgccaattgtattatccagtcaaagatcaccgatgataatgaaattggttttaagattttctatgatctactgacacataagaaacagatttttcacgaattgaaaaggcaaaattcaaaaaattag

SEQ ID NO: 3440 - DNA, 2145 bp, Artificial Sequence
  Description of Artificial Sequence: Synthetic polynucleotide
atgctttctttttgcgactatttttggtctgaagaccttgtctctggtttggatgtgctttttgatagattataccatggttgtgagcaatgcgacttgttcattcaattatttgcgtccagaatgcaatttgaagtcagtcacgggaggcagttgtttggtatagaagccggtatggacaatttgaaggcagtgcaggaagatgaagatgaaggggtgacagtttccagggccttaaggggaattttacaggaaatgtctcaggaagggacgcatcacttgacaatagcgtccaacatagaaagtttggtgttacagccattcagtaaatggtgcatagaacatagggagagaattcaatactccgagaagactttgttgaccaatgtaaataatttcaggaagtctaaaaagtacgtcggtaagttggagaaggaatattttaataaatgtaggcagttagaagaatttaaaagaactcatttcaacgaagatgagttggcaaatgcaatgaaatctttgaaaatacaaaataaatacgaagaagatgtggccagggaaaaggatcacagatttttcaacaggatagcgggaatagattttgattataagacaatgaaggagacgcttcagcttttattaaccaagcttcctaaaacggactataagttacctctcattagttattctttgagcaacaccaacaatggtggagaaataacgaagtttttacttgaccacatgtctttaaaggatattgatcaagctgaaacgtttggccaagatttgttgaatttagggtttttgaaatattgcaacggtgttggtaatacatttgtcaactctaaaaaatttcaataccaatggaagaataccgcgtacatgtttgccaatgtgccaatgcccggttctgaggagcctaccactggtgaatccttaatatccagattcaacaactgggatggttcttctgcaaaggaaattattcaatccaagattggtaacgaccagggggcagcgaagatccaagctccgcatatatccgataatgaaaggacgcttttcagaatgatggatgcgcttgcagcgtctgataagaagtattaccaggagtgcttcaagatggatgccttgagatgctctgttgaggagttgttgattgaccatttgagttttatggaaaaatgtgagtccgatagattgaatgcgatcaagaaagcgacattagatttttgttctaccttgggtaacaagatttcttctttaagattgtgcatagataaaatgctcacgttagaaaacgatattgatcccactgcagaccttttgcaacttttagttaagtacaagacgggcagtttcaagccgcaagccattgtttataataattactacaatcctggttcttttcaaaactttggtgttgatttggaaactcgttgtagattagacaagaaagtcgttccgttgataatttcttctatattctcttatatggacaaaatatatcctgacttacctaatgataaagtaagaacttctatttggactgattctgtgaaattaagtttaacacatcagcttagaaaccttttgaacaaacaacagttccacaacgaaggggaaatatttgatatactttctacgtccaagttggagccaagcaccatcgccagtgttgttaaaatttatttattagaattaccagacccattgattcccaatgatgtctctgatattcttcgtgtgctttaccttgactatccacctttagttgaaactgcgttgcaaaattctacatcttctcccgagaatcagcaggacgatgacaacgaagaaggctttgataccaagagaataagaggcctttatactactttatcctctttaagcaaaccacacatagcgacattagacgctattacaactcatttttacagattaattaaaattttgaaaatgggagagaacggtaatgaagtagcagatgagtttaccgtctctatttctcaagaatttgccaattgtattatccagtccaagatcaccgatgataatgaaattggttttaagattttctatgatttattaacacataagaaacagatttttcacgaattgaaaaggcaaaattctaaaaattga

SEQ ID NO: 3441 - DNA, 624 bp, Saccharomyces cerevisiae
atgctcaagcgtattgttggattgcctgcaaggcgttgctttcatagaacgtcctttttgctgggcagtgactttgaaactgtgcatattcccaatacgaaccactttaaagatttacttatagagaacggtaaatttcaagaggatcaagcaactacaatagtagagataatgacagatgcaattaggggcggggttaatcatgtttcacaggatctggcaaagagagaaaaattgacccaacttagctatcaacaacgtgttgattttgcaaagttaagagatcagctattgagtgctgatagaagtgaatttcacaatattcaaaacgagtacgaaagtgtgaaaaacgatctggagaaactaagaaacaaactaagggaagaaattaccaaaacaaacgccggtttcaaacttgatctgtccttagaaaaaggcagaattagggaagaaagtagtcatcacgatctgcaaataaaagaaatcgacaccaaaattgagcaagaagtgaccaatatgaagatgcagattgattctgtcaagactcaagtcatgcaatggctgataggtgtctgtacaggtacatttgcacttgtattagcatatatgaggttattaacatag

SEQ ID NO: 3442 - DNA, 624 bp, Artificial Sequence
  Description of Artificial Sequence: Synthetic polynucleotide
atgctcaagcgtattgttggattgcctgcaaggcgttgctttcatagaacgtcctttttgttgggcagtgactttgaaactgtgcatattcccaatacgaaccactttaaagatttacttatagagaacggtaaatttcaagaggatcaagcaactacaatagtagagataatgacagatgcaattaggggcggggttaatcatgtttctcaggatttggcaaagagagaaaaattgacccaacttagctatcaacaacgtgttgattttgcaaagttaagagatcagttattgagtgctgatagaagtgaatttcacaatattcaaaacgagtacgaaagtgtgaaaaacgatttagagaaattgagaaacaaattgagggaagaaattaccaaaacaaacgccggtttcaaacttgatttatccttagaaaaaggcagaattagggaagaaagtagtcatcacgatttgcaaataaaagaaatcgacaccaaaattgagcaagaagtgaccaatatgaagatgcagattgattctgtcaagactcaagtcatgcaatggttgataggtgtctgtacaggtacatttgcacttgtattagcatatatgaggttattaacatga

SEQ ID NO: 3443 - DNA, 765 bp, Saccharomyces cerevisiae
atgagtatcgctgaattcgcttacaaggaaaaaccagaaactttggttttattcgatgttgatggtaccttgacaccagccagattaactgtttctgaagaagttagaaaaactttggccaagttgagaaacaagtgctgcattggttttgtcggtggttctgacttaagcaagcaattagaacagttaggcccaaacgttttagatgaatttgactattctttctctgaaaatggtttgaccgcctacagattaggtaaggaattagcttctcaatccttcatcaactggctcggtgaggaaaaatacaataaattggccgtcttcattttgagatatctatctgaaattgacttgccaaagagaagaggtactttcttggaatttagaaatggtatgatcaacgtttccccaattggtagaaatgcttctactgaggaaagaaacgaattcgaaagatacgataaggaacaccaaatcagagccaagttcgttgaagctttgaaaaaggaattcccagactacggtttgactttctccattggtggccaaatctctttcgacgttttccccgctggttgggataagacctactgtttgcaacacgttgaaaaagatggtttcaaggaaattcatttctttggtgacaagactatggtcggtggtaacgattacgaaatttttgtcgatgaaagaaccatcggacattcagtacaatcccctgatgacaccgtcaaaattttgactgaactattcaacttatag

SEQ ID NO: 3444 - DNA, 765 bp, Artificial Sequence
  Description of Artificial Sequence: Synthetic polynucleotide
atgagtatcgctgaattcgcttacaaggaaaaaccagaaactttggttttattcgatgttgatggtaccttgacaccagccagattaactgtttctgaagaagttagaaaaactttggccaagttgagaaacaagtgctgcattggttttgtcggtggttctgacttaagcaagcaattagaacagttaggcccaaacgttttagatgaatttgactattctttctctgaaaatggtttgaccgcctacagattaggtaaggaattagcttctcaatccttcatcaactggctcggtgaggaaaaatacaataaattggccgtcttcattttgagatatttatctgaaattgacttgccaaagagaagaggtactttcttggaatttagaaatggtatgatcaacgtttccccaattggtagaaatgcttctactgaggaaagaaacgaattcgaaagatacgataaggaacaccaaatcagagccaagttcgttgaagctttgaaaaaggaattcccagactacggtttgactttctccattggtggccaaatctctttcgacgttttccccgctggttgggataagacctactgtttgcaacacgttgaaaaagatggtttcaaggaaattcatttctttggtgacaagactatggtcggtggtaacgattacgaaatttttgtcgatgaaagaaccatcggacattctgtacaatcccctgatgacaccgtcaaaattttgactgaattattcaacttatga

SEQ ID NO: 3445 - DNA, 906 bp, Saccharomyces cerevisiae
atgaaactgaaagttactggagcaggaatcaaccaagtcgttactttgaagcaagatgcaacactaaatgatcttattgagcatatcaatgtagatgttaagacgatgaggtttggatatccgcctcaaaggatcaatttgcaaggggaagacgcttctttgggacaaacccagctggacgagctgggtattaactctggtgaaaagattacaatagagtcctctgatagtaacgaaagcttcagtttgccaccaccacaacccaaaccaaagagggtgctgaagagcactgagatgtcaattggtggcagtggagaaaacgtcctatcagtacatcctgttctcgacgacaactcgtgtctgttccatgctattgcctatggcatcttcaaacaagatagcgttcgtgacctcagggagatggtctctaaggaggtcctcaacaaccccgtcaagttcaatgacgccatattggacaaacctaacaaagattacgcgcaatggattttgaaaatggaatcttggggtggagccatcgagattggtatcatatccgatgcactcgcagtagctatttatgtagtcgacattgacgctgttaaaatcgaaaagttcaacgaggacaagttcgacaactacattttgatactgttcaacggaatccactatgattccttgaccatgaacgagtttaaaactgttttcaacaagaaccagccggaatcagatgatgttctaacagcagctttgcaactggcctcaaatttgaagcaaactggctattccttcaacactcataaggcccagatcaaatgcaacacttgccaaatgacctttgtgggtgaaagagaagttgctaggcacgctgaatccacgggacacgttgattttggccaaaatagataa

SEQ ID NO: 3446 - DNA, 906 bp, Artificial Sequence
  Description of Artificial Sequence: Synthetic polynucleotide
atgaaattgaaagttactggagcaggaatcaaccaagtcgttactttgaagcaagatgcaacattaaatgatcttattgagcatatcaatgtagatgttaagacgatgaggtttggatatccgcctcaaaggatcaatttgcaaggggaagacgcttctttgggacaaacccagttagacgagttaggtattaactctggtgaaaagattacaatagagtcctctgatagtaacgaaagcttcagtttgccaccaccacaacccaaaccaaagagggtgttgaagagcactgagatgtctattggtggcagtggagaaaacgtcctttctgtacatcctgttctcgacgacaactcttgtttgttccatgctattgcctatggcatcttcaaacaagatagcgttcgtgacctcagggagatggtctctaaggaggtcctcaacaaccccgtcaagttcaatgacgccatattggacaaacctaacaaagattacgcgcaatggattttgaaaatggaatcttggggtggagccatcgagattggtatcatatccgatgcactcgcagtagctatttatgtagtcgacattgacgctgttaaaatcgaaaagttcaacgaggacaagttcgacaactacattttgatattattcaacggaatccactatgattccttgaccatgaacgagtttaaaactgttttcaacaagaaccagccggaaagtgatgatgttttgacagcagctttgcaattggcctctaatttgaagcaaactggctattccttcaacactcataaggcccagatcaaatgcaacacttgccaaatgacctttgtgggtgaaagagaagttgctaggcacgctgaatccacgggacacgttgattttggccaaaatagatga

SEQ ID NO: 3447 - DNA, 2025 bp, Saccharomyces cerevisiae
atgtcggatgtagataactgggaacccgtatcagataatgaggacagtactgattctgtgaaacaattgggtcccccctttgagcatgcaagtaacaatgacaatgccggcgatactgaagctgagtcactgcaagaagtgcccctaaatacagagaccaacgacgtacgcaagaatttagtagtgattacaaaccaaagtgccgccgatgaacaccctacagagatcaagcacgatcaatcaaggacttcttcgacgtcctcgttcttcagtggaatgatctcttcgtttaagtcaaacgtgccatccccagtttctagatcaactacgccaacttcgccagtttcgcaaccaagcattatatcacatagaagggagccttccatggggtccaaaagaagatcaagccgccgtatcagtaatgccacaattgctgaaataggctctcccttgcaacaggtggaaaagcctgatgaggtcaagacaagactcactccttcccaaatgaaagaagacaattacgatcatagacgattcgtggaagaacgttacatggacacaccttatcactatgcgtctgagcaaagaaataaagactttcatgagacattcaagtccgttcctaaagatgacagactactggatgattttaattgtgggctgaatagagagctgctttaccaggggaaactatacataacagaaacgcatctctgcttcaactccaatgttcttggttggattgctaaagtactgattgcgttcgaagatgtcacgtttatggaaaaaacttctgctgctgggttgttccccagcgcaatatccatcgaaacaaagatgggcaaaactctctttaatggttttatatccagggatgctgcatttggattaatgaaagaagtgtggtcaagaaccttgttgcagaaggacatggccagcgaaaacatcaatactaaagcagaaaagtcaggaaatggcaaagagattgatgatgcaataaactccatcgatgaggaaaacaatgataaagacgctaatgataatgacactaatgaaaatgacgatgaaaatatctctacaaatgagactacccccaatagtacgagttcctcgccggataaagaaaaagagaaagcgtataaactgcgtgccgattcctcgtatcagtatgatggtccaatatatcatcattcaacaagctttccggctgaacctatggccaataacgagtttgttctcaaggagttaccattcgattgtgcacctggtatactttttgagatcatgttcaactcagagcaaaacgaatttcttctagattttttacggggtcaagaaggttcacaaattaccactattccaaatttcacgagcattgacggatcttccatgactttgaagcgtgagtattcatacgagaaagcattgcactttcctgcggggcccaagtccacgacatgttatgttgctgaggtaataaagagaaaagatcctgatacttactatgaggttatcagtagcatacgcactccgaacgtgcccagtggtggtagtttctcaactaagacaaggtatctaatccgttggaatgacgaaataacgtgtctgttacgggtatccttttgggtggaatggactggttccagttggatcaaaggtatggttgaaaatggatgcaagaatggtcaattggaggctgcgcaattaatggagcgtattctttccaagttcatcaagaacaatgtcgaagagtgccaaattactatcagcaaggaggaagaggagcaagatgataaagaagtaaaaaataagttgaaagaggttgaccttgaacaaccaagagaagcggttgttacggctcccgcaattgcagagcagcaaggtctcaaggtcaccatggaaacatggttgttcttatacttgattgtggtcgttttgctattgtttaatctgttctacatacgttcaattgctgtctcattacatcaactggtgaagctgcaattggtagaactgaagttgtga

SEQ ID NO: 3448 - DNA, 2025 bp, Artificial Sequence
  Description of Artificial Sequence: Synthetic polynucleotide
atgagtgatgtagataactgggaacccgtatctgataatgaggacagtactgattctgtgaaacaattgggtcccccctttgagcatgcaagtaacaatgacaatgccggcgatactgaagctgagtctttacaagaagtgcccttgaatacagagaccaacgacgtacgcaagaatttagtagtgattacaaaccaaagtgccgccgatgaacaccctacagagatcaagcacgatcaatccaggacttcttctacgtccagtttcttcagtggaatgatctcttcttttaagtctaacgtgccatccccagtttctagatctactacgccaacttctccagtttctcaaccaagcattatatctcatagaagggagccttccatggggtccaaaagaagaagcagccgccgtatcagtaatgccacaattgctgaaataggctctcccttgcaacaggtggaaaagcctgatgaggtcaagacaagactcactccttcccaaatgaaagaagacaattacgatcatagaagattcgtggaagaacgttacatggacacaccttatcactatgcgtctgagcaaagaaataaagactttcatgagacattcaagtccgttcctaaagatgacagattattagatgattttaattgtgggttaaatagagagttgctttaccaggggaaactttacataacagaaacgcatctctgcttcaactccaatgttcttggttggattgctaaagtacttattgcgttcgaagatgtcacgtttatggaaaaaacttctgctgctgggttgttccccagcgcaatatccatcgaaacaaagatgggcaaaactctctttaatggttttatatccagggatgctgcatttggattaatgaaagaagtgtggtccagaaccttgttgcagaaggacatggccagcgaaaacatcaatactaaagcagaaaagagtggaaatggcaaagagattgatgatgcaataaactccatcgatgaggaaaacaatgataaagacgctaatgataatgacactaatgaaaatgacgatgaaaatatctctacaaatgagactacccccaatagtacgagttcctctccggataaagaaaaagagaaagcgtataaattacgtgccgattccagctatcagtatgatggtccaatatatcatcattctacaagctttccggctgaacctatggccaataacgagtttgttctcaaggagttaccattcgattgtgcacctggtatactttttgagatcatgttcaacagtgagcaaaacgaatttcttttagattttttaagaggtcaagaaggttctcaaattaccactattccaaatttcacgagcattgacggatcttccatgactttgaagcgtgagtattcttacgagaaagcattgcactttcctgcggggcccaagtccacgacatgttatgttgctgaggtaataaagagaaaagatcctgatacttactatgaggttatcagtagcatacgcactccgaacgtgcccagtggtggtagtttctctactaagacaaggtatttgatccgttggaatgacgaaataacgtgtcttttaagagtatccttttgggtggaatggactggttccagttggatcaaaggtatggttgaaaatggatgcaagaatggtcaattggaggctgcgcaattaatggagcgtattctttccaagttcatcaagaacaatgtcgaagagtgccaaattactatcagcaaggaggaagaggagcaagatgataaagaagtaaaaaataagttgaaagaggttgaccttgaacaaccaagagaagcggttgttacggctcccgcaattgcagagcagcaaggtctcaaggtcaccatggaaacatggttgttcttatacttgattgtggtcgttttgttgttgtttaatttattctacatacgttctattgctgtctctttacatcaattagtgaagttacaattggtagaattgaagttgtga

SEQ ID NO: 3449 - DNA, 192 bp, Saccharomyces cerevisiae
atgaaaatgtggggaccctcccaacgagattccttcagagagattacatataaagtgaaattcaagtatgacgatggtgactactccttggccattgatttgatgtctagggattgtattaatgtctatgagttgattaccgataggctactggttgatttcctttcaaaaaagctgctcaagctaagatag

SEQ ID NO: 3450 - DNA, 192 bp, Artificial Sequence
  Description of Artificial Sequence: Synthetic polynucleotide
atgaaaatgtggggaccctcccaaagagattccttcagagagattacatataaagtgaaattcaagtatgacgatggtgactactccttggccattgatttgatgtctagggattgtattaatgtctatgagttgattaccgataggttattggttgatttcctttctaaaaagttactcaagttgagatga

SEQ ID NO: 3451 - DNA, 1869 bp, Saccharomyces cerevisiae
atgttgttctactcgttcgtgtggtctgtactggccgctagtgttgctttggcaaagacacataagttaaactataccgcttcttgggtaactgccaatcctgatggattgcatgaaaaaaggatgattggttttaatggcgaatggccacttccagatatccatgttgaaaaaggagatcgtgttgagctttatttgactaacggctttcaagacaatactgctacttctctacatttccatggtcttttccagaatacgagtttggggaaccagcttcaaatggatggtccttctatggtgacacaatgtcccatcgttccgggacaaacatacctgtacaacttcactgtcccagagcaggtaggaacgttctggtaccatgcacacatgggtgcccagtacggtgacggtatgaggggtgcatttatcatccacgatccggaggagcccttcgaatatgatcatgaacgagtcatcactctatcggaccattatcacgaaaattataaaacggttaccaaagagtttctgtcaagatataatccaaccggtgctgaacctattcctcaaaatattctttttaataatacgatgaatgtaactttagattttacacccggtgaaacgtatctcttcaggttcttgaacgttgggctgtttgtatcccagtatatcattcttgaggatcatgaaatgagtatagtagaggtggacggtgtttacgtaaagccaaactttactgattcgatatatctttctgcggggcaaagaatgagtgtgttgattaaagctaaagataaaatgcctacaagaaactacgctatgatgcaaataatggatgagacgatgcttgatgttgtcccacctgagttacaactcaaccaaactatccaaatgaggtatggccactcgttgccggaggcacgcgcattgaacattgaagattgtgacttggaccgcgccacgaatgacttttacctagaacctctgattgagagagacctacttgctcactatgaccaccaaattgtcatggatgtaagaatggtcaacttgggtgatggtgtgaagtatgcatttttcaataatatcacttacgtcacaccaaaggtgcctactttgacaacgttgcttacctcaggaaagcttgcgtcagatcctagaatttatggtgataatatcaatgcgcagttattgaaacataatgatatcatagaggttgttctaaacaattatgattctggcagacatccattccatttgcacggtcataatttccaaatagtccaaaagtcgccagggttccatgttgatgaagcttatgacgaatctgagcaagatgaaatgaccgtcccttataacgaatctgcgccattacaaccgttccctgagaggccgatggtgagagatacagtggttcttgaacctagtggacatgttgtcctgagatttagagctgacaaccctggtgtctggtatttccattgtcatgtagattggcacttacaacaaggtttggcttcggtctttattgaggcacccgttttacttcaggaaagggaaaagcttaatgagaactatctggatatatgcaaagccgctgatattccggtagttggtaatgctgcaggtcattcgaatgattggtttgacttaaaaggattaccaagacaacctgagccactaccaaagggatttactactgaaggatatttggcattgattatttcaaccattatcggtgtctggggcctatattccattgctcagtatggtattggcgaggttatccctaacgatgagaaggtgtaccacacgttaagggaaatcttggctgaaaatgaaatagaggtttctcgcggctaa

SEQ ID NO: 3452 - DNA, 1869 bp, Artificial Sequence
  Description of Artificial Sequence: Synthetic polynucleotide
atgttgttctactctttcgtgtggtctgtattggccgctagtgttgctttggcaaagacacataagttaaactataccgcttcttgggtaactgccaatcctgatggattgcatgaaaaaaggatgattggttttaatggcgaatggccacttccagatatccatgttgaaaaaggagatcgtgttgagctttatttgactaacggctttcaagacaatactgctacttctttgcatttccatggtcttttccagaatacgagtttggggaaccagcttcaaatggatggtccttctatggtgacacaatgtcccatcgttccgggacaaacatacttgtacaacttcactgtcccagagcaggtaggaacgttctggtaccatgcacacatgggtgcccagtacggtgacggtatgaggggtgcatttatcatccacgatccggaggagcccttcgaatatgatcatgaaagagtcatcactttaagtgaccattatcacgaaaattataaaacggttaccaaagagtttttatctagatataatccaaccggtgctgaacctattcctcaaaatattctttttaataatacgatgaatgtaactttagattttacacccggtgaaacgtatctcttcaggttcttgaacgttgggttgtttgtatcccagtatatcattcttgaggatcatgaaatgagtatagtagaggtggacggtgtttacgtaaagccaaactttactgattctatatatctttctgcggggcaaagaatgagtgtgttgattaaagctaaagataaaatgcctacaagaaactacgctatgatgcaaataatggatgagacgatgcttgatgttgtcccacctgagttacaactcaaccaaactatccaaatgaggtatggccactctttgccggaggcacgcgcattgaacattgaagattgtgacttggaccgcgccacgaatgacttttacttggaacctttgattgagagagacttacttgctcactatgaccaccaaattgtcatggatgtaagaatggtcaacttgggtgatggtgtgaagtatgcatttttcaataatatcacttacgtcacaccaaaggtgcctactttgacaacgttgcttacctctggaaagcttgcgtctgatcctagaatttatggtgataatatcaatgcgcagttattgaaacataatgatatcatagaggttgttttgaacaattatgattctggcagacatccattccatttgcacggtcataatttccaaatagtccaaaagtctccagggttccatgttgatgaagcttatgacgaatctgagcaagatgaaatgaccgtcccttataacgaatctgcgccattacaaccgttccctgagaggccgatggtgagagatacagtggttcttgaacctagtggacatgttgtcttgagatttagagctgacaaccctggtgtctggtatttccattgtcatgtagattggcacttacaacaaggtttggcttctgtctttattgaggcacccgttttacttcaggaaagggaaaagcttaatgagaactatttggatatatgcaaagccgctgatattccggtagttggtaatgctgcaggtcattctaatgattggtttgacttaaaaggattaccaagacaacctgagccattaccaaagggatttactactgaaggatatttggcattgattatttctaccattatcggtgtctggggcttgtattccattgctcagtatggtattggcgaggttatccctaacgatgagaaggtgtaccacacgttaagggaaatcttggctgaaaatgaaatagaggtttctcgcggctga

SEQ ID NO: 3453 - DNA, 1623 bp, Saccharomyces cerevisiae
atgacagcaatgaaagctattgtctggagacttcccaagatgccgaaaatcaaaattacaaaaacttatgaagttacgaaaattacggcgatattgacactagtaggatttataatgggccttgaggtgccgtcattggcaacttttctcacaaacaaaacgtttaatgagtacttcaagtatccaactcctttacaacaaggtttactcatggggtccacccccctgggtggtatcatgggatgttttatttgctgcataatgaatgatagattcagtagaatatatcaatttcaatcgggaataataatatggaatattgttacgttattgaacttttgtatttgggatatattaggtttactaatttgccggatgatcaagggtatgatccttgggaacttttcaattttagtagcatcctacgcaaatgaagttatcccccgcggcaagcgtggaagtacgatgagctatattcaattgtgtttaaccattggaattcttgttatgcattatttgtgcattgcattaagtctatgggattctcattttgcgttccgtatagcgtggtgcataggaatcattcctggattactgttctggatggctagctacgctctacctgaatcttatcactggctagtactacatgggaagatgagtgaagctcaggaaattcagcacaatttagccaaaaagtttaatgaaagccagccaagggatgcagtccctgagatgagtaagatcgaattagcaggagatttttggattggagttaatgatttggacttctccaaaaaattacctcggggttcgtttaagcctttgattcttggaatgactttacagttattggttcaatttagcggtataaacattatccttggttatattacatacatttgcgagattgtagggcttgaaggcaatgtaaaactattcaccagttccattccatatttcatcaacatggttttgagcttgttaccgattacattcattgattacactagcagaaagctaattaccttgttgggtggctttcccattagtgggttgctcattacaatcggcgcattatttgtgaagtatggtcaagacaccaagcccatcgacggcaataggagtttagtttggtcaattggagaaaacccgtttgtgggaggatggattctaactttatgctttctaattgttggaatatttgccatgagcctttccagtataccttgggtttacacgaatgaaatgttgccctcacgagtgaaagttaagggatttgccatttgcgtaacgtttggatggttgggcaattttattttaacgtttctatgccctgtgatgattgaaagattaaaaggcacaacatttataatatttggatctttgacattcttgatatcactttcagttttgatttggttcccagaaacaaagggtatgagcatagaagatattgataaattcttcgaatttgagagtaaagagggcaccaatttacatggggaaaagggtatcaaaacgccggactcaaattctaatggcggttctacaagatcctcccaagaagggcaattgcataaacctataaaactgaaaagcgatgaagagatgatcatatga

SEQ ID NO: 3454 - DNA, 1623 bp, Artificial Sequence
  Description of Artificial Sequence: Synthetic polynucleotide
atgacagcaatgaaagctattgtctggagacttcccaagatgccgaaaatcaaaattacaaaaacttatgaagttacgaaaattacggcgatattgacattggtaggatttataatgggccttgaggtgccgtctttggcaacttttctcacaaacaaaacgtttaatgagtacttcaagtatccaactcctttacaacaaggtttactcatggggtccacccccttaggtggtatcatgggatgttttatttgctgcataatgaatgatagattcagtagaatatatcaatttcaaagtggaataataatatggaatattgttacgttattgaacttttgtatttgggatatattaggtttattgatttgcagaatgatcaagggtatgatccttgggaacttttctattttagtagcatcctacgcaaatgaagttatcccccgcggcaagcgtggaagtacgatgagctatattcaattgtgtttaaccattggaattcttgttatgcattatttgtgcattgcattaagtttatgggattctcattttgcgttccgtatagcgtggtgcataggaatcattcctggattattattctggatggctagctacgctttacctgaatcttatcactggttggtattacatgggaagatgagtgaagctcaggaaattcagcacaatttagccaaaaagtttaatgaaagccagccaagggatgcagtccctgagatgagtaagatcgaattagcaggagatttttggattggagttaatgatttggacttctccaaaaaattacctcgtggttcttttaagcctttgattcttggaatgactttacagttattggttcaatttagcggtataaacattatccttggttatattacatacatttgcgagattgtagggcttgaaggcaatgtaaaattattcaccagttccattccatatttcatcaacatggttttgagcttgttaccgattacattcattgattacactagcagaaagttgattaccttgttgggtggctttcccattagtgggttgctcattacaatcggcgcattatttgtgaagtatggtcaagacaccaagcccatcgacggcaataggagtttagtttggtctattggagaaaacccgtttgtgggaggatggattttgactttatgctttttgattgttggaatatttgccatgagcctttccagtataccttgggtttacacgaatgaaatgttgccctctcgtgtgaaagttaagggatttgccatttgcgtaacgtttggatggttgggcaattttattttaacgtttttatgccctgtgatgattgaaagattaaaaggcacaacatttataatatttggatctttgacattcttgatatctctttctgttttgatttggttcccagaaacaaagggtatgagcatagaagatattgataaattcttcgaatttgagagtaaagagggcaccaatttacatggggaaaagggtatcaaaacgccggactctaattctaatggcggttctacaagatcctcccaagaagggcaattgcataaacctataaaattgaaaagcgatgaagagatgatcatatga

SEQ ID NO: 3455 - DNA, 1128 bp, Saccharomyces cerevisiae
atggattctgaggttgctgctttggttattgataacggttctggtatgtgtaaagccggttttgccggtgacgacgctcctcgtgctgtcttcccatctatcgtcggtagaccaagacaccaaggtatcatggtcggtatgggtcaaaaagactcctacgttggtgatgaagctcaatccaagagaggtatcttgactttacgttacccaattgaacacggtattgtcaccaactgggacgatatggaaaagatctggcatcataccttctacaacgaattgagagttgccccagaagaacaccctgttcttttgactgaagctccaatgaaccctaaatcaaacagagaaaagatgactcaaattatgtttgaaactttcaacgttccagccttctacgtttccatccaagccgttttgtccttgtactcttccggtagaactactggtattgttttggattccggtgatggtgttactcacgtcgttccaatttacgctggtttctctctacctcacgccattttgagaatcgatttggccggtagagatttgactgactacttgatgaagatcttgagtgaacgtggttactctttctccaccactgctgaaagagaaattgtccgtgacatcaaggaaaaactatgttacgtcgccttggacttcgaacaagaaatgcaaaccgctgctcaatcttcttcaattgaaaaatcctacgaacttccagatggtcaagtcatcactattggtaacgaaagattcagagccccagaagctttgttccatccttctgttttgggtttggaatctgccggtattgaccaaactacttacaactccatcatgaagtgtgatgtcgatgtccgtaaggaattatacggtaacatcgttatgtccggtggtaccaccatgttcccaggtattgccgaaagaatgcaaaaggaaatcaccgctttggctccatcttccatgaaggtcaagatcattgctcctccagaaagaaagtactccgtctggattggtggttctatcttggcttctttgactaccttccaacaaatgtggatctcaaaacaagaatacgacgaaagtggtccatctatcgttcaccacaagtgtttctaa

SEQ ID NO: 3456 - DNA, 1128 bp, Artificial Sequence
  Description of Artificial Sequence: Synthetic polynucleotide
atggattctgaggttgctgctttggttattgataacggttctggtatgtgtaaagccggttttgccggtgacgacgctcctcgtgctgtcttcccatctatcgtcggtagaccaagacaccaaggtatcatggtcggtatgggtcaaaaagactcctacgttggtgatgaagctcaatccaagagaggtatcttgactttacgttacccaattgaacacggtattgtcaccaactgggacgatatggaaaagatctggcatcataccttctacaacgaattgagagttgccccagaagaacaccctgttcttttgactgaagctccaatgaaccctaaaagtaacagagaaaagatgactcaaattatgtttgaaactttcaacgttccagccttctacgtttccatccaagccgttttgtccttgtactcttccggtagaactactggtattgttttggattccggtgatggtgttactcacgtcgttccaatttacgctggtttctctttgcctcacgccattttgagaatcgatttggccggtagagatttgactgactacttgatgaagatcttgagtgaacgtggttactctttctccaccactgctgaaagagaaattgtccgtgacatcaaggaaaaattatgttacgtcgccttggacttcgaacaagaaatgcaaaccgctgctcaatcttcttccattgaaaaatcctacgaacttccagatggtcaagtcatcactattggtaacgaaagattcagagccccagaagctttgttccatccttctgttttgggtttggaatctgccggtattgaccaaactacttacaactccatcatgaagtgtgatgtcgatgtccgtaaggaattatacggtaacatcgttatgtccggtggtaccaccatgttcccaggtattgccgaaagaatgcaaaaggaaatcaccgctttggctccatcttccatgaaggtcaagatcattgctcctccagaaagaaagtactccgtctggattggtggttctatcttggcttctttgactaccttccaacaaatgtggatctccaaacaagaatacgacgaaagtggtccatctatcgttcaccacaagtgtttctga

SEQ ID NO: 3457 - DNA, 621 bp, Saccharomyces cerevisiae
atgaatagcgagtacgattacctgttcaaactgctgttgatcgggaattccggtgtcgggaagtcctgtttacttttgaggttttcggacgacacatataccaacgactacatctccacaattggagtggacttcaagattaagactgtagaactggacggcaagactgtaaagctacagatttgggacactgcaggtcaagaacgtttccgtactatcacttcatcttactaccgtggttcgcatgggatcattatcgtgtatgatgtcactgaccaagaatccttcaacggcgtgaagatgtggctgcaagagattgatcggtatgcaacctcaacagtgttgaagctattggtaggtaacaagtgtgatttaaaggacaagcgtgtcgtggaatatgacgtggcaaaggaatttgcggacgcgaataagatgccgttcttagagactagtgctttggactccaccaacgtcgaggatgcgtttttaaccatggctagacaaatcaaggaaagtatgtcccaacaaaacctgaacgaaaccactcagaagaaggaagacaaagggaacgtcaacctgaagggacagagtttaaccaacaccggtgggggctgctgttga

SEQ ID NO: 3458 - DNA, 621 bp, Artificial Sequence
  Description of Artificial Sequence: Synthetic polynucleotide
atgaatagcgagtacgattaccttttcaaattattattgatcgggaattccggtgtcgggaagtcctgtttacttttgaggttttctgacgacacatataccaacgactacatctccacaattggagtggacttcaagattaagactgtagaattagacggcaagactgtaaagttacagatttgggacactgcaggtcaagaacgtttccgtactatcacttcttcttactaccgtggttctcatgggatcattatcgtgtatgatgtcactgaccaagaatccttcaacggcgtgaagatgtggttacaagagattgatagatatgcaacctctacagtgttgaagttgttggtaggtaacaagtgtgatttaaaggacaagcgtgtcgtggaatatgacgtggcaaaggaatttgcggacgcgaataagatgccgttcttagagactagtgctttggactccaccaacgtcgaggatgcgtttttaaccatggctagacaaatcaaggaaagtatgtcccaacaaaacttgaacgaaaccactcagaagaaggaagacaaagggaacgtcaacttgaagggacagagtttaaccaacaccggtgggggctgctgttga

SEQ ID NO: 3459 - DNA, 1374 bp, Saccharomyces cerevisiae
atgagagaaatcattcatatctcgacaggtcagtgtggtaaccaaattggtgctgcattctgggaaactatctgtggtgagcacggtttggatttcaatgggacatatcacggccatgacgatatccagaaggagagactgaacgtgtacttcaacgaggcatcttctgggaagtgggttccaagatctattaacgtcgatctagaacctgggacgattgacgcagtacgcaattctgccatcgggaatttgtttagacctgacaattatatctttgggcaaagttctgcgggcaacgtgtgggccaagggtcactacacagaaggtgctgagcttgtagacagcgtcatggatgttattagacgagaggccgaaggatgcgactcccttcaaggtttccagatcacacattctcttggtggtggtaccggttccggtatgggtacgcttttgatctcgaagattagggaagagtttcctgatcgtatgatggccaccttctccgtcttgccctctccgaagacttctgacaccgttgtcgaaccatacaatgccacgttgtctgtgcaccaattggtagaacactctgatgaaacattctgtatcgataacgaagcactttatgacatctgtcaaaggaccttaaagttgaatcaaccttcttatggagatttgaacaacttggtctcgagcgtcatgtctggtgtgacaacttcattgcgttatcccggccaattgaactctgatttgagaaagttggctgttaatcttgtcccattcccacgtttacatttcttcatggtcggctacgctccattgacggcaattggctctcaatcatttagatctttgactgtccctgaattaacacagcaaatgtttgatgccaagaacatgatggctgctgccgatccaagaaacggtagataccttaccgttgcagccttctttagaggtaaagtttccgttaaggaggtggaagatgaaatgcataaagtgcaatctaaaaactcagactatttcgtggaatggatccccaacaatgtgcaaactgctgtgtgttctgtcgctcctcaaggtttggacatggctgctactttcattgctaactccacatctattcaagagctattcaagagagttggtgaccaattttccgctatgttcaaaagaaaagctttcttgcactggtatactagtgaaggtatggacgaattggaattctctgaggctgaatctaatatgaatgatctggttagcgaataccaacaataccaagaggctactgtagaagatgatgaagaagtcgacgaaaatggcgattttggtgctccacaaaaccaagatgaaccaatcactgagaattttgaataa

SEQ ID NO: 3460 - DNA, 1374 bp, Artificial Sequence
  Description of Artificial Sequence: Synthetic polynucleotide
atgagagaaatcattcatatcagtacaggtcagtgtggtaaccaaattggtgctgcattctgggaaactatctgtggtgagcacggtttggatttcaatgggacatatcacggccatgacgatatccagaaggagagattgaacgtgtacttcaacgaggcatcttctgggaagtgggttccaagatctattaacgtcgatttggaacctgggacgattgacgcagtacgcaattctgccatcgggaatttgtttagacctgacaattatatctttgggcaaagttctgcgggcaacgtgtgggccaagggtcactacacagaaggtgctgagcttgtagacagcgtcatggatgttattagaagagaggccgaaggatgcgactcccttcaaggtttccagatcacacattctcttggtggtggtaccggttccggtatgggtacgcttttgatctccaagattagggaagagtttcctgatcgtatgatggccaccttctccgtcttgccctctccgaagacttctgacaccgttgtcgaaccatacaatgccacgttgtctgtgcaccaattggtagaacactctgatgaaacattctgtatcgataacgaagcactttatgacatctgtcaaaggaccttaaagttgaatcaaccttcttatggagatttgaacaacttggtctccagcgtcatgtctggtgtgacaacttctttgcgttatcccggccaattgaactctgatttgagaaagttggctgttaatcttgtcccattcccacgtttacatttcttcatggtcggctacgctccattgacggcaattggctctcaaagttttagatctttgactgtccctgaattaacacagcaaatgtttgatgccaagaacatgatggctgctgccgatccaagaaacggtagataccttaccgttgcagccttctttagaggtaaagtttccgttaaggaggtggaagatgaaatgcataaagtgcaatctaaaaacagcgactatttcgtggaatggatccccaacaatgtgcaaactgctgtgtgttctgtcgctcctcaaggtttggacatggctgctactttcattgctaactccacatctattcaagagcttttcaagagagttggtgaccaattttccgctatgttcaaaagaaaagctttcttgcactggtatactagtgaaggtatggacgaattggaattctctgaggctgaatctaatatgaatgatttggttagcgaataccaacaataccaagaggctactgtagaagatgatgaagaagtcgacgaaaatggcgattttggtgctccacaaaaccaagatgaaccaatcactgagaattttgaatga

SEQ ID NO: 3461 - DNA, 4056 bp, Saccharomyces cerevisiae
atgctgagaccggcctataaatcgctcgtgaaaacatccctgttacaaagacggttaatatcttcaaagggatctaagctgtttaaaccatctccggactcaacaagtacaatattaatatctgaagacccccttgtaacaggctcgtccccaacctcatctacaacatcaggtataataagttcaaatgatttccctttgttcaacaaaaataggaaagacgccaagagcagcatatcctaccaatggaaaaatccttcagaattagagtttgaccctttcaataaatcgcatgcctcagcagtaacctcgatgacaagaactagagacgttatgcaattatggtctctgttagaagcatgcttgcaatcgaatctaatgaaaagagcgttctctatattggagtcactgtacctggtacctgaacataagcagcgatttatcgaggattataacatgtacttgaattcattttccaaaaatgaccctaatttccctattttaaaaatgaacgaaaaattaacaaatgatttggagacaagttttaaagacgttaattataatgacaaaactttggcaataatgattcatcacgctttgaacttccattcaacgacaagctcgatgcttttgaagcctataatctctgcctacttgaaaatgagcgtgaatggtattagggaaattttctcctgcctagatattttgaccatttcagatctgaatattttaatgaatgacttaaaggttataacaccatcgcaactgccaaattctgtaagaccaatattagaatcacttacgctatctcctacacctgtaaataatattgaaaatgaggagggtttgaacaaagtggaagctgagaacgattcaaaattgcataaagcatcaaatgcaagctctgattctataaaaaaaccttccttggatcctcttcgggaagtttcattccacggttcaacagaagtcttgtcaaaagacgctgaaaagcttatagctgtagacactattggaatgagagtaatccggcatactttgctgggattatcattaacgccggaacagaaagagcaaatttctaaattcaaatttgatgccaatgataatgttttgaaaatgaaacctacgaaaaacgacgataataataattctataaatttttttgaaatttacaattcactgccaacattagaggaaaagaaggcattcgaaagcgcattaaatatatttaaccaagatagacaaaaggtacttgaaaaccgtgcaacggaagccgcaagagagcgttggaagcacgattttgaagaggcaaaagctagaggtgacatttcaattgaaaagaatttaaacgttaagttgtggaaatggtataatgaaatgttacctctagtgaaggaagaaattaatcattgtaggtcattattgtcagaaaagctatcagataagaaaggcttgaataaagttgacacgaaccgtcttggatatggaccatacttaaccttgattgaccctggtaaaatgtgtgtcatcaccattttggaactattaaagttaaattctacgggtggtgttattgaaggtatgaggaccgcaagagcggttatatcagtgggtaaagctattgaaatggaatttagatccgagcaggttttgaaaagcgaatctcaagcgttcagagatgttaacaagaaatcaccagaattcaaaaaactggtacaaaatgctaaatctgtattcagatcatctcaaattgagcagtcgaaaattttgtggcctcagagtattagggccagaatcggttcggtattaatctcaatgttgattcaagtcgctaaggtatctgtgcaaggtgttgaccctgtgacaaaagctaaggttcacggtgaagctccagcttttgcgcatggttatcagtaccacaatggttccaaattgggtgtcttgaagattcacaagactttgattcgtcaattgaacggtgaaagattgattgcctctgtccaaccacaattattaccaatgttggtggaacccaaaccctgggttaattggagatcaggtggatatcattatacacaatctacccttttaagaacaaaagactcacccgaacaagtagcatatttgaaagctgcttccgataatggtgatatagaccgcgtttatgatggtttgaatgttctgggtagaacaccgtggactgtcaacagaaaagtttttgatgtggtttcacaagtttggaataaaggtgaaggtttcctagatattccaggtgcacaagacgaaatggttttaccaccagctcctccgaagaactccgacccttccattttgagagcctggaaacttcaagtcaaaacaattgctaataaattctcttcagatagatcaaatagatgtgatacgaactacaaattggaaattgcaagagcatttttgggtgaaaagctgtactttccacataatttggactttaggggacgtgcttatcctttgtctccacatttcaatcatcttggtaatgatatgagtcgtggccttttgattttttggcacggtaaaaaattaggaccttctggtctcaagtggttaaagattcatttgtcaaatctgttcggatttgataagttacccctaaaggatcgtgttgcatttactgagtctcatttgcaggacatcaaggattctgcggaaaatcccttaacgggagatcgttggtggactactgctgataagccatggcaagcattggccacatgctttgaattgaatgaagttatgaaaatggataatccagaggagtttatctctcatcaaccggttcaccaagacggtacttgcaatggtttgcaacattatgctgccttgggtggtgacgttgaaggggctactcaagtgaatctggttccaagcgataaaccacaagatgtttatgctcatgttgcaaggttggtgcaaaaaagattagaaattgcagcagaaaaaggagacgaaaacgccaaaattttgaaggataagattaccagaaaggttgtcaagcaaaccgtcatgacaaacgtttatggtgttacctacgtcggggctacttttcaaattgctaaacaattaagcccaatatttgatgatcgtaaagaaagcttagacttttctaaatacctaaccaaacatgtttttagtgctatccgcgagttatttcatagtgcgcatttaattcaggattggttaggtgaaagtgcgaaaagaatttccaaatctatcaggttggatgttgatgaaaaatcgttcaagaacggtaataaacccgactttatgtcatccgtcatatggacgacaccactaggactaccaattgttcagccatatcgtgaagaaagcaaaaagcaagttgagaccaatttgcaaactgtctttattagcgatcctttcgctgtcaaccctgttaatgcaagaaggcaaaaggcaggtcttccaccgaacttcatccattcgctggatgcttcacatatgttgctaagtgcagcagaatgtggaaagcaaggattagatttcgcatcagttcatgattcttactggacgcatgcatctgatatagacactatgaatgtggtgttaagggaacagtttatcaaactccatgaggtagatctggttttaagattgaaggaggagtttgaccaaaggtataagaattacgtcaagattggaaagttgaagagatctacggatttggctcaaaagattattagaatccgtaaagatttatccagaaaattaggaagaagtactacattagcagatgaaatttattttgagaaaaaaaggcaagaattattaaacagccctctaatagaagatagaaatgttggtgaaaagatggttacaactgtatcattatttgaagacatcactgacttggacgcacttgaactagaaaacggtggagatgaaaatagcggtatgagtgttcttttaccgttgagattacctgaaatcccacctaaaggtgattttgatgttacagtattgagaaacagtcaatattttttctcgtga

SEQ ID NO: 3462 - DNA, 4056 bp, Artificial Sequence
  Description of Artificial Sequence: Synthetic polynucleotide
atgttgagaccggcctataaatctctcgtgaaaacatccttattacaaagaagattaatatcttccaagggatctaagttatttaaaccatctccggactctacaagtacaatattaatatctgaagacccccttgtaacaggcagctccccaacctcttctacaacatctggtataataagtagtaatgatttccctttgttcaacaaaaataggaaagacgccaagagcagcatatcctaccaatggaaaaatccttctgaattagagtttgaccctttcaataaatctcatgcctctgcagtaacctccatgacaagaactagagacgttatgcaattatggtctttattagaagcatgcttgcaaagcaatttaatgaaaagagcgttctctatattggagtctttgtacttggtacctgaacataagcagagatttatcgaggattataacatgtacttgaattctttttccaaaaatgaccctaatttccctattttaaaaatgaacgaaaaattaacaaatgatttggagacaagttttaaagacgttaattataatgacaaaactttggcaataatgattcatcacgctttgaacttccattctacgacaagcagtatgcttttgaagcctataatctctgcctacttgaaaatgagcgtgaatggtattagggaaattttctcctgcttagatattttgaccatttctgatttgaatattttaatgaatgacttaaaggttataacaccatctcaattaccaaattctgtaagaccaatattagaatctcttacgttgtctcctacacctgtaaataatattgaaaatgaggagggtttgaacaaagtggaagctgagaacgattctaaattgcataaagcatctaatgcaagctctgattctataaaaaaaccttccttggatcctcttagagaagtttctttccacggttctacagaagtcttgagtaaagacgctgaaaagcttatagctgtagacactattggaatgagagtaatcaggcatactttgttgggattatctttaacgccggaacagaaagagcaaatttctaaattcaaatttgatgccaatgataatgttttgaaaatgaaacctacgaaaaacgacgataataataattctataaatttttttgaaatttacaattctttaccaacattagaggaaaagaaggcattcgaaagcgcattaaatatatttaaccaagatagacaaaaggtacttgaaaaccgtgcaacggaagccgcaagagagcgttggaagcacgattttgaagaggcaaaagctagaggtgacatttccattgaaaagaatttaaacgttaagttgtggaaatggtataatgaaatgttacctttagtgaaggaagaaattaatcattgtaggtctttattgagtgaaaagttaagtgataagaaaggcttgaataaagttgacacgaaccgtcttggatatggaccatacttaaccttgattgaccctggtaaaatgtgtgtcatcaccattttggaattattaaagttaaattctacgggtggtgttattgaaggtatgaggaccgcaagagcggttatatctgtgggtaaagctattgaaatggaatttagatccgagcaggttttgaaaagcgaatctcaagcgttcagagatgttaacaagaaatctccagaattcaaaaaattagtacaaaatgctaaatctgtattcagatcttctcaaattgagcagtccaaaattttgtggcctcagagtattagggccagaatcggttctgtattaatctctatgttgattcaagtcgctaaggtatctgtgcaaggtgttgaccctgtgacaaaagctaaggttcacggtgaagctccagcttttgcgcatggttatcagtaccacaatggttccaaattgggtgtcttgaagattcacaagactttgattcgtcaattgaacggtgaaagattgattgcctctgtccaaccacaattattaccaatgttggtggaacccaaaccctgggttaattggagatctggtggatatcattatacacaatctacccttttaagaacaaaagactctcccgaacaagtagcatatttgaaagctgcttccgataatggtgatatagaccgcgtttatgatggtttgaatgttttaggtagaacaccgtggactgtcaacagaaaagtttttgatgtggtttctcaagtttggaataaaggtgaaggtttcttggatattccaggtgcacaagacgaaatggttttaccaccagctcctccgaagaactccgacccttccattttgagagcctggaaacttcaagtcaaaacaattgctaataaattctcttctgatagatctaatagatgtgatacgaactacaaattggaaattgcaagagcatttttgggtgaaaagttgtactttccacataatttggactttaggggacgtgcttatcctttgtctccacatttcaatcatcttggtaatgatatgagtcgtggccttttgattttttggcacggtaaaaaattaggaccttctggtctcaagtggttaaagattcatttgagcaatttattcggatttgataagttacccttgaaggatcgtgttgcatttactgagtctcatttgcaggacatcaaggattctgcggaaaatcccttaacgggagatcgttggtggactactgctgataagccatggcaagcattggccacatgctttgaattgaatgaagttatgaaaatggataatccagaggagtttatctctcatcaaccggttcaccaagacggtacttgcaatggtttgcaacattatgctgccttgggtggtgacgttgaaggggctactcaagtgaatttggttccaagcgataaaccacaagatgtttatgctcatgttgcaaggttggtgcaaaaaagattagaaattgcagcagaaaaaggagacgaaaacgccaaaattttgaaggataagattaccagaaaggttgtcaagcaaaccgtcatgacaaacgtttatggtgttacctacgtcggggctacttttcaaattgctaaacaattaagcccaatatttgatgatcgtaaagaaagcttagacttttctaaatacttgaccaaacatgtttttagtgctatccgcgagttatttcatagtgcgcatttaattcaggattggttaggtgaaagtgcgaaaagaatttccaaatctatcaggttggatgttgatgaaaaatctttcaagaacggtaataaacccgactttatgtcttccgtcatatggacgacaccattaggattaccaattgttcagccatatcgtgaagaaagcaaaaagcaagttgagaccaatttgcaaactgtctttattagcgatcctttcgctgtcaaccctgttaatgcaagaaggcaaaaggcaggtcttccaccgaacttcatccattctttagatgcttctcatatgttgttaagtgcagcagaatgtggaaagcaaggattagatttcgcatctgttcatgattcttactggacgcatgcatctgatatagacactatgaatgtggtgttaagggaacagtttatcaaactccatgaggtagatttggttttaagattgaaggaggagtttgaccaaaggtataagaattacgtcaagattggaaagttgaagagatctacggatttggctcaaaagattattagaatccgtaaagatttatccagaaaattaggaagaagtactacattagcagatgaaatttattttgagaaaaaaaggcaagaattattaaacagccctttgatagaagatagaaatgttggtgaaaagatggttacaactgtatctttatttgaagacatcactgacttggacgcacttgaattggaaaacggtggagatgaaaatagcggtatgagtgttcttttaccgttgagattacctgaaatcccacctaaaggtgattttgatgttacagtattgagaaacagtcaatattttttctcctga

SEQ ID NO: 3463 - DNA, 864 bp, Saccharomyces cerevisiae
atgtccttcttcaacttcaaagcattcggaagaaactcaaagaaaaataaaaaccagccccttaatgttgctcagccgccagcaatgaacaccatttattcaagcccccacagcagcaattccagattatcgttaagaaataaacatcattcgcctaagaggcattctcaaacaagtttccccgcacaaaagtctacgccgcaatcacagcaattgacatctaccacaccacagtctcaacagcaagaagctagtgagagatcagaatcacaacagataatgtttctcagcgaaccgttcgtaagaactgctttagtgaaaggttcatttaaaacaatagtacaattgcccaaatatgtggacctgggagagtggatagcgttgaacgttttcgaattcttcacaaacttgaaccaattttacggagtagtagcggagtacgtaacgcctgacgcgtatccaacaatgaacgctggccctcacacggattatttatggctggacgcaaacaatagacaggtttcactgccagctagtcagtacatagatttggccctcacgtggataaataacaaagtgaacgataaaaacttgtttccgaccaaaaatgggctaccattcccgcagcaattttcgagagatgtgcagagaatcatggtacagatgttcaggatattcgcacatatttatcaccaccactttgacaaaattgtgcacttgtcattagaagctcattggaattcatttttctctcatttcattagttttgcaaaggagtttaagatcattgacagaaaggaaatggctccgctgctaccgttaattgaaagctttgaaaaacagggcaaaattatttataattag

SEQ ID NO: 3464 - DNA, 864 bp, Artificial Sequence
  Description of Artificial Sequence: Synthetic polynucleotide
atgtccttcttcaacttcaaagcattcggaagaaactccaagaaaaataaaaaccagccccttaatgttgctcagccgccagcaatgaacaccatttattctagcccccacagcagcaattccagattatctttaagaaataaacatcattctcctaagaggcattctcaaacaagtttccccgcacaaaagtctacgccgcaatctcagcaattgacatctaccacaccacagtctcaacagcaagaagctagtgagagaagtgaatctcaacagataatgtttctcagcgaaccgttcgtaagaactgctttagtgaaaggttcttttaaaacaatagtacaattgcccaaatatgtggacttgggagagtggatagcgttgaacgttttcgaattcttcacaaacttgaaccaattttacggagtagtagcggagtacgtaacgcctgacgcgtatccaacaatgaacgctggccctcacacggattatttatggttagacgcaaacaatagacaggtttctttaccagctagtcagtacatagatttggccctcacgtggataaataacaaagtgaacgataaaaacttgtttccgaccaaaaatgggttaccattcccgcagcaattttccagagatgtgcagagaatcatggtacagatgttcaggatattcgcacatatttatcaccaccactttgacaaaattgtgcacttgtctttagaagctcattggaattcttttttctctcatttcattagttttgcaaaggagtttaagatcattgacagaaaggaaatggctccgttgttaccgttaattgaaagctttgaaaaacagggcaaaattatttataattga

SEQ ID NO: 3465 - DNA, 369 bp, Saccharomyces cerevisiae
atggctccaaacacttccagaaagcaaaaagttatcaaaaccttaaccgttgacgtttcctctccaactgaaaacggagtcttcgatccggcttcatattccaagtacttaatcgatcatattaaagtagatggtgccgtaggaaacttagggaacgccattgaggttactgaagatggttctatagtcactgtagtatccagtgccaaattttctggtaaatacttgaaatatctaacaaagaagtatttgaagaagaatcagctaagagactggatcagattcgtctctataaggcaaaaccaatacaaattggttttctatcaagtcacccctgaagatgctgacgaagaagaggatgacgaataa

SEQ ID NO: 3466 - DNA, 369 bp, Artificial Sequence
  Description of Artificial Sequence: Synthetic polynucleotide
atggctccaaacacttccagaaagcaaaaagttatcaaaaccttaaccgttgacgtttcctctccaactgaaaacggagtcttcgatccggcttcttattccaagtacttaatcgatcatattaaagtagatggtgccgtaggaaacttagggaacgccattgaggttactgaagatggttctatagtcactgtagtatccagtgccaaattttctggtaaatacttgaaatatttgacaaagaagtatttgaagaagaatcagttaagagactggatcagattcgtctctataaggcaaaaccaatacaaattggttttctatcaagtcacccctgaagatgctgacgaagaagaggatgacgaatga

SEQ ID NO: 3467 - DNA, 3222 bp, Saccharomyces cerevisiae
atgtccgattcggaggaagatttaggtgtacagttgaaaggcttgaagatagcgaggcatttgaaggagtcaggggagcatactgatgaagaatccaactcaagccccgaacatgattgcggcttgagtaatcaagatgatttaactgttatgcatacacaggctaaagaagaagtttttaaacgaagagaagaagacggaacacgaaccgaagatgctttacatgagggagaagcaggaaaagagggcacaggttttccctcatcacagtcagtgtgcagtcctaatgaagcagatagcggtattgatcgggccgataaacctattttgctggacccttttaaatctgtgcacgatacggatcctgttccaggtacaaagtccaggagcaattcagactccgactctgattcagatgatggaggctggcaagagatgcccgctgtctcatcgttcaatatatataaccacagaggcgaactagagttgacttccaaggttagaaactcagaacaagcctctgagacgtctcccacagttcctccaggaaaaaattgcaaaagtgtcaatgattctagatttgactatacgaaaatggccgctgagcagcaagcccaacgatcctatcgaacaaataaaaaaacagatttcctttttgaccacaaagtactgaaaaagaaaattaacagttcgcaaacttccgtaaatttgacttcttccccttcgactacatccttgaacaatgaaaaaaataatgatgacgatgatgatgattcttatgacgaatatgaggacgacgtggaaccagtgaacgacttgaatcgggactcgcagttaaacataacgaaaaatctgctatctgatatggagaagtttgcctacgtaggtgcaataaacattttggcaaatcaaatgtgcacgaatttggctacgctgtgtctttgtattgacattaaatcccacaagaaactagcacatagattacagtttacccagaaggatatggctgcttggaaaactgtggttttatcacggctatatgatcatttggggatatctcaagaagaaattgttatgattgagaagctttctctgcacaaaatccaattggaagatttgtgtaaatgtttgaaaaccactcagagcattgataatccatgggagaatgatagagaccacgaagaagacggtatagaggaaactacggaacgaatgagtccaaatgaacaaaatggctcagtacaggctagtactcccgacccagaacaatccgcaacacctgaaacaccaaaggctaaacaatcaccgttatcttcggacgttccaggaaaagtactcgatccggaaaatgtcaaaagccaagacaaattaaatatagatgtggcgtggaccattatatgtgatcttttcctaatatgcttgcaatcctccacctatgattcgaggtcaaggactttgttgataaattttgccaaagtcttgaatatgactagcttggaaatttgtgaatttgaaagacgagtaacagattccttagacatggaacaatctacagaagatcaagtatgggatgaacaagatcacatgagaaatagacggagaagcaaaagaagaaagaaaatggcatatgtcgcacttgccatggtaggtggttctttggtccttggactaagtggtggtttactagcccccgtcattggcggggggattgctgctggtttgtcaacaataggtattactggtgctacaagtttcttgaccggagtgggtggtaccactgttgttgccgtttcaagtactgctattggtgccaacatcggtgctagaggtatgtcaaaaaggatgggaagtgtgagaacttttgagttcaggccactgcataataatagaagggttaatctaatcctaacagtgtcaggctggatggttggtaacgaagatgatgttagattgccattttctacggtggaccctgttgaaggtgacctgtactcgttatattgggagcccgaaatgctaaagtctattggtcaaacggtcagtattgtagctaccgaaatttttaccacctcgcttcaacaaattttgggtgccactgttttaacagccttgatcagttctatccaatggccgatggctttatcgaaattgggttatattttagataatccgtggaatgtttctttggacagagcttggtctgcaggcaaaattcttgctgacaccctaattgcaagaaatttaggtgcccgccccattacactggttggcttctcaataggtgcgagggtcattttttcttgtttaatcgaattgtgcaagaaaaaggctctaggtttgattgaaaacgtttatctattcggtacaccagctgtcatgaaaaaggagcaactagtcatggcaagatctgtagttagtgggaggtttgtaaatggttattcggataaagattggtttttagcatatttatttagagctgctgctggtggatttagtgctgttatgggtatttctacgatagaaaacgttgaaggtatcgagaatattaattgcactgaatttgttgatggtcatttgaattatcgtaaaagcatgcctaagttattaaaaagaattggtattgctgttttaagtgaggagtttgtcgagatagaggagatgatgaacccagaagaagtgaaaagaaaaaggaaattaataaatgatgtcgatgcagcccaaaaaaaactaagtgaaagaaaaaagcataacagttgggtgccgaagtggttgaaaccgaagaaatccaaatggaaggtcatggtcgaagaagctgtcgaagaaggaagagatatgcaagacctaccagaaaatgacgtcaataacaatgaaaacgaaaatccagatgaacatgaagggatagcaaggcaaaaacgcagagatgctgctcttgtcgatcatggggcattaatgcatgagttacaacttataaaacaagcgatgcacgaagacgaaataaagaataaagcatgccttccaggagaagacaaggaagtggaatcatcaaacgacttcttgggggagtcgcattacaaaccaccgtcaacaccaaaaattaatccaccacaaagccctaataacttccaattgttaagtgctgggagaactattcttccagaggatgatgatttcgaccctcgaggaaaaaaaaaggttgaattctctttcccagatgatatctag

SEQ ID NO: 3468 - DNA, 3222 bp, Artificial Sequence
  Description of Artificial Sequence: Synthetic polynucleotide
atgtccgattctgaggaagatttaggtgtacagttgaaaggcttgaagatagcgaggcatttgaaggagagtggggagcatactgatgaagaatccaactccagccccgaacatgattgcggcttgagtaatcaagatgatttaactgttatgcatacacaggctaaagaagaagtttttaaaagaagagaagaagacggaacaagaaccgaagatgctttacatgagggagaagcaggaaaagagggcacaggttttccctcttctcagtctgtgtgcagtcctaatgaagcagatagcggtattgatagagccgataaacctattttgttggacccttttaaatctgtgcacgatacggatcctgttccaggtacaaagtccaggagcaatagtgactccgactctgattctgatgatggaggctggcaagagatgcccgctgtctcttctttcaatatatataaccacagaggcgaattagagttgacttccaaggttagaaactctgaacaagcctctgagacgtctcccacagttcctccaggaaaaaattgcaaaagtgtcaatgattctagatttgactatacgaaaatggccgctgagcagcaagcccaaagatcctatagaacaaataaaaaaacagatttcctttttgaccacaaagtattgaaaaagaaaattaacagttctcaaacttccgtaaatttgacttcttccccttccactacatccttgaacaatgaaaaaaataatgatgacgatgatgatgattcttatgacgaatatgaggacgacgtggaaccagtgaacgacttgaatagagactctcagttaaacataacgaaaaatttattatctgatatggagaagtttgcctacgtaggtgcaataaacattttggcaaatcaaatgtgcacgaatttggctacgttgtgtctttgtattgacattaaatcccacaagaaattggcacatagattacagtttacccagaaggatatggctgcttggaaaactgtggttttatccagattatatgatcatttggggatatctcaagaagaaattgttatgattgagaagctttctttacacaaaatccaattggaagatttgtgtaaatgtttgaaaaccactcagagcattgataatccatgggagaatgatagagaccacgaagaagacggtatagaggaaactacggaaagaatgagtccaaatgaacaaaatggctctgtacaggctagtactcccgacccagaacaatccgcaacacctgaaacaccaaaggctaaacaatctccgttatcttctgacgttccaggaaaagtactcgatccggaaaatgtcaaaagccaagacaaattaaatatagatgtggcgtggaccattatatgtgatcttttcttgatatgcttgcaatcctccacctatgatagtaggagtaggactttgttgataaattttgccaaagtcttgaatatgactagcttggaaatttgtgaatttgaaagaagagtaacagattccttagacatggaacaatctacagaagatcaagtatgggatgaacaagatcacatgagaaatagaagaagaagcaaaagaagaaagaaaatggcatatgtcgcacttgccatggtaggtggttctttggtccttggattgagtggtggtttattagcccccgtcattggcggggggattgctgctggtttgagtacaataggtattactggtgctacaagtttcttgaccggagtgggtggtaccactgttgttgccgtttctagtactgctattggtgccaacatcggtgctagaggtatgtccaaaaggatgggaagtgtgagaacttttgagttcaggccattgcataataatagaagggttaatttgatcttaacagtgtctggctggatggttggtaacgaagatgatgttagattgccattttctacggtggaccctgttgaaggtgacttgtactctttatattgggagcccgaaatgttgaagtctattggtcaaacggtcagtattgtagctaccgaaatttttaccacctctcttcaacaaattttgggtgccactgttttaacagccttgatcagttctatccaatggccgatggctttatccaaattgggttatattttagataatccgtggaatgtttctttggacagagcttggtctgcaggcaaaattcttgctgacaccttgattgcaagaaatttaggtgcccgccccattacattagttggcttctctataggtgcgagggtcattttttcttgtttaatcgaattgtgcaagaaaaaggctttgggtttgattgaaaacgtttatcttttcggtacaccagctgtcatgaaaaaggagcaattggtcatggcaagatctgtagttagtgggaggtttgtaaatggttattctgataaagattggtttttagcatatttatttagagctgctgctggtggatttagtgctgttatgggtatttctacgatagaaaacgttgaaggtatcgagaatattaattgcactgaatttgttgatggtcatttgaattatcgtaaaagcatgcctaagttattaaaaagaattggtattgctgttttaagtgaggagtttgtcgagatagaggagatgatgaacccagaagaagtgaaaagaaaaaggaaattaataaatgatgtcgatgcagcccaaaaaaaattaagtgaaagaaaaaagcataacagttgggtgccgaagtggttgaaaccgaagaaatccaaatggaaggtcatggtcgaagaagctgtcgaagaaggaagagatatgcaagacttaccagaaaatgacgtcaataacaatgaaaacgaaaatccagatgaacatgaagggatagcaaggcaaaaacgcagagatgctgctcttgtcgatcatggggcattaatgcatgagttacaacttataaaacaagcgatgcacgaagacgaaataaagaataaagcatgccttccaggagaagacaaggaagtggaatcttccaacgacttcttgggggagtctcattacaaaccaccgtccacaccaaaaattaatccaccacaaagccctaataacttccaattgttaagtgctgggagaactattcttccagaggatgatgatttcgaccctagaggaaaaaaaaaggttgaattctctttcccagatgatatctga

SEQ ID NO: 3469 - DNA, 5313 bp, Saccharomyces cerevisiae
atgttcaatagaagtaacaccgcaggcggatctcaggctatgaaagagggacttggcataaacaagctctccccgatatcatcgaattcgaacccaagctcattgacttcctccaattatgaaaaatatctgcagctggccacagagaagaatccgtgtatgatcttggagctggaactggacggcaaggtgcgatatggctctccacagtggaacacgatcacaggagtcgccgatgatagtggctcttctccgacgtacattgcagaccttattctcggatccgatcaagataaaggtgtctttcaaaaggccacagacatgctgctcatgaatgatgacaccagttgcactataacgttcaagataaaggcagccgactatgaaggtagcgcaggctgtgacgatgaaagtacgataacgaccttggaagcacgtggtatcttaatcagggatggccacacacagttgccctctcacacgatgtggatagtcaagcctcgcacaaacgactggtcagacttttatgccaacgaagacgctcaagacgacatggtcatccagttatccgataattgcgacgatatcgatatccaacttcccgaagagttcgccaagacgcttgggttcggcgctaagatcttcgtgcagtacttgaagagaatacgactggaaatgataatagacgagttcaatctacctctgccaaaaatggaactatgccgggtctgtgagaactttgtccctgtttggtggttggagacccattcgcaaagttgcgtttgcgagcatagaacggaatcgctcatacaattactacacgataatcttcttgagcaacaggcgatcttggcaaacttcacgaaagattcagagtataagggcagtcagatacaggtacgttccaacaacttccttaaccaagttttagactccttaagagagctgtgtcaggacgccatagatatcaacccgagtgaaatggttcctgatctttaccacagtctttcaacatttcctcaagataatggtaataataacaataataataataataataataataataacaatgctttgttagatcaattccctatccaaaaagatacagttagcttgaattcatattttcagttttccccaaggactaaccacaacattcaaaacgtcacgtcgtggcaatcaagattttttctcaatgatgatcaggatcctggactagctcttttgattcacgatactctggacttggcaaggaaaaaagtggatgccgtgttgaggttggataacgcaatgacctattctttaaagattaaaaacgaggtcaacaactatgtggtacaactgatccgcgagcaaattgaaataaataagcatgcaatcctaactcacccaatgaatttaaggtcttcttccatatttcattccccactgccgcaaattcactctcaacaaccagaagccgagaatctcatatattcctcctctactcccctgcaagtccaacacgaccaatgtgcgtcctttgaagcaccctccaagtctcatctggagcctattcctttcccggtttcttccattgaagaaacaccaactgcaaatgatatcaggcatccttctcctttgccccgtagttgtagcaacaccgttatgaaactaccgacacctcgaaggaaacttgactcaaacggattattctctgatgcctatttaaacgctgacatcattccgaacccaagtatcgaatccacgatatctattgatagagataataacactaatagtaggggtagtagtatgaaacagtatggtattggtgaagccaccgactctcggactagtaactcggaaagaccttcttcctcttcgtcaaggctggggataagatcaagatccataacaccaagacaaaagatagaatactcacatgtagataatgatgaccgcaccaacgaaatgctgtctagagataaagattctcttcaacctcaaccttccgtagataccaccataacatcctctactcaggcgaccaccacgggtaccaagactaatagtaacaattccacaaactcagtattaccaaaactaatgacaagtatttccttgaccccaaggcgtggttcaccatcatttggtaatctcgcaagccattctatgcagcagacaaacagttttaaactgattcatgataaatcgccgatatcttcacctttcacattctccaaggattttttaaccccagagcagcacccttccaatattgccagaacagatagtatcaataatgcaatgttaacttcaccgaatatgccattatcaccccttttattggccacaaaccaaactgttaaatctccaacgcctagcataaaagattacgatatcttgaaaccaatcagcaaaggtgcttatggtagtgtttatctagcacggaaaaaactcacaggagattattttgctataaaggttctaaggaaatcagatatgattgccaaaaatcaagtaacaaatgtcaaatccgagagagcaatcatgatggttcaaagtgataagccctatgttgcgagactatttgctagtttccaaaataaagataaccttttcttagtgatggaatatttaccaggtggagatttggccactttaatcaagatgatggggtatctgcccgatcaatgggccaagcaatacctaaccgaaatcgttgtcggtgtgaatgatatgcatcaaaatgggatcattcatcatgacttaaagcctgaaaatctactaattgataatgcaggtcatgtgaaattaacagatttcggtttatcaagagctggtctgattcgccgtcacaagtttgtcccacataagtcgtcgctaagtatcagttccactttaccaatcgataacccagcaaataattttaccatgaacaacaacaatagtaatcattctcaattatcaaccccagatagcttcacatcagatcataagcagtataatagaagcaagaagtcatcactaggtcagcaatacgaacactcagaatactcaagtacttccaattcccactcaatgacgccaacgcccagtacgaacactgttgtttatccttcatattaccgtgggaaggacagatcacacggaagttcgaacatcgatctcccagcgtcccttagaagaagtgaatctcaattatcattttccctccttgatatttctcgttctagtactcctcctttagcaaatcccacaaattcgaacgctaataatattatgagaaggaaatcactcactgagaataaatccttttctaatgacctattatcttcagatgctatcgcagctaccaatacgaatattaactcgaataataacatttccctttcgccagcaccttcggatttagctttgttttatcctgatgatagcaagcaaaataagaaattttttgggactcccgattatctcgctccagaaactattgaaggaaagggtgaagataacaagcaatgcgactggtggtcagttggttgtatatttttcgaattacttttagggtatcctccattccatgcagaaacaccagatgctgtttttaagaaaattctatcaggagtcattcaatggccagagtttaaaaatgaagaagaagagcgagaattcctaacaccagaggcaaaagatttgatagaaaaattgttggttgtggatcctgcgaaaagactgggtgcgaaaggaattcaagaaattaaagatcacccttatttcaagaatgtggattgggatcatgtttacgatgaggaagcttcttttgtccctacaatagacaatccagaagatactgattattttgacctaaggggtgcagagctccaagattttggagacgatatcgaaaacgataatgccaatattttgtttggtaaacatggcattaacaccgatgtttctgaattatctgcagctaatctctctccaccattgaatcataaaaatattttatcccgtaaactatcgatgagtaacaccactaataggagctcaaataattccaacagtagcgtgcatgactttggtgcacatacaccggttaataaattaagtattgcttctgtattagagtcagtacctcaagaaacaggatatattacacctaacgggaccggtacaactactacaagtgccaaaaactcacccaatctgaagaatttgtcactggctatacctccacatatgagggatcgcagatcaagtaaattgaatgattcacaaacggaatttggttcttttaatttcaggaatttatcggctcttgataaagctaataaagatgctataaatagactgaaaagtgaacatttttctgaacaacctggggttcacagaagaacctcttctgcgtcactaatggggtcatcctcagacggatcagtgtcaactccagggagtaacgcttcaaacactacatctggtggcaagttgaaaatacataagcctaccatatccggttctccttcaacatttggcacatttcccaaaacatttttgaggtctgattcattctccacaagatcatattctcctgaacgaagtattagtatcgactcgtcaacattatcaaggaagggtagtataatcggggataaccaacaaacaacagcaaatagctcggattcacctacgatgactaaattcaagtcgccactatcacctgctaataccaccaccgtgagctcatatttttcaagacagagggttctatcaaagagtttttcgcaacggaccaattccagtgatctctcggcagaggaaagcgaccgactacaggctatatcaagagttaactctttaagaaacaggaggcgtagtggccgaaagagctcgagcacttctgagattggataccacatggatgttcttgtttgtgagcctataccgattcatagatatcgggttactaaagacttagaaaatttgggctgtaccgtcgtcagtgttggtgccggtgatgaactagttagtagagccactagtggtgtaagttttgacttaattatgacagccttgaagcttccaaaacttggtgctattgacattgttcaactactaaagcaaacaaatggtgctaattcgacaacaccaattgtggccataacaaattattttcaggaggcggcaaccagtagagtctttgacgatgttttagaaaaaccggtaaaacttgacgagctaaaaaaattggtggctaagtacgcactgaaaaagtctcaagaagatgaagagcatactatattgagcgattctgatgaaacgcactga

SEQ ID NO: 3470 - DNA, 5313 bp, Artificial Sequence
  Description of Artificial Sequence: Synthetic polynucleotide
atgttcaatagaagtaacaccgcaggcggatctcaggctatgaaagagggacttggcataaacaagctctccccgatatcttccaatagcaacccaagctctttgacttcctccaattatgaaaaatatttacagttggccacagagaagaatccgtgtatgatcttggagttagaattagacggcaaggtgaggtatggctctccacagtggaacacgatcacaggagtcgccgatgatagtggctcttctccgacgtacattgcagaccttattctcggatccgatcaagataaaggtgtctttcaaaaggccacagacatgttgctcatgaatgatgacaccagttgcactataacgttcaagataaaggcagccgactatgaaggtagcgcaggctgtgacgatgaaagtacgataacgaccttggaagcacgtggtatcttaatcagggatggccacacacagttgccctctcacacgatgtggatagtcaagcctcgcacaaacgactggtctgacttttatgccaacgaagacgctcaagacgacatggtcatccagttatccgataattgcgacgatatcgatatccaacttcccgaagagttcgccaagacgcttgggttcggcgctaagatcttcgtgcagtacttgaagagaataaggttagaaatgataatagacgagttcaatttacctttaccaaaaatggaattgtgcagggtctgtgagaactttgtccctgtttggtggttggagacccattctcaaagttgcgtttgcgagcatagaacggaatctctcatacaattattacacgataatcttcttgagcaacaggcgatcttggcaaacttcacgaaagattctgagtataagggcagtcagatacaggtacgttccaacaacttccttaaccaagttttagactccttaagagagctctgtcaggacgccatagatatcaacccgagtgaaatggttcctgatctttaccacagtctttctacatttcctcaagataatggtaataataacaataataataataataataataataataacaatgctttgttagatcaattccctatccaaaaagatacagttagcttgaattcttattttcagttttccccaaggactaaccacaacattcaaaacgtcacgagctggcaatctagattttttctcaatgatgatcaggatcctggattggctcttttgattcacgatactttggacttggcaaggaaaaaagtggatgccgtgttgaggttggataacgcaatgacctattctttaaagattaaaaacgaggtcaacaactatgtggtacaattgatccgcgagcaaattgaaataaataagcatgcaatcttgactcacccaatgaatttaaggtcttcttccatatttcattccccattaccgcaaattcactctcaacaaccagaagccgagaatctcatatattcctcctctactcccttgcaagtccaacacgaccaatgtgcgtcctttgaagcaccctccaagtctcatttagagcctattcctttcccggtttcttccattgaagaaacaccaactgcaaatgatatcaggcatccttctcctttgccccgtagttgtagcaacaccgttatgaaattaccgacacctagaaggaaacttgactccaacggattattctctgatgcctatttaaacgctgacatcattccgaacccaagtatcgaatccacgatatctattgatagagataataacactaatagtaggggtagtagtatgaaacagtatggtattggtgaagccaccgactctagaactagtaactctgaaagaccttcttcctcttcttccaggttggggataagatctagatccataacaccaagacaaaagatagaatactctcatgtagataatgatgaccgcaccaacgaaatgctttctagagataaagattctcttcaacctcaaccttccgtagataccaccataacatcctctactcaggcgaccaccacgggtaccaagactaatagtaacaattccacaaactctgtattaccaaaattaatgacaagtatttccttgaccccaaggcgtggttctccatcttttggtaatctcgcaagccattctatgcagcagacaaacagttttaaattgattcatgataaatctccgatatcttctcctttcacattctccaaggattttttaaccccagagcagcacccttccaatattgccagaacagatagtatcaataatgcaatgttaacttctccgaatatgccattatctccccttttattggccacaaaccaaactgttaaatctccaacgcctagcataaaagattacgatatcttgaaaccaatcagcaaaggtgcttatggtagtgtttatttggcaagaaaaaaactcacaggagattattttgctataaaggttttgaggaaatctgatatgattgccaaaaatcaagtaacaaatgtcaaatccgagagagcaatcatgatggttcaaagtgataagccctatgttgcgagattatttgctagtttccaaaataaagataaccttttcttagtgatggaatatttaccaggtggagatttggccactttaatcaagatgatggggtatttacccgatcaatgggccaagcaatacttgaccgaaatcgttgtcggtgtgaatgatatgcatcaaaatgggatcattcatcatgacttaaagcctgaaaatttattgattgataatgcaggtcatgtgaaattaacagatttcggtttatctagagctggtttgattcgccgtcacaagtttgtcccacataagtcttctttgagtatcagttccactttaccaatcgataacccagcaaataattttaccatgaacaacaacaatagtaatcattctcaattatctaccccagatagcttcacatctgatcataagcagtataatagaagcaagaagagttctttgggtcagcaatacgaacacagtgaatactctagtacttccaattcccactccatgacgccaacgcccagtacgaacactgttgtttatccttcttattaccgtgggaaggacagaagtcacggaagtagtaacatcgatctcccagcgtcccttagaagaagtgaatctcaattatctttttccctccttgatatttctcgttctagtactcctcctttagcaaatcccacaaatagcaacgctaataatattatgagaaggaaatctctcactgagaataaatccttttctaatgacttattatcttctgatgctatcgcagctaccaatacgaatattaacagtaataataacatttccctttctccagcaccttctgatttagctttgttttatcctgatgatagcaagcaaaataagaaattttttgggactcccgattatctcgctccagaaactattgaaggaaagggtgaagataacaagcaatgcgactggtggtctgttggttgtatatttttcgaattacttttagggtatcctccattccatgcagaaacaccagatgctgtttttaagaaaattttatctggagtcattcaatggccagagtttaaaaatgaagaagaagagagagaattcttaacaccagaggcaaaagatttgatagaaaaattgttggttgtggatcctgcgaaaagattaggtgcgaaaggaattcaagaaattaaagatcacccttatttcaagaatgtggattgggatcatgtttacgatgaggaagcttcttttgtccctacaatagacaatccagaagatactgattattttgacttgaggggtgcagagctccaagattttggagacgatatcgaaaacgataatgccaatattttgtttggtaaacatggcattaacaccgatgtttctgaattatctgcagctaatctctctccaccattgaatcataaaaatattttatcccgtaaattatctatgagtaacaccactaataggagcagtaataattccaacagtagcgtgcatgactttggtgcacatacaccggttaataaattaagtattgcttctgtattagagagtgtacctcaagaaacaggatatattacacctaacgggaccggtacaactactacaagtgccaaaaactctcccaatttgaagaatttgtctttggctatacctccacatatgagggatcgcagaagtagtaaattgaatgattctcaaacggaatttggttcttttaatttcaggaatttatctgctcttgataaagctaataaagatgctataaatagattgaaaagtgaacatttttctgaacaacctggggttcacagaagaacctcttctgcgtctttgatggggtcttccagtgacggatctgtgtccactccagggagtaacgcttctaacactacatctggtggcaagttgaaaatacataagcctaccatatccggttctccttctacatttggcacatttcccaaaacatttttgaggtctgattctttctccacaagatcttattctcctgaaagaagtattagtatcgactcttctacattatctaggaagggtagtataatcggggataaccaacaaacaacagcaaatagcagtgattctcctacgatgactaaattcaagtctccattatctcctgctaataccaccaccgtgagctcttatttttccagacagagggttttatccaagagtttttctcaaagaaccaattccagtgatctctctgcagaggaaagcgacagattacaggctatatctagagttaactctttaagaaacaggaggcgtagtggcagaaagagcagcagcacttctgagattggataccacatggatgttcttgtttgtgagcctataccgattcatagatatagagttactaaagacttagaaaatttgggctgtaccgtcgtcagtgttggtgccggtgatgaattggttagtagagccactagtggtgtaagttttgacttaattatgacagccttgaagcttccaaaacttggtgctattgacattgttcaattattgaagcaaacaaatggtgctaattctacaacaccaattgtggccataacaaattattttcaggaggcggcaaccagtagagtctttgacgatgttttagaaaaaccggtaaaacttgacgagttgaaaaaattggtggctaagtacgcattgaaaaagtctcaagaagatgaagagcatactatattgagcgattctgatgaaacgcactga

SEQ ID NO: 3471 - DNA, 717 bp, Saccharomyces cerevisiae
atggaaatgactgattttgaactaactagtaattcgcaatcgaacttggctatccctaccaacttcaagtcgactctgcctccaaggaaaagagccaagacaaaagaggaaaaggaacagcgaaggatcgagcgtattttgagaaacagaagagctgctcaccagagcagagagaaaaaaagactacatctgcagtatctcgagagaaaatgttctcttttggaaaatttactgaacagcgtcaaccttgaaaaactggctgaccacgaagacgcgttgacttgcagccacgacgcttttgttgcttctcttgacgagtacagggatttccagagcacgaggggcgcttcactggacaccagggccagttcgcactcgtcgtctgatacgttcacaccttcacctctgaactgtacaatggagcctgcgactttgtcgcccaagagtatgcgcgattccgcgtcggaccaagagacttcatgggagctgcagatgtttaagacggaaaatgtaccagagtcgacgacgctacctgccgtagacaacaacaatttgtttgatgcggtggcctcgccgttggcagacccactctgcgacgatatagcgggaaacagtctaccctttgacaattcaattgatcttgacaattggcgtaatccagaagcgcagtcaggtttgaattcatttgaattgaatgatttcttcatcacttcatga

SEQ ID NO: 3472 - DNA, 717 bp, Artificial Sequence
  Description of Artificial Sequence: Synthetic polynucleotide
atggaaatgactgattttgaattgactagtaattctcaaagtaacttggctatccctaccaacttcaagtctactttacctccaaggaaaagagccaagacaaaagaggaaaaggaacagagaaggatcgagcgtattttgagaaacagaagagctgctcaccagagcagagagaaaaaaagattacatttacagtatctcgagagaaaatgttctcttttggaaaatttattaaacagcgtcaaccttgaaaaattggctgaccacgaagacgcgttgacttgcagccacgacgcttttgttgcttctcttgacgagtacagggatttccagagcacgaggggcgcttctttggacaccagggccagttctcactcttcttctgatacgttcacaccttctcctttgaactgtacaatggagcctgcgactttgagccccaagagtatgcgcgattccgcgtctgaccaagagacttcttgggagttacagatgtttaagacggaaaatgtaccagagtctacgacgttacctgccgtagacaacaacaatttgtttgatgcggtggcctctccgttggcagacccactctgcgacgatatagcgggaaacagtttaccctttgacaattctattgatcttgacaattggcgtaatccagaagcgcagtctggtttgaattcttttgaattgaatgatttcttcatcacttcttga

SEQ ID NO: 3473 - DNA, 1158 bp, Saccharomyces cerevisiae
atgactaaatctgtagatacgctgctgatcccaggccccattatcctaagcggagcagtccagaaggccctggacgttccctctttgggccacacctctcctgagttcgtctctatttttcaaagggtgctaaagaacacaagagctgtcttcaaatccgctgctgcctcgaagtctcagccttttgtgcttgccggctctggtacgttggggtgggacatatttgcctcgaactttattctttcgaaggcccccaacaagaacgtgctggtcgtatccactgggacattttctgacaggtttgctgactgtctgcgtagctacggtgcgcaagtagatgttgttaggcccctcaagataggcgaatcagttcccttagaactgattactgaaaagttgtcgcaaaatagctatggggctgtcacggttacgcacgttgacacttcaacggcagtgctgtccgatctgaaagccatttcgcaagcgattaagcagacttcgccggaaacgttcttcgtagtcgatgctgtatgctcgattggatgcgaagagtttgaatttgatgaatggggggtggatttcgccttgactgcttcgcaaaaggctattggcgctccagcgggtctttctatctcgctatgcagtagcagattcatggattatgcactcaacgacagcaaaaatggtcatgtacatgggtatttttcctcgttgagaagatggacaccaataatggaaaattatgaggctggtaaaggagcttattttgcaaccccacccgtacaactaattaatagccttgatgtagccttgaaagaaattctcgaagaggggttgcataagagatgggatttgcaccgtgaaatgagtgattggtttaaagacagtttggttaatggcttgcaattgacatccgtcagtaggtatccttctaacatgtctgcgcacgggttgacagccgtatacgtagcagatcctcctgatgtcattgcttttttaaagtcacacggtgtagtcattgccggaggtattcacaaggacatcggacccaagtatatccgtattggacatatgggtgtgaccgcttgcaacaagaatttaccgtacatgaagaactgcttcgacttaataaaactagctcttcagaggaaaaagtga

SEQ ID NO: 3474 - DNA, 1158 bp, Artificial Sequence
  Description of Artificial Sequence: Synthetic polynucleotide
atgactaaatctgtagatacgttattgatcccaggccccattatcttaagcggagcagtccagaaggccttggacgttccctctttgggccacacctctcctgagttcgtctctatttttcaaagggtgttgaagaacacaagagctgtcttcaaatccgctgctgcctccaagtctcagccttttgtgcttgccggctctggtacgttggggtgggacatatttgcctccaactttattctttccaaggcccccaacaagaacgtgttggtcgtatccactgggacattttctgacaggtttgctgactgtttgcgtagctacggtgcgcaagtagatgttgttaggcccctcaagataggcgaatctgttcccttagaattgattactgaaaagttgtctcaaaatagctatggggctgtcacggttacgcacgttgacacttccacggcagtgttatccgatttgaaagccatttctcaagcgattaagcagacttctccggaaacgttcttcgtagtcgatgctgtatgctccattggatgcgaagagtttgaatttgatgaatggggggtggatttcgccttgactgcttctcaaaaggctattggcgctccagcgggtctttctatctctttatgcagtagcagattcatggattatgcactcaacgacagcaaaaatggtcatgtacatgggtatttttcctctttgagaagatggacaccaataatggaaaattatgaggctggtaaaggagcttattttgcaaccccacccgtacaattgattaatagccttgatgtagccttgaaagaaattctcgaagaggggttgcataagagatgggatttgcaccgtgaaatgagtgattggtttaaagacagtttggttaatggcttgcaattgacatccgtcagtaggtatccttctaacatgtctgcgcacgggttgacagccgtatacgtagcagatcctcctgatgtcattgcttttttaaagtctcacggtgtagtcattgccggaggtattcacaaggacatcggacccaagtatatccgtattggacatatgggtgtgaccgcttgcaacaagaatttaccgtacatgaagaactgcttcgacttaataaaattggctcttcagaggaaaaagtga

SEQ ID NO: 3475 - DNA, 1107 bp, Saccharomyces cerevisiae
atgaaactggatagtatagacattacacactgtcagttggtcaaatctactagaactgctaggatttataggtcggatacatatgccattaaatgtctagcactagatttcgatatcccgccacataacgccaaattcgaagtatcgatattaaacaaactgggcaacaaatgtaagcacatcttacctcttctagagtctaaggctaccgataataatgacctattgttgttgtttccctttgaagagatgaacctttatgagttcatgcaaatgcactataaaagagatagaagaaaaaaaaatccctattacgatttgctaaatcccagtatcccaattgttgcggacccccccgttcagaaatatactaatcaattggacgtcaatcggtattctttgtcctttttccggcaaatggttgaagggattgcattcttacatgagaacaagatcattcaccgcgacatcaaaccgcaaaatatcatgctaacaaacaataccagcaccgtatccccaaagttgtacataattgattttggcatctcttatgacatggcaaataactcacaaacaagtgcggaacccatggatagcaaggtgacggatataagcacaggaatttacaaggccccagaagtgctttttggagtaaaatgctatgatggtggcgtggacgtgtggtcgttgttgataattatttctcagtggttccagagagaaacaagccgtatggggcacgttccggccatgattgatgacggcagcgacgacatgaactcagatggaagcgatttcagactgatttgctcaatattcgaaaagttgggcataccgtccattcagaaatgggaagaggttgcgcaacacggctcggttgatgcatttgttggtatgtttggtgcagatggcgatggcaagtatgtactggaccaggagaaagatgtacagattagcattgttgagaggaatatgcctcgactggacgagattgcggatgtcaaagtcaagcagaagttcattaattgtatcctggggatggtttcattttcaccaaacgaaagatggagctgtcaaagaatcttgcaagaattagaaaagccataa

SEQ ID NO: 3476 - DNA, 1107 bp, Artificial Sequence
  Description of Artificial Sequence: Synthetic polynucleotide
atgaaattggatagtatagacattacacactgtcagttggtcaaatctactagaactgctaggatttataggtctgatacatatgccattaaatgtttggcattggatttcgatatcccgccacataacgccaaattcgaagtatctatattaaacaaattgggcaacaaatgtaagcacatcttacctcttttggagtctaaggctaccgataataatgacttgttgttgttgtttccctttgaagagatgaacctttatgagttcatgcaaatgcactataaaagagatagaagaaaaaaaaatccctattacgatttgttgaatcccagtatcccaattgttgcggacccccccgttcagaaatatactaatcaattggacgtcaatagatattctttgtcctttttcagacaaatggttgaagggattgcattcttacatgagaacaagatcattcaccgcgacatcaaaccgcaaaatatcatgttaacaaacaataccagcaccgtatccccaaagttgtacataattgattttggcatctcttatgacatggcaaataactctcaaacaagtgcggaacccatggatagcaaggtgacggatataagcacaggaatttacaaggccccagaagtgctttttggagtaaaatgctatgatggtggcgtggacgtgtggtctttgttgataattatttctcagtggttccagagagaaacaagccgtatggggcacgttccggccatgattgatgacggcagcgacgacatgaacagtgatggaagcgatttcagattgatttgctctatattcgaaaagttgggcataccgtccattcagaaatgggaagaggttgcgcaacacggctctgttgatgcatttgttggtatgtttggtgcagatggcgatggcaagtatgtattggaccaggagaaagatgtacagattagcattgttgagaggaatatgcctagattagacgagattgcggatgtcaaagtcaagcagaagttcattaattgtatcttggggatggtttctttttctccaaacgaaagatggagctgtcaaagaatcttgcaagaattagaaaagccatga

SEQ ID NO: 3477 - DNA, 870 bp, Saccharomyces cerevisiae
atggtttcccaatttgctattgaggtgcgtaacctaacgtacaaattcaaagaaagctccgatccgtcagttgttgatatcaatcttcaaatcccatggaatacaagatctttagttgtgggtgccaatggtgctggtaaatccacccttttgaaattactaagcggtaagcatctttgccttgatggaaaaatcctggtcaatggtcttgatccattcagtccattatctatgaatcaagtggacgatgatgaaagtgttgaagattcgacgaactaccaaacgaccacttatctaggtacggaatggtgccatatgagtatcattaatagggatatcggcgtcttggaactattaaaaagtattggattcgatcattttagggaaagaggtgaaagattggttagaatcctggacatcgatgtacgttggagaatgcacaggttaagtgatggacaaaagagaagagttcagttagccatggggctcttgaaaccttggagagttttactacttgatgaggtcactgtggatctcgatgttattgccagagcaagacttctggagtttttaaagtgggagaccgaaaccagaagatgctcagtggtctacgctacacatatttttgacggcttggccaaatggcctaaccaagtataccatatgaaatcaggtaagattgtggataatttagattatcagaaagacgtagagttctctgaagtggtcaatgctaaagttaatggacaagtggcctttgaaaatgacaacaataaggttgttattagtaaagtgaatagtttgcatccattagcactagaatggttgaaacgtgataatcaaattcctgacaaagagattggtatataa

SEQ ID NO: 3478 - DNA, 870 bp, Artificial Sequence
  Description of Artificial Sequence: Synthetic polynucleotide
atggtttcccaatttgctattgaggtgcgtaacttgacgtacaaattcaaagaaagctccgatccgtctgttgttgatatcaatcttcaaatcccatggaatacaagatctttagttgtgggtgccaatggtgctggtaaatccacccttttgaaattattaagcggtaagcatctttgccttgatggaaaaatcctcgtcaatggtcttgatccattcagtccattatctatgaatcaagtggacgatgatgaaagtgttgaagattctacgaactaccaaacgaccacttatttgggtacggaatggtgccatatgagtatcattaatagggatatcggcgtcttggaattattaaaaagtattggattcgatcattttagggaaagaggtgaaagattggttagaatcttggacatcgatgtacgttggagaatgcacaggttaagtgatggacaaaagagaagagttcagttagccatggggctcttgaaaccttggagagttttattacttgatgaggtcactgtggatctcgatgttattgccagagcaagacttttggagtttttaaagtgggagaccgaaaccagaagatgctctgtggtctacgctacacatatttttgacggcttggccaaatggcctaaccaagtataccatatgaaatctggtaagattgtggataatttagattatcagaaagacgtagagttctctgaagtggtcaatgctaaagttaatggacaagtggcctttgaaaatgacaacaataaggttgttattagtaaagtgaatagtttgcatccattagcattggaatggttgaaacgtgataatcaaattcctgacaaagagattggtatatga

SEQ ID NO: 3479 - DNA, 1494 bp, Saccharomyces cerevisiae
atgccattaaggtcattatttcatactaatcagagtagccacgacaaagacgcgttgacaaggggaggttataacgcatatctggaatcactttctcgttgtgacagtggaaaggcagaagaacaaaaaggaaaagttatatcaaagttattagagaaaaaagatgtccgagctttgaggtacataggtttagggcctctggggtttgtaaacaactcattaagaaaagattgttggtatgaattattggcgtcccagttgcttattgatgatgcaacagagtacattacaccagtggaaaaacataaagatgaaggtcaggtgatattggatgcagaaaggtcttttggtggaattgtcgacaaaaacttgaaactgcaattgagaaaactactggtggagttaattactcgggtattgagaaagtacccaacgttgaactattaccaaggttatcatgatattgtgtctgttttcatcatgtgttttagttggaatgtcacaaaagagaacggactggaactagaaaatctctcattgcaagaagaaattgatatggaaaggctgttttattgcatcgaagcatttaccctattatatctgagggatttcatgatgaactcactagatttttcatttgagcaattgagagtaatctcttcattgataaaggaatcaaacatgaaattctataatctattcaaatttgacgaaaatgagccccttttcgctattgggtcaatattgacaatctttgcacataatttgaaacctatagatagcggtgacaacaatcttcataaaattcttttccagatatttgacatgacaatatcgatgcaatctatgcgtttacctttgatcatatacaagaacctgctattgcaaaatgcgtctgaaatttcgaagcaaatagaagctaattctgatttcttcgagaacgattttgacctgcgccatggtgctatacaaacagttttacagaaaaaactgtatgatgaggcgctttgggaagaagtcttgcaaataactagaaaagatgcgactactgccagcaagaaggctttgaaacgggtgagtcttaataaatatagtgcattactcaatacagcatgtggaaagccaggatgcttcgatatgagcaccattatcttctatttgagcgaacaaacaaagatgaacgagcattacaaggaagaaaagtatcatggtgtcgccgccagatccaagacaagggcgttggtccaaagacttggccattttttaccctccaaatataacaggtggagcaaaatttctttacttatcgggattgtagctatcctgtaccaattacggactacaaggtcgttgagtttagtactcaatctacgttacatgatctccacaaagttgaaagacttatcacatataaatataaatttgcaccacgttagtcacatctgggtggatccgattagggacattttgaaactggggcatccaactagatag

SEQ ID NO: 3480 - DNA, 1494 bp, Artificial Sequence
  Description of Artificial Sequence: Synthetic polynucleotide
atgccattaaggtctttatttcatactaatcagagtagccacgacaaagacgcgttgacaaggggaggttataacgcatatttggaatctctttctcgttgtgacagtggaaaggcagaagaacaaaaaggaaaagttatatccaagttattagagaaaaaagatgtcagagctttgaggtacataggtttagggcctttagggtttgtaaacaactctttaagaaaagattgttggtatgaattattggcgtcccagttgcttattgatgatgcaacagagtacattacaccagtggaaaaacataaagatgaaggtcaggtgatattggatgcagaaaggtcttttggtggaattgtcgacaaaaacttgaaattacaattgagaaaattattggtggagttaattactagagtattgagaaagtacccaacgttgaactattaccaaggttatcatgatattgtgtctgttttcatcatgtgttttagttggaatgtcacaaaagagaacggattagaattggaaaatctctctttgcaagaagaaattgatatggaaaggttattttattgcatcgaagcatttaccttattatatttgagggatttcatgatgaactctttagatttttcttttgagcaattgagagtaatctcttctttgataaaggaatctaacatgaaattctataatttattcaaatttgacgaaaatgagccccttttcgctattgggtccatattgacaatctttgcacataatttgaaacctatagatagcggtgacaacaatcttcataaaattcttttccagatatttgacatgacaatatccatgcaatctatgcgtttacctttgatcatatacaagaacttattattgcaaaatgcgtctgaaatttccaagcaaatagaagctaattctgatttcttcgagaacgattttgaccttcgccatggtgctatacaaacagttttacagaaaaaactttatgatgaggcgctttgggaagaagtcttgcaaataactagaaaagatgcgactactgccagcaagaaggctttgaaaagagtgagtcttaataaatatagtgcattactcaatacagcatgtggaaagccaggatgcttcgatatgagcaccattatcttctatttgagcgaacaaacaaagatgaacgagcattacaaggaagaaaagtatcatggtgtcgccgccagatccaagacaagggcgttggtccaaagacttggccattttttaccctccaaatataacaggtggagcaaaatttctttacttatcgggattgtagctatcttgtaccaattaagaactacaaggtctttgagtttagtactcaatttacgttacatgatctccacaaagttgaaagacttatctcatataaatataaatttgcaccacgttagtcacatctgggtggatccgattagggacattttgaaattggggcatccaactagatga

SEQ ID NO: 3481 - DNA, 1296 bp, Saccharomyces cerevisiae
atgtctgatgcggctccttcattgagcaatctattttatgatccaacgtataatcctggtcaaagcaccattaactacacttccatatatgggaatggatctaccatcactttcgatgagttgcaaggtttagttaacagtactgttactcaggccattatgtttggtgtcagatgtggtgcagctgctttgactttgattgtcatgtggatgacatcgagaagcagaaaaacgccgattttcattatcaaccaagtttcattgtttttaatcattttgcattctgcactctattttaaatatttactgtctaattactcttcagtgacttacgctctcaccggatttcctcagttcatcagtagaggtgacgttcatgtttatggtgctacaaatataattcaagtccttcttgtggcttctattgagacttcactggtgtttcagataaaagttattttcacaggcgacaacttcaaaaggataggtttgatgctgacgtcgatatctttcactttagggattgctacagttaccatgtattttgtaagcgctgttaaaggtatgattgtgacttataatgatgttagtgccacccaagataaatacttcaatgcatccacaattttacttgcatcctcaataaactttatgtcatttgtcctggtagttaaattgattttagctattagatcaagaagattccttggtctcaagcagttcgatagtttccatattttactcataatgtcatgtcaatctttgttggttccatcgataatattcatcctcgcatacagtttgaaaccaaaccagggaacagatgtcttgactactgttgcaacattacttgctgtattgtctttaccattatcatcaatgtgggccacggctgctaataatgcatccaaaacaaacacaattacttcagactttacaacatccacagataggttttatccaggcacgctgtctagctttcaaactgatagtatcaacaacgatgctaaaagcagtctcagaagtagattatatgacctatatcctagaaggaaggaaacaacatcggataaacattcggaaagaacttttgtttctgagactgcagatgatatagagaaaaatcagttttatcagttgcccacacctacgagttcaaaaaatactaggataggaccgtttgctgatgcaagttacaaagagggagaagttgaacccgtcgacatgtacactcccgatacggcagctgatgaggaagccagaaagttctggactgaagataataataatttatga

SEQ ID NO: 3482 - DNA, 1296 bp, Artificial Sequence
  Description of Artificial Sequence: Synthetic polynucleotide
atgtctgatgcggctccttctttgagcaatttattttatgatccaacgtataatcctggtcaaagcaccattaactacacttccatatatgggaatggatctaccatcactttcgatgagttgcaaggtttagttaacagtactgttactcaggccattatgtttggtgtcagatgtggtgcagctgctttgactttgattgtcatgtggatgacatctagaagcagaaaaacgccgattttcattatcaaccaagtttctttgtttttaatcattttgcattctgcactctattttaaatatttattatctaattactcttctgtgacttacgctctcaccggatttcctcagttcatcagtagaggtgacgttcatgtttatggtgctacaaatataattcaagtccttcttgtggcttctattgagacttctttggtgtttcagataaaagttattttcacaggcgacaacttcaaaaggataggtttgatgcttacgtctatatctttcactttagggattgctacagttaccatgtattttgtaagcgctgttaaaggtatgattgtgacttataatgatgttagtgccacccaagataaatacttcaatgcatccacaattttacttgcatcctccataaactttatgagttttgtcttggtagttaaattgattttagctattagatctagaagattccttggtctcaagcagttcgatagtttccatattttactcataatgtcctgtcaatctttgttggttccaagtataatattcatcctcgcatacagtttgaaaccaaaccagggaacagatgtcttgactactgttgcaacattacttgctgtattgtctttaccattatcttctatgtgggccacggctgctaataatgcatccaaaacaaacacaattacttctgactttacaacatccacagataggttttatccaggcacgttgtctagctttcaaactgatagtatcaacaacgatgctaaaagcagtctcagaagtagattatatgacctttatcctagaaggaaggaaacaacatctgataaacattctgaaagaacttttgtttctgagactgcagatgatatagagaaaaatcagttttatcagttgcccacacctacgagttctaaaaatactaggataggaccgtttgctgatgcaagttacaaagagggagaagttgaacccgtcgacatgtacactcccgatacggcagctgatgaggaagccagaaagttctggactgaagataataataatttatga

SEQ ID NO: 3483 - DNA, 3090 bp, Saccharomyces cerevisiae
atgggtatcaggagattagttagtgttataacgcggcccataattaataaagttaactcatctggtcaatactcgagagtactcgctacgcgtgaagaccaggataaagcttcccccaaatatatgaacaatgataagatagcaaaaaaaccttacacatatcgccttttctctattcttggcattttaagcatttgctcgcttttattgatatcgctactgaaaccttttaatggtgcagatgctcctcagtgtgaatctatctatatgtttccatcttacgcaaggatcgatggatttgacgagaggtatacaccactggcacacaagtatcatctttacttgtatcgagaacaaagcgtagaccgagaacctttaaatggtgatgagttacaacttgatggtatccctgtactttttatacccggaaatgcaggttcttttaggcaatgcagatcgattgcttccgcttgctccaatatatattttgattccaataccagggcgactctgcgtaacgaaaatgtgcgaaatttggacttctttacggcagatttcaatgaagatttcactgcgtttcatggtgaaacaatgcttgatcaagctgaatacctaaatgatgccattaagtacatcttgtctctttacgaaaggacccctgattacccacatccaaaaccgcagtcagttattatcgtgggacattccatgggcggtattgtatccagggtcatgctaactttgaagaaccacgtaccgggaagtataagcaccatattgaccttatcatcacctcatgctgcttcaccagtaacctttgatggtgacattttaaagctttacaaaaatacaaacgaatattggagaaagcagttatcccaaaacgattcttttttctctaagaacatttcattggtttccattacaggcggtatattggatactactttacctgcagattatgcatctgtagaagatttggttagcttagaaaatgggttcaccagcttcacaactactattccagatgtttggactccaattgatcatttagccattgtttggtgcaagcaattaagagaggtactagcgcgccttttattggaaagtatagatgcctccaaacctgaaaaagttaagccattgaatcagagattgcaaatcgctagaaaactattgctttcagggtttgaagactactcatggatgaatagtaagttaaattatcctcaagaaaacttacaagaatttagtgacaacttcttttctgattacgctactttggaaatgaacgatgtcctagattttgaaatgtttaacctggaaaagtggcacaacaattatacaaaaataaatattccgagtaacatctcctccactgaacacctgcatttcacattattaactagtctcgatatgcctatgatctatttctgtacagagtccagggtgaatctaagctgtataacagctgttgatagtattctaacagtgcccaggtcttcaaaagatactcagttcgcagctgattcttcttttggagaagcaaaaaatccgtttaaagccgttagtgttggcaagaatatactacagaagtacgactacttgatgataagcaaacccacttacggtgaattttcagaacaagaaggcatggaggacaatcaggggtttcttttggcattactgcgcaacgtctccaatgtacaaatagtcaatactacaccttctcaaatattgctctttggagaacaactacacttggatggcaaagacatcgagcaggttataagtttcagtaatttgtgggattctttattatcgtacaaattagaaaccaagattgaggcaagcaacgaaggtattgcttccgaagagacattgtttcagcctttcataaggcaatgggtttacgaacctttcgagtctaaatggcatctaaatattataaacaaaagtctcgatataaatatgcataatgtagcaccgtttatcccattaaatgaaagcgaaccgagatcgctacaattaagtttttttattccacccggaatgtccttagaagctaaaatgactattaattggtctttaactttgaaaatgctgtttatcaggtacagattagcactagcatcttttccagtcgcgtttatagcactcgtactgtcataccagttctactggtacaacaagacatctgagtttccttcctttgatagcactttgggatatattttaagaaagcacggaatattaatgttttttacgctgttcttagcttcgcctgtggttaataataagttggtacaacgaatactttatttattggatcctgtcggtttaaattatccatttctgctatccgagagaaacatgcatgcaaatttttattatttggggatcagagattggtttatgtcaactattggaattctctttggggttatgacagttggattactagcactagtttctaagatttttggatccttggaaattttagtaatattccttcaacggaagttatcaaagaaaaacactgaagataaagaggcttttgatactattgaacataaagcgtatggtaagggaagattaatggcatctgtgcttttattactgttggtattttttcacataccataccagatggcgtttgttatctcattagtaatccaaattgctacctgcattagagtagcgctgttgaaactatcaaacaacgagcagaaattgaacttactaaattataatatgacgttgcttctgcttttattatttgttagtgccattaacatccctatcattattgttttcctgcataatgttgccatcaaatgggaaacttcatttagatcccatcacaatatactagcagtggcaccaattatttttttggttggaaataattctattttcaaaatgccaaacagcgtacctttagacacgtgggatggtaaagttaccatcattttatttgtgtacttaaccgttttcagtttcatttatggaataagaaatctgtactggatacaccacttggtgaacataatatgtgcctggttgctatttttcgaaacaatacattag

SEQ ID NO: 3484 - DNA, 3090 bp, Artificial Sequence
  Description of Artificial Sequence: Synthetic polynucleotide
atgggtatcaggagattagttagtgttataacgaggcccataattaataaagttaactcttctggtcaatactctagagtactcgctacgcgtgaagaccaggataaagcttcccccaaatatatgaacaatgataagatagcaaaaaaaccttacacatatcgccttttctctattcttggcattttaagcatttgcagccttttattgatatctttattgaaaccttttaatggtgcagatgctcctcagtgtgaatctatctatatgtttccatcttacgcaaggatcgatggatttgacgagaggtatacaccattggcacacaagtatcatctttacttgtatagagaacaaagcgtagacagagaacctttaaatggtgatgagttacaacttgatggtatccctgtactttttatacccggaaatgcaggttcttttaggcaatgcagatctattgcttccgcttgctccaatatatattttgattccaataccagggcgactttacgtaacgaaaatgtgagaaatttggacttctttacggcagatttcaatgaagatttcactgcgtttcatggtgaaacaatgcttgatcaagctgaatacttgaatgatgccattaagtacatcttgtctctttacgaaaggacccctgattacccacatccaaaaccgcagtctgttattatcgtgggacattccatgggcggtattgtatccagggtcatgttgactttgaagaaccacgtaccgggaagtataagcaccatattgaccttatcttctcctcatgctgcttctccagtaacctttgatggtgacattttaaagctttacaaaaatacaaacgaatattggagaaagcagttatcccaaaacgattcttttttctctaagaacatttctttggtttccattacaggcggtatattggatactactttacctgcagattatgcatctgtagaagatttggttagcttagaaaatgggttcaccagcttcacaactactattccagatgtttggactccaattgatcatttagccattgtttggtgcaagcaattaagagaggtattggcgcgccttttattggaaagtatagatgcctccaaacctgaaaaagttaagccattgaatcagagattgcaaatcgctagaaaacttttgctttccgggtttgaagactactcttggatgaatagtaagttaaattatcctcaagaaaacttacaagaatttagtgacaacttcttttctgattacgctactttggaaatgaacgatgtcttggattttgaaatgtttaacttggaaaagtggcacaacaattatacaaaaataaatattccgagtaacatctcctccactgaacacttgcatttcacattattaactagtctcgatatgcctatgatctatttctgtacagagtccagggtgaatttgagctgtataacagctgttgatagtattttaacagtgcccaggtcttctaaagatactcagttcgcagctgattcttcttttggagaagcaaaaaatccgtttaaagccgttagtgttggcaagaatatattacagaagtacgactacttgatgataagcaaacccacttacggtgaattttctgaacaagaaggcatggaggacaatcaggggtttcttttggcattacttcgcaacgtctccaatgtacaaatagtcaatactacaccttctcaaatattgctctttggagaacaattacacttggatggcaaagacatcgagcaggttataagtttcagtaatttgtgggattctttattatcttacaaattagaaaccaagattgaggcaagcaacgaaggtattgcttccgaagagacattgtttcagcctttcataaggcaatgggtttacgaacctttcgagtctaaatggcatttgaatattataaacaaaagtctcgatataaatatgcataatgtagcaccgtttatcccattaaatgaaagcgaaccgagatccttacaattaagtttttttattccacccggaatgtccttagaagctaaaatgactattaattggtctttaactttgaaaatgttatttatcaggtacagattagcattggcatcttttccagtcgcgtttatagcactcgtattatcttaccagttctactggtacaacaagacatctgagtttccttcctttgatagcactttgggatatattttaagaaagcacggaatattaatgttttttacgcttttcttagcttcccctgtggttaataataagttggtacaaagaatactttatttattggatcctgtcggtttaaattatccatttttattatccgagagaaacatgcatgcaaatttttattatttggggatcagagattggtttatgtctactattggaattctctttggggttatgacagttggattattggcattggtttctaagatttttggatccttggaaattttagtaatattccttcaaagaaagttatccaagaaaaacactgaagataaagaggcttttgatactattgaacataaagcgtatggtaagggaagattaatggcatctgtgcttttattattattggtattttttcacataccataccagatggcgtttgttatctctttagtaatccaaattgctacctgcattagagtagcgttattgaaattatctaacaacgagcagaaattgaacttattgaattataatatgacgttgcttttacttttattatttgttagtgccattaacatccctatcattattgttttcttacataatgttgccatcaaatgggaaacttcttttagatcccatcacaatatattggcagtggcaccaattatttttttggttggaaataattctattttcaaaatgccaaacagcgtacctttagacacgtgggatggtaaagttaccatcattttatttgtgtacttaaccgttttcagtttcatttatggaataagaaatctttactggatacaccacttggtgaacataatatgtgcctggttgttatttttcgaaacaatacattga

SEQ ID NO: 3485 - DNA, 2499 bp, Saccharomyces cerevisiae
atgccgacaccttcaaacgctatagagatcaatgacggttcgcataaatctggtagaagcactaggcggtctggatctaggagtgcgcacgatgacggtctagattcattctcaaaaggcgattcaggtgctggagccagtgctggtagcagtaatagtcgatttagacatcgaaaaatatctgtgaagcaacatcttaagatatatctgcctaacgatctgaaacacctggataaagatgaattgcaacagagagaggtggttgagatcgaaactggtgtagaaaaaaatgaagaaaaggaggtccatttgcatcgaatattacaaatgggttctggtcatacaaagcacaaagactatattccgaccccggatgcttctatgacttggaatgaatatgataagttttatacgggcagtttccaggagaccaccagctacatcaaattttctgccactgtggaggattgctgtggtaccaactacaatatggatgaaagagatgagacctttttaaatgaacaagtcaacaaaggttcatcagacattttaactgaagacgaatttgaaatactttgttccagttttgaacatgctattcacgagcgtcaaccattcttgagtatggatccggaaagtatactttcttttgaagaattgaagcccacattaataaaatcagatatggctgatttcaatctaagaaaccagctgaatcatgaaataaattctcataaaacacattttatcacacaattcgaccccgtatctcaaatgaatacgagacctttaattcagctgatagagaagttcggctctaaaatttatgattattggagagaaagaaaaattgaagttaacgggtacgaaatttttccgcagctgaaatttgaaaggccgggtgaaaaagaagagattgatccctacgtctgtttcagaagaagagaagtgagacatccgcggaaaacaagacgtatagatatcttaaacagtcagcgtttaagggcgttgcatcaagaattgaaaaacgcgaaggacttggccctgcttgttgctaaacgtgagaacgtttccctaaattggattaatgatgaattaaaaatattcgatcaaagggtaaaaattaagaatttgaaaagatctttgaacattagtggagaagacgatgacttgattaaccacaagagaaaacgccccacgattgttacggtcgaacaaagggaagctgaactaaggaaagctgaacttaagagagcagctgctgcagcagcggcagcgaaggcaaagaacaataaaaggaataaccaacttgaagacaaatcttctaggctcaccaagcagcaacagcagcaactgttacagcaacaacaacaacaacagcaaaatgcccttaagactgaaaacggaaagcaactcgcgaatgcatcctcttcttcaacatcacagccaattacgtctcatgtttatgtcaaactaccatcttccaaaattcctgacattgtattggaagacgtggatgctctattgaacagcaaagaaaaaaatgcaagaaagttcgttcaggaaaagatggagaaacggaaaattgaagacgcagatgtctttttcaacttaacggacgatccctttaatcctgtatttgacatgtcgttgcctaaaaatttttcgactagtaatgttccctttgcatctatcgcgtcatccaagtttcagatagatagatctttttattcttcacatttaccagaatacttgaaggggatatctgatgacatcagaatatatgattcaaatggccgttcgagaaacaaagataattacaacttggataccaaaagaatcaaaaaaactgaactgtacgacccattccaagaaaatttggaaattcattcgagagagtatccaataaaattcaggaagagagttggtagatctaatattaagtatgttgatcgtatgccaaattttacaacatcgtcgaccaagtctgcatgttctttaatggattttgtagatttcgattcaatcgaaaaagaacaatattcaagagaaggtagtaacgatactgactcgattaatgtttacgattccaaatacgacgaatttgtcagactttacgacaagtggaagtatgattctccacaaaatgaatatgggatcaagttttcagatgaaccggcaagacttaaccagatttcaaatgatactcaggtgattagattcggaacaatgttgggtacgaagtcctacgaacaattaagggaagccaccataaagtatcgtagggactatatcaccagactgaaacaaaagcatatacaacatttacaacagcaacaacaacagcagcagcagcaacagcagcaagcacaacaacaaaagcagaaatcacagaacaataattcaaattcttcgaactccctaaaaaaattaaatgattcgttaatcaattcagaagcgaaacagaactcttctataacccagaaaaattcatcatga

SEQ ID NO: 3486 - DNA, 2499 bp, Artificial Sequence
  Description of Artificial Sequence: Synthetic polynucleotide
atgccgacaccttccaacgctatagagatcaatgacggttctcataaatctggtagaagcactaggcgttctggatctaggagtgcgcacgatgacggtttggattctttctccaaaggcgattctggtgctggagccagtgctggtagcagtaatagtagatttagacatagaaaaatatctgtgaagcaacatcttaagatatatttacctaacgatttgaaacacttggataaagatgaattgcaacagagagaggtggttgagatcgaaactggtgtagaaaaaaatgaagaaaaggaggtccatttgcatagaatattacaaatgggttctggtcatacaaagcacaaagactatattccgaccccggatgcttctatgacttggaatgaatatgataagttttatacgggcagtttccaggagaccaccagctacatcaaattttctgccactgtggaggattgctgtggtaccaactacaatatggatgaaagagatgagacctttttaaatgaacaagtcaacaaaggttcttctgacattttaactgaagacgaatttgaaatactttgttccagttttgaacatgctattcacgagcgtcaaccattcttgagtatggatccggaaagtatactttcttttgaagaattgaagcccacattaataaaatctgatatggctgatttcaatttaagaaaccagttgaatcatgaaataaattctcataaaacacattttatcacacaattcgaccccgtatctcaaatgaatacgagacctttaattcagttgatagagaagttcggctctaaaatttatgattattggagagaaagaaaaattgaagttaacgggtacgaaatttttccgcagttgaaatttgaaaggccgggtgaaaaagaagagattgatccctacgtctgtttcagaagaagagaagtgagacatccgcgtaaaacaagacgtatagatatcttaaacagtcagcgtttaagggcgttgcatcaagaattgaaaaacgcgaaggacttggccttacttgttgctaaacgtgagaacgtttccttgaattggattaatgatgaattaaaaatattcgatcaaagggtaaaaattaagaatttgaaaagatctttgaacattagtggagaagacgatgacttgattaaccacaagagaaaacgccccacgattgttacggtcgaacaaagggaagctgaattgaggaaagctgaacttaagagagcagctgctgcagcagcggcagcgaaggcaaagaacaataaaaggaataaccaacttgaagacaaatcttctaggctcaccaagcagcaacagcagcaattattacagcaacaacaacaacaacagcaaaatgcccttaagactgaaaacggaaagcaactcgcgaatgcatcctcttcttctacatctcagccaattacgtctcatgtttatgtcaaattaccatcttccaaaattcctgacattgtattggaagacgtggatgctttattgaacagcaaagaaaaaaatgcaagaaagttcgttcaggaaaagatggagaaaagaaaaattgaagacgcagatgtctttttcaacttaacggacgatccctttaatcctgtatttgacatgtctttgcctaaaaatttttccactagtaatgttccctttgcatctatcgcgtcttccaagtttcagatagatagatctttttattcttctcatttaccagaatacttgaaggggatatctgatgacatcagaatatatgattctaatggccgttccagaaacaaagataattacaacttggataccaaaagaatcaaaaaaactgaattatacgacccattccaagaaaatttggaaattcattccagagagtatccaataaaattcaggaagagagttggtagatctaatattaagtatgttgatcgtatgccaaattttacaacatcttccaccaagtctgcatgttctttaatggattttgtagatttcgattctatcgaaaaagaacaatattctagagaaggtagtaacgatactgacagtattaatgtttacgattccaaatacgacgaatttgtcagactttacgacaagtggaagtatgattctccacaaaatgaatatgggatcaagttttctgatgaaccggcaagacttaaccagatttctaatgatactcaggtgattagattcggaacaatgttgggtacgaagtcctacgaacaattaagggaagccaccataaagtatcgtagggactatatcaccagattgaaacaaaagcatatacaacatttacaacagcaacaacaacagcagcagcagcaacagcagcaagcacaacaacaaaagcagaaatctcagaacaataatagtaattcttccaactccttgaaaaaattaaatgattctttaatcaattctgaagcgaaacagaactcttctataacccagaaaaattcttcttga

SEQ ID NO: 3487 - DNA, 2391 bp, Saccharomyces cerevisiae
atggatttgttagcggccagcgtagaaagtacgttgaaaaatctgcaagataagagaaactttctttcggaacaaagagagcactatatagatatcagaagccgactggttagatttatcaatgacaatgatgatggcgaagaagaaggcgaaggccaagggatggtgtttggtgatatcataatttctacgagtaagatatatctaagtctaggctatgagtattacgttgaaaagaccaaagaggaggccatcacgtttgttgatgataaattaaaactaatggaggacgccattgagcaatttaacctgaagatcgaagaggctaaaaagaccttagacaacttgaatcacatggaggacggaaatggaattgaagaagacgaagcgaacaacgacgaagattttctgccctctatggagattagagaagaactagatgacgagggaaatgtcataagtagttccgttacccctacaacaaagcaaccatcacaatcgaattccaaaaaagaacagacacctgcagtcggtccaaaggagaaaggattagcaaaggagaagaaatcaaagtcattcgaagaaaacttgaaaggaaagttattgaaaaggaacgatgaagtaaagaaaaaagtgcagccatctaaagtagatacagaaaacgtgtatacatttgccgacttggtccaacagatggaccaacaagatgaattggaggacggctatattgaaactgatgaaataaattatgattatgatgcgttcgaaaactccaatttcaaagtcaatgataactatgaagaggatgacgaggacgaagatgaagaagagtatctaaatcattctattatacctggctttgaagcgcagtcctcatttttacaacaaattcaacgcctacgcgcacaaaagcaatcccaagatcatgagagggaagaaggtgacgttaataaatcattaaaacctattttgaaaaagtcttcttttgctgagaattcagacaaaaagcagaaaaagaaacaagtcgggtttgcatcttctctagaaattcacgaagtcgaaaacttgaaagaagagaacaagaggcagatgcaatcctttgcggtgcccatgtatgaaacccaggaaagcacaggtatcgctaataaaatgacatcggatgagtttgatggtgatttatttgctaagatgttgggtgtccaagaggccgatgaagtgcatgaaaaatataaagaggaactgataaatcaagagagacttgaaggggaagcaagcaggtcgaatagaagaactagggtgtccagattccggaaggatagagcttctaaaaaagaaaatacgttatcaactttcaaacaggaaacgacaaggtcagtggagaacgaggtagtggaaaaagagcctgttgtgggggatattatagaaaaagaacctgttgtgggggatgttatagaaaaagaacctgttgtgggggatgttatagaaaaagagcctgctgtcaccgatatagtggaaagggagcctgctgtcaacgatatagtggaaaggaagcctgttgtgggggatattatagaaaaagaacctactatcaacgatatagtggaaaaagaaccggaaattaacagcaagagcgagtttgagactccttttaaaaagaaaaagctaaaatcactgcaaaaaccaagatcatcgaaatcaatgaaaaaaaaatttgatcccaaaattctcgaaaatataagtgatgacgattatgatgatgatgacgatggtaataagaaacttttgtccaacaaaagtaaaaataacactgatgagcaagataaatttccttcaaaaatccaagaggtgtctaggtcgatggctaagacgggcgccacagtagggagtgagccggttagaattacaaatgtcgattatcacgccctaggtggaaacttggatgatatggtcaaggcatattcattggggttatatgacgacgatttagaggaagatccaggaaccatagtggaaaagctcgaggatttcaaagaatacaataagcaggtggagttgctgcgtgacgaaattcgagactttcaactagaaaacaagccagtgacgatggaggaggaggaaaatgatggcaatgttatgaatgatatcattgagcatgaatttcctgaaagttacacaaatgacgaggacgaagtagcactacatccgggccggctacaggaagaggttgctatagagtacagacggttgaaagaagctaccgcgtcgaaatggcaatcatcatcacccgccgcacacactgaaggcgaattggagcctattgataagttcgggaacccggtcaagacaagtcgtttccgctctcaacggctccatatggacagtaaaccataa

SEQ ID NO: 3488 - DNA, 2391 bp, Artificial Sequence
  Description of Artificial Sequence: Synthetic polynucleotide
atggatttgttagcggccagcgtagaaagtacgttgaaaaatttacaagataagagaaactttctttctgaacaaagagagcactatatagatatcagaagcaggttggttagatttatcaatgacaatgatgatggcgaagaagaaggcgaaggccaagggatggtgtttggtgatatcataatttctacgagtaagatatatttgagtttgggctatgagtattacgttgaaaagaccaaagaggaggccatcacgtttgttgatgataaattaaaattaatggaggacgccattgagcaatttaacttgaagatcgaagaggctaaaaagaccttagacaacttgaatcacatggaggacggaaatggaattgaagaagacgaagcgaacaacgacgaagattttttgccctctatggagattagagaagaattagatgacgagggaaatgtcataagtagttccgttacccctacaacaaagcaaccatctcaaagcaattccaaaaaagaacagacacctgcagtcggtccaaaggagaaaggattagcaaaggagaagaaatccaagagtttcgaagaaaacttgaaaggaaagttattgaaaaggaacgatgaagtaaagaaaaaagtgcagccatctaaagtagatacagaaaacgtgtatacatttgccgacttggtccaacagatggaccaacaagatgaattggaggacggctatattgaaactgatgaaataaattatgattatgatgcgttcgaaaactccaatttcaaagtcaatgataactatgaagaggatgacgaggacgaagatgaagaagagtatttgaatcattctattatacctggctttgaagcgcagtcctcttttttacaacaaattcaacgcttgcgcgcacaaaagcaatcccaagatcatgagagggaagaaggtgacgttaataaatctttaaaacctattttgaaaaagtcttcttttgctgagaatagtgacaaaaagcagaaaaagaaacaagtcgggtttgcatcttctttggaaattcacgaagtcgaaaacttgaaagaagagaacaagaggcagatgcaatcctttgcggtgcccatgtatgaaacccaggaaagcacaggtatcgctaataaaatgacatctgatgagtttgatggtgatttatttgctaagatgttgggtgtccaagaggccgatgaagtgcatgaaaaatataaagaggaattgataaatcaagagagacttgaaggggaagcaagcaggtctaatagaagaactagggtgtccagattcagaaaggatagagcttctaaaaaagaaaatacgttatctactttcaaacaggaaacgacaaggtctgtggagaacgaggtagtggaaaaagagcctgttgtgggggatattatagaaaaagaacctgttgtgggggatgttatagaaaaagaacctgttgtgggggatgttatagaaaaagagcctgctgtcaccgatatagtggaaagggagcctgctgtcaacgatatagtggaaaggaagcctgttgtgggggatattatagaaaaagaacctactatcaacgatatagtggaaaaagaaccggaaattaacagcaagagcgagtttgagactccttttaaaaagaaaaagttgaaatctttacaaaaaccaagatcttctaaatctatgaaaaaaaaatttgatcccaaaattctcgaaaatataagtgatgacgattatgatgatgatgacgatggtaataagaaacttttgtccaacaaaagtaaaaataacactgatgagcaagataaatttccttccaaaatccaagaggtgtctaggtctatggctaagacgggcgccacagtagggagtgagccggttagaattacaaatgtcgattatcacgcccttggtggaaacttggatgatatggtcaaggcatattctttggggttatatgacgacgatttagaggaagatccaggaaccatagtggaaaagctcgaggatttcaaagaatacaataagcaggtggagttgttacgtgacgaaattagagactttcaattggaaaacaagccagtgacgatggaggaggaggaaaatgatggcaatgttatgaatgatatcattgagcatgaatttcctgaaagttacacaaatgacgaggacgaagtagcattgcatccgggcagattacaggaagaggttgctatagagtacagaagattgaaagaagctaccgcgtccaaatggcaatcttcttctcccgccgcacacactgaaggcgaattggagcctattgataagttcgggaacccggtcaagacaagtcgtttccgctctcaaagactccatatggacagtaaaccatga

SEQ ID NO: 3489 - DNA, 1512 bp, Saccharomyces cerevisiae
atgtctgacttccaattagaaattctaaaaaaactagatgaattggatgagatcaagtccacactggcaactttccctcagcacggctctcaagatgttctttccgctttgaactctttgaaagcccacaacaagttagagttttccaaggtcgacacggttacgtatgacttgaccaaagaaggtgctcaaattttgaatgaaggttcgtacgaaattaaactagtcaagctcatccaagagttgggtcaacttcaaatcaaagatgtgatgtccaaactgggtcctcaagttggtaaggtcggtcaggctagagctttcaagaacggctggatcgccaaaaacgcctcaaacgagcttgaactctccgcaaaattgcaaaataccgatttaaatgagcttactgatgaaacgcaatctattctagcgcaaatcaagaacaactcgcatctggatagcattgacgccaagattttgaacgacttgaagaaaagaaagttaattgctcaaggtaaaatcacagatttcaacgttaccaaagggccagagttctcgaccgacctcaccaaattggaaaccgatcttacctccgacatggtctccaccaatgcatacaaggacttgaagttcaagccttacaatttcaattctcaaggtgtgcaaatatcttcaggtgctcttcaccccttaaacaaagtcagagaggaatttagacaaattttcttttccatgggattcacagagatgccctcgaaccaatacgtcgagacaggtttctggaacttcgatgccctttacgtcccacaacagcatcctgctcgtgacctgcaagacactttctacatcaaggacccactaaccgctgacttgcccgatgacaagacatacatggacaatatcaaagccgttcacgaacaggggagattcgggtccatcggttatcgttacaactggaagccagaagaatgtcaaaaattggtcttgagaactcactccacagccatctctgccagaatgctgcacgatttggccaaagatccaaagcccaccagattgttttctatcgaccgtgttttccgtaacgaagcagttgacgccacccatttggccgaattccaccaggtggaaggtgttcttgccgactacaacattactctgggtgacctgatcaagttcatggaagagtttttcgaaagaatgggtgtcaccggtttgagattcaagcctacctacaatccttacaccgagccatcaatggaaatcttttcttggcacgaaggtttgcaaaaatgggtcgaaatcggtaactctggtatgttcagaccagaaatgctcgagtccatgggtctaccaaaggatctaagagtccttggttgggggttatccttggaaagacctaccatgatcaaatataaggttcaaaacatcagagaactgttaggtcataaagtctctttggactttatcgaaaccaatcctgctgctagattggacgaagacttgtacgaataa

SEQ ID NO: 3490 - DNA, 1512 bp, Artificial Sequence
  Description of Artificial Sequence: Synthetic polynucleotide
atgtctgacttccaattagaaattttgaaaaaattggatgaattggatgagatcaagtccacattagcaactttccctcagcacggctctcaagatgttctttccgctttgaactctttgaaagcccacaacaagttagagttttccaaggtcgacacggttacgtatgacttgaccaaagaaggtgctcaaattttgaatgaaggttcttacgaaattaaattggtcaagctcatccaagagttgggtcaacttcaaatcaaagatgtgatgtccaaattgggtcctcaagttggtaaggtcggtcaggctagagctttcaagaacggctggatcgccaaaaacgcctccaacgagcttgaactctccgcaaaattgcaaaataccgatttaaatgagcttactgatgaaacgcaatctattttggcgcaaatcaagaacaactctcatttggatagcattgacgccaagattttgaacgacttgaagaaaagaaagttaattgctcaaggtaaaatcacagatttcaacgttaccaaagggccagagttctccaccgacctcaccaaattggaaaccgatcttacctccgacatggtctccaccaatgcatacaaggacttgaagttcaagccttacaatttcaattctcaaggtgtgcaaatatcttctggtgctcttcaccccttaaacaaagtcagagaggaatttagacaaattttcttttccatgggattcacagagatgccctctaaccaatacgtcgagacaggtttctggaacttcgatgccctttacgtcccacaacagcatcctgctcgtgacttgcaagacactttctacatcaaggacccattgaccgctgacttgcccgatgacaagacatacatggacaatatcaaagccgttcacgaacaggggagattcgggtccatcggttatcgttacaactggaagccagaagaatgtcaaaaattggtcttgagaactcactccacagccatctctgccagaatgttgcacgatttggccaaagatccaaagcccaccagattgttttctatcgaccgtgttttccgtaacgaagcagttgacgccacccatttggccgaattccaccaggtggaaggtgttcttgccgactacaacattactttaggtgacttgatcaagttcatggaagagtttttcgaaagaatgggtgtcaccggtttgagattcaagcctacctacaatccttacaccgagccaagcatggaaatcttttcttggcacgaaggtttgcaaaaatgggtcgaaatcggtaactctggtatgttcagaccagaaatgctcgagtccatgggtttgccaaaggatttgagagtccttggttgggggttatccttggaaagacctaccatgatcaaatataaggttcaaaacatcagagaattattaggtcataaagtctctttggactttatcgaaaccaatcctgctgctagattggacgaagacttgtacgaatga

SEQ ID NO: 3491 - DNA, 1533 bp, Saccharomyces cerevisiae
atgcacgttttctttcctttgcttttccgcccttcccctgttctgttcatcgcatgtgcatatatatatatagatatatatatacattgtacacggtgcacggtagtgaacataactatgagcacgaacagagtcccgaacctcgacccggacttgaatttaaacaaagaaatctgggacctgtactcgagcgcccagaaaatattgcccgattctaaccgtattttgaacctttcttggcgtttgcataaccgcacgtctttccatcgaattaaccgcataatgcaacattctaactctattatggacttctccgcctcgccctttgccagcggcgtgaacgccgctggcccaggcaacaacgacctcgatgacaccgatactgataaccagcaattcttcctttcagacatgaacctcaacggatcttctgtttttgaaaatgtgtttgacgacgatgacgatgatgatgacgtggagacgcactccattgtgcactcagacctgctcaacgacatggacagcgcttcccagcgtgcttcacataatgcttctggtttccctaattttctggacacttcctgctcgtcctccttcgatgaccactttattttcaccaataacttaccatttttaaataataatagcattaataataatcatagtcataatagtagtcataataataacagtcccagcatcgccaataatacaaacgcaaacacaaacacaaacacaagtgcaagtacaaacaccaatagtcctttactgagaagaaacccctccccatctatagtgaagcctggctcgcgaagaaattcctccgtgaggaagaagaaacctgctttgaagaagatcaagtcttccacttctgtgcaatcttcggctactccgccttcgaacacctcatccaatccggatataaaatgctccaactgcacaacctccaccactccgctgtggaggaaggaccccaagggtcttcccctgtgcaatgcttgcggcctcttcctcaagctccacggcgtcacaaggcctctgtcgttgaagactgacatcattaagaagagacagaggtcgtctaccaagataaacaacaatataacgccccctccatcgtcgtctctcaatccgggagcagcagggaaaaagaaaaactatacagcaagtgtggcagcgtccaagaggaagaactcactgaacattgtcgcacctttgaagtctcaggacatacccattccgaagattgcctcaccttccatcccacaatacctccgctctaacactcgccaccacctttcgagttccgtacccatcgaggcggaaacgttctccagctttcggcctgatatgaatatgactatgaacatgaaccttcacaacgcctcaacctcctccttcaacaatgaagccttctggaagcctttggactccgcaatagatcatcattctggagacacaaatccaaactcaaacatgaacaccactccaaatggcaatctgagcctggattggttgaatctgaatttatag

SEQ ID NO: 3492 - DNA, 1533 bp, Artificial Sequence
  Description of Artificial Sequence: Synthetic polynucleotide
atgcacgttttctttcctttgcttttccgcccttcccctgttttgttcatcgcatgtgcatatatatatatagatatatatatacattgtacaaggtgcacggtagtgaacataactatgagcacgaacagagtcccgaacctcgacccggacttgaatttaaacaaagaaatctgggacttgtactccagcgcccagaaaatattgcccgattctaaccgtattttgaacctttcttggcgtttgcataaccgcacgtctttccatagaattaaccgcataatgcaacattctaactctattatggacttctccgcctctccctttgccagcggcgtgaacgccgctggcccaggcaacaacgacctcgatgacaccgatactgataaccagcaattcttcctttctgacatgaacctcaacggatcttctgtttttgaaaatgtgtttgacgacgatgacgatgatgatgacgtggagacgcactccattgtgcactctgacttactcaacgacatggacagcgcttcccagcgtgcttctcataatgcttctggtttccctaattttttggacacttcctgctcttcctccttcgatgaccactttattttcaccaataacttaccatttttaaataataatagcattaataataatcatagtcataatagtagtcataataataacagtcccagcatcgccaataatacaaacgcaaacacaaacacaaacacaagtgcaagtacaaacaccaatagtcctttattaagaagaaacccctccccatctatagtgaagcctggcagtagaagaaattcctccgtgaggaagaagaaacctgctttgaagaagatcaagtcttccacttctgtgcaatcttctgctactccgccttccaacacctcttccaatccggatataaaatgctccaactgcacaacctccaccactccgttatggaggaaggaccccaagggtcttcccctttgcaatgcttgcggcctcttcctcaagctccacggcgtcacaaggcctttatctttgaagactgacatcattaagaagagacagaggtcttctaccaagataaacaacaatataacgccccctccatcttcttctctcaatccgggagcagcagggaaaaagaaaaactatacagcaagtgtggcagcgtccaagaggaagaactctttgaacattgtcgcacctttgaagtctcaggacatacccattccgaagattgcctctccttccatcccacaatacctccgctctaacactcgccaccacctttccagttccgtacccatcgaggcggaaacgttctccagctttagacctgatatgaatatgactatgaacatgaaccttcacaacgccagcacctcctccttcaacaatgaagccttctggaagcctttggactccgcaatagatcatcattctggagacacaaatccaaactccaacatgaacaccactccaaatggcaatttgagcttagattggttgaatttgaatttatga

SEQ ID NO: 3493 - DNA, 369 bp, Saccharomyces cerevisiae
atggtcaaattaacttcaatcgccgctggtgtcgccgccattgccgctggtgcctccgctgcagcaaccactacactatctcaatctgacgaaagagttaatttggttgaattaggtgtctatgtttccgatatcagagctcatttggctgaatactactccttccaagctgcccacccaactgaaacttatccagttgaaattgcagaagctgttttcaactacggtgatttcaccaccatgttgactggtattcccgccgaccaagttaccagagttatcactggtgttccatggtactctagcagattaaagccagctatctctagcgctctatccgcagacggtatctacactattgcaaattag

SEQ ID NO: 3494 - DNA, 369 bp, Artificial Sequence
  Description of Artificial Sequence: Synthetic polynucleotide
atggtcaaattaacttctatcgccgctggtgtcgccgccattgccgctggtgcctccgctgcagcaaccactacattatctcaatctgacgaaagagttaatttggttgaattaggtgtctatgtttccgatatcagagctcatttggctgaatactactccttccaagctgcccacccaactgaaacttatccagttgaaattgcagaagctgttttcaactacggtgatttcaccaccatgttgactggtattcccgccgaccaagttaccagagttatcactggtgttccatggtactctagcagattaaagccagctatctctagcgctttgtccgcagacggtatctacactattgcaaattga

SEQ ID NO: 3495 - DNA, 354 bp, Saccharomyces cerevisiae
atgatagttgaactttattcaaatatcatcgaagtaagaagatatactactaaagactccctttgctctatattcgagtcaggctccaccagtcatttcgaaattaaccagttacaggtcaaaagactaaacttactgcaaaaccaatttgcttctgttttcacttctttccaccccaaagataatacaaagggcatacatatcaattttttttcacctgtcactaggataactgaccttcaatattcctttttttatacgaatcagatactgttcggtacacgatatctaattaaaatgattcaaaactttgtaacaggtaaagttttcactagaaccaatcaatccaagtga

SEQ ID NO: 3496 - DNA, 354 bp, Artificial Sequence
  Description of Artificial Sequence: Synthetic polynucleotide
atgatagttgaactttattctaatatcatcgaagtaagaagatatactactaaagactccctttgctctatattcgagagtggctccaccagtcatttcgaaattaaccagttacaggtcaaaagattgaacttattacaaaaccaatttgcttctgttttcacttctttccaccccaaagataatacaaagggcatacatatcaattttttttctcctgtcactaggataactgaccttcaatattcctttttttatacgaatcagatattattcggtacaagatatttgattaaaatgattcaaaactttgtaacaggtaaagttttcactagaaccaatcaatccaagtga

SEQ ID NO: 3497 - DNA, 1500 bp, Saccharomyces cerevisiae
atgttaagaatcagatcactcctaaataataagcgtgccttttcgtccacagtcaggacattgaccattaacaagtcacatgatgtagtcatcatcggtggtggccctgctggttacgtggctgctatcaaagctgctcaattgggatttaacactgcatgtgtagaaaaaagaggcaaattaggcggtacctgtcttaacgttggatgtatcccctccaaagcacttctaaataattctcatttattccaccaaatgcatacggaagcgcaaaagagaggtattgacgtcaacggtgatatcaaaattaacgtagcaaacttccaaaaggctaaggatgacgctgttaagcaattaactggaggtattgagcttctgttcaagaaaaataaggtcacctattataaaggtaatggttcattcgaagacgaaacgaagatcagagtaactcccgttgatgggttggaaggcactgtcaaggaagaccacatactagatgttaagaacatcatagtcgccacgggctctgaagttacacccttccccggtattgaaatagatgaggaaaaaattgtctcttcaacaggtgctctttcgttaaaggaaattcccaaaagattaaccatcattggtggaggaatcatcggattggaaatgggttcagtttactctagattaggctccaaggttactgtagtagaatttcaacctcaaattggtgcatctatggacggcgaggttgccaaagccacccaaaagttcttgaaaaagcaaggtttggacttcaaattaagcaccaaagttatttctgcaaagagaaacgacgacaagaacgtcgtcgaaattgttgtagaagatactaaaacgaataagcaagaaaatttggaagctgaagttttgctggttgctgttggtagaagaccttacattgctggcttaggggctgaaaagattggattagaagtagacaaaaggggacgcctagtcattgatgaccaatttaattccaagttcccacacattaaagtggtaggagatgttacatttggtccaatgctggctcacaaagccgaagaggaaggtattgcagctgtcgaaatgttgaaaactggtcacggtcatgtcaactataacaacattccttcggtcatgtattctcacccagaagtagcatgggttggtaaaaccgaagagcaattgaaagaagccggcattgactataaaattggtaagttcccctttgcggccaattcaagagccaagaccaaccaagacactgaaggtttcgtgaagattttgatcgattccaagaccgagcgtattttgggggctcacattatcggtccaaatgccggtgaaatgattgctgaagctggcttagccttagaatatggcgcttccgcagaagatgttgctagggtctgccatgctcatcctactttgtccgaagcatttaaggaagctaacatggctgcctatgataaagctattcattgttga

SEQ ID NO: 3498 - DNA, 1500 bp, Artificial Sequence
  Description of Artificial Sequence: Synthetic polynucleotide
atgttaagaatcagaagtctcttgaataataagcgtgccttttcttccacagtcaggacattgaccattaacaagagtcatgatgtagtcatcatcggtggtggccctgctggttacgtggctgctatcaaagctgctcaattgggatttaacactgcatgtgtagaaaaaagaggcaaattaggcggtacctgtcttaacgttggatgtatcccctccaaagcacttttgaataattctcatttattccaccaaatgcatacggaagcgcaaaagagaggtattgacgtcaacggtgatatcaaaattaacgtagcaaacttccaaaaggctaaggatgacgctgttaagcaattaactggaggtattgagcttttattcaagaaaaataaggtcacctattataaaggtaatggttctttcgaagacgaaacgaagatcagagtaactcccgttgatgggttggaaggcactgtcaaggaagaccacatattggatgttaagaacatcatagtcgccacgggctctgaagttacacccttccccggtattgaaatagatgaggaaaaaattgtctcttctacaggtgctctttctttaaaggaaattcccaaaagattaaccatcattggtggaggaatcatcggattggaaatgggttctgtttactctagattaggctccaaggttactgtagtagaatttcaacctcaaattggtgcatctatggacggcgaggttgccaaagccacccaaaagttcttgaaaaagcaaggtttggacttcaaattaagcaccaaagttatttctgcaaagagaaacgacgacaagaacgtcgtcgaaattgttgtagaagatactaaaacgaataagcaagaaaatttggaagctgaagttttgttggttgctgttggtagaagaccttacattgctggcttaggggctgaaaagattggattagaagtagacaaaaggggacgcttggtcattgatgaccaatttaattccaagttcccacacattaaagtggtaggagatgttacatttggtccaatgttggctcacaaagccgaagaggaaggtattgcagctgtcgaaatgttgaaaactggtcacggtcatgtcaactataacaacattccttctgtcatgtattctcacccagaagtagcatgggttggtaaaaccgaagagcaattgaaagaagccggcattgactataaaattggtaagttcccctttgcggccaattctagagccaagaccaaccaagacactgaaggtttcgtgaagattttgatcgattccaagaccgagcgtattttgggggctcacattatcggtccaaatgccggtgaaatgattgctgaagctggcttagccttagaatatggcgcttccgcagaagatgttgctagggtctgccatgctcatcctactttgtccgaagcatttaaggaagctaacatggctgcctatgataaagctattcattgttga

SEQ ID NO: 3499 - DNA, 234 bp, Saccharomyces cerevisiae
atggtttctacccctgaactgaagaaatatatggacaagaagatattgctgaatataaatggatctaggaaagtggcaggaattttgcgaggctacgatattttcttaaacgtcgttcttgatgatgcaatggagataaatggtgaagaccctgccaataaccaccagctaggcttgcagaccgtcattaggggcaactccataatatccctagaggctctagatgccatataa

SEQ ID NO: 3500 - DNA, 234 bp, Artificial Sequence
  Description of Artificial Sequence: Synthetic polynucleotide
atggtttctacccctgaattgaagaaatatatggacaagaagatattgttgaatataaatggatctaggaaagtggcaggaattttgagaggctacgatattttcttaaacgtcgttcttgatgatgcaatggagataaatggtgaagaccctgccaataaccaccagttaggcttgcagaccgtcattaggggcaactccataatatccttggaggctttagatgccatatga

SEQ ID NO: 3501 - DNA, 480 bp, Saccharomyces cerevisiae
atgagcttacccgatggattttatataaggcgaatggaagagggggatttggaacaggtcactgagacgctaaaggttttgaccaccgtgggcactattacccccgaatccttcagcaaactcataaaatactggaatgaagccacagtatggaatgataacgaagataaaaaaataatgcaatataaccccatggtgattgtggacaagcgcaccgagacggttgccgctacggggaatatcatcatcgaaagaaagatcattcatgaactggggctatgtggccacatcgaggacattgcagtaaactccaagtatcagggccaaggtttgggcaagctcttgattgatcaattggtaactatcggctttgactacggttgttataagattattttagattgcgatgagaaaaatgtcaaattctatgaaaaatgtgggtttagcaacgcaggcgtggaaatgcaaattagaaaatag

SEQ ID NO: 3502 - DNA, 480 bp, Artificial Sequence
  Description of Artificial Sequence: Synthetic polynucleotide
atgagcttacccgatggattttatataaggagaatggaagagggggatttggaacaggtcactgagacgttgaaggttttgaccaccgtgggcactattacccccgaatccttcagcaaactcataaaatactggaatgaagccacagtatggaatgataacgaagataaaaaaataatgcaatataaccccatggtgattgtggacaagcgcaccgagacggttgccgctacggggaatatcatcatcgaaagaaagatcattcatgaattggggctttgtggccacatcgaggacattgcagtaaactccaagtatcagggccaaggtttgggcaagctcttgattgatcaattggtaactatcggctttgactacggttgttataagattattttagattgcgatgagaaaaatgtcaaattctatgaaaaatgtgggtttagcaacgcaggcgtggaaatgcaaattagaaaatga

SEQ ID NO: 3503 - DNA, 1536 bp, Saccharomyces cerevisiae
atggctttccaacaaggtgtattgtcaaggtgttccggtgtctttagacaccatgtgggacattctcgccatatcaataatattctttatagacatgccatcgcgtttgcatccatcgctccacgaataccaaaatctagcttccatacttctgcaatcagaaacaacgaagcattcaaggacccgtacgatactttaggcttgaagaaatctgctacaggtgcggaaatcaaaaaagcatactacaaactggcaaagaagtaccacccggatatcaacaaggaaccggatgctgagaagaaattccacgatttacagaacgcttatgaaattctgtcagacgaaacgaagaggcagcagtacgatcaatttgggcccgctgccttcggcggcggcggtgccgctggaggtgccggtggtggtagtggctctccctttggttcccaatttcatgatttctcaggattcaccagtgcaggcggctcgccatttggcggtatcaattttgaagacctgtttggtgctgcatttggtggtggtggccgcggtagcggtggcgcaagcaggtcgtcatctatgttcagacaatataggggcgacccaatcgagattgtccataaagtgtctttcaaggacgcagtgtttgggtccaagaacgttcagttaagattctctgcgctggacccttgtagtacctgttcagggacgggaatgaaaccaaacacgcataaggtcagttgtagcacttgtcacggaacaggaaccactgttcacattaggggcggatttcagatgatgtcgacttgtcctacttgcaacggtgaaggtaccatgaaacggcctcaggacaattgtaccaagtgccatggtgagggtgttcaggtcaacagggcaaagacaattacggtggacttgccacatggattacaggacggcgacgtggtcaggatccctggccaaggctcataccctgacatcgctgtagaggcggacttgaaagattcagtcaagttatcaagaggtgatattttggtgagaattcgtgtcgacaaggatcccaacttttcgataaagaacaagtacgatatttggtacgacaaggagattcctataaccacagctgcacttggtggtactgtcactatccccactgtggagggacaaaagatcaggataaaggtcgctccagggactcaatacaatcaagtgatatccattcctaacatgggtgttcctaaaacatcaaccattcgcggtgatatgaaagtccagtacaagatcgttgttaagaaaccgcaatcgctggcagaaaaatgcttgtgggaggcactggcagatgtcaccaacgatgacatggccaagaaaaccatgcaaccgggcacagccgcgggtacagccattaatgaagagatactgaagaaacaaaaacaagaagaggaaaaacacgcaaaaaaggatgacgacaacactttgaagagactagaaaatttcattaccaacacattcaggaagatcaaaggtgacaaaaaaaattaa

SEQ ID NO: 3504 - DNA, 1536 bp, Artificial Sequence
  Description of Artificial Sequence: Synthetic polynucleotide
atggctttccaacaaggtgtattgagtaggtgttccggtgtctttagacaccatgtgggacattctcgccatatcaataatattctttatagacatgccatcgcgtttgcatccatcgctccaagaataccaaaatctagcttccatacttctgcaatcagaaacaacgaagcattcaaggacccgtacgatactttaggcttgaagaaatctgctacaggtgcggaaatcaaaaaagcatactacaaattggcaaagaagtaccacccggatatcaacaaggaaccggatgctgagaagaaattccacgatttacagaacgcttatgaaattttaagtgacgaaacgaagaggcagcagtacgatcaatttgggcccgctgccttcggcggcggcggtgccgctggaggtgccggtggtggtagtggctctccctttggttcccaatttcatgatttcagtggattcaccagtgcaggcggctctccatttggcggtatcaattttgaagacttatttggtgctgcatttggtggtggtggccgcggtagcggtggcgcaagcaggagttcttctatgttcagacaatataggggcgacccaatcgagattgtccataaagtgtctttcaaggacgcagtgtttgggtccaagaacgttcagttaagattctctgcgttggacccttgtagtacctgttctgggacgggaatgaaaccaaacacgcataaggtcagttgtagcacttgtcacggaacaggaaccactgttcacattaggggcggatttcagatgatgtctacttgtcctacttgcaacggtgaaggtaccatgaaaagacctcaggacaattgtaccaagtgccatggtgagggtgttcaggtcaacagggcaaagacaattacggtggacttgccacatggattacaggacggcgacgtggtcaggatccctggccaaggctcttaccctgacatcgctgtagaggcggacttgaaagattctgtcaagttatctagaggtgatattttggtgagaattcgtgtcgacaaggatcccaacttttccataaagaacaagtacgatatttggtacgacaaggagattcctataaccacagctgcacttggtggtactgtcactatccccactgtggagggacaaaagatcaggataaaggtcgctccagggactcaatacaatcaagtgatatccattcctaacatgggtgttcctaaaacatctaccattcgcggtgatatgaaagtccagtacaagatcgttgttaagaaaccgcaaagtttagcagaaaaatgcttgtgggaggcattggcagatgtcaccaacgatgacatggccaagaaaaccatgcaaccgggcacagccgcgggtacagccattaatgaagagatattgaagaaacaaaaacaagaagaggaaaaacacgcaaaaaaggatgacgacaacactttgaagagattagaaaatttcattaccaacacattcaggaagatcaaaggtgacaaaaaaaattga

SEQ ID NO: 3505 - DNA, 495 bp, Saccharomyces cerevisiae
atgcttgcgtatacctttccttctttcaatttctacgtcaatgggtttttttccttccttttccttttccttttccttttcccctctttactacgtttctatgttattttgtgccgccccctgcaagttgcaacatatccccttaacagatgccagcaatattctagtcttgctatttttaccgcctctggcttttggcttctagtccttgtcccaagagccaagggcccgtcaacacgtcgtcattgctaccgccagctggcacccacacatcaccgaccctttttttccattttcggctgggccgttagtgggatccgcccgctcccggagattttcacttggatttgcgcgtcccctttttttcttcattctctgactccccctaccttctcccacttttctgtgtatcaagaggaaaagaaggagaaaaggagaactccgaaaaataccgaacaagagggtaacagaatgtgcatttggatgagcgggtaa

SEQ ID NO: 3506 - DNA, 495 bp, Artificial Sequence
  Description of Artificial Sequence: Synthetic polynucleotide
atgcttgcgtatacctttccttctttcaatttctacgtcaatgggtttttttccttccttttccttttccttttccttttcccctctttattacgtttctatgttattttgtgccgccccttgcaagttgcaacatatccccttaacagatgccagcaatattctagtcttgctatttttaccgcctctggcttttggcttttggtccttgtcccaagagccaagggcccgtccacacgtcgtcattgctaccgccagttagcacccacacatcacaggccctttttttccattttcggctgggccgttagtgggatccgcccgctcccggagattttcacttggatttgcgcgtcccctttttttcttcattctttgactccccctaccttctcccacttttctgtgtatcaagaggaaaagaaggagaaaaggagaactccgaaaaataccgaacaagagggtaacagaatgtgcatttggatgagcgggtga

SEQ ID NO: 3507 - DNA, 330 bp, Saccharomyces cerevisiae
atgtctgacgcaggtagaaaaggattcggtgaaaaagcttctgaagctttgaagccagactctcaaaagtcatacgctgaacaaggtaaggaatacatcactgacaaggccgacaaggtcgctggtaaggttcaaccagaagacaacaagggtgtcttccaaggtgtccacgactctgccgaaaaaggcaaggataacgctgaaggtcaaggtgaatctttggcagaccaagctagagattacatgggagccgccaagtccaagttgaacgatgccgtcgaatatgtttccggtcgtgtccacggtgaagaagacccaaccaagaagtaa

SEQ ID NO: 3508 - DNA, 330 bp, Artificial Sequence
  Description of Artificial Sequence: Synthetic polynucleotide
atgtctgacgcaggtagaaaaggattcggtgaaaaagcttctgaagctttgaagccagactctcaaaagtcctacgctgaacaaggtaaggaatacatcactgacaaggccgacaaggtcgctggtaaggttcaaccagaagacaacaagggtgtcttccaaggtgtccacgactctgccgaaaaaggcaaggataacgctgaaggtcaaggtgaatctttggcagaccaagctagagattacatgggagccgccaagtccaagttgaacgatgccgtcgaatatgtttccggtcgtgtccacggtgaagaagacccaaccaagaagtga

SEQ ID NO: 3509 - DNA, 2079 bp, Saccharomyces cerevisiae
atggggaagagagtatacgatccaattcatgatactttccaactacgagaagacaattctgacgaaacaaaagcagattctccaatgcaatctgtaaaatcgggatcacaagaagaagcatccccaagctccattcaatcagagaccgagactgtgactacaaaaagcattccagttatacacgagattgaaatcgacgataaaaatgatgatgactccacgcaaagtgaagaagaaaataccaacatcttgctcaacttcgaaccttctacagtgcctgaagcaacaggagcaagtacggcaacggggccagtgacaactaacactgttagaaggaaacccaaagaaagcaatgccagtaaatacaatcgtcatttgaagaaacctgacggcgagccattcaatagaaaggacattcagttcagtttcatgcaagaactgttgatggacaagaggcaaatcttcactaatgttctaaaacccctatacaagaactctattgtacccattaatatcgatggcgataaattatcaatcaacgtgaccgacaaagagtacgatgcaaggacatttgtatttaacgataaattgacgttcgcacaattgtatgtgttgacaatagccacttctatcaaatgttccaaaattctcagagataaactattattagaccaacaagtagcattttctacttgtgttttagcgttattggtcaacattggtaggttgaacaccactataaatttttatttagaaatgacatcgcaattgagaacttttcactccgtgccagttttacaattacatgccaatgatccgaaacttttgcaggatacacctagactgaaatctattctgaaaaatctgccgtggggcaatgagcaactctcattgatggagacttacaaaaaggtcgaccaaaatgatggtgaagtggacaccgttaacaaatttaacattattaatatgttgtttagcatatgtgataattccggcctaattgacaagaggtttctttccaagtatgtggaagtcgaatcgaaagctcaggagcaagatatggtagatgaacagaatgaagtaaaagaaacggaagcggaaaatgaaaaacaagaatcaaaagcagcttatgcaacaacattatttgatatactggactattcgaaatacgagccaaaggatagatcaaacatattgatttggctgctatatattcatttggagacaaacttaagccaggaggaggtcgaagaatcagtaagatttttcaatggattggaagatggtgcacctgctggaaagttcattttaaggtgtacggaacgcagttacgacacggatcctgaagatgaattagagttcggagccaaccaacgcatcaagagaagagaattcatgagtaagatggaggagggtaggaagcgcgagcgtaccaatgttacagaggtgaaaaagcccagtatcggtggtgacaagagtgaagaggacggtgaaggggaagatgacaagagcgaggagactgtagaggagactagatcacttttgacgcctacgcccatactggaatcttcttcacccatgacattgaacaggaaaaaagtcacaccacaactgcccaaagtaacgccagcagcaccaacagaaacagaagaagaaatcacctccgctgctatcattgacaaaaacgatttaaatctaacaccattgaaaaaatacaatagttcggctacggtaaacaaggtcgacaagctaatatcgctagatctgaacaagcatgtgtcagaaaatggtaagacacaagaggagtttctcgccgatttgaaaaaatcccaggtgccaaacaggttgaaaagacgcgatattgggttaatcaagatattcaatgaatttgaagacatccccgtagcgtcagtgcttgggattcgcggtaaaaagagaaagaaattcaaagataatttgcttggatttgagacggatttcatgaaaaatctcggcgcttcaaagaaagtacttttaaataaaatcgaacgcgcggaaattgatgacgaagaagcaaccgccatgtttaagctggagtga

SEQ ID NO: 3510 - DNA, 2079 bp, Artificial Sequence
  Description of Artificial Sequence: Synthetic polynucleotide
atggggaagagagtatacgatccaattcatgatactttccaattaagagaagacaattctgacgaaacaaaagcagattctccaatgcaatctgtaaaaagtggatctcaagaagaagcatccccaagctccattcaaagtgagaccgagactgtgactacaaaaagcattccagttatacacgagattgaaatcgacgataaaaatgatgatgactccacgcaaagtgaagaagaaaataccaacatcttgctcaacttcgaaccttctacagtgcctgaagcaacaggagcaagtacggcaacggggccagtgacaactaacactgttagaaggaaacccaaagaaagcaatgccagtaaatacaatcgtcatttgaagaaacctgacggcgagccattcaatagaaaggacattcagttcagtttcatgcaagaattattgatggacaagaggcaaatcttcactaatgttttgaaacccttgtacaagaactctattgtacccattaatatcgatggcgataaattatctatcaacgtgaccgacaaagagtacgatgcaaggacatttgtatttaacgataaattgacgttcgcacaattgtatgtgttgacaatagccacttctatcaaatgttccaaaattctcagagataaattattattagaccaacaagtagcattttctacttgtgttttagcgttattggtcaacattggtaggttgaacaccactataaatttttatttagaaatgacatctcaattgagaacttttcactccgtgccagttttacaattacatgccaatgatccgaaacttttgcaggatacacctagattgaaatctattttgaaaaatttaccgtggggcaatgagcaactctctttgatggagacttacaaaaaggtcgaccaaaatgatggtgaagtggacaccgttaacaaatttaacattattaatatgttgtttagcatatgtgataattccggcttaattgacaagaggtttctttccaagtatgtggaagtcgaaagtaaagctcaggagcaagatatggtagatgaacagaatgaagtaaaagaaacggaagcggaaaatgaaaaacaagaaagtaaagcagcttatgcaacaacattatttgatatattggactattctaaatacgagccaaaggatagatctaacatattgatttggttgttatatattcatttggagacaaacttaagccaggaggaggtcgaagaaagtgtaagatttttcaatggattggaagatggtgcacctgctggaaagttcattttaaggtgtacggaacgcagttacgacacggatcctgaagatgaattagagttcggagccaaccaacgcatcaagagaagagaattcatgagtaagatggaggagggtaggaagcgcgagcgtaccaatgttacagaggtgaaaaagcccagtatcggtggtgacaagagtgaagaggacggtgaaggggaagatgacaagagcgaggagactgtagaggagactagatctcttttgacgcctacgcccatattggaatcttcttctcccatgacattgaacaggaaaaaagtcacaccacaattgcccaaagtaacgccagcagcaccaacagaaacagaagaagaaatcacctccgctgctatcattgacaaaaacgatttaaatttgacaccattgaaaaaatacaatagttctgctacggtaaacaaggtcgacaagttaatatctttagatttgaacaagcatgtgtctgaaaatggtaagacacaagaggagtttctcgccgatttgaaaaaatcccaggtgccaaacaggttgaaaagacgcgatattgggttaatcaagatattcaatgaatttgaagacatccccgtagcgtctgtgcttgggattcgcggtaaaaagagaaagaaattcaaagataatttgcttggatttgagacggatttcatgaaaaatctcggcgcttccaagaaagtacttttaaataaaatcgaacgcgcggaaattgatgacgaagaagcaaccgccatgtttaagttggagtga

SEQ ID NO: 3511 - DNA, 447 bp, Saccharomyces cerevisiae
atgcccaaatcccgaccaaaaaggaccattgcgtcttcctcgtcagttttttatggaagttcacctttccaaaatgatggctacatcaaagtaatggaactcgtatcacacattgtcattgaaataaatcattcacctaccgcaacaacggatgaaacgagaaagcagaataatccggagctgaaagtgaaagaaccagtttgtaacctcaagaagtgggaaaataacactaactttatattggaagatcatacgaagaataaaacaaaactttctagcacagataggatacgtaagtggtttagaagacatatattaaaggaagagatcgaaatcctttcccatggaaaacaattgagtagtattgatgaggattattgcccttcaaatgttcttgtaggatgttcaagagatctaaataaactcagatcatttcaaaatttttag

SEQ ID NO: 3512 - DNA, 447 bp, Artificial Sequence
  Description of Artificial Sequence: Synthetic polynucleotide
atgcccaaatccagaccaaaaaggaccattgcgtcttcctcttctgttttttatggaagtagccctttccaaaatgatggctacatcaaagtaatggaactcgtaagccacattgtcattgaaataaatcattctcctaccgcaacaacggatgaaacgagaaagcagaataatccggagttgaaagtgaaagaaccagtttgtaacctcaagaagtgggaaaataacactaactttatattggaagatcatacgaagaataaaacaaaactttctagcacagataggatacgtaagtggtttagaagacatatattaaaggaagagatcgaaatcctttcccatggaaaacaattgagtagtattgatgaggattattgcccttccaatgttcttgtaggatgttccagagatttgaataaactcagatcttttcaaaatttttga

SEQ ID NO: 3513 - DNA, 1641 bp, Saccharomyces cerevisiae
atggttagttcaagtgtttccattttggggactagcgccaaggcatccacttctctaagtagaaaggatgaaattaaactaacccctgaaacaagggaagctagcttggacattccatacaaacccattattgcatactggacggtgatgggtctctgtctgatgattgcctttggtggattcatttttggttgggatacaggaaccatttcagggtttattaaccaaacagatttcaagagaaggtttggtgagttacaaagggacggcagttttcaactatcagatgtcaggacagggctaattgtcggtatcttcaacataggttgtgctttaggtggcctaacgctgggacgcctgggcgatatttatgggcgtaaaatcggcttaatgtgtgttatactggtgtatgttgttggtatcgtgatccagattgcttcctctgacaaatggtatcaatattttattggtagaattgtttctggaatgggtgttggaggtgttgctgtgctgtcgccaactttgatctcagaaatttccccaaagcacctaagaggcacttgtgtctctttttaccagctaatgattacccttggaattttcttgggctactgtaccaattatggtacaaagaaatattcaaattcaatacagtggcgggttcccttgggtttgtgttttgcgtgggcaatctttatggtgattggaatggttatggttccggaatcgcccagatatttagtagaaaaaggtaagtatgaagaagctagaaggtctttggccaaatcaaacaaggtcacagttactgatccaggcgttgtttttgagtttgatactatagttgcaaatatggaattagaaagggctgttggaaatgccagttggcacgaactcttctcaaataaaggagcaattctaccaagggtaataatgggaatcgttatccagtcactgcaacagcttactggctgtaattattttttctactacggcacgaccattttcaatgctgttggaatgcaagactctttcgagacttccattgtccttggggctgttaattttgcttctacatttgttgcactatacattgtggataaatttgggcgtcgaaaatgtttattgtgggggtctgcctcgatggcaatttgtttcgtcatattcgccaccgttggcgtcactagattatggccacaagggaaagaccaaccttcttcgcaaagtgctggtaatgttatgatcgtttttacttgtttcttcattttctcttttgccattacttgggctcctatcgcctatgtcattgtggcagaaacttatccattaagagttaaaaatcgtgccatggccattgcggttggtgcgaactggatgtggggtttcttgattggatttttcacaccctttatcactagatccataggattttcttatggctatgttttcatgggttgcttaatcttttcgtacttctacgttttcttctttgtttgcgaaacaaagggattaactctggaggaagttaatgaaatgtacgaagaaagaataaagccatggaagtccggaggttggattcccagttctagaagaacaccacaaccaacaagcagtacaccattagttattgttgatagtaaataa

SEQ ID NO: 3514 - DNA, 1641 bp, Artificial Sequence
  Description of Artificial Sequence: Synthetic polynucleotide
atggttagtagtagtgtttccattttggggactagcgccaaggcatccacttctttgagtagaaaggatgaaattaaattgacccctgaaacaagggaagctagcttggacattccatacaaacccattattgcatactggacggtgatgggtctctgtttgatgattgcctttggtggattcatttttggttgggatacaggaaccatttctgggtttattaaccaaacagatttcaagagaaggtttggtgagttacaaagggacggcagttttcaattaagtgatgtcaggacagggttgattgtcggtatcttcaacataggttgtgctttaggtggcttgacgttgggacgccttggcgatatttatgggcgtaaaatcggcttaatgtgtgttatattggtgtatgttgttggtatcgtgatccagattgcttcctctgacaaatggtatcaatattttattggtagaattgtttctggaatgggtgttggaggtgttgctgtgttatctccaactttgatcagtgaaatttccccaaagcacttgagaggcacttgtgtctctttttaccagttgatgattacccttggaattttcttgggctactgtaccaattatggtacaaagaaatattctaattctatacagtggagagttcccttgggtttgtgttttgcgtgggcaatctttatggtgattggaatggttatggttccggaaagtcccagatatttagtagaaaaaggtaagtatgaagaagctagaaggtctttggccaaaagtaacaaggtcacagttactgatccaggcgttgtttttgagtttgatactatagttgcaaatatggaattagaaagggctgttggaaatgccagttggcacgaactcttcagtaataaaggagcaattttaccaagggtaataatgggaatcgttatccagtctttacaacagcttactggctgtaattattttttctactacggcacgaccattttcaatgctgttggaatgcaagactctttcgagacttccattgtccttggggctgttaattttgcttctacatttgttgcattgtacattgtggataaatttgggcgtcgtaaatgtttattgtgggggtctgcctctatggcaatttgtttcgtcatattcgccaccgttggcgtcactagattatggccacaagggaaagaccaaccttcttctcaaagtgctggtaatgttatgatcgtttttacttgtttcttcattttctcttttgccattacttgggctcctatcgcctatgtcattgtggcagaaacttatccattaagagttaaaaatcgtgccatggccattgcggttggtgcgaactggatgtggggtttcttgattggatttttcacaccctttatcactagatccataggattttcttatggctatgttttcatgggttgcttaatcttttcttacttctacgttttcttctttgtttgcgaaacaaagggattaactttagaggaagttaatgaaatgtacgaagaaagaataaagccatggaagtccggaggttggattcccagttctagaagaacaccacaaccaacaagcagtacaccattagttattgttgatagtaaatga

SEQ ID NO: 3515 - DNA, 285 bp, Saccharomyces cerevisiae
atggaccgatctttgcaagtatatatctgtatgtatccatatttagatggcagcaagcaatatagatttgatgagcttatatcattttatcgtccttgtccaaaaagtcttgataacattaaaagtcactaccgtcaaatccatcatcaaatccgccgtcgaacccaccagcatcatcaaatccgccgtcggacccaccagcatcatcaccgtagtaattgttctcgacaacgacagtgtctggtccgtcatagttgtggtcgtcaaatgcgtgttctagcatag

SEQ ID NO: 3516 - DNA, 285 bp, Artificial Sequence
  Description of Artificial Sequence: Synthetic polynucleotide
atggacagatctttgcaagtatatatctgtatgtatccatatttagatggcagcaagcaatatagatttgatgagcttatatccttttatcgtccttgtccaaaaagtcttgataacattaaaagtcactaccgtcaaatccatcatcaaatccgccgtagaacccaccagcatcatcaaatccgccgtagaacccaccagcatcatcaccgtagtaattgttctagacaaagacagtgtttggtccgtcatagttgtggtcgtcaaatgcgtgttttagcatga

SEQ ID NO: 3517 - DNA, 636 bp, Saccharomyces cerevisiae
atggctcaaagtaaaagtaatcctcctcaagtgccttctggctggaaggctgtttttgatgatgaataccagacttggtattatgtagatttatctacgaacagctctcagtgggaaccaccaaggggaacaacatggccaagacccaaaggtcctccaccaggtgttaacaatgagaagagttctcgtcaacaggcagaccaggctcctccaccttattcttctcaatcaacaccgcaagtgcaagcaggggcccaagcacagcaacctcgttactatcagcctcaacagcctcagtaccctcaataccctcaacagcagcgttactatcctcaacaagcccctatgccagcagcagcaccacagcaagcatactatggaactgcgccaagcaccagtaaaggtagtggacacggcggtgccatgatgggtggtttacttggtgttggtgcgggtttgttaggtggagctatgctagaacacgcatttgacgaccacaactatgacggaccagacactgtcgttgtcgagaacaattactacggtgatgatgctggtgggtccgacggcggatttgatgatgctggtgggttcgacggcggatttgatgatggatttgacggtagtgacttttaa

SEQ ID NO: 3518 - DNA, 636 bp, Artificial Sequence
  Description of Artificial Sequence: Synthetic polynucleotide
atggctcaaagtaaaagtaatcctcctcaagtgccttctggctggaaggctgtttttgatgatgaataccagacttggtattatgtagatttatctacgaacagctctcagtgggaaccaccaaggggaacaacatggccaagacccaaaggtcctccaccaggtgttaacaatgagaagagttctcgtcaacaggcagaccaggctcctccaccttattcttctcaaagtacaccgcaagtgcaagcaggggcccaagcacagcaacctcgttactatcagcctcaacagcctcagtaccctcaataccctcaacagcagcgttactatcctcaacaagcccctatgccagcagcagcaccacagcaagcatactatggaactgcgccaagcaccagtaaaggtagtggacacggcggtgccatgatgggtggtttacttggtgttggtgcgggtttgttaggtggagctatgttggaacacgcatttgacgaccacaactatgacggaccagacactgtcgttgtcgagaacaattactacggtgatgatgctggtgggtccgacggcggatttgatgatgctggtgggttcgacggcggatttgatgatggatttgacggtagtgacttttga

SEQ ID NO: 3519 - DNA, 2340 bp, Saccharomyces cerevisiae
atggggtcgtttcccttagctgagtttccattacgtgatatccctgttccttatagctaccgtgtgtctggcggtatagcttcctcaggtagtgttactgcgcttgttactgccgctggcactcatcgaaactcgtccacggctaagacagttgagacagaagacggcgaagaagatatcgatgagtatcagaggaaaagagcagctggttctggcgaatccactcctgaacgcagtgatttcaaaagggtaaaacatgataatcacaaaaccctccatccagttaacttacagaacaccggtgcagcgtctgtggataatgacggtctgcacaatttaacagatatatccaacgatgcagaaaaacttttgatgtctgtggatgatggttctgccgcaccttctacattgagtgtaaacatgggagtggcatctcataatgttgctgctcccactaccgtcaatgcggcaacaataactggcagtgatgttagtaacaatgttaatagtgctactattaacaatcctatggaggaaggagcgctgccgttatcacccactgcttcctctccaggtaccacaactcctttagctaaaactacgaaaactatcaacaacaataataatatcgccgatttgatagaatccaaagattctataatctcccctgaatacctttctgatgagattttcagcgcaataaacaataatctccctcacgcatacttcaaaaatttattatttagattagttgccaacatggataggagtgaactatccgacttggggactttaatcaaggataatttaaagagggacctaataacgtctttgccttttgaaataagtttgaaaattttcaattatttgcaattcgaggatattataaattcccttggggtctcccaaaattggaacaaaataattagaaaatctacatcgttgtggaaaaaacttctgatatcggaaaattttgtgagcccaaagggttttaattctctcaatctcaaactctcccaaaaatacccaaaactctcacaacaagatcgccttagattatcttttctggagaatatattcattttaaaaaattggtacaatcccaagtttgtaccacaaaggaccacgttaagaggccatatgacgagtgttattacgtgcttgcaatttgaagataattatgtcattacgggggctgatgacaaaatgatcagagtttatgattcgataaacaagaaatttcttctacaactatcaggtcatgatggtggggtttgggcattgaagtatgcccatggcggtattttagtcagcggttctacagacagaacggtgcgagtttgggatattaagaaaggttgttgtacccatgtgtttaaaggtcataactctacggtgaggtgcctagatatagtagaatataaaaatatcaagtacattgttactggttcgagagataacactttgcacgtttggaaattgcccaaggagtcctccgttcctgatcatggggaagaacatgattatccattagtctttcatacccctgaggagaacccatattttgttggtgttttaagaggacatatggcatctgtaagaactgtctcaggccacggtaatattgtcgttagtggctcctatgataatacactgattgtgtgggatgttgcgcaaatgaaatgtttgtatattttaagtggacatacggatcgtatttattcgacaatctacgatcatgaaagaaaaaggtgcatctctgccagtatggataccactattagaatttgggatttggaaaatatatggaataatggagaatgttcctacgcaacaaattcagcatcgccatgcgccaaaatacttggtgctatgtacactttgcagggtcatacagctttggtcggtttattaagattatccgacaaatttttggtcagtgccgctgcagacggttcaataaggggttgggacgcaaacgactactctagaaaattttcctaccatcataccaatttgagtgcaattaccacattttatgtatcggataatattttggtgagtggatcggaaaatcagttcaacatctataatctacggagtgggaaattggtccacgcaaatattctaaaagatgctgatcagatttggtcggttaattttaagggcaaaacacttgttgcagcagttgaaaaagatggacagagctttttagaaattctggatttcagcaaagcttcaaaaattaactacgttagcaatcccgtaaactcctcgtcgtcgtctttggaatccatttctacttctttgggtctaacgaggacaactataataccatga

SEQ ID NO: 3520 - DNA, 2340 bp, Artificial Sequence
  Description of Artificial Sequence: Synthetic polynucleotide
atggggtcttttcccttagctgagtttccattacgtgatatccctgttccttatagctaccgtgtgtctggcggtatagcttccagtggtagtgttactgcgcttgttactgccgctggcactcatagaaactcttccacggctaagacagttgagacagaagacggcgaagaagatatcgatgagtatcagaggaaaagagcagctggttctggcgaatccactcctgaacgcagtgatttcaaaagggtaaaacatgataatcacaaaaccctccatccagttaacttacagaacaccggtgcagcgtctgtggataatgacggtttacacaatttaacagatatatccaacgatgcagaaaaacttttgatgtctgtggatgatggttctgccgcaccttctacattgagtgtaaacatgggagtggcatctcataatgttgctgctcccactaccgtcaatgcggcaacaataactggcagtgatgttagtaacaatgttaatagtgctactattaacaatcctatggaggaaggagcgttaccgttatctcccactgcttcctctccaggtaccacaactcctttagctaaaactacgaaaactatcaacaacaataataatatcgccgatttgatagaatccaaagattctataatctcccctgaatacctttctgatgagattttcagcgcaataaacaataatctccctcacgcatacttcaaaaatttattatttagattagttgccaacatggataggagtgaattatccgacttggggactttaatcaaggataatttaaagagggacttgataacgtctttgccttttgaaataagtttgaaaattttcaattatttgcaattcgaggatattataaattcccttggggtctcccaaaattggaacaaaataattagaaaatctacatctttgtggaaaaaacttttgatatctgaaaattttgtgagcccaaagggttttaattctctcaatctcaaactctcccaaaaatacccaaaactctctcaacaagatcgccttagattatcttttttggagaatatattcattttaaaaaattggtacaatcccaagtttgtaccacaaaggaccacgttaagaggccatatgacgagtgttattacgtgcttgcaatttgaagataattatgtcattacgggggctgatgacaaaatgatcagagtttatgattctataaacaagaaatttcttttacaattatctggtcatgatggtggggtttgggcattgaagtatgcccatggcggtattttagtcagcggttctacagacagaacggtgagagtttgggatattaagaaaggttgttgtacccatgtgtttaaaggtcataactctacggtgaggtgcttagatatagtagaatataaaaatatcaagtacattgttactggttccagagataacactttgcacgtttggaaattgcccaaggagtcctccgttcctgatcatggggaagaacatgattatccattagtctttcatacccctgaggagaacccatattttgttggtgttttaagaggacatatggcatctgtaagaactgtctccggccacggtaatattgtcgttagtggctcctatgataatacattaattgtgtgggatgttgcgcaaatgaaatgtttgtatattttaagtggacatacggatcgtatttattctacaatctacgatcatgaaagaaaaaggtgcatctctgccagtatggataccactattagaatttgggatttggaaaatatatggaataatggagaatgttcctacgcaacaaattctgcatctccatgcgccaaaatacttggtgctatgtacactttgcagggtcatacagctttggtcggtttattaagattatccgacaaatttttggtcagtgccgctgcagacggttccataaggggttgggacgcaaacgactactctagaaaattttcctaccatcataccaatttgagtgcaattaccacattttatgtatctgataatattttggtgagtggatctgaaaatcagttcaacatctataatttaagaagtgggaaattggtccacgcaaatattttgaaagatgctgatcagatttggtctgttaattttaagggcaaaacacttgttgcagcagttgaaaaagatggacagagctttttagaaattttagatttcagcaaagcttccaaaattaactacgttagcaatcccgtaaactcctcttcttcttctttggaatccatttctacttctttgggtttaacgaggacaactataataccatga

SEQ ID NO: 3521 - DNA, 3678 bp, Saccharomyces cerevisiae
atgggacgtttagttggcttagaactaagtaatttcaagtcctatagaggcgttaccaaggtaggattcggcgagtcgaatttcacaagtattatcggtcctaacggatctggtaaatcgaatatgatggatgctatctcattcgtactcggtgtgcggagtaatcatttgaggtcaaacatcttgaaagatttaatctatagaggtgttctaaacgatgagaatagtgacgattatgataacgagggcgctgcctcttcgaacccacaatccgcatacgtgaaggcattttatcaaaaaggtaacaaactggtggagctgatgaggataatttccagaaacggtgacactagttataaaattgatggaaaaactgtctcctataaggactattctatatttcttgagaacgaaaatattcttatcaaagccaaaaattttctagtgttccagggtgatgttgagcaaattgcagcacaatctcccgtagaattatcaagaatgtttgaagaagtatcaggttctatccaatacaaaaaggagtatgaagagttgaaggaaaagattgagaaattaagcaaatctgcaaccgaatctataaaaaataggagaaggatccatggagaattgaagacatataaagaaggtatcaataagaacgaggagtataggaaacaattggacaaaaaaaatgaattacagaagttccaggctctatggcagttatatcatttagagcaacaaaaagaggagctaacggacaagctgtccgcattaaactctgaaatatcgtctttaaagggaaaaataaataacgagatgaaatcattacaacgctcaaaatcttcctttgttaaagaaagcgcagtaatttctaagcaaaaaagtaaattagattatatcttcaaggataaggaaaaattagtctcggatttacggctcataaaggttcctcaacaggcagcagggaagcgaatttcccatatagaaaaaagaatcgaaagtttacagaaagatcttcaaagacagaagacttatgtggagagatttgaaacacaactaaaagtggtgaccagatcaaaggaagcttttgaagaggaaatcaaacaatctgctagaaactatgacaaattcaagctaaatgaaaatgatttaaagacatataattgcttacatgaaaaatatctgactgaaggtgggtcaatcctagaagaaaaaattgccgttttgaacaacgataagcgagaaatccaagaggaattggagagattcaacaaaagggcagatatttctaaaagaaggataacggaggagctttctataacaggagaaaaattggacacgcaattaaacgatttaagagtttctttgaatgagaaaaacgcccttcatactgaacgtttgcacgagctgaaaaaattacaatctgatattgaatctgctaataatcaagaatacgacttaaatttcaagttgagggaaacgttggttaagatcgatgacttgagtgctaatcaaagagaaacaatgaaagaaagaaaactaagagaaaatatagcaatgttgaaaagattcttccccggagtaaaaggtcttgttcatgatctttgtcacccaaaaaaggagaaatatggcttggcagtgtctaccatcttaggtaagaactttgattccgtcattgtagaaaatttaaccgtagctcaagaatgcattgcatttttgaagaagcaacgtgcgggcactgcatctttcataccactagacacaattgagacagagttacctacattatcattgcctgactcacaagactatattttatcaattaatgctattgactacgagccggaatatgaaaaagcgatgcaatatgtgtgtggcgattccatcatatgtaatacgttgaatattgctaaagatctgaaatggaaaaagggcataagaggcaaattggttacaattgaaggtgctttgatccacaaggccggtttgatgacaggtggtatatcaggagatgccaataataggtgggataaagaagaatatcaaagcttaatgtctttaaaagacaaattactaatccaaatcgatgaactttccaacggtcaacgctctaattcaatcagagcaagagaagttgaaaatagtgtttcactattgaactcggacatagcaaatttgagaactcaagtaacacaacaaaaacgctccttggatgaaaatcgtttagagattaagtaccataatgacttgatagagaaagaaattcaaccgaagataactgaactaaagaagaagctagatgatttagaaaatactaaagataatttagtgaaagagaaggaggctttacaaaataatattttcaaagaattcactagtaaaattggctttacaatcaaagaatatgaaaatcattccggtgaattgatgagacaacaatctaaagaattacagcagttacaaaaacaaattttgaccgttgaaaataagttgcagtttgagacagacagactaagtactactcaaagaagatatgaaaaggcgcaaaaggatttagagaatgctcaagttgaaatgaagtctttggaagaacaggaatatgcaatagaaatgaaaatcggatcaatagagtctaaattggaagaacacaaaaatcacttagatgagttacagaagaaatttgtaacgaagcaaagtgaattaaattccagcgaagatattctagaggacatgaacagcaacttacaagtcttaaaaagggaaagagacggtataaaggaagatattgaaaagtttgatttagagagagtaacagcgttaaagaattgtaaaatttctaatataaatatacctatatcatctgaaacaacgatagatgatttaccaatatcttccactgataatgaagcaattacaatttccaacagtatcgatataaactataaaggactacctaaaaaatacaaagaaaacaataccgattcggcaaggaaggagctggagcagaagattcatgaagtggaggaaatattgaacgagttgcagcccaatgcaagagctttggagagatacgacgaggcggaaggaaggtttgaagtgattaataacgaaacagaacaactaaaggccgaagaaaagaaaatattaaaccagttcctaaaaattaagaaaaaaagaaaggaactgttcgaaaagacatttgattatgtgagcgaccatttagacgcaatctacagggaacttactaaaaatcccaactccaatgtggaattggccggtggtaacgcttctttaaccatagaagacgaagatgaaccgttcaatgcgggaatcaaatatcatgccactccgcctcttaaaagattcaaagacatggaatatctttctggtggtgaaaaaaccgtagctgcattagctctattatttgctattaattcctaccagcctagtcccttcttcgtgctggacgaagtggacgcagccctagacattactaacgtccagagaattgctgcctatataagaaggcaccgtaatccagatctccaattcattgtcatttcattgaagaacaccatgtttgaaaaatctgacgctctcgttggggtttacagacagcaacaagaaaactcgtcgaagatcataactttggacttgagcaattacgcagaataa

SEQ ID NO: 3522 - DNA, 3678 bp, Artificial Sequence
  Description of Artificial Sequence: Synthetic polynucleotide
atgggacgtttagttggcttagaattaagtaatttcaagtcctatagaggcgttaccaaggtaggattcggcgagagcaatttcacaagtattatcggtcctaacggatctggtaaatctaatatgatggatgctatctctttcgtactcggtgtgagaagtaatcatttgaggtctaacatcttgaaagatttaatctatagaggtgttttgaacgatgagaatagtgacgattatgataacgagggcgctgcctcttccaacccacaatccgcatacgtgaaggcattttatcaaaaaggtaacaaattagtggagttgatgaggataatttccagaaacggtgacactagttataaaattgatggaaaaactgtctcctataaggactattctatatttcttgagaacgaaaatattcttatcaaagccaaaaattttttagtgttccagggtgatgttgagcaaattgcagcacaatctcccgtagaattatctagaatgtttgaagaagtatctggttctatccaatacaaaaaggagtatgaagagttgaaggaaaagattgagaaattaagcaaatctgcaaccgaatctataaaaaataggagaaggatccatggagaattgaagacatataaagaaggtatcaataagaacgaggagtataggaaacaattggacaaaaaaaatgaattacagaagttccaggctttatggcagttatatcatttagagcaacaaaaagaggagcttacggacaagttatccgcattaaactctgaaatatcttctttaaagggaaaaataaataacgagatgaaatctttacaacgctctaaatcttcctttgttaaagaaagcgcagtaatttctaagcaaaaaagtaaattagattatatcttcaaggataaggaaaaattagtctctgatttaagactcataaaggttcctcaacaggcagcagggaagagaatttcccatatagaaaaaagaatcgaaagtttacagaaagatcttcaaagacagaagacttatgtggagagatttgaaacacaattgaaagtggtgaccagatccaaggaagcttttgaagaggaaatcaaacaatctgctagaaactatgacaaattcaagttgaatgaaaatgatttaaagacatataattgcttacatgaaaaatatttgactgaaggtgggtctatcttggaagaaaaaattgccgttttgaacaacgataagagagaaatccaagaggaattggagagattcaacaaaagggcagatatttctaaaagaaggataacggaggagctttctataacaggagaaaaattggacacgcaattaaacgatttaagagtttctttgaatgagaaaaacgcccttcatactgaacgtttgcacgagttgaaaaaattacaatctgatattgaatctgctaataatcaagaatacgacttaaatttcaagttgagggaaacgttggttaagatcgatgacttgagtgctaatcaaagagaaacaatgaaagaaagaaaattgagagaaaatatagcaatgttgaaaagattcttccccggagtaaaaggtcttgttcatgatctttgtcacccaaaaaaggagaaatatggcttggcagtgtctaccatcttaggtaagaactttgattccgtcattgtagaaaatttaaccgtagctcaagaatgcattgcatttttgaagaagcaacgtgcgggcactgcatctttcataccattggacacaattgagacagagttacctacattatctttgcctgactctcaagactatattttatccattaatgctattgactacgagccggaatatgaaaaagcgatgcaatatgtgtgtggcgattccatcatatgtaatacgttgaatattgctaaagatttgaaatggaaaaagggcataagaggcaaattggttacaattgaaggtgctttgatccacaaggccggtttgatgacaggtggtatatctggagatgccaataataggtgggataaagaagaatatcaaagcttaatgtctttaaaagacaaattattgatccaaatcgatgaactttccaacggtcaacgctctaattccatcagagcaagagaagttgaaaatagtgtttctttgttgaacagcgacatagcaaatttgagaactcaagtaacacaacaaaaacgctccttggatgaaaatcgtttagagattaagtaccataatgacttgatagagaaagaaattcaaccgaagataactgaattgaagaagaagttggatgatttagaaaatactaaagataatttagtgaaagagaaggaggctttacaaaataatattttcaaagaattcactagtaaaattggctttacaatcaaagaatatgaaaatcattccggtgaattgatgagacaacaatctaaagaattacagcagttacaaaaacaaattttgaccgttgaaaataagttgcagtttgagacagacagattaagtactactcaaagaagatatgaaaaggcgcaaaaggatttagagaatgctcaagttgaaatgaagtctttggaagaacaggaatatgcaatagaaatgaaaatcggatccatagagtctaaattggaagaacacaaaaatcacttagatgagttacagaagaaatttgtaacgaagcaaagtgaattaaattccagcgaagatattttagaggacatgaacagcaacttacaagtcttaaaaagggaaagagacggtataaaggaagatattgaaaagtttgatttagagagagtaacagcgttaaagaattgtaaaatttctaatataaatatacctatatcttctgaaacaacgatagatgatttaccaatatcttccactgataatgaagcaattacaatttccaacagtatcgatataaactataaaggattgcctaaaaaatacaaagaaaacaataccgattctgcaaggaaggagttagagcagaagattcatgaagtggaggaaatattgaacgagttgcagcccaatgcaagagctttggagagatacgacgaggcggaaggaaggtttgaagtgattaataacgaaacagaacaattgaaggccgaagaaaagaaaatattaaaccagttcttgaaaattaagaaaaaaagaaaggaattattcgaaaagacatttgattatgtgagcgaccatttagacgcaatctacagggaacttactaaaaatcccaactccaatgtggaattggccggtggtaacgcttctttaaccatagaagacgaagatgaaccgttcaatgcgggaatcaaatatcatgccactccgcctcttaaaagattcaaagacatggaatatctttctggtggtgaaaaaaccgtagctgcattagctttattatttgctattaattcctaccagcctagtcccttcttcgtgcttgacgaagtggacgcagccttggacattactaacgtccagagaattgctgcctatataagaaggcaccgtaatccagatctccaattcattgtcatttctttgaagaacaccatgtttgaaaaatctgacgctctcgttggggtttacagacagcaacaagaaaactcttccaagatcataactttggacttgagcaattacgcagaatga

SEQ ID NO: 3523 - DNA, 6432 bp, Saccharomyces cerevisiae
atgaccgctaacaatgacgatgatatcaaatcacccattcccattactaacaagaccttatcccaattgaagcgctttgagagaagtccaggaaggcccagttcttctcagggcgagataaaacgtaaaaagtctaggctatatgccgcagacggaagaccacattctccgctaagagcaaggtctgctaccccaacgctacaggaccaaaaactgttcaatggcatggattccacttcccttttgaatgaaaggctacagcattatacgctggattatgttagtgacagggcccagcatatgaagaatatatatgacccatcatctcgctggttcagcagatccgtgaggcctgaatttcctattgaagagttcttaccatataagactgaaagtcatgaagatcaagcgaaatacttgtgccatgtcttagttaatctttatattgcgatcagctcattagatatacaaggtttgatttctatttccagtaaagatctggctgatttaaagaaagaagtggatgatttagctcttaaaaccgatcttttcaggttatctaacaacacagcggagaatgacttacttggtaacgatattgctgattatgacgatgcggaaggcctggaggacgaattggatgaatacttcgacttagcaggccccgactttaatgctaccggaaaaatcacagctaaatcagctactattgtgaatgtaaaccattggactaatgagctcaaaaattgtctacattttgattttccagtagctttaagaaagtcgctagcgacagtttattattatttgtctcttgttcagggccaaaaggtgtatagacaaatgcatgtcgatatgttcgaaagattagtaagccttgacgatgataggacaaatttcactgaactgttgcaaaaacaaggtcttttgctagatcatcaaatcatgctcaatttcctgtgcgaatttctaccttatccagatcccgactatgctcgttatgaattatcatcaaaggaagatttacagttatttagattacttttgaagcatgcacataatgcaaaaccatttttcgataagtcaaaggaaagtttgttagttgatacgatgaattttctgttgtctagtcttgcaccatctactatgatggctgtcatgcctatcgttacatccgttgtgccctatcattatcatatccattctaagatcatcgattatttcccgttttgctatagcatctggagctcagtcagcgcaaacgtggccatcgacactcacatgtatgattttgttgggtcaatttccaaagacgttcataataagattttgagtagcgagcatgaaaaggatgtagttggagtggagtttggagaattcgggatttttactgatgatcaaatgacttttatgttcaataggttacaaggccatcttagaacagacggtcaaatacattcgtattcccgcacagtgaagccttttgtttatgctataaacggatcaaaaaaagataggttttttgaaaaacttgtaagtttagccaaagcaatcgaaacatttatccatccctctaataatgggttttggaccaagccaaatgctaaattcgttcatgcatttataaagtcttaccacggaagggtcaaatatgaagaagatatttgtgctaggggcgtcacaaatgggatatgtttaacttctttttgtcacgaagagatagttgaaatattcttaaatattatcagtctgggttcacagaataaaaatcctgatattgcgaactattacatctcttgtttcgcatatctgttagagctggatccttcaaatgcatatttaatttatgacaaaatactgatagatttgtacgatacgctggctgaccaatttatcaattcgagacacagaatcatttcctctttgaaacaatttacaagagtaattcggtttattgtgatggataagctatatcgcgtgcacataacaaacgtcctttcgatgctggtctccaaacttgatatgaacgatactaatttgacaagcaacctcatcaacggtattgtatctatagccgctttcattcctatccaagacctcactggggaggacgattatatatcgtttgaatcggatactcttcctttagttcaacaacatttttatcatattaagtgtggcgaaagttcaaagaccttccgagttgatgatgaactgttaaataacgctttcaaagcttccactacagtttttcaaagtatgctaaaagtatacgtagaaaaaattttccaattggttgatgtagacttagaggactctttggttactaaaataaaccaaacaactatgattttacaagagtctatggacgataaaatatttaattattttgcttctttattacagagaaacttctggagtaatgactccttcaaggaaaaggatccaaactatgaattagttactatcccactagcggctttagtaagaaggaataatggtttgagtaaagagttggtcagaactcttttattccatatcaaagaacaaatcaaaagaggcgccgggtctgtaagaagtacttcagagattcaacagagggatgttaagttagttttatacttaactgcactaaatgatgtcttaaggcaatgtcatgaatctctattggagtatagcgatgagttgataacattcatgaaatatttatacgacaacgtcactaacccgccattggatgttatcacatctattgttattcacagtgctttagcaactctatgtacaaccgaaataactgattgtcgtctattcccagaggactctaagattccggaaaaagacagatggggaggactacagttcgatcctcgaagatttgataaacagcatttgagttttcagtggcacgtaccttctagtgacgagataactttatccataagcattctagaaagcctttccgaatactgtattaacaacgtagaagaactgatgaaagctccaagacatgattccgaatatggcgatatgatacaaaaatatgttttagttatgacacatacgctttccgggtcaagtttactttttgatccagattttaacaaatataggacgcaatcaaacttatcatacagagagaaactgattttattaaagaatatacgcgaaaataattgtgaccctcaagaactggatattgatattgaacaaattcgttctggcaaggatgatgaagactatattgagagtaaggacattgaagcagggctgaatgcaggagtttccgatgttgtgcagttaagagatgagtttccggatgaattaattgttgatgaagaagtagtgtctgagatgccatctggtgtaaatacccctatcgcggggacgcatggcacggacaattcagctatgagttcggatctagctttcagggatttagatatttacacctgtaattattacttcggaaataccactgaggagaagttacaaaacccacaatatttacaagtccacagagttagagcgcgcattggacatttctttcacaaactctatgtttttttatctacaaacttcgaaaacaacaccaacatgttccaaattctattgcacggattgaaagtttggttcacagatctgggacaagaaacggtcttcaatgaagacccaaatgccttcattgacgttgatttcctagaaaacgttcaatctctctcacacgtaaatgagcccttcacgagaaccaattttgcaatcagagcaaacagtttgcaccagagtagagttctattacattcaacaaatagaaaagcttccaagctggaaaacctattgttagttgacatcatacagttagcgacatccctttatcctgatatttataaaccagcacagggaactttggtacactgtatgaaacaattagttgggtcatatggcgtagtcatcaataaaattattccatcattagagaaagcgattaaggatcatgattatatgaaaatccaagttattttaaatgttttgttaattaagaaaatccataggaagcttatgacggattataaagacatcggcagattgatatttctgcttattgaatgttgtcgtgtgaatgaattagagattggtatgtatgcagataaaatcttaactgacatagtgattgggatcaagattccttctagtgtatgtgtcatttccgatcaagctttcttacctttagcacctcctgatggtactattaatttgcaagttgaagcggtaaagcttgccaaaaagaaaaagcgtgagtactacctctctctgttagtggatttgcaggacaaacttttagacaaattagataatgaaaaagatatggggtggaagataagaatgttcattttacgttttgttacacaaatccaatcgaacctcgaaagcaaacccgataaaagagcagtattttcaataatctcccaaatctccacaaaacatcccgaaatcatacatttggttgtaaagtcattgttgtcgacgtgcaacaagataatatctctctctgactatgaatatgacatcaccagggcctataagaatgaattcaatccatcatttgtggaaatactggacacttcgaccacaagcttccctaaaacgtttactgaagaaatgaataactttgataaccccaagtattttatcgatttgagggcgtatgtagggtggctatgttggggaaggcttatgtacgtcatgtcgccgaaagctttaaagctcaatttacgtgagaatgaactggaagtcctcaagacagctggtcatctattgacaagagaattcctgagagatgttacaatgaatttagtccaagataatgaaactaggggtgtttttagtagtggtaacgtgtcatttttctctttagtaatccttttgatatcatctggtttctgcgaactgaatatgtcggatctctttgagctatgtgaatcctactataacaaagacgataaggcttcgatgatcatgtctgtcgagatagtggctggcttagtttgcgggagtaagtttatgtcagtctctgacttggacaaacgtgacacttttatcgaaaacttcctagccaaatgtttagattatgagttgaaccatgacgcatttgaaatttggagcaccttggcatggtggttgcctgcagtcgttgatttaagaaggtctaaaacttttttttgccattttatcaacgccgatggcatgtttgaccgtgaatctgatgcagccacacatcaaacctccaaaatttacatgctaagaagtatcttgatgagcatggaatttagagccccagatgttggtaagctatttgatgagttggtatttgatcacccatacgatcaggttcgccaggctgtcgctaaactattgacgaccttagttcaaaatcaaagtaatccgtcaatttcagatccaaccacattattagaagcagaacggaatgatccagatggattagggttaccattaaaaagcgtcccagaaaaggtggatgcctatattaagaagcagtttgagatcattaaaaatctggaagattccgttgtcggcctgaatcctcaacaatttattaagacagactatttttacaggacatccacaatattttattggatcaaagaaatggcgagagggcctaataaagttttgttagttccatatttagtcgattatgttttaccatttctgatcggattagtgaaacataaagatgtttgtgctcttgccagtttagatcctgttcgattgtatgccggcttgggctatatgccgatcagaaagaaccatgttgccgccattgttgactatgtttgttcgtcaaatgtagcactatcttcaaaccaaacgaaactacagctagctttcatccaacactttttatcagcggaactgcttcaacttactgaggaagaaaagaacaaaattttggaatttgttgtcagcaatttgtataacgaacagtttgtagaggtgagagttcgtgcggcatccattttgtctgatatcgtccataactggaaagaggaacagccgttgttgagtttaatcgagagatttgcaaagggtctcgacgtcaacaaatacacgtcgaaagaaagacaaaagttatccaaaacggatatcaagattcatggtaacgttttgggtttgggagctattatatcagcgttcccctatgtttttcccctaccgccatggatacccaagcaactaagcaacttatcctcgtgggccaggactagtggtatgactggacaagctgccaaaaatactattagtgagttcaagaaggtgagggccgacacttggaagttcgatagagcatctttcaatacggaggaactggaagacctggagggtgtcctatggagaagttactatgcctga

SEQ ID NO: 3524 - DNA, 6432 bp, Artificial Sequence
  Description of Artificial Sequence: Synthetic polynucleotide
atgaccgctaacaatgacgatgatatcaaaagtcccattcccattactaacaagaccttatcccaattgaagcgctttgagagaagtccaggaaggcccagttcttctcagggcgagataaaacgtaaaaagtctaggttatatgccgcagacggaagaccacattctccgttaagagcaaggtctgctaccccaacgttgcaggaccaaaaattattcaatggcatggattccacttcccttttgaatgaaaggttacagcattatacgttagattatgttagtgacagggcccagcatatgaagaatatatatgacccatcttctcgctggttcagcagatccgtgaggcctgaatttcctattgaagagttcttaccatataagactgaaagtcatgaagatcaagcgaaatacttgtgccatgtcttagttaatctttatattgcgatcagctctttagatatacaaggtttgatttctatttccagtaaagatttggctgatttaaagaaagaagtggatgatttagctcttaaaaccgatcttttcaggttatctaacaacacagcggagaatgacttacttggtaacgatattgctgattatgacgatgcggaaggcttagaggacgaattggatgaatacttcgacttagcaggccccgactttaatgctaccggaaaaatcacagctaaatctgctactattgtgaatgtaaaccattggactaatgagctcaaaaattgtttgcattttgattttccagtagctttaagaaagtctttagcgacagtttattattatttgtctcttgttcagggccaaaaggtgtatagacaaatgcatgtcgatatgttcgaaagattagtaagccttgacgatgataggacaaatttcactgaattattgcaaaaacaaggtcttttgttggatcatcaaatcatgctcaatttcttgtgcgaatttttaccttatccagatcccgactatgctcgttatgaattatcttccaaggaagatttacagttatttagattacttttgaagcatgcacataatgcaaaaccatttttcgataagtccaaggaaagtttgttagttgatacgatgaattttttattgtctagtcttgcaccatctactatgatggctgtcatgcctatcgttacatccgttgtgccctatcattatcatatccattctaagatcatcgattatttcccgttttgctatagcatctggagctctgtcagcgcaaacgtggccatcgacactcacatgtatgattttgttgggtctatttccaaagacgttcataataagattttgagtagcgagcatgaaaaggatgtagttggagtggagtttggagaattcgggatttttactgatgatcaaatgacttttatgttcaataggttacaaggccatcttagaacagacggtcaaatacattcttattcccgcacagtgaagccttttgtttatgctataaacggatctaaaaaagataggttttttgaaaaacttgtaagtttagccaaagcaatcgaaacatttatccatccctctaataatgggttttggaccaagccaaatgctaaattcgttcatgcatttataaagtcttaccacggaagggtcaaatatgaagaagatatttgtgctaggggcgtcacaaatgggatatgtttaacttctttttgtcacgaagagatagttgaaatattcttaaatattatcagtttgggttctcagaataaaaatcctgatattgcgaactattacatctcttgtttcgcatatcttttagagttagatccttccaatgcatatttaatttatgacaaaatattaatagatttgtacgatacgttggctgaccaatttatcaattctagacacagaatcatttcctctttgaaacaatttacaagagtaattagatttattgtgatggataagctttatcgcgtgcacataacaaacgtcctttctatgcttgtctccaaacttgatatgaacgatactaatttgacaagcaacctcatcaacggtattgtatctatagccgctttcattcctatccaagacctcactggggaggacgattatatatcctttgaaagtgatactcttcctttagttcaacaacatttttatcatattaagtgtggcgaaagttccaagaccttcagagttgatgatgaattattaaataacgctttcaaagcttccactacagtttttcaaagtatgttgaaagtatacgtagaaaaaattttccaattggttgatgtagacttagaggactctttggttactaaaataaaccaaacaactatgattttacaagagtctatggacgataaaatatttaattattttgcttctttattacagagaaacttctggagtaatgactccttcaaggaaaaggatccaaactatgaattagttactatcccattggcggctttagtaagaaggaataatggtttgagtaaagagttggtcagaactcttttattccatatcaaagaacaaatcaaaagaggcgccgggtctgtaagaagtacttccgagattcaacagagggatgttaagttagttttatacttaactgcattgaatgatgtcttaaggcaatgtcatgaatctttgttggagtatagcgatgagttgataacattcatgaaatatttatacgacaacgtcactaacccgccattggatgttatcacatctattgttattcacagtgctttagcaactttgtgtacaaccgaaataactgattgtcgtttattcccagaggactctaagattccggaaaaagacagatggggaggattacagttcgatcctagaagatttgataaacagcatttgagttttcagtggcacgtaccttctagtgacgagataactttatccataagcattttggaaagcctttccgaatactgtattaacaacgtagaagaattgatgaaagctccaagacatgattccgaatatggcgatatgatacaaaaatatgttttagttatgacacatacgctttccgggagtagtttactttttgatccagattttaacaaatataggacgcaaagtaacttatcttacagagagaaattgattttattaaagaatatacgcgaaaataattgtgaccctcaagaattagatattgatattgaacaaattcgttctggcaaggatgatgaagactatattgagagtaaggacattgaagcagggttaaatgcaggagtttccgatgttgtgcagttaagagatgagtttccggatgaattaattgttgatgaagaagtagtgtctgagatgccatctggtgtaaatacccctatcgcggggacgcatggcacggacaattctgctatgagttctgatttggctttcagggatttagatatttacacctgtaattattacttcggaaataccactgaggagaagttacaaaacccacaatatttacaagtccacagagttagagcgcgcattggacatttctttcacaaactctatgtttttttatctacaaacttcgaaaacaacaccaacatgttccaaattttattgcacggattgaaagtttggttcacagatttgggacaagaaacggtcttcaatgaagacccaaatgccttcattgacgttgatttcttggaaaacgttcaatctctcagtcacgtaaatgagcccttcacgagaaccaattttgcaatcagagcaaacagtttgcaccagagtagagttttattacattctacaaatagaaaagcttccaagttggaaaaccttttgttagttgacatcatacagttagcgacatccctttatcctgatatttataaaccagcacagggaactttggtacactgtatgaaacaattagttgggtcttatggcgtagtcatcaataaaattattccatctttagagaaagcgattaaggatcatgattatatgaaaatccaagttattttaaatgttttgttaattaagaaaatccataggaagcttatgacggattataaagacatcggcagattgatatttttacttattgaatgttgtcgtgtgaatgaattagagattggtatgtatgcagataaaatcttaactgacatagtgattgggatcaagattccttctagtgtatgtgtcatttccgatcaagctttcttacctttagcacctcctgatggtactattaatttgcaagttgaagcggtaaagcttgccaaaaagaaaaagcgtgagtactacctctctttattagtggatttgcaggacaaacttttagacaaattagataatgaaaaagatatggggtggaagataagaatgttcattttacgttttgttacacaaatccaaagtaacctcgaaagcaaacccgataaaagagcagtattttccataatctcccaaatctccacaaaacatcccgaaatcatacatttggttgtaaagtctttgttgagcacgtgcaacaagataatatctctctctgactatgaatatgacatcaccagggcctataagaatgaattcaatccatcttttgtggaaatattggacacttctaccacaagcttccctaaaacgtttactgaagaaatgaataactttgataaccccaagtattttatcgatttgagggcgtatgtagggtggttatgttggggaaggcttatgtacgtcatgtctccgaaagctttaaagctcaatttacgtgagaatgaattggaagtcctcaagacagctggtcatcttttgacaagagaattcttaagagatgttacaatgaatttagtccaagataatgaaactaggggtgtttttagtagtggtaacgtgtcctttttctctttagtaatccttttgatatcttctggtttctgcgaattgaatatgagtgatctctttgagctctgtgaatcctactataacaaagacgataaggcttccatgatcatgtctgtcgagatagtggctggcttagtttgcgggagtaagtttatgtctgtctctgacttggacaaacgtgacacttttatcgaaaacttcttggccaaatgtttagattatgagttgaaccatgacgcatttgaaatttggagcaccttggcatggtggttgcctgcagtcgttgatttaagaaggtctaaaacttttttttgccattttatcaacgccgatggcatgtttgaccgtgaatctgatgcagccacacatcaaacctccaaaatttacatgttgagaagtatcttgatgagcatggaatttagagccccagatgttggtaagttatttgatgagttggtatttgatcacccatacgatcaggttcgccaggctgtcgctaaacttttgacgaccttagttcaaaatcaaagtaatccgtctatttctgatccaaccacattattagaagcagaaagaaatgatccagatggattagggttaccattaaaaagcgtcccagaaaaggtggatgcctatattaagaagcagtttgagatcattaaaaatttggaagattccgttgtcggcttgaatcctcaacaatttattaagacagactatttttacaggacatccacaatattttattggatcaaagaaatggcgagagggcctaataaagttttgttagttccatatttagtcgattatgttttaccatttttgatcggattagtgaaacataaagatgtttgtgctcttgccagtttagatcctgttagattgtatgccggcttgggctatatgccgatcagaaagaaccatgttgccgccattgttgactatgtttgttcttccaatgtagcattatcttccaaccaaacgaaattacagttagctttcatccaacactttttatctgcggaattgcttcaacttactgaggaagaaaagaacaaaattttggaatttgttgtcagcaatttgtataacgaacagtttgtagaggtgagagttcgtgcggcatccattttgtctgatatcgtccataactggaaagaggaacagccgttgttgagtttaatcgagagatttgcaaagggtctcgacgtcaacaaatacacgtccaaagaaagacaaaagttatccaaaacggatatcaagattcatggtaacgttttgggtttgggagctattatatctgcgttcccctatgtttttcccttgccgccatggatacccaagcaattgagcaacttatcctcttgggccaggactagtggtatgactggacaagctgccaaaaatactattagtgagttcaagaaggtgagggccgacacttggaagttcgatagagcatctttcaatacggaggaattggaagacttggagggtgtcttgtggagaagttactatgcctga

SEQ ID NO: 3525 - DNA, 648 bp, Saccharomyces cerevisiae
atgtcaggcttgagaactgtttctgcttcatccggtaatggaaagagctatgactctattatgaaaattttattgattggtgattctggtgttgggaaatcatgtttattggttcgttttgttgaagacaaatttaacccgtcatttatcaccaccattggtattgatttcaaaataaagactgtcgatatcaacggtaagaaggtaaagctgcaactttgggataccgctggtcaagaacgtttccggacaatcaccacagcgtattatcgtggtgctatgggtatcattcttgtatatgatgtgacagacgagagaacatttactaatatcaagcaatggtttaaaaccgttaatgagcatgcgaacgatgaagcacagctactgttggttggtaacaagagcgatatggagacgagagtggtaacagctgatcaaggtgaagccttggctaaggagctgggtataccattcatcgagtccagtgctaagaacgatgacaatgtcaacgagatttttttcaccttggcgaagttaatccaagaaaaaatcgacagtaacaagcttgttggcgtcggtaacggtaaagagggcaatattagcatcaatagtgggagcggaaacagttctaaatcaaattgctgttga

SEQ ID NO: 3526 - DNA, 648 bp, Artificial Sequence
  Description of Artificial Sequence: Synthetic polynucleotide
atgagtggcttgagaactgtttctgcttcttccggtaatggaaagagctatgactctattatgaaaattttattgattggtgattctggtgttgggaaaagttgtttattggttcgttttgttgaagacaaatttaacccgtcctttatcaccaccattggtattgatttcaaaataaagactgtcgatatcaacggtaagaaggtaaagttacaactttgggataccgctggtcaagaacgtttcagaacaatcaccacagcgtattatcgtggtgctatgggtatcattcttgtatatgatgtgacagacgagagaacatttactaatatcaagcaatggtttaaaaccgttaatgagcatgcgaacgatgaagcacagttattattggttggtaacaagagcgatatggagacgagagtggtaacagctgatcaaggtgaagccttggctaaggagttaggtataccattcatcgagtccagtgctaagaacgatgacaatgtcaacgagatttttttcaccttggcgaagttaatccaagaaaaaatcgacagtaacaagcttgttggcgtcggtaacggtaaagagggcaatattagcatcaatagtgggagcggaaacagttctaaatctaattgctgttga

SEQ ID NO: 3527 - DNA, 2487 bp, Saccharomyces cerevisiae
atgctgtttggagtgaagttggctaatgaggtttatcctccttggaagggttcttatattaattatgagggcttgaaaaaattcctgaaggaagatagcgtgaaggatggaagtaacgataagaaagcacgctgggacgattcagatgaatccaagtttgtggaagagttggataaggaacttgaaaaagtctatggttttcaactaaaaaagtacaataacttgatggagagattgtcccatctggagaaacaaacagatacggaagcagccataaaggccttggacgctgatgcattccaacgtgtattggaggaactgttaagcgagtctaccgaattagacaattttaagagattgaactttactgggtttgctaagattgttaagaaacatgacaagctatatccaaagtatccatctgttaaatctttgttggaagttagattaaaggaattgccttcccattcggaagaatattccccattgttgtatcgtatttcatttttgtacaacattttgagaagtaattttaacactgcatctgaacccttagccagcgcttctaagttttctagcattgtcagcaatgacatagacatgaatttcagaagctttaaattttgggttcataatgacaacttaatggaggtcaaaacaagaatcttgagacatcttcccgtgttggtctacgccaatgttccctccgaaaacgatgacctggtcaatagattcgaatcagatatatcaaataatgatgaaattgtgggtagttcgagctccactagtagcgtagaacatggcttgggagcgcgctccttcgatccattaatcaacacgctatattttgacaatgagcattttgaattatataacgacaagttattaaagttaaattcagcacctactttaagattaaggtggactggccagttatctgataagccggatattttcttggaaaagaaaactcttattgaagacgaagccactgggaagtctgaatttgatctaactaaattgcaattgaaacaaaaattcattaacgggtttattttcgaaggtgataagaaatttaaagaacaaactttgaaaaagttaaaagaaagtggtacggcagggagagacctggaaaggttagaagaagatttctctgagattcaaaactttattatcaagaatgaattgcaaccagtttttagaactgtttacaccagaactgctttccagattcccggcgatgacaagataagagtaaccattgactctaatattgtattcatcaaggaggattcattcgacagagagcgtccaattagagaccctaatacctggcatagaactgatattgatgccaatgttgcaaatcccttgaaattcctgagaggaggcgagtatgctaagtttccttattcagtaatggaaattaaagtgaaaagttcattagattcttcgatgtctgccagttctatgatttctaatgtaaaactgcctaaaaagcatggtcaatggctgaacgatttgacaaattctcatttggtcaaagaaattccaaagttttctatctttgtgcaaggtgtggcatcattgtatggagatgatgaaaaattagatatcttaccattttggttaccagatttggaaacagatattagacaggatcctaagcaagcatatgaggaggaaaagaaaaaactgttgaaacaaaaagagatacaaaagaaaattgatggaatgagaaggctttccaacttaaaagagcctcaacatcaagcagcagtaccggtatctcaagaggaaaatgagcgtattacctctcaaggtgatttggaggcagacggttcatccgatgaggaaactgagcaagaacctcattcgaaaagatcaaagaaagttcggagaagaaaacccaaggccactttcttgagaattttggccggtagagatccaaagttaatgggggtggattctgaagaagaagaaattgaattgccacctggtgtgaaaaaaccattaaatttgttaaaaaatgctggtcctgtaaacgtggaggcaaaggtttggcttgccaacgaacgtacatttaacagatggttaagtgtcaccagtttattgagtgttttgacgttctcaatttataattctgtgaagaaagccgaataccccactttggctaactacatggcatacgtatattttggtctaacgatattctgtgctttatggtcctattccatttatatgaaaagagttgatattattcaacaaagaagcggtcaacatctagatgcaccacttggtccagttttggtttctatagttttatttgtcactttagtggttaattttgttatggcgtttagaaatgcagcaaagtctcgtcaagagttgcaaatacagaatttagaagttcctgaaagaataccagaagtattaaggccacttcaaaattatctattcaagttaatggggccaagcagtgattag

SEQ ID NO: 3528 - DNA, 2487 bp, Artificial Sequence
  Description of Artificial Sequence: Synthetic polynucleotide
atgttatttggagtgaagttggctaatgaggtttatcctccttggaagggttcttatattaattatgagggcttgaaaaaattcttgaaggaagatagcgtgaaggatggaagtaacgataagaaagcacgctgggacgattctgatgaatccaagtttgtggaagagttggataaggaacttgaaaaagtctatggttttcaattgaaaaagtacaataacttgatggagagattgtcccatttagagaaacaaacagatacggaagcagccataaaggccttggacgctgatgcattccaacgtgtattggaggaattattaagcgagtctaccgaattagacaattttaagagattgaactttactgggtttgctaagattgttaagaaacatgacaagctttatccaaagtatccatctgttaaatctttgttggaagttagattaaaggaattgccttcccattctgaagaatattccccattgttgtatcgtatttcctttttgtacaacattttgagaagtaattttaacactgcatctgaacccttagccagcgcttctaagttttctagcattgtcagcaatgacatagacatgaatttcagaagctttaaattttgggttcataatgacaacttaatggaggtcaaaacaagaatcttgagacatcttcccgtgttggtctacgccaatgttccctccgaaaacgatgacttggtcaatagattcgaaagtgatatatccaataatgatgaaattgtgggtagtagtagctccactagtagcgtagaacatggcttgggagcgcgctccttcgatccattaatcaacacgctttattttgacaatgagcattttgaattatataacgacaagttattaaagttaaattctgcacctactttaagattaaggtggactggccagttatctgataagccggatattttcttggaaaagaaaactcttattgaagacgaagccactgggaagtctgaatttgatttgactaaattgcaattgaaacaaaaattcattaacgggtttattttcgaaggtgataagaaatttaaagaacaaactttgaaaaagttaaaagaaagtggtacggcagggagagacttggaaaggttagaagaagatttctctgagattcaaaactttattatcaagaatgaattgcaaccagtttttagaactgtttacaccagaactgctttccagattcccggcgatgacaagataagagtaaccattgactctaatattgtattcatcaaggaggattctttcgacagagagcgtccaattagagaccctaatacctggcatagaactgatattgatgccaatgttgcaaatcccttgaaattcttaagaggaggcgagtatgctaagtttccttattctgtaatggaaattaaagtgaaaagttctttagattcttctatgtctgccagttctatgatttctaatgtaaaattacctaaaaagcatggtcaatggttgaacgatttgacaaattctcatttggtcaaagaaattccaaagttttctatctttgtgcaaggtgtggcaagtttgtatggagatgatgaaaaattagatatcttaccattttggttaccagatttggaaacagatattagacaggatcctaagcaagcatatgaggaggaaaagaaaaaacttttgaaacaaaaagagatacaaaagaaaattgatggaatgagaaggctttccaacttaaaagagcctcaacatcaagcagcagtaccggtatctcaagaggaaaatgagcgtattacctctcaaggtgatttggaggcagacggttcttccgatgaggaaactgagcaagaacctcattctaaaagatccaagaaagttagaagaagaaaacccaaggccactttcttgagaattttggccggtagagatccaaagttaatgggggtggattctgaagaagaagaaattgaattgccacctggtgtgaaaaaaccattaaatttgttaaaaaatgctggtcctgtaaacgtggaggcaaaggtttggcttgccaacgaacgtacatttaacagatggttaagtgtcaccagtttattgagtgttttgacgttctccatttataattctgtgaagaaagccgaataccccactttggctaactacatggcatacgtatattttggtttaacgatattctgtgctttatggtcctattccatttatatgaaaagagttgatattattcaacaaagaagcggtcaacatttggatgcaccacttggtccagttttggtttctatagttttatttgtcactttagtggttaattttgttatggcgtttagaaatgcagcaaagtctcgtcaagagttgcaaatacagaatttagaagttcctgaaagaataccagaagtattaaggccacttcaaaattatcttttcaagttaatggggccaagcagtgattga

SEQ ID NO: 3529 - DNA, 2637 bp, Saccharomyces cerevisiae
atgagtgaatctaatctatctagttttatcagtacaaattatttcaatttaaggtcggcggctaattcttcaaactctatttcgaagccaagtacgaaaaagagtatcaggaaccaaaaatcgccaactaacataagtagttgggctctcaaaaagaaaacgctacaaatagcagagacaacatgggaaaacaatgaaaaagattcaacacatagccattacttaatgactggatcaatggcctctaggaccgcaacctccttaagtcgatacagcaccaacgcttcactcctcggtcctagtattgactgtgttctttgttgcatatacgaagtgccaagagacataagtacgcggattgggttatgtattatcaactgtaacacgggacagatgtatctttcagatttcatggattcacaaatttacattcgtgtagttcataaactccaaatttaccaacctacggaaatactgattccaagcagttctctagctccaacagtatcaaaattagcgacaatgataaaatttaatgtggccgagacagttaaaattgaagagggttcacgaaagtgcttcaatagccaagatggactggcggcgattacaaagtatttaatggatgatacaaaaaaggacttgaaaatcgaggagattatagataaaacgtttgctctttgtgctgcatctgctgcgataagctacatggaagagattatatccaaaagcagccgaaatttgaatgcgtttcgaaaactacgtatacagtttgaaggaacagaaaatacaatgctgattgattctaaaaccgtcagaggtttagaacttgtagaaaataaattggataagaatggcatatcactatggaagttcttggataccacgtccactaaaatgggacaaagatcacttcggaacagtatactgcagccattaactgataggggcagtatcgaaatgagactagaggccctagaagaattgaaagccaatgatgaccttctacaaaaattaaggctagaaatgaaatcattgcctgatctagataagttattttcaaggttattatgcattaatcattctgcaataaaacctgaccaaagaattaattacgttttgttgctaaaggaaactttacaaagcgtgaagtcattgaaagacgcacttaatgatcagttaattcaaagccgtttaattagcgagaccaaaaaaatattcaataatgacgcaattatggaaattgaaaaattaattaatagttgtataaatgaagactgtgtctgggcatcctcagctatacaactacttaaccaacgttcatatgctgtgaaaagtgattccaatgggcttttggatgtttctagacaaatctacaaagaggtaaaagaggaattttttcgtgaggtagaagatcttaccgctaaaaacaaaatcaatttagatcataattacgattctgcacgaggcttttatctcagaataaaaagacaggaatttaccgatgacgtcgctacacttccagacgtattcatttcaagaacaataaaaaaaaattatattgaatgtacaaccctaaatataataaaaaaaaatgcgaggttgaaggaagttatggaagagattttacttttaagtgaagagacagttgatgaactgctcgataaaattgcaacccatatttctgaactatttatgattgcagaagcagtggctatcctggatttggtttgttcattcacatataatttgaaagaaaataattacacaataccgatttttacaaacaatctactaattcgagattcaagacacccactacttgaaaaggtactaaaaaattttgtccctaacaccatatcaagtacaaaacatagctccagcttacaaatcataaccggatgcaacatgagtggaaaatctgtttatttaaaacaagttgcccttatttgcataatggcccaaatgggatcaggtataccggcactttatgggtcttttcctgtctttaaacgtctacatgcaagagtctgcaatgacagtatggaattaacctcatcaaattttggttttgaaatgaaagaaatggcttactttttagatgacataaatacagaaacactgttaattttagatgaacttggtcgtggttcaagcatcgctgatgggttttgtgtgtctttggcagtaactgaacatttacttcgaacggaggcaacggtatttctttctacacacttccaggacattcctaaaataatgtctaagaagccagcagtttcccatcttcatatggatgcagtccttctcaatgacaattctgtcaaaatgaattatcagttgacccagaaatctgtcgcaatagagaatagtggaataagggtggtaaaaaaaatattcaacccggatattattgcagaagcgtacaatatccattcgcttttgaaaattgcaaaagcaaggactgaaaacgaagattcaaatggcgttgttgatcaaaagaccataaaccaaatgaagagaatacacaatcttgtagcgatattgaaagaatgtgcaggaaatgaaaaagagcccttgactttagggaaattaaaagaaataaactccgacttcatcgaaaattttgaagaataa

SEQ ID NO: 3530 - DNA, 2637 bp, Artificial Sequence
  Description of Artificial Sequence: Synthetic polynucleotide
atgagtgaatctaatttatctagttttatcagtacaaattatttcaatttaaggtctgcggctaattcttccaactctatttccaagccaagtacgaaaaagagtatcaggaaccaaaaatctccaactaacataagtagttgggctctcaaaaagaaaacgttacaaatagcagagacaacatgggaaaacaatgaaaaagattctacacatagccattacttaatgactggatccatggcctctaggaccgcaacctccttaagtagatacagcaccaacgcttctctcctcggtcctagtattgactgtgttctttgttgcatatacgaagtgccaagagacataagtacgagaattgggttatgtattatcaactgtaacacgggacagatgtatctttctgatttcatggattctcaaatttacattcgtgtagttcataaactccaaatttaccaacctacggaaatattgattccaagcagttctttggctccaacagtatccaaattagcgacaatgataaaatttaatgtggccgagacagttaaaattgaagagggttccagaaagtgcttcaatagccaagatggattagcggcgattacaaagtatttaatggatgatacaaaaaaggacttgaaaatcgaggagattatagataaaacgtttgctctttgtgctgcatctgctgcgataagctacatggaagagattatatccaaaagcagcagaaatttgaatgcgtttagaaaattacgtatacagtttgaaggaacagaaaatacaatgttgattgattctaaaaccgtcagaggtttagaacttgtagaaaataaattggataagaatggcatatctctttggaagttcttggataccacgtccactaaaatgggacaaagatctcttagaaacagtatattacagccattaactgataggggcagtatcgaaatgagattggaggccttggaagaattgaaagccaatgatgaccttttacaaaaattaaggttagaaatgaaatctttgcctgatttggataagttatttagcaggttattatgcattaatcattctgcaataaaacctgaccaaagaattaattacgttttgttgttgaaggaaactttacaaagcgtgaagtctttgaaagacgcacttaatgatcagttaattcaaagccgtttaattagcgagaccaaaaaaatattcaataatgacgcaattatggaaattgaaaaattaattaatagttgtataaatgaagactgtgtctgggcatcctctgctatacaattacttaaccaacgttcttatgctgtgaaaagtgattccaatgggcttttggatgtttctagacaaatctacaaagaggtaaaagaggaattttttcgtgaggtagaagatcttaccgctaaaaacaaaatcaatttagatcataattacgattctgcaagaggcttttatctcagaataaaaagacaggaatttaccgatgacgtcgctacacttccagacgtattcatttctagaacaataaaaaaaaattatattgaatgtacaaccttgaatataataaaaaaaaatgcgaggttgaaggaagttatggaagagattttacttttaagtgaagagacagttgatgaattactcgataaaattgcaacccatatttctgaattatttatgattgcagaagcagtggctatcttagatttggtttgttctttcacatataatttgaaagaaaataattacacaataccgatttttacaaacaatttattgattagagattccagacacccattacttgaaaaggtattgaaaaattttgtccctaacaccatatctagtacaaaacatagctccagcttacaaatcataaccggatgcaacatgagtggaaaatctgtttatttaaaacaagttgcccttatttgcataatggcccaaatgggatctggtataccggcactttatgggtcttttcctgtctttaaacgtttgcatgcaagagtctgcaatgacagtatggaattaacctcttccaattttggttttgaaatgaaagaaatggcttactttttagatgacataaatacagaaacattattaattttagatgaacttggtcgtggttccagcatcgctgatgggttttgtgtgtctttggcagtaactgaacatttacttagaacggaggcaacggtatttctttctacacacttccaggacattcctaaaataatgtctaagaagccagcagtttcccatcttcatatggatgcagtccttctcaatgacaattctgtcaaaatgaattatcagttgacccagaaatctgtcgcaatagagaatagtggaataagggtggtaaaaaaaatattcaacccggatattattgcagaagcgtacaatatccattctcttttgaaaattgcaaaagcaaggactgaaaacgaagattctaatggcgttgttgatcaaaagaccataaaccaaatgaagagaatacacaatcttgtagcgatattgaaagaatgtgcaggaaatgaaaaagagcccttgactttagggaaattaaaagaaataaactccgacttcatcgaaaattttgaagaatga

SEQ ID NO: 3531 - DNA, 1821 bp, Saccharomyces cerevisiae
atgtcaaagtcattggaatgggataatctcgggttttctttacttccctggataaggacaggactcgatgttatgggttttgagaccatgactccagtccaagcatcgacaattcccatgcttgctggcaacaaggatgtagtagttgattctgtaacaggctcaggtaagaccgctgcgtttgttatacctgtactagaaaaagttgtaaaggaagaagcgaatacatcaaaattcaagaaagcacacttccactcgttaattattgctccaacaagagaattgtcacgccaaattgagtctgtcgttctatcatttctggaacattatccttccgacttgttccctattaaatgtcagctcctggttggtactaatgaagccacagttagagatgatgtaagtaattttctgcggaatagaccgcagattctgattggaacacctggtagagttttggactttttacaaatgccagcagtaaagacgtcagcatgcagtatggtagttatggatgaagcagacagattgttggatatgagttttattaaggataccgaaaaaattctgaggctattgcctaaacaaagaaggacgggtctattttctgcaactatgcgtagcgccggatcagatatctttaagacagggcttagaaatcctgtcaggattaccgttaactctaagaaccaggcgccctcctctttgaaattaaattactgtgtcgtaaatcctgccgaaaaactacaacttttggttagcattttgaataactacaaattcaagaaatgtattgtatattttccaacatgtgtgtcagtctcctacttctactcatttatccagtatttgggaaagaggaatattctcgtgaatgaagtagaaatattttccttgcatggaaaacttcaaacatcggcaaggacaaaaactctaacagcttttactgattcgctaagtaattctgttttattcacaacagatgtggctgctagaggtattgacatacccgacgttgatctcgtcatccagcttgatccccctaccaatactgatatgttcatgcatagatgtggtagaactggtagagcaaatagagtgggtaaagcaattacgtttcttaatgaaggcagagaagaggattttattcctttcatgcaagttaaaaatgtggaacttgaagaacttgatttggaagtaaagggcataacaacaaacttttacgaggactttagaaattggatactagaagatagggatagatttgataaaggtgttaaagcatatgttgcctttattaaatactactcaaatcattccgcaacttcaatttttaggcttcaatctttagattatgttggtattgcgaaattgtatggtcttttccgcctgcctagaatgcctgagataacaaagtacttagccaccgaaaaacaagaagggattttcccagggaattggttggtcgatcccccagttaatatggatgaatataaatacaaggacaaaaaacgtgaaaaggagagacaagaaacattaaaaaatataagcctgattaatgataaaaagaagctgaaaagtgagttgaagaagaagaatttagcgtggtcagataaaacattgacgaaagaacggaaactcgagagaaaggaaaagatgagtttaaaaaggaaggctatagaggaagaattgaaagcagaagagctcgatgaaaatgctgaagaagagcgtattaaagaggattggaaagaaatcgttttacagaataaacggaagaaagtttccagcaaagctatccaaggcaattttgacgacttataa

SEQ ID NO: 3532 - DNA, 1821 bp, Artificial Sequence
  Description of Artificial Sequence: Synthetic polynucleotide
atgtccaagtctttggaatgggataatctcgggttttctttacttccctggataaggacaggactcgatgttatgggttttgagaccatgactccagtccaagcaagcacaattcccatgcttgctggcaacaaggatgtagtagttgattctgtaacaggcagtggtaagaccgctgcgtttgttatacctgtattggaaaaagttgtaaaggaagaagcgaatacaagtaaattcaagaaagcacacttccactctttaattattgctccaacaagagaattgtcccgccaaattgagtctgtcgttttatcttttttggaacattatccttccgacttgttccctattaaatgtcagctcttggttggtactaatgaagccacagttagagatgatgtaagtaattttttaagaaatagaccgcagattttaattggaacacctggtagagttttggactttttacaaatgccagcagtaaagacgtctgcatgcagtatggtagttatggatgaagcagacagattgttggatatgagttttattaaggataccgaaaaaattttaaggttattgcctaaacaaagaaggacgggtttattttctgcaactatgcgtagcgccggaagtgatatctttaagacagggcttagaaatcctgtcaggattaccgttaactctaagaaccaggcgccctcctctttgaaattaaattactgtgtcgtaaatcctgccgaaaaattacaacttttggttagcattttgaataactacaaattcaagaaatgtattgtatattttccaacatgtgtgtctgtctcctacttctactcttttatccagtatttgggaaagaggaatattctcgtgaatgaagtagaaatattttccttgcatggaaaacttcaaacaagtgcaaggacaaaaactttgacagcttttactgattctttgagtaattctgttttattcacaacagatgtggctgctagaggtattgacatacccgacgttgatctcgtcatccagcttgatccccctaccaatactgatatgttcatgcatagatgtggtagaactggtagagcaaatagagtgggtaaagcaattacgtttcttaatgaaggcagagaagaggattttattcctttcatgcaagttaaaaatgtggaacttgaagaacttgatttggaagtaaagggcataacaacaaacttttacgaggactttagaaattggatattggaagatagggatagatttgataaaggtgttaaagcatatgttgcctttattaaatactactctaatcattccgcaacttctatttttaggcttcaatctttagattatgttggtattgcgaaattgtatggtcttttccgcttacctagaatgcctgagataacaaagtacttagccaccgaaaaacaagaagggattttcccagggaattggttggtcgatcccccagttaatatggatgaatataaatacaaggacaaaaaacgtgaaaaggagagacaagaaacattaaaaaatataagcttaattaatgataaaaagaagttgaaaagtgagttgaagaagaagaatttagcgtggtctgataaaacattgacgaaagaaagaaaactcgagagaaaggaaaagatgagtttaaaaaggaaggctatagaggaagaattgaaagcagaagagctcgatgaaaatgctgaagaagagcgtattaaagaggattggaaagaaatcgttttacagaataaaagaaagaaagtttccagcaaagctatccaaggcaattttgacgacttatga

SEQ ID NO: 3533 - DNA, 1329 bp, Saccharomyces cerevisiae
atgagtaatttcattagaaggctagttgggaaaatgaaagcgatttcaacaggtaccaatgctattgttagtaagaaggactccatttacgcaaactggtccaaagagcagctaatacgaaggatcactgaactagaaaacgcaaataagccacattctgaaaaattccagcacatcgaggataacaaaaagcgcaaaatttcgcaagaagaggttacgagaagcaaggcgaaaaaggctccgaagaagtttgacttttctaaacataataccaggttcatcgccttgagatttgcctatttgggatggaattacaatggcttagctgttcagaaggaatacacaccgttgcctacagtagagggtaccattttggaggccatgaataagtgtaaacttgttccctcgatggttttacaagactataaatttagcagatgtggcagaacagacaagggagttagcgccatgaaccaagttatatcgttagaagtccgttccaatttaacagatgaggaacagcgggatccgaccaacgacagcagggaaataccctatgttcacgttttaaatcaattactacccgacgatattcgtatatcagctgtctgcctcagaccgccacctaactttgacgcaagattcagctgtgttcaccggcactataagtacatctttaatggaaaaaaccttaatattgaaaaaatgtctaaagccgcatcatattttgttggagagagagacttcaggaatttttgtaagcttgatggctcaaaacaaattaccaattttaaacgaacaataataagctcaaaaattcttcccctttctgaaactttctattgttttgatctcgttggttcagcattcctatggcaccaagttcgttgcatgatggccattcttttcttagttggtcaatcacttgaagtgccggaaattgtcttgcgtctgactgatattgagaaaacccctcaaaggcctgtttacgaaatggcaaatgatataccattattgttatatgattgtaaatttcctgaaatggattggcaagaacctactgtagatgactataaggcaataaaattcacgacagctactgaagcattgacgttacactacgaacttaaggccgcagtatgcaatatttttaaagatgttttgcccacagcaaatacaaacaacttctcaaagacaattattaatttgggcgatggaagaggtaaagtagtcggtacctatgtgaaactagaggatagaagcgttatggaacctgtcgaagttgttaatgctaaatactccaagaaaaagaacaacaaaaataagtaa

SEQ ID NO: 3534 - DNA, 1329 bp, Artificial Sequence
  Description of Artificial Sequence: Synthetic polynucleotide
atgagtaatttcattagaaggttggttgggaaaatgaaagcgatttctacaggtaccaatgctattgttagtaagaaggactccatttacgcaaactggtccaaagagcagttgataagaaggatcactgaattggaaaacgcaaataagccacattctgaaaaattccagcacatcgaggataacaaaaagcgcaaaatttctcaagaagaggttacgagaagcaaggcgaaaaaggctccgaagaagtttgacttttctaaacataataccaggttcatcgccttgagatttgcctatttgggatggaattacaatggcttagctgttcagaaggaatacacaccgttgcctacagtagagggtaccattttggaggccatgaataagtgtaaacttgttccctctatggttttacaagactataaatttagcagatgtggcagaacagacaagggagttagcgccatgaaccaagttatatctttagaagtccgttccaatttaacagatgaggaacagagagatccgaccaacgacagcagggaaataccctatgttcacgttttaaatcaattattgcccgacgatattcgtatatctgctgtctgcctcagaccgccacctaactttgacgcaagattcagctgtgttcacagacactataagtacatctttaatggaaaaaaccttaatattgaaaaaatgtctaaagccgcaagttattttgttggagagagagacttcaggaatttttgtaagcttgatggctctaaacaaattaccaattttaaaagaacaataataagcagtaaaattcttcccctttctgaaactttctattgttttgatctcgttggttctgcattcttatggcaccaagttcgttgcatgatggccattcttttcttagttggtcaatctcttgaagtgccggaaattgtcttgcgtttgactgatattgagaaaacccctcaaaggcctgtttacgaaatggcaaatgatataccattattgttatatgattgtaaatttcctgaaatggattggcaagaacctactgtagatgactataaggcaataaaattcacgacagctactgaagcattgacgttacactacgaacttaaggccgcagtatgcaatatttttaaagatgttttgcccacagcaaatacaaacaacttctccaagacaattattaatttgggcgatggaagaggtaaagtagtcggtacctatgtgaaattagaggatagaagcgttatggaacctgtcgaagttgttaatgctaaatactccaagaaaaagaacaacaaaaataagtga

SEQ ID NO: 3535 - DNA, 615 bp, Saccharomyces cerevisiae
atggcaccaaagaaaccttctaagagacaaaatctgagaagagaagtcgcaccagaggtgtttcaagattcacaagctaggaatcaactagcgaatgttcctcatcttaccgaaaaatctgcccagcgtaagccttctaaaaccaaggttaaaaaagaacagtctttggctagactttatggtgcgaagaaggacaagaaggggaaatattctgagaaagacttgaatattccaacactcaatagagctatcgttccgggtgttaaaataaggaggggaaagaaaggtaagaaattcattgctgataacgacactctgactttaaaccgtttaataacaactattggtgacaagtacgacgatatagctgagagtaagcttgaaaaggctagaagattagaagagatacgagaattgaaaagaaaggaaattgaaagaaaggaagcgcttaaacaagataaactagaagaaaaaaaagacgagattaaaaagaagtcttctgtcgcaaggactatacgtagaaagaataaacgtgatatgttgaaaagtgaagcaaaagctagtgaaagtaaaactgaaggaaggaaggtaaaaaaagtctcatttgctcaatag

SEQ ID NO: 3536 - DNA, 615 bp, Artificial Sequence
  Description of Artificial Sequence: Synthetic polynucleotide
atggcaccaaagaaaccttctaagagacaaaatttaagaagagaagtcgcaccagaggtgtttcaagattctcaagctaggaatcaattggcgaatgttcctcatcttaccgaaaaatctgcccagcgtaagccttctaaaaccaaggttaaaaaagaacagtctttggctagactttatggtgcgaagaaggacaagaaggggaaatattctgagaaagacttgaatattccaacactcaatagagctatcgttccgggtgttaaaataaggaggggaaagaaaggtaagaaattcattgctgataacgacactttaactttaaaccgtttaataacaactattggtgacaagtacgacgatatagctgagagtaagcttgaaaaggctagaagattagaagagataagagaattgaaaagaaaggaaattgaaagaaaggaagcgcttaaacaagataaattagaagaaaaaaaagacgagattaaaaagaagtcttctgtcgcaaggactatacgtagaaagaataaacgtgatatgttgaaaagtgaagcaaaagctagtgaaagtaaaactgaaggaaggaaggtaaaaaaagtcagttttgctcaatga

SEQ ID NO: 3537 - DNA, 2520 bp, Saccharomyces cerevisiae
atgctggagacgttgcgcggaaataagctgcattctggcacctcaaaaggcgccaacaaaaagttgaatgaactcttggaatcgtccgacaatctaccatcagcatcctctgaattaggttcaattcaagtaagcattaatgaattgagaagacgtgtttttcaattgagaagcaagaacaaagctagcaaggactatactaaagcccactatttattggctaacagtggcttaagctttgaagatgttgatgctttcatcaaagacttgcagacgaatcaatttttggaaccaaatccaccaaaaataattgaaagtgaggaattagaattctatataagaactaaaaaggaagaaaacattttgatgtctatcgaacagcttttaaatggcgctacaaaagattttgataattttattaatcataacttaaatcttgattgggctcagcataaaaatgaagtcatgaaaaattttggcatccttatacaagataagaaaactgtagatcacaaaaaatccatcagttctctagaccctaagcttccaagctggggtaataagggcaataacattttaaatagcaacgaatccagattgaatgtcaacgaaaataatatccttagggaaaagtttgaaaattatgccagaattgtgtttcaatttaacaatagtagacaagcaaatggaaattttgatatagccaacgaattcatctcaatattatcttctgcgaacggaacaagaaacgctcaattgctagagagctggaagattctcgaatcgatgaaaagtaaggatattaatattgttgaagtcgggaaacagtacctggagcaacagtttttacaatataccgacaatttatataagaaaaacatgaatgaaggattggccacaaatgtcaataaaatcaagtcattcattgatacgaagttgaagaaagcagacaaatcatggaagatttctaatttaactgttatcaatggtgttccaatatgggccttaatattttatcttttaagagcaggtctaatcaaggaagcattgcaagttctagtggagaataaggcgaatatcaaaaaagtagaacaatcattccttacttatttcaaagcatatgcttcttcaaaggaccacggcctaccagtggaatattccaccaagcttcatacagaatacaaccaacacataaaaagttcactagatggtgatccttatcgtctagctgtctacaagttgatcggaagatgcgacttgagtagaaagaacattcctgcagttactttaagcattgaagattggttgtggatgcatctcatgttgatcaaagaaaaggacgcggagaatgatcctgtttatgaaagatattccttagaagacttccagaatataataatatcgtatggaccatctcgcttctcaaactattacttacagacccttttgttaagtgggctctatggattggctattgactatacttatacatttagtgaaatggatgcggtgcatttggcaatagggctagcaagcttgaagctatttaagattgatagctcaacgcgcttgaccaaaaaacccaaaagggatatcaggttcgcaaacatactagctaattataccaagtcctttaggtattcagatcctagagttgctgtcgaatatttggttttaataactctaaatgaaggacctaccgatgtcgagttatgccatgaggcgttgagggagctagtattggaaactaaggaatttactgttcttttgggtaaaattggacgcgatggagctagaattccgggggtgatcgaagaaagacaacctttattacacgttcgtgatgaaaaggagtttttgcatacaattacagaacaagcagcaagaagggcagacgaagacggcagaatatatgatagtatattactgtaccagcttgctgaagaatatgacatagttattaccctcgtcaatagtttattaagtgatacacttagtgcgtcagatttagatcaaccattggttggacctgatgacaatagcgagacgaatcctgtcttgttggctaggaggatggcgtccatatattttgataatgctggtatatcgagacagattcatgttaaaaacaaagaaatttgtatgctgctcttaaatatctcctctatcagggagctatatttcaataaacaatggcaagaaacactatcccaaatggagttattggatttacttcctttctcagacgagctatctgctagaaagaaagcacaagatttctctaatttagatgacaacattgtgaaaaatattccaaatttgttgattatcactctaagctgtatatcgaacatgattcatatcttgaacgaaagtaagtatcaatcgtccacaaaaggtcaacaaattgattccttaaaaaatgttgcgagacaatgtatgatttatgctggtatgattcaatacagaatgccaagggaaacgtacagcactttaattaatatagacgtctctctatga

SEQ ID NO: 3538 - DNA, 2520 bp, Artificial Sequence
  Description of Artificial Sequence: Synthetic polynucleotide
atgttagagacgttgcgcggaaataagttgcattctggcacctccaaaggcgccaacaaaaagttgaatgaactcttggaatcttccgacaatttaccatctgcatcctctgaattaggttccattcaagtaagcattaatgaattgagaagacgtgtttttcaattgagaagcaagaacaaagctagcaaggactatactaaagcccactatttattggctaacagtggcttaagctttgaagatgttgatgctttcatcaaagacttgcagacgaatcaatttttggaaccaaatccaccaaaaataattgaaagtgaggaattagaattctatataagaactaaaaaggaagaaaacattttgatgtctatcgaacagcttttaaatggcgctacaaaagattttgataattttattaatcataacttaaatcttgattgggctcagcataaaaatgaagtcatgaaaaattttggcatccttatacaagataagaaaactgtagatcacaaaaaatccatcagttctttggaccctaagcttccaagctggggtaataagggcaataacattttaaatagcaacgaatccagattgaatgtcaacgaaaataatatccttagggaaaagtttgaaaattatgccagaattgtgtttcaatttaacaatagtagacaagcaaatggaaattttgatatagccaacgaattcatctccatattatcttctgcgaacggaacaagaaacgctcaattgttggagagctggaagattctcgaaagtatgaaaagtaaggatattaatattgttgaagtcgggaaacagtacttggagcaacagtttttacaatataccgacaatttatataagaaaaacatgaatgaaggattggccacaaatgtcaataaaatcaagagtttcattgatacgaagttgaagaaagcagacaaaagttggaagatttctaatttaactgttatcaatggtgttccaatatgggccttaatattttatcttttaagagcaggtttgatcaaggaagcattgcaagttttggtggagaataaggcgaatatcaaaaaagtagaacaaagtttccttacttatttcaaagcatatgcttcttccaaggaccacggcttaccagtggaatattccaccaagcttcatacagaatacaaccaacacataaaaagttctttagatggtgatccttatcgtttggctgtctacaagttgatcggaagatgcgacttgagtagaaagaacattcctgcagttactttaagcattgaagattggttgtggatgcatctcatgttgatcaaagaaaaggacgcggagaatgatcctgtttatgaaagatattccttagaagacttccagaatataataatatcttatggaccatctcgcttcagtaactattacttacagacccttttgttaagtgggctctatggattggctattgactatacttatacatttagtgaaatggatgcggtgcatttggcaatagggttagcaagcttgaagttatttaagattgatagctctacgcgcttgaccaaaaaacccaaaagggatatcaggttcgcaaacatattggctaattataccaagtcctttaggtattctgatcctagagttgctgtcgaatatttggttttaataactttgaatgaaggacctaccgatgtcgagttatgccatgaggcgttgagggagttggtattggaaactaaggaatttactgttcttttgggtaaaattggacgcgatggagctagaattccgggggtgatcgaagaaagacaacctttattacacgttcgtgatgaaaaggagtttttgcatacaattacagaacaagcagcaagaagggcagacgaagacggcagaatatatgatagtatattattgtaccagcttgctgaagaatatgacatagttattaccctcgtcaatagtttattaagtgatacacttagtgcgtctgatttagatcaaccattggttggacctgatgacaatagcgagacgaatcctgtcttgttggctaggaggatggcgtccatatattttgataatgctggtatatctagacagattcatgttaaaaacaaagaaatttgtatgttgctcttaaatatctcctctatcagggagttgtatttcaataaacaatggcaagaaacattatcccaaatggagttattggatttacttcctttcagtgacgagctttctgctagaaagaaagcacaagatttctctaatttagatgacaacattgtgaaaaatattccaaatttgttgattatcactttaagctgtataagcaacatgattcatatcttgaacgaaagtaagtatcaatcttccacaaaaggtcaacaaattgattccttaaaaaatgttgcgagacaatgtatgatttatgctggtatgattcaatacagaatgccaagggaaacgtacagcactttaattaatatagacgtctctttgtga

SEQ ID NO: 3539 - DNA, 468 bp, Saccharomyces cerevisiae
atgagtggaaatcaaatggctatgggatcagaacaacaacagaccgtagggtcccgaacggtgagtgtggaagaggttcccgcagttttgcagcttcgagcaactcaagatcctccaagaagccaggaggcaatgcctacaaggcacaatgtaagatgggaagaaaatgtgattgacaatgaaaacatgaataaaaaaaagaccaagatatgctgcatttttcatccacaaaatgaggatgaagaagagtgcaaccatcattcagatgatgatggatcctcttcttccggatcctcttcttcagaatctgagaatgagaaggatcttgactttaacgaacgtagacaaagaagattggaaaggcgccatcgtaaacttgagaaaaaaaggtcatatagccccaatgcttatgaaatccaaccagattattctgaatacaggcgaaaacagcaggaaaagaaggactga

SEQ ID NO: 3540 - DNA, 468 bp, Artificial Sequence
  Description of Artificial Sequence: Synthetic polynucleotide
atgagtggaaatcaaatggctatgggatctgaacaacaacagaccgtagggtccagaacggtgagtgtggaagaggttcccgcagttttgcagcttcgtgcaactcaagatcctccaagaagccaggaggcaatgcctacaaggcacaatgtaagatgggaagaaaatgtgattgacaatgaaaacatgaataaaaaaaagaccaagatatgctgcatttttcatccacaaaatgaggatgaagaagagtgcaaccatcattctgatgatgatggatcctcttcttccggatcctcttcttctgaatctgagaatgagaaggatcttgactttaacgaacgtagacaaagaagattggaaaggcgccatcgtaaacttgagaaaaaaaggagttatagccccaatgcttatgaaatccaaccagattattctgaatacaggagaaaacagcaggaaaagaaggactga

SEQ ID NO: 3541 - DNA, 921 bp, Saccharomyces cerevisiae
atggaacgactacagagattgatgatgaatagtaaggtggggtccgcggacaccggccgtgacgatacgaaagaaactgtttatatttcttcgattgcgcttttaaagatgctaaagcatggtagagctggtgttcccatggaagtcatggggttgatgttaggtgagtttgtcgatgattatacggttaacgttgtggacgtgtttgcgatgcctcaatcgggtaccggagtttctgttgaggctgtcgatgatgttttccaagcgaagatgatggacatgttaaaacaaacgggcagagaccaaatggtcgttggctggtaccactctcatccagggtttggctgttggctatcttctgttgatgttaatactcaaaaatcttttgaacaactaaacagcagagctgttgctgtcgttgttgaccctattcaatccgttaagggaaaagttgtcatcgatgcttttagattgattgacacgggcgcattgataaataacttagagcctagacaaacaacctccaacacaggcttattgaacaaggccaacattcaagccttaattcacggtctgaataggcattactattctttaaatattgattatcataaaaccgcgaaggaaaccaagatgttaatgaacttacataaagaacagtggcaatcaggtcttaagatgtacgattatgaagaaaaagaagaatcaaatttggctgctacaaagagtatggttaagatagccgaacagtactctaagagaatagaagaggaaaaggaattaaccgaagaagaacttaagacaagatacgttggtaggcaagatccaaagaagcacctttccgaaacagcagatgagacactagagaacaatattgtttctgtgctgacggcgggtgttaattcagtggcaattaaataa

SEQ ID NO: 3542 - DNA, 921 bp, Artificial Sequence
  Description of Artificial Sequence: Synthetic polynucleotide
atggaaagattacagagattgatgatgaatagtaaggtggggtccgcggacaccggccgtgacgatacgaaagaaactgtttatatttcttccattgcgcttttaaagatgttgaagcatggtagagctggtgttcccatggaagtcatggggttgatgttaggtgagtttgtcgatgattatacggttaacgttgtggacgtgtttgcgatgcctcaatctggtaccggagtttctgttgaggctgtcgatgatgttttccaagcgaagatgatggacatgttaaaacaaacgggcagagaccaaatggtcgttggctggtaccactctcatccagggtttggctgttggttatcttctgttgatgttaatactcaaaaatcttttgaacaattgaacagcagagctgttgctgtcgttgttgaccctattcaatccgttaagggaaaagttgtcatcgatgcttttagattgattgacacgggcgcattgataaataacttagagcctagacaaacaacctccaacacaggcttattgaacaaggccaacattcaagccttaattcacggtttgaataggcattactattctttaaatattgattatcataaaaccgcgaaggaaaccaagatgttaatgaacttacataaagaacagtggcaatctggtcttaagatgtacgattatgaagaaaaagaagaaagtaatttggctgctacaaagagtatggttaagatagccgaacagtactctaagagaatagaagaggaaaaggaattaaccgaagaagaacttaagacaagatacgttggtaggcaagatccaaagaagcacctttccgaaacagcagatgagacattagagaacaatattgtttctgtgttaacggcgggtgttaattctgtggcaattaaatga

SEQ ID NO: 3543 - DNA, 1347 bp, Saccharomyces cerevisiae
atggaggttgataacaaaaggagacattcagaagatgagttaaaacaggaggcagtaaaaaagataaagtctcaggaaccaaactatgcctatcttgagactgtagtaagagaaaaactagatttcgattctgagaaaatttgctgcattactctgtcccctttgaatgtatattgttgcctcgtgtgtggacattattatcaggggagacatgaaaagagtcctgctttcatacattcaattgatgaaaaccatcacgtcttcttgaatttgacaagtttgaagttttacatgttgccgcaaaatgtccaaattttacatgacggtgaggttcaattgttgaacagcataaaatttgcagcttatccgacttattgtccaaaagatctagaagattttccgagacagtgttttgatttgagcaatcgcacatatctgaatggatttatagggttcaccaatgcggcaacttatgactatgcgcatagtgtattgcttttgatatcgcacatggttccagtgcgggaccacttcctactgaatcattttgataatcaaggggaatttatcaaaaggttatccatatgtgtaaagaaaatttggtcccctaaactattcaaacatcatctttcagttgacgattttgtatcctatttgaaagttagagaaggtttaaatttaaatcctatagacccgcgtctcttccttttgtggctattcaataaaatttgctcgtcctcgaacgacttaaagtcaattttaaaccattcttgtaaaggcaaagtaaagatagcaaaagttgaaaataagcctgaggccagtgagtctgttacaggaaaagtcattgtcaaaccattttgggttctgactctcgatttgccggagttttcaccctttgaagatggcaacagcgttgatgatctcccacaaataaatatcactaaattattgactaaatttactaagtcaagaagctcctctactagcaccgtttttgaactaacgcgattaccgcagtttttaatatttcatttcaataggtttgaccgtaacagtgatcatcctgtcaaaaatagaaaccaaacgttggtggaattttccagtgaacttgaaattttgcacgtcaagtatcgcttaaaagcaaatgtggtccatgtggtcattaaacaaccatccacagatggaaacgcatttaatggtgatgaaaaaagccattggattactcagctgtatgataacaaaagtgaaaaatggatagaaatagatggcataaatacgacagagagagaagccgagcttttatttttgaaggaaacgtttatacaagtatgggaaaagcaagagtga

SEQ ID NO: 3544 - DNA, 1347 bp, Artificial Sequence
  Description of Artificial Sequence: Synthetic polynucleotide
atggaggttgataacaaaaggagacattctgaagatgagttaaaacaggaggcagtaaaaaagataaagtctcaggaaccaaactatgcctatcttgagactgtagtaagagaaaaattggatttcgattctgagaaaatttgctgcattactttatcccctttgaatgtatattgttgcctcgtgtgtggacattattatcaggggagacatgaaaagagtcctgctttcatacattctattgatgaaaaccatcacgtcttcttgaatttgacaagtttgaagttttacatgttgccgcaaaatgtccaaattttacatgacggtgaggttcaattgttgaacagcataaaatttgcagcttatccgacttattgtccaaaagatttggaagattttccgagacagtgttttgatttgagcaatcgcacatatttgaatggatttatagggttcaccaatgcggcaacttatgactatgcgcatagtgtattgcttttgatatctcacatggttccagtgagagaccacttcttattgaatcattttgataatcaaggggaatttatcaaaaggttatccatatgtgtaaagaaaatttggtcccctaaattattcaaacatcatctttctgttgacgattttgtatcctatttgaaagttagagaaggtttaaatttaaatcctatagacccgcgtctcttccttttgtggcttttcaataaaatttgctcttccagtaacgacttaaagtctattttaaaccattcttgtaaaggcaaagtaaagatagcaaaagttgaaaataagcctgaggccagtgagtctgttacaggaaaagtcattgtcaaaccattttgggttttaactctcgatttgccggagttttctccctttgaagatggcaacagcgttgatgatctcccacaaataaatatcactaaattattgactaaatttactaagtctagaagctcctctactagcaccgtttttgaattgacgagattaccgcagtttttaatatttcatttcaataggtttgaccgtaacagtgatcatcctgtcaaaaatagaaaccaaacgttggtggaattttccagtgaacttgaaattttgcacgtcaagtatcgcttaaaagcaaatgtggtccatgtggtcattaaacaaccatccacagatggaaacgcatttaatggtgatgaaaaaagccattggattactcagttatatgataacaaaagtgaaaaatggatagaaatagatggcataaatacgacagagagagaagccgagcttttatttttgaaggaaacgtttatacaagtatgggaaaagcaagagtga

SEQ ID NO: 3545 - DNA, 1608 bp, Saccharomyces cerevisiae
atgtgccttgaaccaatctctcttgttgttttcggatccctggtgtttttctttggcttggtgaagtatttcaaacgtggagaacggcaaagaacaagaggaattttacagccagagtacaaagataagtattattacagtaaagaaaaaggggaagaaatgggcgaggtagcaaacgtaaatgaaattccggtcaagataagaaatcataagtatcctgcgaaagaacataacttgagggttaaagatttgttgttaaatcgcaatccgaagctatcaaagatatccacagcattttttattgctggtgaagaattagagggaaacaagtattgtgacaccaacaaagattttagacagaatagatatttttatcatttgtcaggtgttgatatacctgcttcggcgatattgtttaactgtagcacagataagctgacattgtttttgccaaacatcgatgaagaagatgtcatatggagcggtatgcctttgagtttggatgaggcaatgagagtgtttgacattgatgaggccttgtacatatctgatctggggaaaaaatttaaagaattgcaagacttcgctatctttacaaccgatttggacaatgttcatgacgagaatattgcaagatcactaattccttcagaccctaacttcttttatgctatggatgaaactagagcaattaaggattggtatgaaattgaaagcatcagaaaagcttgtcagatttcagacaagagccatttggccgttatgtccgcgttgcccatcgaactgaacgagttacaaatacaagctgaatttgaataccatgcaacccgtcaaggtggtcgttctttgggctatgaccccatttgttgttctggaccggcatgtggcactttacattacgtcaagaattcagaagatatcaaaggtaaacattccatcttaattgatgcaggtgcagaatggagacaatatacaagtgatatcaccagatgtttcccaacttcaggcaagtttactgcggaacatcgtgaagtttacgaaaccgttcttgacatgcaaaaccaagcaatggaaaggattaaacctggtgctaaatgggacgatttacatgcactgacacacaaggttcttattaaacatttcttaagtatgggtattttcaagaaagagttttctgaggacgaaatctttaaaagaagagcttcttgcgctttttatccccatggactagggcatatgttggggcttgatgtacacgacgttggtggtaatccaaactatgacgacccagatccaatgtttagatatttaagaatccgccgtcctttgaaagaaaatatggttatcactaatgaaccaggttgctactttaatcaatttttgatcaaagaatttttggaaaagcaccccgaaagattggaagttgtcgatatgagcgtattgaaaagatacatgtatgtcggtggtgttagaattgaagatgatatccttgttaccaaagatggttacgagaacttaactggtattacttctgaccctgatgaaattgaaaaaatcgttcaaaaaggtttgaagaaaccccgttcaggtttccacgtaatcgtttag

SEQ ID NO: 3546 - DNA, 1608 bp, Artificial Sequence
  Description of Artificial Sequence: Synthetic polynucleotide
atgtgccttgaaccaatctctcttgttgttttcggatccttagtgtttttctttggcttggtgaagtatttcaaacgtggagaaagacaaagaacaagaggaattttacagccagagtacaaagataagtattattacagtaaagaaaaaggggaagaaatgggcgaggtagcaaacgtaaatgaaattccggtcaagataagaaatcataagtatcctgcgaaagaacataacttgagggttaaagatttgttgttaaatcgcaatccgaagttatccaagatatccacagcattttttattgctggtgaagaattagagggaaacaagtattgtgacaccaacaaagattttagacagaatagatatttttatcatttgtctggtgttgatatacctgcttctgcgatattgtttaactgtagcacagataagttaacattgtttttgccaaacatcgatgaagaagatgtcatatggagcggtatgcctttgagtttggatgaggcaatgagagtgtttgacattgatgaggccttgtacatatctgatttagggaaaaaatttaaagaattgcaagacttcgctatctttacaaccgatttggacaatgttcatgacgagaatattgcaagatccttgattccttctgaccctaacttcttttatgctatggatgaaactagagcaattaaggattggtatgaaattgaaagcatcagaaaagcttgtcagatttctgacaagagccatttggccgttatgtccgcgttgcccatcgaattgaacgagttacaaatacaagctgaatttgaataccatgcaacccgtcaaggtggtcgttctttgggctatgaccccatttgttgttctggaccggcatgtggcactttacattacgtcaagaattctgaagatatcaaaggtaaacattccatcttaattgatgcaggtgcagaatggagacaatatacaagtgatatcaccagatgtttcccaacttctggcaagtttactgcggaacatcgtgaagtttacgaaaccgttcttgacatgcaaaaccaagcaatggaaaggattaaacctggtgctaaatgggacgatttacatgcattaacacacaaggttcttattaaacatttcttaagtatgggtattttcaagaaagagttttctgaggacgaaatctttaaaagaagagcttcttgcgctttttatccccatggattagggcatatgttggggcttgatgtacacgacgttggtggtaatccaaactatgacgacccagatccaatgtttagatatttaagaatccgccgtcctttgaaagaaaatatggttatcactaatgaaccaggttgctactttaatcaatttttgatcaaagaatttttggaaaagcaccccgaaagattggaagttgtcgatatgagcgtattgaaaagatacatgtatgtcggtggtgttagaattgaagatgatatccttgttaccaaagatggttacgagaacttaactggtattacttctgaccctgatgaaattgaaaaaatcgttcaaaaaggtttgaagaaaccccgttctggtttccacgtaatcgtttga

SEQ ID NO: 3547 - DNA, 1062 bp, Saccharomyces cerevisiae
atggtcgatacgcataaactagcagacgacgttcttcagctattggataaccgtatcgaagataattatagggtttgtgttatcctagtcggttctccaggctccggtaagtctactattgcggaagaactttgtcaaattataaatgaaaaatatcacacatttttgtcagagcatccaaatgttattgaggttaatgataggttgaaacctatggttaacctagtagactctttaaagacgctccagcccaataaagtagctgaaatgattgaaaatcaggggctgtttaaagatcatgttgaggatgttaattttcaaccagtcaagtactcagcccttacatcaaataatgaagaatgtaccgcagtagttgccagaggtggtactgcgaatgccataagaatcgcagcagttgataatccagtcaatgttaacaagttggcccaggatagtatcaatatagcgcaaatagtcccaatggatggttttcacttatctcgcagatgtctagacctattcaaagacccacaaactgcccataaaagaagaggttcgccctcaacgtttgacagtaacaatttcttacaattgtgtaaaattctagccaagacgtccctatgtaaggtctcctcacatcataaattttactccacttcaagcgtttttgagaagttatccaaaacttttagccaaacaattcctgatatctttgttccaggatttaaccatgcactaaaagacccaactccagatcagtactgtatttccaaatttacaaggatagttatacttgaagggttatacctactgtatgaccaagaaaactggaagaaaatttacaaaacattagctgatacgggagcacttcttgtttataagattgacatagactatgaggccaccgaagaaagggtggccaaaaggcatttgcaatcagggttagtcacgactattgcagaaggacgagagaagtttcgcagcaatgatttgttgaatggcagggatatagataatcatttaattaaggtagataatatcgtccatatccgcaacgactag

SEQ ID NO: 3548 - DNA, 1062 bp, Artificial Sequence
  Description of Artificial Sequence: Synthetic polynucleotide
atggtcgatacgcataaattggcagacgacgttcttcagttattggataaccgtatcgaagataattatagggtttgtgttatcctcgtcggttctccaggctccggtaagtctactattgcggaagaactttgtcaaattataaatgaaaaatatcacacatttttgagtgagcatccaaatgttattgaggttaatgataggttgaaacctatggttaacttggtagactctttaaagacgctccagcccaataaagtagctgaaatgattgaaaatcaggggttgtttaaagatcatgttgaggatgttaattttcaaccagtcaagtactctgcccttacaagtaataatgaagaatgtaccgcagtagttgccagaggtggtactgcgaatgccataagaatcgcagcagttgataatccagtcaatgttaacaagttggcccaggatagtatcaatatagcgcaaatagtcccaatggatggttttcacttatctcgcagatgtttggaccttttcaaagacccacaaactgcccataaaagaagaggttctcccagtacgtttgacagtaacaatttcttacaattgtgtaaaattttagccaagacgtccttatgtaaggtctcctctcatcataaattttactccacttccagcgtttttgagaagttatccaaaacttttagccaaacaattcctgatatctttgttccaggatttaaccatgcattgaaagacccaactccagatcagtactgtatttccaaatttacaaggatagttatacttgaagggttatacttgttatatgaccaagaaaactggaagaaaatttacaaaacattagctgatacgggagcacttcttgtttataagattgacatagactatgaggccaccgaagaaagggtggccaaaaggcatttgcaaagtgggttagtcacgactattgcagaaggaagagagaagtttcgcagcaatgatttgttgaatggcagggatatagataatcatttaattaaggtagataatatcgtccatatccgcaacgactga

SEQ ID NO: 3549 - DNA, 666 bp, Saccharomyces cerevisiae
atgagtgaccaaatcaacgttttgtcaatgcaacaacaacaacagcagcagcagcagcagcagcaagtatatatgtctcctcaagcagaaaacttgaatcatatgtacttgttagttaacaagctagtgaaacagttgagggaaaatcaagcagaaaaggcgaaaatactaaggaacatagacatattatccggaagcttaaacaagtatgagacatctgaagaacctcacgataccacggaaaatattgcattatttaatagatttctagaacaaagagggaaagctcctattactgagaaagagcaactaagcaacaatctggatgaaaatgcgaaagatgacgttatgctaggagtgttgaagcgccaaaattcaatgctccggaaaagtttacaggaatccaagcaggtaacccttgaatccatggatttattgtcttactccgaagactctttaaattacattgtcgcccaattaagaggaaacattctaatgcatcataaagagactatcaaattgattaggcagaaattccagacggagacaattcccctcgaagatgaagagttcaagatgtatttggaaaatgttaatggtctgcaaaaattgacagatatatctcacacttatagattactactgaggttacatgcacaagattga

SEQ ID NO: 3550 - DNA, 666 bp, Artificial Sequence
  Description of Artificial Sequence: Synthetic polynucleotide
atgagtgaccaaatcaacgttttgtccatgcaacaacaacaacagcagcagcagcagcagcagcaagtatatatgtctcctcaagcagaaaacttgaatcatatgtacttgttagttaacaagttagtgaaacagttgagggaaaatcaagcagaaaaggcgaaaatattaaggaacatagacatattatccggaagcttaaacaagtatgagacatctgaagaacctcacgataccacggaaaatattgcattatttaatagatttttggaacaaagagggaaagctcctattactgagaaagagcaattgagcaacaatttggatgaaaatgcgaaagatgacgttatgcttggagtgttgaagcgccaaaattctatgctcagaaaaagtttacaggaatccaagcaggtaacccttgaatccatggatttattgtcttactccgaagactctttaaattacattgtcgcccaattaagaggaaacattttgatgcatcataaagagactatcaaattgattaggcagaaattccagacggagacaattcccctcgaagatgaagagttcaagatgtatttggaaaatgttaatggtttacaaaaattgacagatatatctcacacttatagattattattgaggttacatgcacaagattga

SEQ ID NO: 3551 - DNA, 2259 bp, Saccharomyces cerevisiae
atggcaagcatcggttcgcaagtgagaaaagctgcttctagtattgaccctatcgtcacggattacgcagtgggctactttaaccacttgtccggaataacttttgatgctgttcaaagtaagcaggtagatttgtccactgaagtgcaatttgtgtccgatttattgattgatgcgggtgcgtcaaaggctaaagttaaagaactatcggaaagtattttgaagcaattgactactcaactaaaggagaacgaagccaaattggaattgaccggtgatacgtccaagagattacttgatattaatgtcttaaagagtcataacagtaaatccgatatcaacgtctcattaagcatgctgggtgtgaacggtgacatcgaacatactggtagaaagatggaaacaagagttgatttgaaaaaactggccaaggctgaacaaaagatcgcaaagaaagtcgccaagagaaataacaaatttgttaaatacgaggcttctaaattgatcaatgaccaaaaggaggaggattacgattctttctttttgcaaatcaaccctttagaattcggttcatccgctggtaaatccaaggatatccatattgacactttcgacttgtacgttggtgacggtcaaagaattttgtccaacgcccaattgactctaagttttggtcacagatatggtcttgtgggccaaaatggtattggtaaatctactttgttaagggctctatctagaagagagctgaacgtccccaaacatgtttcgattttacacgtggaacaagagttaagaggtgatgatacaaaggctttacaaagtgtgctggatgcagacgtttggagaaaacaactattaagtgaagaagccaagatcaatgaaagattaaaggaaatggatgtattaagacaggaattcgaagaagacagtttagaagttaaaaaattggacaatgaaagagaagacttggataaccatttgatacagatttctgacaaattagtcgatatggaatctgacaaggctgaagctagggcagcatcaatcttatatggtttggggttcagtacggaggcacagcaacaacccactaattccttttccggtggttggagaatgagattgtccttggcaagagccttattctgtcaaccagatcttttgttgttagatgaaccttccaatatgttggatgtgccatccatcgcttatttagcagagtatttgaaaacatatccaaatacagttttgacagtttctcacgaccgtgcattcttgaatgaagtggctacagatatcatttatcaacacaacgaaagactagactattacagaggccaagatttcgataccttttacaccacaaaggaggaacgtagaaagaatgctcaacgtgagtatgataaccaaatggtttacagaaagcacttgcaagagtttattgacaaatacagatacaatgctgccaaatcacaggaagctcaatcaagaattaagaaattggaaaaattgcccgttttggagccacctgaacaagacaaaaccattgatttcaaattccctgaatgtgataaattgtctccaccaattatccaattgcaagacgtttcctttggttatgatgaaaacaacctattattgaaagatgttaacctggacgttcaaatggattccagaattgcccttgtaggtgccaatggttgtggtaagactacactgttgaagattatgatggagcagttaagaccactaaaaggctttgtatcaagaaacccaagattacgtataggctacttcactcaacatcatgtggattctatggatttgaccacgtctgcagtggactggatgtccaaatccttcccaggtaaaactgatgaagagtatagacgtcatctaggttcatttggtatcactggtaccctgggtctacaaaagatgcaattattatccggtggtcaaaaatctcgtgtagcattcgctgcattgtgtttaaataatccacacattttggttctggatgaaccttctaaccatttggataccactggtctagacgctttggtagaagccttgaaaaatttcaacggtggtgtcttaatggtttcccatgatatctctgttattgactctgtttgtaaagagatttgggtttcagagcaaggtactgtcaagaggttcgaaggtacaatttacgactatagagattacatcttgcagtctgctgatgctgcaggtgtggttaaaaagcattga

SEQ ID NO: 3552 - DNA, 2259 bp, Artificial Sequence
  Description of Artificial Sequence: Synthetic polynucleotide
atggcaagcatcggttctcaagtgagaaaagctgcttctagtattgaccctatcgtcacggattacgcagtgggctactttaaccacttgtccggaataacttttgatgctgttcaaagtaagcaggtagatttgtccactgaagtgcaatttgtgtccgatttattgattgatgcgggtgcgtctaaggctaaagttaaagaattatctgaaagtattttgaagcaattgactactcaattgaaggagaacgaagccaaattggaattgaccggtgatacgtccaagagattacttgatattaatgtcttaaagagtcataacagtaaatccgatatcaacgtctctttaagcatgttgggtgtgaacggtgacatcgaacatactggtagaaagatggaaacaagagttgatttgaaaaaattggccaaggctgaacaaaagatcgcaaagaaagtcgccaagagaaataacaaatttgttaaatacgaggcttctaaattgatcaatgaccaaaaggaggaggattacgattctttctttttgcaaatcaaccctttagaattcggttcttccgctggtaaatccaaggatatccatattgacactttcgacttgtacgttggtgacggtcaaagaattttgtccaacgcccaattgactttaagttttggtcacagatatggtcttgtgggccaaaatggtattggtaaatctactttgttaagggctttatctagaagagagttgaacgtccccaaacatgtttctattttacacgtggaacaagagttaagaggtgatgatacaaaggctttacaaagtgtgttggatgcagacgtttggagaaaacaattattaagtgaagaagccaagatcaatgaaagattaaaggaaatggatgtattaagacaggaattcgaagaagacagtttagaagttaaaaaattggacaatgaaagagaagacttggataaccatttgatacagatttctgacaaattagtcgatatggaatctgacaaggctgaagctagggcagcatctatcttatatggtttggggttcagtacggaggcacagcaacaacccactaattccttttccggtggttggagaatgagattgtccttggcaagagccttattctgtcaaccagatcttttgttgttagatgaaccttccaatatgttggatgtgccatccatcgcttatttagcagagtatttgaaaacatatccaaatacagttttgacagtttctcacgaccgtgcattcttgaatgaagtggctacagatatcatttatcaacacaacgaaagattagactattacagaggccaagatttcgataccttttacaccacaaaggaggaacgtagaaagaatgctcaacgtgagtatgataaccaaatggtttacagaaagcacttgcaagagtttattgacaaatacagatacaatgctgccaaatctcaggaagctcaatctagaattaagaaattggaaaaattgcccgttttggagccacctgaacaagacaaaaccattgatttcaaattccctgaatgtgataaattgtctccaccaattatccaattgcaagacgtttcctttggttatgatgaaaacaacttattattgaaagatgttaacttggacgttcaaatggattccagaattgcccttgtaggtgccaatggttgtggtaagactacattattgaagattatgatggagcagttaagaccattgaaaggctttgtatctagaaacccaagattacgtataggctacttcactcaacatcatgtggattctatggatttgaccacgtctgcagtggactggatgtccaaatccttcccaggtaaaactgatgaagagtatagacgtcatttaggttcttttggtatcactggtaccttgggtttacaaaagatgcaattattatccggtggtcaaaaatctcgtgtagcattcgctgcattgtgtttaaataatccacacattttggttttggatgaaccttctaaccatttggataccactggtttggacgctttggtagaagccttgaaaaatttcaacggtggtgtcttaatggtttcccatgatatctctgttattgactctgtttgtaaagagatttgggtttctgagcaaggtactgtcaagaggttcgaaggtacaatttacgactatagagattacatcttgcagtctgctgatgctgcaggtgtggttaaaaagcattga

SEQ ID NO: 3553 - DNA, 1500 bp, Saccharomyces cerevisiae
atgagcggagaaacgtttgagttcaatattagacattctggtaaagtttacccaataacactttccactgatgctacttcagcagatttgaaaagcaaagcagaggaattgacccaagtcccaagtgcccgccaaaaatacatggttaaaggtggcttgtctggcgaagagtccattaaaatatatcccttaatcaagccaggatcgacagtaatgctattggggactccagatgctaacctgatttctaaaccagccaaaaagaataatttcattgaagaccttgcgcctgagcaacaagtccaacaatttgctcaattgcctgttggtttcaagaatatgggcaacacctgttatctgaatgctaccctacaggctttatacagagtgaacgatttaagggatatgattcttaattataacccttctcaaggtgtgtctaacagtggtgcacaagatgaagagattcacaaacaaatcgttattgaaatgaagcgttgttttgaaaatttacagaataaaagtttcaagagtgttttgccaattgtgttattaaacacgctaagaaagtgttatccacaatttgctgaacgtgattcacaaggtgggttctataaacagcaagacgctgaggagttgtttacacaactattccatagtatgagtattgtttttggtgacaaattttccgaagatttcaggattcaatttaaaactaccatcaaagacacagctaatgataacgatattactgttaaagaaaatgaaagcgattctaaattacaatgtcatatttctggtactacaaatttcatgagaaatgggctcctggaaggtttgaatgagaaaattgaaaaaagatcagacttgactggcgccaattccatctatagcgtcgaaaagaaaatatcaagattaccaaagtttttaactgttcagtacgttagatttttctggaaaaggtcaaccaacaaaaaatctaaaatattgcgtaaggtcgttttcccatttcaattagatgttgcagacatgcttaccccagaatacgcagcagagaaggtaaaagttcgtgacgaactgagaaaagttgaaaaggagaaaaatgaaaaggaaagagagatcaaaaggcgtaaatttgacccatcatccagtgaaaatgtcatgacaccaagagaacaatatgagacacaagtggctcttaacgaaagtgaaaaagatcaatggctcgaagagtataagaaacattttcctccaaacttggaaaaaggtgaaaacccatcttgtgtttataacttgatcggtgtcattacacatcaaggtgccaattctgagtctggacactatcaagctttcataagggacgaactggacgaaaataaatggtacaaatttaatgatgataaagttagcgttgttgaaaaggaaaaaattgaatctttagccggtgggggcgaaagtgatagtgcactgatcttaatgtataaaggatttggtctgtaa

SEQ ID NO: 3554 - DNA, 1500 bp, Artificial Sequence
  Description of Artificial Sequence: Synthetic polynucleotide
atgagcggagaaacgtttgagttcaatattagacattctggtaaagtttacccaataacactttccactgatgctacttctgcagatttgaaaagcaaagcagaggaattgacccaagtcccaagtgcccgccaaaaatacatggttaaaggtggcttgtctggcgaagagtccattaaaatatatcccttaatcaagccaggaagtacagtaatgcttttggggactccagatgctaacttgatttctaaaccagccaaaaagaataatttcattgaagaccttgcgcctgagcaacaagtccaacaatttgctcaattgcctgttggtttcaagaatatgggcaacacctgttatttgaatgctaccttgcaggctttatacagagtgaacgatttaagggatatgattcttaattataacccttctcaaggtgtgtctaacagtggtgcacaagatgaagagattcacaaacaaatcgttattgaaatgaagcgttgttttgaaaatttacagaataaaagtttcaagagtgttttgccaattgtgttattaaacacgttgagaaagtgttatccacaatttgctgaacgtgattctcaaggtgggttctataaacagcaagacgctgaggagttgtttacacaattattccatagtatgagtattgtttttggtgacaaattttccgaagatttcaggattcaatttaaaactaccatcaaagacacagctaatgataacgatattactgttaaagaaaatgaaagcgattctaaattacaatgtcatatttctggtactacaaatttcatgagaaatgggctcttggaaggtttgaatgagaaaattgaaaaaagaagtgacttgactggcgccaattccatctatagcgtcgaaaagaaaatatctagattaccaaagtttttaactgttcagtacgttagatttttctggaaaaggtctaccaacaaaaaatctaaaatattgcgtaaggtcgttttcccatttcaattagatgttgcagacatgcttaccccagaatacgcagcagagaaggtaaaagttcgtgacgaattgagaaaagttgaaaaggagaaaaatgaaaaggaaagagagatcaaaaggcgtaaatttgacccatcttccagtgaaaatgtcatgacaccaagagaacaatatgagacacaagtggctcttaacgaaagtgaaaaagatcaatggctcgaagagtataagaaacattttcctccaaacttggaaaaaggtgaaaacccatcttgtgtttataacttgatcggtgtcattacacatcaaggtgccaattctgagtctggacactatcaagctttcataagggacgaattagacgaaaataaatggtacaaatttaatgatgataaagttagcgttgttgaaaaggaaaaaattgaatctttagccggtgggggcgaaagtgatagtgcattaatcttaatgtataaaggatttggtttgtga

SEQ ID NO: 3555 - DNA, 513 bp, Saccharomyces cerevisiae
atgggttcaaacacttccaaagtgggtgctggtgcagaaaaacaacaagtctatactccgctaacacagatcgatttttcacagtctttggtttctcaattggattcatcgaaggaatcagactatgtcaccaagcaaaatgcagaaaagttcattgagaagaaggtttcacaaaggctatctaacctagaagttgaaacgttaaagaagtttgaagatactttgaacaattcactattatcagacgacgacaaggatgccgttgatggaatatcatcaagttcattgaataatcaaatcgagtcgttgaacaagaaactaacattatttgatcaattagagttacaaaagttggagaaatatgggggtgccaaaggtaaatctgataaaaaaaccgacaacggcagcatttctataaaggcaaaattgactgagtgtcttttggccaataagggcaagccattgaattgttacgaagagatggaagaattcaagaagctcgttatgggttga

SEQ ID NO: 3556 - DNA, 513 bp, Artificial Sequence
  Description of Artificial Sequence: Synthetic polynucleotide
atgggttccaacacttccaaagtgggtgctggtgcagaaaaacaacaagtctatactccgttaacacagatcgatttttcccagtctttggtttctcaattggattcttccaaggaaagtgactatgtcaccaagcaaaatgcagaaaagttcattgagaagaaggtttctcaaaggttatctaacttggaagttgaaacgttaaagaagtttgaagatactttgaacaattctttattaagtgacgacgacaaggatgccgttgatggaatatcttccagttctttgaataatcaaatcgagtctttgaacaagaaattaacattatttgatcaattagagttacaaaagttggagaaatatgggggtgccaaaggtaaatctgataaaaaaaccgacaacggcagcatttctataaaggcaaaattgactgagtgtcttttggccaataagggcaagccattgaattgttacgaagagatggaagaattcaagaagctcgttatgggttga

SEQ ID NO: 3557 - DNA, 609 bp, Saccharomyces cerevisiae
atgctaaattataaattgattttattgttttcctctttcctacaattaatctctttttctggctttatgatatgttgtttaacttcaccaataattagaaactgggggctggctcaagctgctggagtttcatatggtacctttggttactgtaaaactttgaattctttttcctgctctcgagtacgtttaatatataacacctcgaaagaaatattacctggcccttctcttgaacgttggtggctgagtcctaaggcaagacatacaataggaggacttttgatttcgataccggttgctacatgtttgactttcatttcttttgcacttcccttggttattatttttctttttcagactggaggaactaatgtctcacttattacttccaacgctatattacacatattgacacttttatcaactatttttgcatgcaccgtgatcctgttactttgcatgcaccgtgatcctgttacaatttcatccttatacgacttggtgtggctggctaactgttccctgttccctctgctcgttattggcgtgcattttctcagttttaggtttgatacgtctgcgcagtcagacagaaaacatagctaa

SEQ ID NO: 3558 - DNA, 609 bp, Artificial Sequence
  Description of Artificial Sequence: Synthetic polynucleotide
atgttgaattataaattgattttattgttttcctctttcttacaattaatctctttttctggctttatgatatgttgtttaacttctccaataattagaaactgggggttggctcaagctgctggagtttcttatggtacctttggttactgtaaaactttgaattctttttcctgctctagagtacgtttaatatataacacctccaaagaaatattacctggcccttctcttgaacgttggtggttgagtcctaaggcaagacatacaataggaggacttttgatttctataccggttgctacatgtttgactttcatttcttttgcacttcccttggttattatttttctttttcagactggaggaactaatgtctcccttattacttccaacgctatattacacatattgacacttttatctactatttttgcatgcaccgtgatcttattactttgcatgcaccgtgatcctgttacaatttcttccttatacgacttggtgtggttggctaactgttcccttttccctttactcgttattggcgtgcattttctcagttttaggtttgatacgtctgcgcagagtgacagaaaacatagctga

SEQ ID NO: 3559 - DNA, 87 bp, Saccharomyces cerevisiae
atgctccccagaaagtacaagcccgcctacaaaaaacaggcacatcgtgtgaagagtaatccacaaccagcttatactttccaatga

SEQ ID NO: 3560 - DNA, 87 bp, Artificial Sequence; identical to SEQ ID NO: 3559
  Description of Artificial Sequence: Synthetic oligonucleotide

SEQ ID NO: 3561 - DNA, 2364 bp, Saccharomyces cerevisiae
atggattctccatccaattctatccagaatttgcagcaagaagcccagggcagctcttccgcacagcttgctgaccatgatcatgatcgcgtatcaatggctatgcccttacaaaccgatcaaagtgttagtgtttcacaatcttctgataatttaaggagatcaagacgtgttcctaagccaagaacgagcatttatgatgaatacgaggaagagttaaaggaaagggcgaataaacccaagaggaagagacctgctcctcctaagaaaaaggcaccttccacacagaactctaaatcaaatgataaagtagagaaaaagaagactacctcaattgctaaggatggcaaacctacactgaagactaatgacaaaaaagtggcgccgaaacctaaaccagcccatgaacaagtagaacccgctttgatccctagcaattggacttctgtaatacccttgcttacttctgatttcaagaaccagtatagtgtcatctctaggttaaaaaatccgaacatgaagcctgtgccatatgctggagatatcattaagctgatggcgttcataaataagtttagttcttttttccattctgacctacaaaatttatcattccaagattttgaggtcggtttagatttgtatcccggcgatcctaatggaagcgcagctggtatagtgaagggtcctgaagacacctccttattgctatatcctgattttatggccatcaaggatatcgtctattgccaagacaaaatgaatttactgttcctatccttgttagatttaacatttactgaaaattttgatggtaaaagtgccaagaagaaaggtccattaacaacctgggagaatctaaaatcgtcctccaagaaagtattttccaatcctctttatcggttaagacttgtagctcgcgaatgggggtatccacgagaatggcgtcaacaactccccagtgaccaagatatctccaaacctaaaactgctctttttgaacaagatgaacaaacaccagtggtggatcccagtcatccagaaattttaacgccaaatatatatacctggaatgctaatgaaccactcccattggaatcaaatcctttgtataatcgagaaatggacaagaatggaattttggcgctcaaaccaatggatcgcgttgttttattgagggcgttaactgactggtgcgcttcccattcatctgctattcatgacgagatatacaaattaactcatggtaaaaaagatcccgtttttggcatccaaacacaacaagtgcctaggtatacaattgaaggggtagataataccataaatcagtttaaaaaactctgctcactaattcaatcaagatatgaaatcagaagtaagaaaaaacattttgttaaacaactaaaagagggtaaaaaaccagatttatcaaggaagctagaaatactgaaggaaattaaagcggaattgaagaacgctgtaaaatccgaaaaggatgaacttttgttctcactgtacgacaagtgggtcccattgtttgaaggcgaattacctgatcaaccattagccaatcctttttcggaaagactttataaattgcgattacaagagttcttccttggtagagttccccatataggtgatttttatatgccaagattacacagttatggggactcactcgaaatgagcaccttcactgatttgagaaatctacaagcattgctatcgaaattcaaaaataatgaatacaacgcttttacactgtttgaaaatgatggacaatcgatgagtgcccaattcaaattgttttaccatgacacaccatcgttggcgcatgatgttgcacgaggcagaaatacatcggggaaggtttattggtatgaattatgccacgattcagcaacactgctggagttcttggagttcttggactataaaattgttaaacctcaagatgagaaaaaggagggaaatgaaaaagaaaaagaagcactgaataatgaagcgcacatattggagcagaaatctaccactgataataatccctccataaatacaaacccgctaccaaaagacgcaaaatataacactgcgagaaagaagttacagatattaaaggaatttttatctgattactatttcattcttcgtcagtttgaacaaatgaaagtgcaatttgcagacatgaagccaggcaagagacagttgagaaggatacagcgacagactgtaaactataatacggaatatgatagcgaggaatatgtcgatgatgaagaagacgacgaagctgatatttatgatgacaacgacaatgattcttcttttgatgatggtagagttaaaaggcagcgcacttag

SEQ ID NO: 3562 - DNA, 2364 bp, Artificial Sequence
  Description of Artificial Sequence: Synthetic polynucleotide
atggattctccatccaattctatccagaatttgcagcaagaagcccagggcagctcttccgcacagcttgctgaccatgatcatgatcgcgtatctatggctatgcccttacaaaccgatcaaagtgttagtgtttctcaatcttctgataatttaaggagatctagacgtgttcctaagccaagaacgagcatttatgatgaatacgaggaagagttaaaggaaagggcgaataaacccaagaggaagagacctgctcctcctaagaaaaaggcaccttccacacagaactctaaatctaatgataaagtagagaaaaagaagactacctctattgctaaggatggcaaacctacattgaagactaatgacaaaaaagtggcgccgaaacctaaaccagcccatgaacaagtagaacccgctttgatccctagcaattggacttctgtaatacccttgcttacttctgatttcaagaaccagtatagtgtcatctctaggttaaaaaatccgaacatgaagcctgtgccatatgctggagatatcattaagttgatggcgttcataaataagtttagttcttttttccattctgacttgcaaaatttatctttccaagattttgaggtcggtttagatttgtatcccggcgatcctaatggaagcgcagctggtatagtgaagggtcctgaagacacctccttattgttatatcctgattttatggccatcaaggatatcgtctattgccaagacaaaatgaatttattattcttatccttgttagatttaacatttactgaaaattttgatggtaaaagtgccaagaagaaaggtccattaacaacctgggagaatttgaaatcttcctccaagaaagtattttccaatcctctttatagattaagacttgtagctcgcgaatgggggtatccaagagaatggcgtcaacaactccccagtgaccaagatatctccaaacctaaaactgctctttttgaacaagatgaacaaacaccagtggtggatcccagtcatccagaaattttaacgccaaatatatatacctggaatgctaatgaaccactcccattggaaagtaatcctttgtataatagagaaatggacaagaatggaattttggcgctcaaaccaatggatcgcgttgttttattgagggcgttaactgactggtgcgcttcccattcttctgctattcatgacgagatatacaaattaactcatggtaaaaaagatcccgtttttggcatccaaacacaacaagtgcctaggtatacaattgaaggggtagataataccataaatcagtttaaaaaactctgctctttgattcaatctagatatgaaatcagaagtaagaaaaaacattttgttaaacaattgaaagagggtaaaaaaccagatttatctaggaagttggaaatattgaaggaaattaaagcggaattgaagaacgctgtaaaatccgaaaaggatgaacttttgttctccttgtacgacaagtgggtcccattgtttgaaggcgaattacctgatcaaccattagccaatcctttttctgaaagactttataaattgagattacaagagttcttccttggtagagttccccatataggtgatttttatatgccaagattacacagttatggggactctctcgaaatgagcaccttcactgatttgagaaatttacaagcattgctttctaaattcaaaaataatgaatacaacgcttttacattatttgaaaatgatggacaatctatgagtgcccaattcaaattgttttaccatgacacaccatctttggcgcatgatgttgcaagaggcagaaatacatctgggaaggtttattggtatgaattatgccacgattctgcaacattattggagttcttggagttcttggactataaaattgttaaacctcaagatgagaaaaaggagggaaatgaaaaagaaaaagaagcattgaataatgaagcgcacatattggagcagaaatctaccactgataataatccctccataaatacaaacccgttaccaaaagacgcaaaatataacactgcgagaaagaagttacagatattaaaggaatttttatctgattactatttcattcttcgtcagtttgaacaaatgaaagtgcaatttgcagacatgaagccaggcaagagacagttgagaaggatacagagacagactgtaaactataatacggaatatgatagcgaggaatatgtcgatgatgaagaagacgacgaagctgatatttatgatgacaacgacaatgattcttcttttgatgatggtagagttaaaaggcagcgcacttga

SEQ ID NO: 3563 - DNA, 1341 bp, Saccharomyces cerevisiae
atggacgacaaagtttcagaaaaggagagctccccaaaacaaacagaggaggattctgaaggtaaaatggcacatgtgcagcctgcttcgtacgtgaataaaaaaaaatatgtttttgggaagacattaggtgctggtacatttggtgtggtgagacaagccaaaaacactgaaacaggggaggacgtggccgttaaaatcctgatcaagaaagcactaaagggaaacaaggttcagctagaggctttatacgacgagttagacattttacaaagactgcatcatccaaatatagtggcatttaaggattggtttgaatcaaaagacaagttctacattatcacgcaattagccaaagggggtgaattgttcgataggattttgaagaagggtaagttcactgaggaagatgcagtgagaattttggttgaaatattgagcgcagtcaaatatatgcattctcagaatattgttcatagggacttgaaaccggaaaatttactgtatatagataaaagtgacgaatctccactggtagttgctgattttggtatcgcaaagagattgaaaagtgatgaggaactcctctataagccggcaggctcactgggttacgtggctccagaggtacttactcaggacggtcatggtaaaccttgcgacatttggtcgataggtgtcattacgtatactttgctttgcggttattcggcgtttagagccgaaagggttcaagatttccttgacgaatgcacaactggtgagtatccagtgaagtttcataggccttattgggattccgtttccaataaagcaaaacaattcatcttgaaggctcttaatttggatccttcaaagagaccgaccgccgcagaactcttggaagatccatggattatttgtaccgaattgaagacgcacaatttattgcctgggttaaaggaaggattggatgctcgtcaaaagttccgtaattctgttgagagagtcagattaaacatgaagatccagaaattaagagatctgtatcttgaacagacagagagtgattcagattttgacgaaggaagtcaagcaaacggttcagttcctccattgaaagcaacggataccagtcaactatccaagaagctatcagaagaagaacagtctaagttgaagtccgagttaaccagcaaagcttttgcacaattagttaacacagtgcttgccgaaaaggaaaaatttttaaatattaacagagtctgtagttctgatagcgatcttcctgggagtgatataaagtctttggatgaggcgaaggagaaaccagaggggaaggataccaaaacagaagaatga

SEQ ID NO: 3564 - DNA, 1341 bp, Artificial Sequence
  Description of Artificial Sequence: Synthetic polynucleotide
atggacgacaaagtttctgaaaaggagagctccccaaaacaaacagaggaggattctgaaggtaaaatggcacatgtgcagcctgcttcttacgtgaataaaaaaaaatatgtttttgggaagacattaggtgctggtacatttggtgtggtgagacaagccaaaaacactgaaacaggggaggacgtggccgttaaaatcttaatcaagaaagcattgaagggaaacaaggttcagttggaggctttatacgacgagttagacattttacaaagattacatcatccaaatatagtggcatttaaggattggtttgaaagtaaagacaagttctacattatcacgcaattagccaaagggggtgaattgttcgataggattttgaagaagggtaagttcactgaggaagatgcagtgagaattttggttgaaatattgagcgcagtcaaatatatgcattctcagaatattgttcatagggacttgaaaccggaaaatttattatatatagataaaagtgacgaatctccattagtagttgctgattttggtatcgcaaagagattgaaaagtgatgaggaactcctctataagccggcaggctctttgggttacgtggctccagaggtacttactcaggacggtcatggtaaaccttgcgacatttggtccataggtgtcattacgtatactttgctttgcggttattctgcgtttagagccgaaagggttcaagatttccttgacgaatgcacaactggtgagtatccagtgaagtttcataggccttattgggattccgtttccaataaagcaaaacaattcatcttgaaggctcttaatttggatccttctaagagaccgaccgccgcagaactcttggaagatccatggattatttgtaccgaattgaagacgcacaatttattgcctgggttaaaggaaggattggatgctcgtcaaaagttccgtaattctgttgagagagtcagattaaacatgaagatccagaaattaagagatttatatcttgaacagacagagagtgattctgattttgacgaaggaagtcaagcaaacggttctgttcctccattgaaagcaacggataccagtcaattatccaagaagttatctgaagaagaacagtctaagttgaagtccgagttaaccagcaaagcttttgcacaattagttaacacagtgcttgccgaaaaggaaaaatttttaaatattaacagagtctgtagttctgatagcgatcttcctgggagtgatataaagtctttggatgaggcgaaggagaaaccagaggggaaggataccaaaacagaagaatga

SEQ ID NO: 3565 - DNA, 2127 bp, Saccharomyces cerevisiae
atggctcgtgacttacaaaatcatctactgttcgaagtagcaacagaagtaactaacagggttggtggtatttactctgtcttgaagtccaaggctccagtcactgtggcacaatacggagacaactatacgctgcttggacctttgaacaaggcgacttatgaaagtgaggttgaaaaacttgactgggaagatgaaagtatctttcctgaagagctgttaccgatccaaaaaactttgatgtccatgcgggaaaagggtgtgaactttgtctacggtaactggttgattgagggagcaccacgtgtcattttatttgagctggattctgtaagacactttttgaacgaatggaaggctgacctatggtctctcgtcggaattccatcaccagagcatgatcacgaaacaaacgatgccatattgttgggttatgttgttgtgtggtttttgggagaagtttcaaaactggacagtagccatgccatcattggccatttccatgaatggctagctggtgtagccctgccattgtgtagaaagaaaagaattgatgttgtaacgattttcaccacgcacgcaactttattgggtagatacttgtgtgccgctggtgatgtagatttttataacaatctacagtattttgatgtggaccaagaagctggtaagagaggcatatatcataggtactgcattgagcgcgctgcggctcatactgccgatgtttttacgactgtgtcgcaaatcactgcattagaagcggagcatttgttgaagaggaaaccggatggcattttgcccaatggtttgaacgttgttaagtttcaagcagtacatgaatttcaaaatctgcatgccctgaaaaaggacaaaattaatgatttcgtcagaggccatttccatggttgttttgatttcgatctagacaacacagtttatttctttatcgctggtagatatgaatacaaaaacaaaggtgctgacatgttcattgaatcattggctcgtctcaattacagattgaaggtttctggatccaagaagacggtggtagcgtttttgatcatgcctgccaaaaccaattccttcactgtggaggcactgaaaagccaagccattgtaaaatctttggaaaatactgttaatgaggtcaccgcatccattgggaagagaattttcgagcatacgatgagataccctcataatggcctagaatcagagttgcccactaatttagatgagctgttgaagagttctgaaaaggttttgctgaagaaaagggtattggcgctgagaagaccttacggggaattgcctccggtagtcacacataacatgtgcgatgatgctaacgatccaattttaaaccaaattagacatgttagattattcaatgattcgagtgatcgtgtaaaagtgattttccatcctgaattcttaaacgccaataaccctatccttggtttggattatgacgagtttgttcgcggctgtcacttgggtgtttttccatcctattacgaaccatgggggtacacgccagcagaatgtaccgtcatgggtgtcccatctatcacaacaaacgtttctgggttcggtgcctacatggaagacttgattgaaacagaccaagcgaaagactatggtatttatattgtagaccgtcgtttcaagagccctgatgaatctgtcgagcaattagcagactacatggaagagtttgtaaacaagaccagaagacaaagaatcaaccaaagaaacagaaccgaaagactatcagacttgttagattggaagagaatggggttggaatacgttaaggctagacagttgggtcttcgtagggcctatccagagcagttcaagcaactggtgggtgaaacaattagtgacgccaatatgaatactcttgccggtggcaagaaattcaagattgccaggcctttgagtgtacccggatcccccaaagtaaggtccaatagtactgtttacatgactccgggcgatttaggtacccttcaagatgctaataatgcagatgactattttaatttgagcacgaatggagccatcgacaatgacgatgatgacaacgatacgtctgcatactacgaggataattaa

SEQ ID NO: 3566 - DNA, 2127 bp, Artificial Sequence
  Description of Artificial Sequence: Synthetic polynucleotide
atggctcgtgacttacaaaatcatttattattcgaagtagcaacagaagtaactaacagggttggtggtatttactctgtcttgaagtccaaggctccagtcactgtggcacaatacggagacaactatacgttacttggacctttgaacaaggcgacttatgaaagtgaggttgaaaaacttgactgggaagatgaaagtatctttcctgaagagttattaccgatccaaaaaactttgatgtccatgagagaaaagggtgtgaactttgtctacggtaactggttgattgagggagcaccacgtgtcattttatttgagttagattctgtaagacactttttgaacgaatggaaggctgacttatggtctctcgtcggaattccatctccagagcatgatcacgaaacaaacgatgccatattgttgggttatgttgttgtgtggtttttgggagaagtttccaaattagacagtagccatgccatcattggccatttccatgaatggttggctggtgtagccttaccattgtgtagaaagaaaagaattgatgttgtaacgattttcaccacgcacgcaactttattgggtagatacttgtgtgccgctggtgatgtagatttttataacaatttacagtattttgatgtggaccaagaagctggtaagagaggcatatatcataggtactgcattgagcgcgctgcggctcatactgccgatgtttttacgactgtgagtcaaatcactgcattagaagcggagcatttgttgaagaggaaaccggatggcattttgcccaatggtttgaacgttgttaagtttcaagcagtacatgaatttcaaaatttacatgccttgaaaaaggacaaaattaatgatttcgtcagaggccatttccatggttgttttgatttcgatttggacaacacagtttatttctttatcgctggtagatatgaatacaaaaacaaaggtgctgacatgttcattgaatctttggctcgtctcaattacagattgaaggtttctggatccaagaagacggtggtagcgtttttgatcatgcctgccaaaaccaattccttcactgtggaggcattgaaaagccaagccattgtaaaatctttggaaaatactgttaatgaggtcaccgcatccattgggaagagaattttcgagcatacgatgagataccctcataatggccttgaaagtgagttgcccactaatttagatgagttattgaagagttctgaaaaggttttgttgaagaaaagggtattggcgttaagaagaccttacggggaattgcctccggtagtcacacataacatgtgcgatgatgctaacgatccaattttaaaccaaattagacatgttagattattcaatgattctagtgatcgtgtaaaagtgattttccatcctgaattcttaaacgccaataaccctatccttggtttggattatgacgagtttgttcgcggctgtcacttgggtgtttttccatcctattacgaaccatgggggtacacgccagcagaatgtaccgtcatgggtgtcccatctatcacaacaaacgtttctgggttcggtgcctacatggaagacttgattgaaacagaccaagcgaaagactatggtatttatattgtagaccgtcgtttcaagagccctgatgaatctgtcgagcaattagcagactacatggaagagtttgtaaacaagaccagaagacaaagaatcaaccaaagaaacagaaccgaaagattaagtgacttgttagattggaagagaatggggttggaatacgttaaggctagacagttgggtcttcgtagggcctatccagagcagttcaagcaattagtgggtgaaacaattagtgacgccaatatgaatactcttgccggtggcaagaaattcaagattgccaggcctttgagtgtacccggatcccccaaagtaaggtccaatagtactgtttacatgactccgggcgatttaggtacccttcaagatgctaataatgcagatgactattttaatttgagcacgaatggagccatcgacaatgacgatgatgacaacgatacgtctgcatactacgaggataattga

SEQ ID NO: 3567 - DNA, 3702 bp, Saccharomyces cerevisiae
atggtagaatctttgactgtagaaaatcaggaacacaatgttcaacccccatcggtaactagtgctggagattcgtattcgacacttgctacagatcttcccttaccaagtacgaatgatattatagaaagtcgagatcaacttacagaaagtgacttagatgaagcgataaatgccactgagaattttgcacaggaattatcatctcaaaggaaatcttctaaattgaaaggtcataaaaagaaaaaccagggacaaataaaggcgaatcgtgacagagatactattgtaaaactttccagttctgttggtgaaaccgaggaagcttccacacgggatgcaatctctcatgatttggaaagaaaagacgacgtaatagagatagccacagatacaataaatgacgctacagaatctcccacacagatcccaatagacgtcaatgtagttatcaaagaaacttctactaacaatgtagcggaaggcacagaaaatgtaccaccaatcaaagaatccacaggaattgaggttggcaatagcccaattacgagaagaaaaaaaaacaaaaagaaaaaaaccacgaatagaagaggtcgtaattcttcaaatcctgcagatactactgatttgtcaaaacagtcaactttagattccatactagtaggcattgaagagtacctacaggaagatggttcaaagaacgaggatatcaaagtaaatattgtccaagatgagcctgttaatgtcgaaaaaatggatatcagaaccagaaatgaatctagtgacaaaaccttcgacatagatgtgcctaacaaagataatgttgacgaaacttcctcaaagtccgagaacaatatcaacgaggaaaaggcagaacataccttacctcgagaagagaatgagatcttaaatgttaatgagggaaatgcagcttcttttaaacaccaactagagccgcacggtttggaggcaggtgatgaaaatgggcaagcgtctactaaggatgttgaaagtgaaagtttaactaagaatgggtttaatttcaaagagaacgaatcaaaacatttgaaagctggggaaaagcagcagactgaaagtgatagagacggaataagtccttcagttcttgcaaaaaatcagaaagaaacagaaatcgggaaagaagaccatgtttttgaacagaaggataaagaagacgaaaaatgtaggaaagaattatctgttaatcatgagaataacatgagccataattttaacgcagctggtagtgatagtatcatccctccagaaactgagcgagagacttatgatgacgaaacgatgggaccaacaaagcgcattagtgacaatgaaaaaaatctacaacacggtactaacgatatatctgtagaagttgaaaaagaagaagaagaagaagaagaagaagaagaaaattcgactttttcaaaagttaaaaaagaaaatgtaaccggggagcaagaagctgtaagaaataatgaagtgtccggtaccgaagaagaatctacatcaaaaggagaggaaattatggggggagatgaaaagcagtcagaagcgggagaaaaatcttccattattgaaatagagggaagcgcaaactctgcaaaaatttctaaagataaccttgttcttgaagatgaagctgaagcacctactcaggaaaacaagcctacggaagttgtcggagaaatcgatatacctgacgcgcctagggatgatgtagagattgttgaggctgtggaaaaaaatataatacctgaagatctcgaggttgccaaagaagatcaagaaggggaacaagtcaagctggatgaacctgttaaggccatgaaagatgataaaatagcaatgagaggtgctgagtctatcagtgaagacatgaaaaagaagcaagaggggactgctgagctttccaacgagaaagcaaaaaaagaggttgatgaaacagcaagagaaagtgcagaaggtgtagaggttgagaaatcgaagactcctgagtctccaaaagtagttaagcgttgtacctccggaagaccagaagatcttcaaatcaacgaaagagatcctgaggttctaaaggaagatgttagagttcccgatgaagatgtaaagccagaaattgcaacaaccattgagaattccgaagaagaagatcccaaatcccagcgcgttcaaatttcaacagaacaagctgaaactacacaaaaggatatgggagatgtaggatctactactagtttcaaagaagaagaaaaacccaaacgctttgaaattacacaagaaggcgataaaatcaccggcaaagatacaaatcatgaacatggtgaagctactgaggctgcgagcgaaaattcaaaagcaagtgatgttggaactgccgaaaaatatatagaacctagcagcgaatctgtcaagaaggacaccgaggaagatgcagaagtggagaattccgaaaaaactgaatttatcaaggtaaaggcagagcttgaaaatcttgacgctccaaaagaggcagaagtcactgctgaactgaataaagaaaatgaagatgtggaagttgacaccgaggaagatgcagaagtggagaattccgaaaaaactgaatttatcaaggtaaaggcagagcttggaaatcttgacgctccaaaagaggcagaagtcactgctgaactgaataaagaaaatgaagatgtggaagttgctgcaacttcaaaagaagacatcgaaacaaaatgttcggaacctgctgagactccaatagaggatggaacatgtacggaggcagaagtttcaaaaaaggatgcggaagccgtgacaaaagaagacgagaatatggaaaattctaagattgctgaggcgctcaaagatgtcaccggagatcaagagatcgacgatatcaacatttcagacgaatttcaaaggacagtcgaattgccagaattggaaaaacaagatataaaggataataaaggagaagacaaggaattggaagtagaagaaacagagaaagaaacttctcttcctgatcttgtagtggaagaaaacatcacggaggaaaagaatgaaattaagcaagaagaagaggaggtatcccagttagacttcaatgaaacagagtcaatcagtaaagaagccccaaacaatgacgaaaatggatttgaagatcaaagtacaagggaaaatcccaagaaagcaagtgcagatgacatcttcaaagatattttggacgaaacgaatgagtttttagagcaactaaaaattgttgatgattctgaactaaacgctctactccaatcactagatgcgaaagactccacaactcaaactactgagcaatccaagaaaaacaatgacaagccacaagacgtaataacgactagcgagatccggaagctgaatgaaaaggaacctgtatatatatacacgtcactagccggaggcggtttccatatgatccccagaacaaatcgcttaagcacaatcctgacggccaaccgaatcccgttcacctacagagatcttggcacagatgatgaagcgagaaaagtttggaagactttcagcaagggtaggagtcttccaggtgtggtcagaggacacaatgacttaatcgggaactgggaagaaatagaagaagctaacgaagactacaaattgcgggaactcatttacgatactatttaa

SEQ ID NO: 3568 - DNA, 3702 bp, Artificial Sequence
  Description of Artificial Sequence: Synthetic polynucleotide
atggtagaatctttgactgtagaaaatcaggaacacaatgttcaacccccatctgtaactagtgctggagattcttattctacacttgctacagatcttcccttaccaagtacgaatgatattatagaaagtagagatcaacttacagaaagtgacttagatgaagcgataaatgccactgagaattttgcacaggaattatcttctcaaaggaaatcttctaaattgaaaggtcataaaaagaaaaaccagggacaaataaaggcgaatcgtgacagagatactattgtaaaactttccagttctgttggtgaaaccgaggaagcttccacaagagatgcaatctctcatgatttggaaagaaaagacgacgtaatagagatagccacagatacaataaatgacgctacagaatctcccacacagatcccaatagacgtcaatgtagttatcaaagaaacttctactaacaatgtagcggaaggcacagaaaatgtaccaccaatcaaagaatccacaggaattgaggttggcaatagcccaattacgagaagaaaaaaaaacaaaaagaaaaaaaccacgaatagaagaggtcgtaattcttccaatcctgcagatactactgatttgagtaaacagtctactttagattccatattagtaggcattgaagagtacttacaggaagatggttccaagaacgaggatatcaaagtaaatattgtccaagatgagcctgttaatgtcgaaaaaatggatatcagaaccagaaatgaatctagtgacaaaaccttcgacatagatgtgcctaacaaagataatgttgacgaaacttcctccaagtccgagaacaatatcaacgaggaaaaggcagaacataccttacctagagaagagaatgagatcttaaatgttaatgagggaaatgcagcttcttttaaacaccaattggagccgcacggtttggaggcaggtgatgaaaatgggcaagcgtctactaaggatgttgaaagtgaaagtttaactaagaatgggtttaatttcaaagagaacgaaagtaaacatttgaaagctggggaaaagcagcagactgaaagtgatagagacggaataagtccttctgttcttgcaaaaaatcagaaagaaacagaaatcgggaaagaagaccatgtttttgaacagaaggataaagaagacgaaaaatgtaggaaagaattatctgttaatcatgagaataacatgagccataattttaacgcagctggtagtgatagtatcatccctccagaaactgagagagagacttatgatgacgaaacgatgggaccaacaaagcgcattagtgacaatgaaaaaaatttacaacacggtactaacgatatatctgtagaagttgaaaaagaagaagaagaagaagaagaagaagaagaaaattctactttttccaaagttaaaaaagaaaatgtaaccggggagcaagaagctgtaagaaataatgaagtgtccggtaccgaagaagaatctacaagtaaaggagaggaaattatggggggagatgaaaagcagtctgaagcgggagaaaaatcttccattattgaaatagagggaagcgcaaactctgcaaaaatttctaaagataaccttgttcttgaagatgaagctgaagcacctactcaggaaaacaagcctacggaagttgtcggagaaatcgatatacctgacgcgcctagggatgatgtagagattgttgaggctgtggaaaaaaatataatacctgaagatctcgaggttgccaaagaagatcaagaaggggaacaagtcaagttggatgaacctgttaaggccatgaaagatgataaaatagcaatgagaggtgctgagtctatcagtgaagacatgaaaaagaagcaagaggggactgctgagctttccaacgagaaagcaaaaaaagaggttgatgaaacagcaagagaaagtgcagaaggtgtagaggttgagaaatccaagactcctgagtctccaaaagtagttaagcgttgtacctccggaagaccagaagatcttcaaatcaacgaaagagatcctgaggttttgaaggaagatgttagagttcccgatgaagatgtaaagccagaaattgcaacaaccattgagaattccgaagaagaagatcccaaatcccagcgcgttcaaatttctacagaacaagctgaaactacacaaaaggatatgggagatgtaggatctactactagtttcaaagaagaagaaaaacccaaacgctttgaaattacacaagaaggcgataaaatcaccggcaaagatacaaatcatgaacatggtgaagctactgaggctgcgagcgaaaattctaaagcaagtgatgttggaactgccgaaaaatatatagaacctagcagcgaatctgtcaagaaggacaccgaggaagatgcagaagtggagaattccgaaaaaactgaatttatcaaggtaaaggcagagcttgaaaatcttgacgctccaaaagaggcagaagtcactgctgaattgaataaagaaaatgaagatgtggaagttgacaccgaggaagatgcagaagtggagaattccgaaaaaactgaatttatcaaggtaaaggcagagcttggaaatcttgacgctccaaaagaggcagaagtcactgctgaattgaataaagaaaatgaagatgtggaagttgctgcaacttctaaagaagacatcgaaacaaaatgttctgaacctgctgagactccaatagaggatggaacatgtacggaggcagaagtttccaaaaaggatgcggaagccgtgacaaaagaagacgagaatatggaaaattctaagattgctgaggcgctcaaagatgtcaccggagatcaagagatcgacgatatcaacatttctgacgaatttcaaaggacagtcgaattgccagaattggaaaaacaagatataaaggataataaaggagaagacaaggaattggaagtagaagaaacagagaaagaaacttctcttcctgatcttgtagtggaagaaaacatcacggaggaaaagaatgaaattaagcaagaagaagaggaggtatcccagttagacttcaatgaaacagagagtatcagtaaagaagccccaaacaatgacgaaaatggatttgaagatcaaagtacaagggaaaatcccaagaaagcaagtgcagatgacatcttcaaagatattttggacgaaacgaatgagtttttagagcaattgaaaattgttgatgattctgaattgaacgctttactccaatctttagatgcgaaagactccacaactcaaactactgagcaatccaagaaaaacaatgacaagccacaagacgtaataacgactagcgagatcagaaagttgaatgaaaaggaacctgtatatatatacacgtctttggccggaggcggtttccatatgatccccagaacaaatcgcttaagcacaatcttaacggccaacagaatcccgttcacctacagagatcttggcacagatgatgaagcgagaaaagtttggaagactttcagcaagggtaggagtcttccaggtgtggtcagaggacacaatgacttaatcgggaactgggaagaaatagaagaagctaacgaagactacaaattgagagaactcatttacgatactatttga

SEQ ID NO: 3569 - DNA, 588 bp, Saccharomyces cerevisiae
atgacagatccccacttgaacacgccccaagtgagcacgtcacccacatttgaaagatcacaggacttcctcaacatcgacgaaccgccctgtgcacaggaaacacctagtgtttctacattcaacctcccgggtccaagcgctcccgctcaaagcgtagacaagccagtccccatgattagacggcggtctaccaattatatggacgcactaaattccagggaacaagcccgggaacgcgaaagcagtatcggggagcacgccccgggagccgaacgtaggagtagcggacccatggatttccagaatactatccacaatatgcaatacaggaccactaacgactctgacctgagccacgctggcgtggatatgggtgactccatctcccatacaccgatctgttctcgtgctggcaacagacccattttcaaaaactcgtaccttgacaacaacagcaatggtaacagcgcaagagtcccacacggctctcctccacagttgggcacgcgtagaaagtcgtcttttaagtacgaggactttaagaaggacatctataaccagcttcacatgtttggagagaagtaa

SEQ ID NO: 3570 - DNA, 588 bp, Artificial Sequence
  Description of Artificial Sequence: Synthetic polynucleotide
atgacagatccccacttgaacacgccccaagtgagcacgtctcccacatttgaaagaagccaggacttcctcaacatcgacgaaccgccctgtgcacaggaaacacctagtgtttctacattcaacctcccgggtccaagcgctcccgctcaaagcgtagacaagccagtccccatgattagaagaagatctaccaattatatggacgcattgaattccagggaacaagccagagaacgcgaaagcagtatcggggagcacgccccgggagccgaacgtaggagtagcggacccatggatttccagaatactatccacaatatgcaatacaggaccactaacgactctgacttgagccacgctggcgtggatatgggtgactccatctcccatacaccgatctgttctcgtgctggcaacagacccattttcaaaaactcttaccttgacaacaacagcaatggtaacagcgcaagagtcccacacggctctcctccacagttgggcacgcgtagaaagtcttcttttaagtacgaggactttaagaaggacatctataaccagcttcacatgtttggagagaagtga

SEQ ID NO: 3571 - DNA, 1092 bp, Saccharomyces cerevisiae
atgggaatgaagtacgtattgcctttgcgactaattggtctagcgtacctgttggtgctatttcaggtgcatagggtaactgggtgggagttgtcatatgagcagtaccatgcagcgcatctgaacgaagctatcaacccagacagcggttggaacaaaagtaccaagaacctgctgttgccttttaacagaacgcgcgtacccggatcggaaggctcgcgcgagatccagcgcttcatcatcgagcacttcaacaatacgctggcgggagaatgggccgttgagacgcaagcctttgaggagaacggttaccgcttcaataaccttgttatgacattacaaaacaatgcgagcgagtacttagtgctcgctgctcattatgataccaagatagcgcccacggggatggtgggcgctatcgacagtgccgcctcgtgtgccgcgctgctatatacggcccagttcctaacgcacatcgcgtgccacgagcgcacgaaagagtacaatgacttagagtcgaacactgtagtatcgaattctaccttgggtgtaaagatcgtattctttgatggagaggaggccattgaagagtggggccccgaggactcgatttatggagcacgccgattagccgcccaatggcttgctgacggcacgatgacaagaattcgcctattatttcttctggatcttttaggaagtggcgaagaggagccgctagtgcccagctactatgcagagacacatcaagaatatcagctgctcaatcgaatagaggatgacttgttatttcgacgtggagatgaaatcaacggcgaatcggcattagccgccgaagtcgcgcgtcaacgcaaacatctggaccccacggactatcgatttttagggctcgggcattcggtcatcggagacgaccacacgccattcctggccgccggagtacccgtattacatgcaatcccgctaccattcccaagtacatggcacaccgtggatgatgacttccggcacttagacgccgcggagactcgtcactgggcgctgcttgtgtgcgaatttgtagtacagtcactacgctcccgtaaccagtga

SEQ ID NO: 3572 - DNA, 1092 bp, Artificial Sequence
  Description of Artificial Sequence: Synthetic polynucleotide
atgggaatgaagtacgtattgcctttgagattgattggtttggcgtacttgttggtgctttttcaggtgcatagggtaactgggtgggagttgagttatgagcagtaccatgcagcgcatttgaacgaagctatcaacccagacagcggttggaacaaaagtaccaagaacttattattgccttttaacagaacgcgcgtacccggatctgaaggctctcgcgagatccagcgcttcatcatcgagcacttcaacaatacgttggcgggagaatgggccgttgagacgcaagcctttgaggagaacggttaccgcttcaataaccttgttatgacattacaaaacaatgcgagcgagtacttagtgctcgctgctcattatgataccaagatagcgcccacggggatggtgggcgctatcgacagtgccgcctcttgtgccgcgttattatatacggcccagttcttgacgcacatcgcgtgccacgagcgcacgaaagagtacaatgacttagagagcaacactgtagtatctaattctaccttgggtgtaaagatcgtattctttgatggagaggaggccattgaagagtggggccccgaggacagtatttatggagcacgcagattagccgcccaatggcttgctgacggcacgatgacaagaattcgcttattatttcttttagatcttttaggaagtggcgaagaggagccgttggtgcccagctactatgcagagacacatcaagaatatcagttgctcaatagaatagaggatgacttgttatttagacgtggagatgaaatcaacggcgaaagtgcattagccgccgaagtcgcgcgtcaacgcaaacatttggaccccacggactataggtttttagggctcgggcattctgtcatcggagacgaccacacgccattcttggccgccggagtacccgtattacatgcaatcccgttaccattcccaagtacatggcacaccgtggatgatgacttcagacacttagacgccgcggagactcgtcactgggcgttacttgtgtgcgaatttgtagtacagtccttacgctcccgtaaccagtga

SEQ ID NO: 3573 - DNA, 6837 bp, Saccharomyces cerevisiae
atgtcatcggaagaaccccatgcatctatatcctttccagatggctcacatgtccggtcgtcctccactggtacttcatctgtgaacacaatcgatgctaccttatccagaccgaactatattaagaaaccgtccctgcacattatgtcgacatctacgacgtcgactacgacggatctagtgacaaacccaattctgagcaatatctccgtgccaaaaataagcccccccacatcatcctcgatagcaacagcgacatcaacaagtcacgtgaccggcactgcgtcgcattcgaacattaaagctaatgctaacactagtaccagcgtgaataagaaaaatttgccgccaacaactagtgggaggataccctctagcaccatcaagagatatccgagtcgctataagccttctcactcgctgcagctgcccattaagaacgactccaactttaaacgatctagcatatatgcctccaaatccactgttactgctatccccattaggaacaatcggccaatttccatgcagaattcctatgcgcgcactcctgacagcgatcatgacgacgttggcgatgaagtgtcttcgataaagagtgcctcttcttcgttgaccgcatccctgtccaagagtttcctgttcgcattttataacaaccgcaagaaggacaagaccagtaacaatggtgtcctctcaaaggaatattggatgaaggacgagagttctaaagaatgtttcagttgtggtaaaacgtttaacactttcagaaggaaacaccactgcaggatatgcggccaaattttttgcagcagttgcactctcttgatagatggtgatcgattcggctgtcatgccaagatgcgagtatgttacaattgttatgagcatgcagacacatacgaggactccagtgatgaagagaatgattctacaatgcaattgaatgagccaaggtctcgctctcgctctcgttcttccaataccaatccatattctcattcacattcgcatttgcatctcatttcacaggacaaccataacggtaccgatctccatgatccagtagcagcaacggataaccctcaacagcagaatgaggtctacctattaaatgacgatgacgtacaaagtataatgacctcaggtgaagattctaaattgttcatttctacacccccaccaccaccgaagatggccatcccagcaacaaagcaaggcggatcgctggaaatctcattcgattcggaaaacgatagggctttgcattatcaagatgacaaccccggtcgccatcatcacctcgattccgtgcccacaaggtacactatcagagatatggacaatatatcacattacgataccaactctaattccactttgaggccacattataacaccaataacagcactattaccatcaacaacctcaacaacactacttccaacaacagcaactataacaataccaatagcaacagcaacatcaataatcctgcgcattccttaagaaggtctattttccattatgtaagcagcaatagtgttaacaaggacagtaacaatagctctgcaacacccgcttcgtctgcacagtcttcttccatactggatcctgccaatcgtattatcgggaattatgctcatagaaattacaagtttaaattcaactacaattccaaaggtccttcgcaacaaaatgacacggcaaatggaaataatgataataataataataataataataataataataataataataataacagtgccagcggtattgctgacaacaataacattccctcaaacgacaatggcacgacgttcactctagataagaagaaaagaaacccactgacaaaatctaaatctacgtccgcttacctagaatatcctctaaacgaggaagactcttctgaggacgaaggttccatgtccatatattctgtattgaatgatgaccataaaactgacaatccaattagatcaatgaggaactccacaaaatcttttcaacgagcgcaagcttcactacagcggatgaggtttagaaggaaaagtaaaagcaagcattttcccaacaattcgaaaagttccatttatagagacttaaatttcttgaccaatagtactcccaatttactttctgtagtaagcgacgataatctatacgacgattcttctcctttgcaagacaaggcctcttcatccgctgcaagcagactcactgacagaaaattcagcaatagcagtggcagcaataataatagcaatagtaatagcaatatcaacaccgatccttggaagagaatcgctagtatatcgggattcaaactgaaaaaggaaaaaaagagagaattaaatgaagtctctcttttacatatgcatgccctattaaaacaattattgaatgatcaagaaatttccaatcttcaagaatggataacccttctagatggcgctttgcgtaaagttttaaggaccatcctgaacgcgagggatttgaacacattagattttagacaaacttacgttaagataaaaagaattagtggtggatctcctcaaaattcagaatatatcgacggggttgtcttttcgaaagcattgccgtcgaaaacaatgccacggcatttgaaaaacccaaggatactattaatcatgtttccactggagtaccaaaagaacaataaccactttctaagtatagagtccgtctttaggcaagagcgcgaatatttggataaacttgtttcgagattaaagtcattacatcctgatattatatacgtcggcgccaatgttagtgggtacgcgttagaactattaaatgactcaggcattgtcgtacagtttaatatgaaaccacaagtcattgaaagaattgccaagctaacagaagcagatattgccatttctgtggataagttggctacgaatattaagatgggtgaatgtgaaacttttgaagttaaaagctacatttatggaaacatcagtaaaacatatacatttcttcggggctgtaacccagaacttggtggaacaattttgttaagaggtgatagtcttgaaaacttgagaaaaatcaaacaagtctctgaatttatggtctacgcaattttttcattgaagttggaaagttcattttttaacgataatttcatacaactttctacagatgtttatttgaagagagctgaatccaaaaaactgcaagttttcgaaggttattttgcagatttcttgatcaaattcaataacaggattttgactgtatcaccaacggtagatttccccattccctttttattggaaaaagccagaggcttggaaaagaagctcatagaaaggatcaatcaatatgaaagcgaatctgatttagatcggcaaacgcaactaaatatgcttcaaggcttagaatcgactatcactaagaaacacttaggaaatttaataaaattcctgcatgaaatggaaattgaaaatttagagcttgagtttcagaagagaagtcgtcaatgggaggtttcatattcatcatcacagaacttacttggtacgggctcacaccagtctataacagttctctactcaatggtttcaacaaagactgccacaccttgcgttggccctcaaattgttactattgactatttttgggacagtgatatttccattggtcagtttatcgagaacgtcgtgggaactgccaggtatccctgccaacaaggctgtaatggtctgtatttggatcattatagaagctatgttcatgggtcaggaaaagtagacgttttaatcgaaaaattccaaactagattaccaaaattaaaagatattatcctcacgtggagttattgtaaaaaatgtgggacatctactccgattttacaaattagcgaaaaaacctggaatcattctttcggtaaatatttagaagtcatgttttggagttacaaagatagcgtgacaggaattgggaaatgtcctcatgatttcactaaagatcatgtcaaatactttggttacaatgatttagtggttcgactagaatattctgatttagaagttcatgaattgataaccccaccacgcaaaataaaatggaaacctcatatcgacatcaaactgaaggtggaactatactataagattctggaaaagatcaataatttctatgggagtgtcctaagtcggttggaacgtattaaattggatagtatgactaaagataaagttcttagtggacaagctaaaattatcgaattgaagagcaatgctacagaggagcaaaaattaatgttgcaagacctggatactttttacgcagatagtccttgcgatcaacatttaccattgaacctggttatcaaatctctatacgataaggctgtaaattggaactctacatttgcgatatttgcaaaaagctatttgccttctgaaactgatattagtcgtatcacggccaagcagctgaaaaaactgttttacgattcttcaagaaaagacagcgaagacaaaaaatcacttcatgatgaaaaggcgaagacgaggaaaccagaaaagaacgaattaccgttagagggattgaaagatgtcgaaaagccgaaaattgatagcaagaatacgacagagaatcgtgacagaacgaacgaaccacagaatgccgtgacgataaccacttttaaagacgacactccaattattccaacaagtggtactagtcacttgacagttacaccttctgcatcgtcggtttcttcttctttgacccctcaaaccgaagaacgtccgccaataagcagaagtggaacaggtatatctatgactcatgataaaagcactagacctaacataagaaaaatgagtagtgatagtagtttatgtggactagcatcacttgctaatgaatatagtaaaaataataaggtgagtaagctagctacatttttcgatcaaatgcattttgatgccctgtcgaaagaatttgaactggaacgtgaaagggaaagattacaacttaataaggataaataccaagccatacgattacaaacatccacaccaattgtggaaatttataaaaatgtcaaagacgcagttgatgaaccgcttcactctagaagttcaggcaataatttgtcatctgcgaatgttaagactttggaggcacctgtgggagaacattcccgggccaataattgtaatcctcctaatttagatcaaaacttggaaactgaattagaaaattccattagccaatggggagaaaacattttgaacccctctggaaagaccaccgcaagtactcatttaaattctaagccagtagtaaaggaaacttcagaaaatccaaagtcaatagttagagaatcagataattcaaagtcggagccgcttccacctgtaataacaacaacaactgtcaataaggtagaatccactccacaacctgaaaaatcattattgatgaaaaccttgagcaacttttgggcagatcgatctgcgtatttgtggaaaccccttgtttatccaacctgtccttcggaacacatttttactgatagtgacgttataatccgcgaagatgaaccaagttccttgatcgcattttgcttaagtacttctgactatagaaataaaatgatgaacttgaatgtccagcaacaacagcagcagcaaacagcagaagctgctcctgccaaaacaggaggaaacagtggaggaactacgcaaaccggggatccttctgttaacatttctccctcagtttctacaacttctcataataaggggagggactcagaaatttcatccttagtaaccaccaaagagggcttgttgaacacccctcccattgaaggcgcccgagataggaccccacaagaatcacaaacgcattcccaagcaaatttagatactcttcaagaattagagaaaattatgacaaaaaaaacagccacacacttgagatatcaatttgaggagggtttaacggtaatgtcatgtaaaattttcttcacagaacattttgacgtgtttagaaagatttgtgattgtcaagaaaacttcattcaaagtttgtcaagatgtgttaaatgggattccaatggggggaaaagtgggagcgggtttttaaagactttggatgatagatttattataaaggagctgtcacacgcagaactggaagccttcataaaatttgcaccaagttattttgaatacatggcacaagcaatgttccatgatttgcccacgactttggctaaagtatttgggttttatcaaattcaagtaaaaagctctatttcaagttccaaaagttataaaatggacgttatcattatggagaacttattttatgagaagaaaacaacaagaatatttgatttgaagggttccatgagaaatagacatgtcgaacaaacaggtaaagctaatgaagtgttgttggatgaaaatatggtagagtatatttacgaatcacctattcatgttcgcgaatatgacaagaaacttttaagagcttctgtttggaacgacacattatttttggccaaaatgaatgtgatggattattccttagtcattggtattgacaatgaagggtatactttgacagtaggaatcattgatttcattcgaacgtttacatgggacaaaaaactagaaagttgggtcaaagagaaaggcctagtagggggggccagtgtgatcaagcagcctaccgttgttacaccaagacaatataaaaaacgttttagggaagcaatggagaggtatattttgatggttcctgatccgtggtatagggaaggaaattaa

SEQ ID NO: 3574 - DNA, 6837 bp, Artificial Sequence
  Description of Artificial Sequence: Synthetic polynucleotide
atgtcttctgaagaaccccatgcatctatatcctttccagatggctctcatgtcagaagttcctccactggtacttcttctgtgaacacaatcgatgctaccttatccagaccgaactatattaagaaaccgtccttgcacattatgtctacatctacgacgtctactacgacggatttggtgacaaacccaattttgagcaatatctccgtgccaaaaataagcccccccacatcttcctccatagcaacagcgacatctacaagtcacgtgaccggcactgcgtctcattccaacattaaagctaatgctaacactagtaccagcgtgaataagaaaaatttgccgccaacaactagtgggaggataccctctagcaccatcaagagatatccgagtcgctataagccttctcactctttgcagttgcccattaagaacgactccaactttaaaagatctagcatatatgcctccaaatccactgttactgctatccccattaggaacaatagaccaatttccatgcagaattcctatgcgcgcactcctgacagcgatcatgacgacgttggcgatgaagtgtcttctataaagagtgcctcttcttctttgaccgcatccttgtccaagagtttccttttcgcattttataacaaccgcaagaaggacaagaccagtaacaatggtgtcctctctaaggaatattggatgaaggacgagagttctaaagaatgtttcagttgtggtaaaacgtttaacactttcagaaggaaacaccactgcaggatatgcggccaaattttttgcagcagttgcactctcttgatagatggtgatagattcggctgtcatgccaagatgagagtatgttacaattgttatgagcatgcagacacatacgaggactccagtgatgaagagaatgattctacaatgcaattgaatgagccaaggtctcgctctcgctctcgttcttccaataccaatccatattctcattctcattctcatttgcatctcatttctcaggacaaccataacggtaccgatctccatgatccagtagcagcaacggataaccctcaacagcagaatgaggtctacttattaaatgacgatgacgtacaaagtataatgacctctggtgaagattctaaattgttcatttctacacccccaccaccaccgaagatggccatcccagcaacaaagcaaggcggatctttggaaatctctttcgattctgaaaacgatagggctttgcattatcaagatgacaaccccggtcgccatcatcacctcgattccgtgcccacaaggtacactatcagagatatggacaatatatctcattacgataccaactctaattccactttgaggccacattataacaccaataacagcactattaccatcaacaacctcaacaacactacttccaacaacagcaactataacaataccaatagcaacagcaacatcaataatcctgcgcattccttaagaaggtctattttccattatgtaagcagcaatagtgttaacaaggacagtaacaatagctctgcaacacccgcttcttctgcacagtcttcttccatattggatcctgccaatcgtattatcgggaattatgctcatagaaattacaagtttaaattcaactacaattccaaaggtccttctcaacaaaatgacacggcaaatggaaataatgataataataataataataataataataataataataataataataacagtgccagcggtattgctgacaacaataacattccctctaacgacaatggcacgacgttcactttagataagaagaaaagaaacccattaacaaaatctaaatctacgtccgcttacttggaatatcctttgaacgaggaagactcttctgaggacgaaggttccatgtccatatattctgtattgaatgatgaccataaaactgacaatccaattagaagtatgaggaactccacaaaatcttttcaaagagcgcaagcttctttgcagagaatgaggtttagaaggaaaagtaaaagcaagcattttcccaacaattctaaaagttccatttatagagacttaaatttcttgaccaatagtactcccaatttactttctgtagtaagcgacgataatctttacgacgattcttctcctttgcaagacaaggcctcttcttccgctgcaagcagactcactgacagaaaattcagcaatagcagtggcagcaataataatagcaatagtaatagcaatatcaacaccgatccttggaagagaatcgctagtatatctggattcaaattgaaaaaggaaaaaaagagagaattaaatgaagtctctcttttacatatgcatgccttattaaaacaattattgaatgatcaagaaatttccaatcttcaagaatggataacccttttagatggcgctttgcgtaaagttttaaggaccatcttgaacgcgagggatttgaacacattagattttagacaaacttacgttaagataaaaagaattagtggtggatctcctcaaaattctgaatatatcgacggggttgtcttttccaaagcattgccgtccaaaacaatgccaagacatttgaaaaacccaaggatattattaatcatgtttccattggagtaccaaaagaacaataaccactttttgagtatagagtccgtctttaggcaagagcgcgaatatttggataaacttgtttctagattaaagtctttacatcctgatattatatacgtcggcgccaatgttagtgggtacgcgttagaattattaaatgacagtggcattgtcgtacagtttaatatgaaaccacaagtcattgaaagaattgccaagttaacagaagcagatattgccatttctgtggataagttggctacgaatattaagatgggtgaatgtgaaacttttgaagttaaaagctacatttatggaaacatcagtaaaacatatacatttcttaggggctgtaacccagaacttggtggaacaattttgttaagaggtgatagtcttgaaaacttgagaaaaatcaaacaagtctctgaatttatggtctacgcaattttttctttgaagttggaaagttctttttttaacgataatttcatacaactttctacagatgtttatttgaagagagctgaatccaaaaaattacaagttttcgaaggttattttgcagatttcttgatcaaattcaataacaggattttgactgtatctccaacggtagatttccccattccctttttattggaaaaagccagaggcttggaaaagaagctcatagaaaggatcaatcaatatgaaagcgaatctgatttagatagacaaacgcaattgaatatgcttcaaggcttagaatctactatcactaagaaacacttaggaaatttaataaaattcttacatgaaatggaaattgaaaatttagagcttgagtttcagaagagaagtcgtcaatgggaggtttcttattcttcttctcagaacttacttggtacgggctctcaccagtctataacagttctctactccatggtttctacaaagactgccacaccttgcgttggccctcaaattgttactattgactatttttgggacagtgatatttccattggtcagtttatcgagaacgtcgtgggaactgccaggtatccctgccaacaaggctgtaatggtttatatttggatcattatagaagctatgttcatgggtctggaaaagtagacgttttaatcgaaaaattccaaactagattaccaaaattaaaagatattatcctcacgtggagttattgtaaaaaatgtgggacatctactccgattttacaaattagcgaaaaaacctggaatcattctttcggtaaatatttagaagtcatgttttggagttacaaagatagcgtgacaggaattgggaaatgtcctcatgatttcactaaagatcatgtcaaatactttggttacaatgatttagtggttagattagaatattctgatttagaagttcatgaattgataaccccaccacgcaaaataaaatggaaacctcatatcgacatcaaattgaaggtggaattatactataagattttggaaaagatcaataatttctatgggagtgtcttaagtagattggaacgtattaaattggatagtatgactaaagataaagttcttagtggacaagctaaaattatcgaattgaagagcaatgctacagaggagcaaaaattaatgttgcaagacttggatactttttacgcagatagtccttgcgatcaacatttaccattgaacttggttatcaaatctttgtacgataaggctgtaaattggaactctacatttgcgatatttgcaaaaagctatttgccttctgaaactgatattagtcgtatcacggccaagcagttgaaaaaattattttacgattcttctagaaaagacagcgaagacaaaaaatctcttcatgatgaaaaggcgaagacgaggaaaccagaaaagaacgaattaccgttagagggattgaaagatgtcgaaaagccgaaaattgatagcaagaatacgacagagaatcgtgacagaacgaacgaaccacagaatgccgtgacgataaccacttttaaagacgacactccaattattccaacaagtggtactagtcacttgacagttacaccttctgcatcttctgtttcttcttctttgacccctcaaaccgaagaacgtccgccaataagcagaagtggaacaggtatatctatgactcatgataaaagcactagacctaacataagaaaaatgagtagtgatagtagtttatgtggattagcatctcttgctaatgaatatagtaaaaataataaggtgagtaagttggctacatttttcgatcaaatgcattttgatgccctttctaaagaatttgaattggaacgtgaaagggaaagattacaacttaataaggataaataccaagccataagattacaaacatccacaccaattgtggaaatttataaaaatgtcaaagacgcagttgatgaaccgcttcactctagaagttctggcaataatttgtcttctgcgaatgttaagactttggaggcacctgtgggagaacattccagagccaataattgtaatcctcctaatttagatcaaaacttggaaactgaattagaaaattccattagccaatggggagaaaacattttgaacccctctggaaagaccaccgcaagtactcatttaaattctaagccagtagtaaaggaaacttctgaaaatccaaagagtatagttagagaaagtgataattctaagagtgagccgcttccacctgtaataacaacaacaactgtcaataaggtagaatccactccacaacctgaaaaatctttattgatgaaaaccttgagcaacttttgggcagatagatctgcgtatttgtggaaaccccttgtttatccaacctgtccttctgaacacatttttactgatagtgacgttataatccgcgaagatgaaccaagttccttgatcgcattttgcttaagtacttctgactatagaaataaaatgatgaacttgaatgtccagcaacaacagcagcagcaaacagcagaagctgctcctgccaaaacaggaggaaacagtggaggaactacgcaaaccggggatccttctgttaacatttctccctctgtttctacaacttctcataataaggggagggactctgaaatttcttccttagtaaccaccaaagagggcttgttgaacacccctcccattgaaggcgccagagataggaccccacaagaatctcaaacgcattcccaagcaaatttagatactcttcaagaattagagaaaattatgacaaaaaaaacagccacacacttgagatatcaatttgaggagggtttaacggtaatgtcctgtaaaattttcttcacagaacattttgacgtgtttagaaagatttgtgattgtcaagaaaacttcattcaaagtttgtccagatgtgttaaatgggattccaatggggggaaaagtgggagcgggtttttaaagactttggatgatagatttattataaaggagttatcccacgcagaattggaagccttcataaaatttgcaccaagttattttgaatacatggcacaagcaatgttccatgatttgcccacgactttggctaaagtatttgggttttatcaaattcaagtaaaaagctctatttccagttccaaaagttataaaatggacgttatcattatggagaacttattttatgagaagaaaacaacaagaatatttgatttgaagggttccatgagaaatagacatgtcgaacaaacaggtaaagctaatgaagtgttgttggatgaaaatatggtagagtatatttacgaatctcctattcatgttcgcgaatatgacaagaaacttttaagagcttctgtttggaacgacacattatttttggccaaaatgaatgtgatggattattccttagtcattggtattgacaatgaagggtatactttgacagtaggaatcattgatttcattagaacgtttacatgggacaaaaaattagaaagttgggtcaaagagaaaggcttagtagggggggccagtgtgatcaagcagcctaccgttgttacaccaagacaatataaaaaacgttttagggaagcaatggagaggtatattttgatggttcctgatccgtggtatagggaaggaaattga

SEQ ID NO: 3575 - DNA, 699 bp, Saccharomyces cerevisiae
atgtggtgctattctcactttttattaatttttgtttccttcgtgacttcttttgcacataagctcccagctaataactcaacgactaatggaggtaccgacggaatagctgtaccagttatagaaactactattgattcagggatgtattctgagaacggtactgatttgatgacacccgaagatcttcctgatttgctatcagatggtatagtattatcttttgctaatactacagaaacgggctcggattcggactccacgttaattgacagtgaagatcttcggagatgtatagatatgccggaccgctcatgctctgctcaacgaggcaatttgtgttcatacagtttttgggatattcctttcagtttcttgaatacagtccatgatatattcggcatgactaatatgggtaattgcgcagttatggctggtgataagggtgctttttattataaatactatcctgttgaacctaactgcaattcaactatacaccaaaagacgattgacgatgctttacaacaagcaactgaacaactgaatggtgactttaacaacatgtattttttccatgtcaaccgtggtggattgtggcagggtgatatgatggttggaactcgcgtctttacctggtttgctggcgccaagtgggctgaacataaaggttccatagaggcaggtttcacctcgtag

SEQ ID NO: 3576 - DNA, 699 bp, Artificial Sequence
  Description of Artificial Sequence: Synthetic polynucleotide
atgtggtgctattctcactttttattaatttttgtttccttcgtgacttcttttgcacataagctcccagctaataactccacgactaatggaggtaccgacggaatagctgtaccagttatagaaactactattgattctgggatgtattctgagaacggtactgatttgatgacacccgaagatcttcctgatttgttaagtgatggtatagtattatcttttgctaatactacagaaacgggcagtgattctgactccacgttaattgacagtgaagatcttagaagatgtatagatatgccggaccgctcttgctctgctcaaagaggcaatttgtgttcttacagtttttgggatattcctttcagtttcttgaatacagtccatgatatattcggcatgactaatatgggtaattgcgcagttatggctggtgataagggtgctttttattataaatactatcctgttgaacctaactgcaattctactatacaccaaaagacgattgacgatgctttacaacaagcaactgaacaattgaatggtgactttaacaacatgtattttttccatgtcaaccgtggtggattgtggcagggtgatatgatggttggaactcgcgtctttacctggtttgctggcgccaagtgggctgaacataaaggttccatagaggcaggtttcacctcctga

SEQ ID NO: 3577 - DNA, 1503 bp, Saccharomyces cerevisiae
atgtctgattcatcacctactatcaactttattaatttcaatcaaaccggaacgtgtatttcccttggaacgtcgaaaggtttcaaaatattcaattgtgagcccttcggaaaattttattcagaggacagtgggggctatgctatcgtcgagatgttgttctccacctcgttactagccctcgttgggataggcgatcaacctgcgctttcaccaaggagattgcgtataatcaacacaaaaaaacattctattatctgtgaggtgactttccctacttctattctgagtgtgaaaatgaataagtctcgattggtggtacttttacaagagcagatttatatttatgatatcaacaccatgagactattgcatactatagaaacaaaccctaacccacgtggccttatggctatgtctccttcggtagccaacagctatttagtgtatccatcaccaccaaaagttattaactccgaaattaaagctcatgccaccacaaacaatatcacattgtcagttggtggcaacacagagaccagtttcaagagagatcagcaagatgctggccatagtgacattagcgacttggatcagtattcgagctttactaagagggatgatgcggatccaacaagcagtaacggcggtaacagcagtataataaagaatggtgatgtgatcgtattcaacttggaaacattacagccaaccatggtcatcgaagctcataagggcgagattgctgcaatggcaattagttttgatgggacactaatggctaccgcctctgataaaggtactatcatcagggtctttgacattgaaacgggtgataagatctaccaattcaggagagggacgtacgcgacaagaatttactccatatcattcagtgaagatagccagtacttggcggttaccggctcttccaaaaccgtgcatatcttcaaattggggcattcaatgagcaacaataaactagacagcgatgatagcaacatggaagaagctgcagccgatgattcatcgctcgataccaccagtatcgatgcgctgagtgacgaggaaaacccgacaagactcgcaagagaaccatatgtggatgcatcaagaaagacaatgggtaggatgatacgttactcttctcaaaagctatcccgaagagctgccagaacattgggtcagattttccccatcaaagttacatcgttgttggaatcctcgcgccattttgcgtctttgaaacttcccgttgaaaccaattcccatgtaatgaccatatcaagtataggctctccaatagatatagacacatccgagtatccggaactcttcgaaactggcaattccgcaagtacagagtcctaccatgagcctgttatgaagatggtccccatcagggtcgtttcctcggatggatacctatacaactttgttatggacccggagagaggcggcgattgcttaatattgtcacagtattccatcttgatggattga

SEQ ID NO: 3578 - DNA, 1503 bp, Artificial Sequence
  Description of Artificial Sequence: Synthetic polynucleotide
atgtctgattcttctcctactatcaactttattaatttcaatcaaaccggaacgtgtatttcccttggaacgtccaaaggtttcaaaatattcaattgtgagcccttcggaaaattttattctgaggacagtgggggctatgctatcgtcgagatgttgttctccaccagtttattagccctcgttgggataggcgatcaacctgcgctttctccaaggagattgcgtataatcaacacaaaaaaacattctattatctgtgaggtgactttccctacttctattttaagtgtgaaaatgaataagtctagattggtggtacttttacaagagcagatttatatttatgatatcaacaccatgagattattgcatactatagaaacaaaccctaacccacgtggccttatggctatgtctccttctgtagccaacagctatttagtgtatccatctccaccaaaagttattaactccgaaattaaagctcatgccaccacaaacaatatcacattgagtgttggtggcaacacagagaccagtttcaagagagatcagcaagatgctggccatagtgacattagcgacttggatcagtattctagctttactaagagggatgatgcggatccaacaagcagtaacggcggtaacagcagtataataaagaatggtgatgtgatcgtattcaacttggaaacattacagccaaccatggtcatcgaagctcataagggcgagattgctgcaatggcaattagttttgatgggacattgatggctaccgcctctgataaaggtactatcatcagggtctttgacattgaaacgggtgataagatctaccaattcaggagagggacgtacgcgacaagaatttactccatatctttcagtgaagatagccagtacttggcggttaccggctcttccaaaaccgtgcatatcttcaaattggggcattctatgagcaacaataaattagacagcgatgatagcaacatggaagaagctgcagccgatgattcttctctcgataccaccagtatcgatgcgttaagtgacgaggaaaacccgacaagactcgcaagagaaccatatgtggatgcatctagaaagacaatgggtaggatgatacgttactcttctcaaaagttatccagaagagctgccagaacattgggtcagattttccccatcaaagttacatctttgttggaatcctctcgccattttgcgtctttgaaacttcccgttgaaaccaattcccatgtaatgaccatatctagtataggctctccaatagatatagacacatccgagtatccggaactcttcgaaactggcaattccgcaagtacagagtcctaccatgagcctgttatgaagatggtccccatcagggtcgtttccagtgatggatacttgtacaactttgttatggacccggagagaggcggcgattgcttaatattgtctcagtattccatcttgatggattga

SEQ ID NO: 3579 - DNA, 2202 bp, Saccharomyces cerevisiae
atgggcttcagtagcggtaaatcaactaagaaaaagcctctgcttttcgatatcagacttaaaaatgttgacaacgatgtaatactcctcaaaggtcctccaaacgaggccccctcggtgcttttatctggttgcatcgttttatcgattaacgaacccatgcagatcaaaagcatatcattgagactttatgggaagatacaaatagacgtaccattagagaggccccaggacgctagttcttcgtcgttgtcttcatcgccgccaaagatcagaaagtacaacaaagttttttataattacgcatgggataatgttaacctcaaggagtatctgagtggtttaagagggcaatctggccttgcgggcagtagctcatcaagtaatatcttgggcactcgccaaagagctcagtccacaagttccttgaagtctttaaaggggtcctcctcaccctcttcatgtactttagataagggcaactacgattttccctttagtgctattttgcctggttcgttaccagagagcgtagaatctttgccaaattgcttcgtgacatatagcatggaatccgttattgaacgcagcaaaaattatagtgatttgatctgtaggaaaaatattagagttctgagaaccatttcacccgcagcagtggagttatcagaaactgtttgtgtagataactcatggcccgacaaagtggattattctatttcagtacccaacaaagccgtagctattggttcagccacccctataaatatttccattgtacctctttcgaaaggtttgaaattgggctcaatcaaagtcgtattatttgagaattatcaatattgtgaccccttccctccagtaatttctgaaaataggcaagtgacagaactaaatcttgaagatcccttgaacgagtcatctggagaatttaatggtaatggttgctttgtaaataaccccttttttcagcctgatcattcattccaagacaagtgggagattgataccatcctgcaaatcccgaacagcttatcaaactgtgtgcaagattgtgatgtccgctctaacattaaggttcgccataagctcaaatttttcatcatcctaattaacccagatggtcataaatctgagttaagagcgtccttaccgattcaactttttatttcaccatttgtggcactttcaataaaaccattgtcatcctcgaatttgtattcgctttttagcaccactaaccagaaagacgaaaactcatcacaagaagaggaagaggaatatctgttttctagatcagcatcagtcacagggttggaattattagcggatatgcgtagcggtggctctgttcctaccatttcagacttgatgacgcccccaaattatgaaatgcacgtatatgatcgtctttatagcggttctttcactcgcacggctgtggaaacgtctggaacatgtactcctttgggaagcgaatgttcgactgtcgaggatcagcaacaggatttagaagatttacgtatacggttgacaaaaattagaaatcaacgtgacaatctagggctaccaccgtctgcctcgtctgctgccgcttccagatcgctatctccattactaaacgttccagcaccagaggatggcacggagagaatcttacctcagagtgctcttggtcccaatagtggctctgtgccaggagtacatagtaacgtatcacctgttttactttcaagatccccagccccaagcgtgtcagcccatgaagtgttaccagtgccctcgggcttaaattatccagagactcaaaacctgaacaaggttccatcgtatggcaaggcaatgaaatatgatatcattggtgaggaccttcctccttcctacccttgtgcgatacaaaatgtgcaaccaagaaaacccagtagggtacattccaggaactcttcgacaacattgtcatcttctataccaactagctttcattcctctagttttatgagtagcactgcttcccctatttccataattaatggctctagaagtagttctagtggggtatctcttaatacacttaatgagttaacttcgaaaacttcgaataacccatccagtaatagtatgaaaaggtcaccaacaagacggagggctacttctttagctgggtttatgggaggttttctatcaaagggtaacaaacgatag

SEQ ID NO: 3580 - DNA, 2202 bp, Artificial Sequence
  Description of Artificial Sequence: Synthetic polynucleotide
atgggcttcagtagcggtaaatctactaagaaaaagcctttacttttcgatatcagacttaaaaatgttgacaacgatgtaatactcctcaaaggtcctccaaacgaggccccctctgtgcttttatctggttgcatcgttttatccattaacgaacccatgcagatcaaaagcatatctttgagactttatgggaagatacaaatagacgtaccattagagaggccccaggacgctagttcttcttctttgtcttcttctccgccaaagatcagaaagtacaacaaagttttttataattacgcatgggataatgttaacctcaaggagtatttgagtggtttaagagggcaatctggccttgcgggcagtagctcttccagtaatatcttgggcactcgccaaagagctcagtccacaagttccttgaagtctttaaaggggtcctcctctccctcttcttgtactttagataagggcaactacgattttccctttagtgctattttgcctggttctttaccagagagcgtagaatctttgccaaattgcttcgtgacatatagcatggaatccgttattgaacgcagcaaaaattatagtgatttgatctgtaggaaaaatattagagttttgagaaccatttctcccgcagcagtggagttatctgaaactgtttgtgtagataacagttggcccgacaaagtggattattctattagtgtacccaacaaagccgtagctattggttctgccacccctataaatatttccattgtacctctttctaaaggtttgaaattgggctccatcaaagtcgtattatttgagaattatcaatattgtgaccccttccctccagtaatttctgaaaataggcaagtgacagaattgaatcttgaagatcccttgaacgagtcttctggagaatttaatggtaatggttgctttgtaaataaccccttttttcagcctgatcattctttccaagacaagtgggagattgataccatcttgcaaatcccgaacagcttatctaactgtgtgcaagattgtgatgtccgctctaacattaaggttcgccataagctcaaatttttcatcatcttgattaacccagatggtcataaatctgagttaagagcgtccttaccgattcaactttttatttctccatttgtggcactttccataaaaccattgtcttcctctaatttgtattctctttttagcaccactaaccagaaagacgaaaactcttctcaagaagaggaagaggaatatttattttctagaagtgcatctgtcacagggttggaattattagcggatatgcgtagcggtggctctgttcctaccatttctgacttgatgacgcccccaaattatgaaatgcacgtatatgatcgtctttatagcggttctttcactcgcacggctgtggaaacgtctggaacatgtactcctttgggaagcgaatgttccactgtcgaggatcagcaacaggatttagaagatttacgtataagattgacaaaaattagaaatcaacgtgacaatttggggttaccaccgtctgcctcttctgctgccgcttccagatccttatctccattattaaacgttccagcaccagaggatggcacggagagaatcttacctcagagtgctcttggtcccaatagtggctctgtgccaggagtacatagtaacgtatctcctgttttactttctagatccccagccccaagcgtgtctgcccatgaagtgttaccagtgccctctggcttaaattatccagagactcaaaacttgaacaaggttccatcttatggcaaggcaatgaaatatgatatcattggtgaggaccttcctccttcctacccttgtgcgatacaaaatgtgcaaccaagaaaacccagtagggtacattccaggaactcttctacaacattgtcttcttctataccaactagctttcattcctctagttttatgagtagcactgcttcccctatttccataattaatggctctagaagtagttctagtggggtatctcttaatacacttaatgagttaacttctaaaacttccaataacccatccagtaatagtatgaaaaggtctccaacaagaagaagggctacttctttagctgggtttatgggaggttttttatccaagggtaacaaaaggtga

SEQ ID NO: 3581 - DNA, 1836 bp, Saccharomyces cerevisiae
atgtattctatttcaaacaaaaaaccttctatactcagtatggttcccctgaatattttgaaaaaccaggatttgaaagtaaaaaaagatcaagaaaagaaaatatcatttaaccccgtagttactcctattaggccagacgactaccacgaaaaaacatccagatcgtcaagttcgagccattctgattcacctgaatttttgagaattaacaacaacaaatccggtcacaagaatggaaaattgaaaagttttgaaagtaaaaaactagttccgctattcattggtgacctccatgaaacagttactgaagaaactttaaaagggatcttcaaaaaatatccctcttttgtctctgctaaagtttgtcttgattcagtgacaaaaaaatcactgggccatggttacttaaattttgaagacaaagaagaagctgaaaaggctatggaagaattaaattacacgaaggttaatggtaaagaaattaggattatgccatcattgaggaatacaacgtttagaaagaatttcggcactaatgtctttttctctaatctacctctaaataatccattattaacaacaagagtattctatgatacgttttctagatatggtaaaattctatcatgcaaattagactctaggaaagatataggatttgtttactttgaggacgaaaaaactgcgagaaatgtgatcaaaatgtacaataataccagtttttttggtaagaaaattctatgtggaatacattttgataaagaggtcagaagtgttccaaattttgaaacacaaaaatcacgattagatgcggaaacaattattgaaaaagagcaatctttgaatgagaaacactccaaggggaatgataaggaatctaaaaatatttactcttcatcccaaaattctatattcatcaaaaaccttccaacaataactacaagggatgatattttaaatttcttcagtgaagtgggtccaattaagtcaatttatctatccaatgccactaaagttaaatatctttgggcatttgttacatataaaaatagcagtgactcagaaaaggcaattaaacgctacaataatttttatttcagaggtaaaaagcttttagtaaccagggcacaggataaagaagaaagagccaaatttatagaatctcaaaaaatatctacacttttcctggaaaatttaagcgctgtctgcaataaggaatttcttaaatatttatgtcaccaagaaaatattagaccgttcaagattcagatagatggatatgacgaaaattcttctacatattctgggttcatcaaattcaggaattttgaagatgctacgagaatatttaactttttgaataaccgtttagtaggaggaagcatcgtcacgacatcttgggaaagacaaaataatgcacctaaatatcatgatggttatggaatgcgcaatatacacacctcttctcatccacaaattaccccatattaccagtactcacatgcgaatagtttgaactccccacacatgagagatctttcgtcaatgaatagcagcacaagatcactaataaagaataaaaatttcaataagaaagttttggaaacattcgaaaagcaagtaagaagaggtatagatttcatgagatttccaagtgccactagagacgaaaatgtgcacggaatagctgagtatatattcgacacttattggaatcgcgatgtgttaatattggacaaatttttatcgttgctaaatagtagtccatatcatgaaggtgtattgcaaaaacaaattgaagaggctgcaagctcgttaggatttaaaagatga

SEQ ID NO: 3582 - DNA, 1836 bp, Artificial Sequence
  Description of Artificial Sequence: Synthetic polynucleotide
atgtattctatttccaacaaaaaaccttctatactcagtatggttcccttgaatattttgaaaaaccaggatttgaaagtaaaaaaagatcaagaaaagaaaatatcctttaaccccgtagttactcctattaggccagacgactaccacgaaaaaacatccagaagtagtagtagtagccattctgattctcctgaatttttgagaattaacaacaacaaatccggtcacaagaatggaaaattgaaaagttttgaaagtaaaaaattggttccgcttttcattggtgacctccatgaaacagttactgaagaaactttaaaagggatcttcaaaaaatatccctcttttgtctctgctaaagtttgtcttgattctgtgacaaaaaaatctttaggccatggttacttaaattttgaagacaaagaagaagctgaaaaggctatggaagaattaaattacacgaaggttaatggtaaagaaattaggattatgccatctttgaggaatacaacgtttagaaagaatttcggcactaatgtctttttctctaatttacctttaaataatccattattaacaacaagagtattctatgatacgttttctagatatggtaaaattttaagttgcaaattagactctaggaaagatataggatttgtttactttgaggacgaaaaaactgcgagaaatgtgatcaaaatgtacaataataccagtttttttggtaagaaaattctttgtggaatacattttgataaagaggtcagaagtgttccaaattttgaaacacaaaaatctagattagatgcggaaacaattattgaaaaagagcaatctttgaatgagaaacactccaaggggaatgataaggaatctaaaaatatttactcttcttcccaaaattctatattcatcaaaaaccttccaacaataactacaagggatgatattttaaatttcttcagtgaagtgggtccaattaagtctatttatttatccaatgccactaaagttaaatatctttgggcatttgttacatataaaaatagcagtgactctgaaaaggcaattaaacgctacaataatttttatttcagaggtaaaaagcttttagtaaccagggcacaggataaagaagaaagagccaaatttatagaatctcaaaaaatatctacacttttcttggaaaatttaagcgctgtctgcaataaggaatttcttaaatatttatgtcaccaagaaaatattagaccgttcaagattcagatagatggatatgacgaaaattcttctacatattctgggttcatcaaattcaggaattttgaagatgctacgagaatatttaactttttgaataaccgtttagtaggaggaagcatcgtcacgacatcttgggaaagacaaaataatgcacctaaatatcatgatggttatggaatgcgcaatatacacacctcttctcatccacaaattaccccatattaccagtactctcatgcgaatagtttgaactccccacacatgagagatctttcttctatgaatagcagcacaagatccttgataaagaataaaaatttcaataagaaagttttggaaacattcgaaaagcaagtaagaagaggtatagatttcatgagatttccaagtgccactagagacgaaaatgtgcacggaatagctgagtatatattcgacacttattggaatcgcgatgtgttaatattggacaaatttttatctttgttgaatagtagtccatatcatgaaggtgtattgcaaaaacaaattgaagaggctgcaagctctttaggatttaaaagatga

SEQ ID NO: 3583 - DNA, 1380 bp, Saccharomyces cerevisiae
atgggtattaacaatcctattccaaggagtttaaagagtgagacaaaaaaagcagcgaagattttggctagttttgtcaaaccaaaccaagtttttggtgcggaccaagtcattcctccagacgttttgaaaagagctaaagggttggctatcataacgatcttaaaagcaggttttctattttcaggtagagctggttctggtgtgattgtcgcaagattaaaggatggtacttggtcagctccatctgccattgccatggcaggtgctggtgccggtgggatggttggtatagaattgactgattttgttttcattttaaatactcaggatgctgttaagtcgttttctgaatttgggaccatcacgttgggtggtaacgtctccgtttctgctgggcctcttggtagaagtgcagaagcagctgcatcagcctccgccggtggtgtggctgcagtttttgcctattctaagagtaaaggtctatttgcaggggtttctgtggaaggttcggctattatagaaagaagagaggctaacagaaaattttatggtgacaattgtaccgcgaaaatgattttgtctggtaggataagaccgcctccagcagttgatccattgtttcgtgttttagagtccagggcgtttaattacagaccctccaacggtggtcgtggcagtttcgatgacgacgaagacgattactatgacgacgacgattactataatgacattcctagttcattcagttctacagatgcttcctccactagacctaacacaagatccacaaggagaagagcccaaagcggttctcgttatacgttcgacgatgatgatgacgatgatgattatggtactggctattcaaggaattcaagactggctcctaccaacagtggcggtagtggtggtaaattggatgacccatctggagcttcaagttattatgccagccacagaagatcaggaactgctcagtcaagggctcgttcttcaagaaatcgttgggctgatgatgaatacgatgattatgatgatgattatgaatccgggtatagacgcgggaatggaagagataggacaaaagaccgtgaagtcgatgacttgtcgaacagattttctaaatctagaatctcgtccgcttcaacaccgcaaactagtcagggcagattcactgctccaacatccccatccacgtcttctccaaaggccgtggcattatatagctttgcaggagaagagtccggagatttaccattcagaaagggtgacgtgatcacaattttgaaaaaatcagattctcaaaatgactggtggaccggaagagtcaacggtagagaaggtatattcccagcaaattacgttgaactagtttaa

SEQ ID NO: 3584 - DNA, 1380 bp, Artificial Sequence
  Description of Artificial Sequence: Synthetic polynucleotide
atgggtattaacaatcctattccaaggagtttaaagagtgagacaaaaaaagcagcgaagattttggctagttttgtcaaaccaaaccaagtttttggtgcggaccaagtcattcctccagacgttttgaaaagagctaaagggttggctatcataacgatcttaaaagcaggttttttgttttctggtagagctggttctggtgtgattgtcgcaagattaaaggatggtacttggagtgctccatctgccattgccatggcaggtgctggtgccggtgggatggttggtatagaattgactgattttgttttcattttaaatactcaggatgctgttaagagcttttctgaatttgggaccatcacgttgggtggtaacgtctccgtttctgctgggcctcttggtagaagtgcagaagcagctgcatctgcctccgccggtggtgtggctgcagtttttgcctattctaagagtaaaggtttatttgcaggggtttctgtggaaggttctgctattatagaaagaagagaggctaacagaaaattttatggtgacaattgtaccgcgaaaatgattttgtctggtaggataagaccgcctccagcagttgatccattgtttcgtgttttagagtccagggcgtttaattacagaccctccaacggtggtcgtggcagtttcgatgacgacgaagacgattactatgacgacgacgattactataatgacattcctagttctttcagttctacagatgcttcctccactagacctaacacaagatccacaaggagaagagcccaaagcggttctcgttatacgttcgacgatgatgatgacgatgatgattatggtactggctattctaggaattctagattggctcctaccaacagtggcggtagtggtggtaaattggatgacccatctggagcttccagttattatgccagccacagaagatctggaactgctcagtctagggctcgttcttctagaaatcgttgggctgatgatgaatacgatgattatgatgatgattatgaatccgggtatagacgcgggaatggaagagataggacaaaagaccgtgaagtcgatgacttgtctaacagattttctaaatctagaatctcttccgcttctacaccgcaaactagtcagggcagattcactgctccaacatccccatccacgtcttctccaaaggccgtggcattatatagctttgcaggagaagagtccggagatttaccattcagaaagggtgacgtgatcacaattttgaaaaaatctgattctcaaaatgactggtggaccggaagagtcaacggtagagaaggtatattcccagcaaattacgttgaattggtttga

SEQ ID NO: 3585 - DNA, 1008 bp, Saccharomyces cerevisiae
atgcactcacaccattcacactccggtgactatagtgcccacggtacggaccctttggattccgtggtcgatcaagtggtcaacctcaactttcacacgtactgtttgacagagcacataccaagaattgaggccaagtttatataccccgaagagcagtcattgggcaagaatcctgaggaagtcataaccaagctagaaacatcgttcaagaatttcatgagtcatgcgcaagaaatcaagactcgttatgctgatagacccgatgtgcggactaaattcattataggaatggagatcgaaagttgtgacatggctcatatcgaatatgcaaagcgactcatgaaggagaataatgatattttgaagttttgtgtgggttcggtccatcacgtcaacgggatccctattgatttcgaccaacaacaatggtacaattcattgcattccttcaatgataatttgaaacattttctcctgtcttacttccaatcacagtacgaaatgctgatcaatattaaaccgttggtcgtgggtcacttcgacctttacaaattatttttgcccaatgacatgctagtaaaccagaaatcgggcaactgcaacgaagaaaccggagttcctgtagcttcactggacgtcatcagtgaatggccagaaatatacgatgcagttgtaagaaatttacaatttatagactcctatggcggcgcaattgaaatcaatacgtccgcattaagaaagcgcctcgaggagccgtaccccagcaaaaccttatgtaatctggtcaagaagcactgtggatccagatttgttctaagtgatgacgcacacggcgtggcgcaagtgggtgtgtgctatgacaaggtaaagaaatacatagtagacgtgctacaattagagtatatttgctaccttgaggaaagccaatcaccagagaatctgttaactgtaaagagattacccatttcgcaattcgttaatgatcccttttgggccaatatataa

SEQ ID NO: 3586 - DNA, 1008 bp, Artificial Sequence
  Description of Artificial Sequence: Synthetic polynucleotide
atgcactctcaccattctcactccggtgactatagtgcccacggtacggaccctttggattccgtggtcgatcaagtggtcaacctcaactttcacacgtactgtttgacagagcacataccaagaattgaggccaagtttatataccccgaagagcagtctttgggcaagaatcctgaggaagtcataaccaagttggaaacatctttcaagaatttcatgagtcatgcgcaagaaatcaagactcgttatgctgatagacccgatgtgagaactaaattcattataggaatggagatcgaaagttgtgacatggctcatatcgaatatgcaaagagactcatgaaggagaataatgatattttgaagttttgtgtgggttctgtccatcacgtcaacgggatccctattgatttcgaccaacaacaatggtacaattctttgcattccttcaatgataatttgaaacattttctcttatcttacttccaatctcagtacgaaatgttgatcaatattaaaccgttggtcgtgggtcacttcgacctttacaaattatttttgcccaatgacatgttggtaaaccagaaatctggcaactgcaacgaagaaaccggagttcctgtagcttctttggacgtcatcagtgaatggccagaaatatacgatgcagttgtaagaaatttacaatttatagactcctatggcggcgcaattgaaatcaatacgtccgcattaagaaagcgcctcgaggagccgtaccccagcaaaaccttatgtaatttggtcaagaagcactgtggatccagatttgttttgagtgatgacgcacacggcgtggcgcaagtgggtgtgtgctatgacaaggtaaagaaatacatagtagacgtgttgcaattagagtatatttgctaccttgaggaaagccaatctccagagaatttattaactgtaaagagattacccatttctcaattcgttaatgatcccttttgggccaatatatga

SEQ ID NO: 3587 - DNA, 510 bp, Saccharomyces cerevisiae
atgacgccctatgcagtagcaattaccgtggccttactaattgtaacagtgagcgcactccaggtcaacaattcatgtgtcgcttttccgccatcaaatctcagaggcaaaaatggagacggtactaatgaacagtatgcaactgcactactttctattccctggaatggacctcctgagtcattgagggatattaatcttattgaactcgaaccgcaagttgcactctatttgctcgaaaattatattaaccattactacaacaccacaagagacaataagtgccctaataaccactacctaatgggagggcagttgggtagctcatcggataataggagtttgaacgatccgcaaacgatgctatggccggaaaagaaggaagacgaaaaaaactgccaagaaacttttaaaggggcctgttcgtgtaccaaaaggttttgcaagggttatttctctgtaaatatttttgggataaacctgaatatatcttatagctctggaaagtga

SEQ ID NO: 3588 - DNA, 510 bp, Artificial Sequence
  Description of Artificial Sequence: Synthetic polynucleotide
atgacgccctatgcagtagcaattaccgtggccttattgattgtaacagtgagcgcactccaggtcaacaattcttgtgtcgcttttccgccatccaatctcagaggcaaaaatggagacggtactaatgaacagtatgcaactgcattactttctattccctggaatggacctcctgagtctttgagggatattaatcttattgaactcgaaccgcaagttgcactctatttgctcgaaaattatattaaccattactacaacaccacaagagacaataagtgccctaataaccactacttgatgggagggcagttgggtagctccagtgataataggagtttgaacgatccgcaaacgatgttatggccggaaaagaaggaagacgaaaaaaactgccaagaaacttttaaaggggcctgttcttgtaccaaaaggttttgcaagggttatttctctgtaaatatttttgggataaacttgaatatatcttatagctctggaaagtga

SEQ ID NO: 3589 - DNA, 846 bp, Saccharomyces cerevisiae
atgaaagctaggaaatcgcagagaaaagcgggcagtaaaccaaatcttatccagtctaaattgcaagttaataatggttcgaaatcgaataaaatagtcaagtgtgataaatgtgagatgtcatattcctcgacatcaatagaagatcgcgccatccacgagaaataccacactttacagctgcatggacgtaaatggtcgccgaattggggttctatagtatacacagagcgaaaccattcaaggacggtgcatctatcaagatcgacagggacaataacgccattgaactcctcacctttgaaaaaaagtagtccgtctattacccatcaggaggagaagattgtatatgtgagaccagataagtcgaatggtgaagtccgagccatgacggagataatgacactagtgaataacgagctgaatgcgccacacgatgagaatgtcatttggaacagtaccacagaagaaaaaggcaaagcgtttgtatacataagaaatgacagggcggtcggaataataattatagagaacctttatgggggcaatggtaaaacatctagtcgtggacgttggatggtttatgattctagaagattggtacagaatgtgtaccccgattttaagattggcatatcgagaatttgggtgtgcaggacagcaaggaagttgggtatcgcaaccaaattgattgacgttgcaagagaaaatattgtttacggtgaagttattcctaggtaccaggtagcatggtcgcaacccacagacagcggtggaaaactggctagcaaatacaacggcattatgcataaatcaggcaagttactattgccggtatacatatga

SEQ ID NO: 3590 - DNA, 846 bp, Artificial Sequence
  Description of Artificial Sequence: Synthetic polynucleotide
atgaaagctaggaaatctcagagaaaagcgggcagtaaaccaaatcttatccagtctaaattgcaagttaataatggttccaaatctaataaaatagtcaagtgtgataaatgtgagatgtcttattcctctacatctatagaagatcgcgccatccacgagaaataccacactttacagttacatggacgtaaatggtctccgaattggggttctatagtatacacagagagaaaccattccaggacggtgcatttatctagatctacagggacaataacgccattgaactcctcccctttgaaaaaaagtagtccgtctattacccatcaggaggagaagattgtatatgtgagaccagataagagcaatggtgaagtcagagccatgacggagataatgacattagtgaataacgagttgaatgcgccacacgatgagaatgtcatttggaacagtaccacagaagaaaaaggcaaagcgtttgtatacataagaaatgacagggcggtcggaataataattatagagaacctttatgggggcaatggtaaaacatctagtcgtggacgttggatggtttatgattctagaagattggtacagaatgtgtaccccgattttaagattggcatatctagaatttgggtgtgcaggacagcaaggaagttgggtatcgcaaccaaattgattgacgttgcaagagaaaatattgtttacggtgaagttattcctaggtaccaggtagcatggtctcaacccacagacagcggtggaaaattggctagcaaatacaacggcattatgcataaatctggcaagttattattgccggtatacatatga

SEQ ID NO: 3591 - DNA, 1656 bp, Saccharomyces cerevisiae
atgcgtaggagtgtatacctcgacaacacgatcgagttcctgcgaggcagagtatatctcggtgcatatgattacacgccggaagatactgatgagctggtgttttttaccgtggaggacgcaatcttttacaacagtttccatttggatttcggtcccatgaacattggacatctatatcgttttgccgttattttccatgaaatcttgaatgacccagaaaatgccaataaagccgttgttttctattcatctgcatcgaccagacaacgtgctaacgccgcatgtatgctttgctgttatatgatcctcgttcaggcatggactccgcatcaagtgcttcagccgttggcgcaagtagaccctcccttcatgccatttagagatgccggttattctaatgcggatttcgaaatcacaattcaagatgtggtttatggcgtttggagggctaaggaaaaaggccttattgatttgcattccttcaatttggagagttacgagaaatacgaacacgtggagtttggagacttcaatgtactcaccccagattttattgcatttgcgtcaccacaagaggaccatccaaagggctatctcgctaccaaatcttcacatttgaaccagccgtttaagtcagttctgaattttttcgccaacaataacgtccaattagtggtaaggttgaattctcatttatataataaaaagcattttgaagacattggcattcaacatttggatctaattttcgaagatggtacatgtcctgatctttccattgtaaaaaactttgttggtgctgctgaaacgataattaaaaggggaggtaaaattgctgtgcactgtaaggctgggctaggtagaactggttgtttaattggtgctcacttaatatacacgtatggatttaccgctaacgagtgtattggcttcttaaggtttataaggccgggaatggtcgttggccctcaacagcattggttatatttacaccagaatgattttagagaatggaagtacacaaccagaatttctttgaagcctagtgaggccattggcggcttatatcccttaataagtttagaagaataccgcttacaaaaaaagaaacttaaagacgacaagagggttgcgcaaaataacattgaaggtgaattaagagatttaaccatgacgccgccatccaacggtcatggggcgcttagtgccagaaattcgagccaaccttctacggcgaataatggaagtaattcattcaagagctcagccgtcccacagacttcgcctggtcagccgagaaagggccaaaacggttctaatactatagaagatatcaacaataatcgtaatccaacttcccatgcgaataggaaggtagtaatagaaagcaacaactcagatgacgaatccatgcaggataccaacggcacaagtaatcattatcccaaagtttcgcgcaagaaaaatgatatctcctctgcttcatcgtcccgaatggaagataacgaacccagcgcaacgaacatcaataatgccgcagatgataccatactaagacaactattgcccaagaataggagagtaacgtcagggagaaggactacaagcgccgccggtggtataagaaaaataagtggctccatcaagaaataa

SEQ ID NO: 3592 - DNA, 1656 bp, Artificial Sequence
  Description of Artificial Sequence: Synthetic polynucleotide
atgcgtaggagtgtatacctcgacaacacgatcgagttcttaagaggcagagtatatctcggtgcatatgattacacgccggaagatactgatgagttggtgttttttaccgtggaggacgcaatcttttacaacagtttccatttggatttcggtcccatgaacattggacatttatatcgttttgccgttattttccatgaaatcttgaatgacccagaaaatgccaataaagccgttgttttctattcttctgcatctaccagacaacgtgctaacgccgcatgtatgctttgctgttatatgatcctcgttcaggcatggactccgcatcaagtgcttcagccgttggcgcaagtagaccctcccttcatgccatttagagatgccggttattctaatgcggatttcgaaatcacaattcaagatgtggtttatggcgtttggagggctaaggaaaaaggccttattgatttgcattccttcaatttggagagttacgagaaatacgaacacgtggagtttggagacttcaatgtactcaccccagattttattgcatttgcgtctccacaagaggaccatccaaagggctatctcgctaccaaatcttctcatttgaaccagccgtttaagtctgttttgaattttttcgccaacaataacgtccaattagtggtaaggttgaattctcatttatataataaaaagcattttgaagacattggcattcaacatttggatttgattttcgaagatggtacatgtcctgatctttccattgtaaaaaactttgttggtgctgctgaaacgataattaaaaggggaggtaaaattgctgtgcactgtaaggctgggttaggtagaactggttgtttaattggtgctcacttaatatacacgtatggatttaccgctaacgagtgtattggcttcttaaggtttataaggccgggaatggtcgttggccctcaacagcattggttatatttacaccagaatgattttagagaatggaagtacacaaccagaatttctttgaagcctagtgaggccattggcggcttatatcccttaataagtttagaagaataccgcttacaaaaaaagaaacttaaagacgacaagagggttgcgcaaaataacattgaaggtgaattaagagatttaaccatgacgccgccatccaacggtcatggggcgcttagtgccagaaatagtagccaaccttctacggcgaataatggaagtaattctttcaagagcagtgccgtcccacagacttctcctggtcagccgagaaagggccaaaacggttctaatactatagaagatatcaacaataatcgtaatccaacttcccatgcgaataggaaggtagtaatagaaagcaacaacagtgatgacgaatccatgcaggataccaacggcacaagtaatcattatcccaaagtttctcgcaagaaaaatgatatctcctctgcttcttcttccagaatggaagataacgaacccagcgcaacgaacatcaataatgccgcagatgataccatattaagacaattattgcccaagaataggagagtaacgtctgggagaaggactacaagcgccgccggtggtataagaaaaataagtggctccatcaagaaatga

SEQ ID NO: 3593 - DNA, 2037 bp, Saccharomyces cerevisiae
atgcactctcatagacaaaagtggggccgccagacggatatagcgagggtgctcgacgatatagaacacgacctctatctaccgcaacggctatcactcgatggtgcaactggtactgacgaatcacatgtgcaatacggtatagtcaaagactgctctgtgcttacgtgtggctgctgtatatctgaatcgctattcaatgatttatgcagggaaacttcgaacaagcaaactgcgtgtcccatctgtcagcgagaaaatgttcgactactttcagccatcaagccgctgcgagatttggctcgtcagattgacttcttcagaagtactaccggacagggcgaaagcgaaagcgatgagctccccgctatagtaaagacttcaccatcatcatcatcactatcgctaacgccatcgcgctcttcctccactgctgggctagaagctgataacaagacactatcagaccctacagttaaggagaaatcatcactgctcgaactcttccatattgtggcttcgaagatgcataatgcgaatacagaggtagggtcggaccacccactcacgactggcaccacccgtgatcaagaagaacacaccactaaggagaattactcaagcagcttactcgagcccaactatgacgaccacgcgaactggaaaatcctggataatgcctcgaacacaagaactgtgccgatagataacaacttctctttgatgtctacggacgttacaataccttccacagcaaactaccaaacaaatagtgcacatgatctggacgaagaaaaggagtacttttttgccaactgtttccccatgtacagaaaaaaatttcagttcaacacacaccccaaattcctagggacgaaatccaaattattcatcaaccaaagcatttctcccgattgcaccaaatttgctctaattactgaacacaagtgggaaatttattcgattaatccgaaggacaactctcctcaactagtatcatgtggcaagtctagtggagaatatggtcccaacttcaaccaactaacagagcaatcgtcatcttcactctccactacttctcaagcgtcaaaaaagaaaaagaaaaactggagccaacgtttttgcaaactttccaatgatttcttgataatatcgggttcgcaaaacattcttaatgtacacgacatacaccaaaacggcaaactcatctatacctacgtgtcgagattccccatccgatgcatagacatagatccaaggtcgcagataatagcctacggaatcaccggaaaggatagacatacaggcgcggaacaagcattagtcgtgatccaacaaattaccagaaataaagtgactttggagcccgagttccccccaccaatcaccataacacttccatacagagatcccatcaataccatacaactttcgcacgacgccaagtatctgacatgttcgaccgcgctagagtcgcggttcttgatcatatctttgcagaaaataaacgaaccaagactgataatgaaaagtgttcggtccatagacacttccttagaatctgaaggtatcactgacacaaaacttttcccaggaaatccaaatctgatgtgtatcacatcaacagcattcaattcatctccactggtcataaacaccaaaatcacccaaattaacggtgtacggaccgtggcacaaccatccatgcttataagggtagatgagattggatgcaagattcacaagtgcgaaatatcaccaagaaacgacgcaattgccttcctcgaccgcaacggatcagtttacatcatgtgtgcccccaccatgatggacaacaacgaaaaaagaaggacaatcctcgttgaaaccgtggcaaatgcctacagggcttatgaatcagctactttgcggtttaacccagagggcaacaagctttatattctcgacagaaaggggactttctttgtggaagactttgcatatggcttgccccaatctcgcgaaatcaccaaatgtaagcaaatattccacaaataa

SEQ ID NO: 3594 - DNA, 2037 bp, Artificial Sequence
  Description of Artificial Sequence: Synthetic polynucleotide
atgcactctcatagacaaaagtggggccgccagacggatatagcgagggtgctcgacgatatagaacacgacctctatttaccgcaaagattatctctcgatggtgcaactggtactgacgaaagtcatgtgcaatacggtatagtcaaagactgctctgtgcttacgtgtggctgctgtatatctgaatctttattcaatgatttatgcagggaaacttctaacaagcaaactgcgtgtcccatctgtcagagggaaaatgttagattactttctgccatcaagccgcttagagatttggctcgtcagattgacttcttcagaagtactaccggacagggcgaaagcgaaagcgatgagctccccgctatagtaaagacttctccatcttcttcttctttaagtttaacgccaagccgctcttcctccactgctgggttggaagctgataacaagacattaagtgaccctacagttaaggagaaatcttctttactcgaactcttccatattgtggcttccaagatgcataatgcgaatacagaggtagggagtgaccacccactcacgactggcaccacccgtgatcaagaagaacacaccactaaggagaattactccagcagcttactcgagcccaactatgacgaccacgcgaactggaaaatcttagataatgcctccaacacaagaactgtgccgatagataacaacttctctttgatgtctacggacgttacaataccttccacagcaaactaccaaacaaatagtgcacatgatttggacgaagaaaaggagtacttttttgccaactgtttccccatgtacagaaaaaaatttcagttcaacacacaccccaaattcttggggacgaaatccaaattattcatcaaccaaagcatttctcccgattgcaccaaatttgctttgattactgaacacaagtgggaaatttattctattaatccgaaggacaactctcctcaattggtatcttgtggcaagtctagtggagaatatggtcccaacttcaaccaattgacagagcaatcttcttcttctctctccactacttctcaagcgtccaaaaagaaaaagaaaaactggagccaacgtttttgcaaactttccaatgatttcttgataatatctggttctcaaaacattcttaatgtacacgacatacaccaaaacggcaaactcatctatacctacgtgtccagattccccatccgttgcatagacatagatccaaggagccagataatagcctacggaatcaccggaaaggatagacatacaggcgcggaacaagcattagtcgtgatccaacaaattaccagaaataaagtgactttggagcccgagttccccccaccaatcaccataacacttccatacagagatcccatcaataccatacaactttctcacgacgccaagtatttgacatgttctaccgcgctcgagtctagattcttgatcatatctttgcagaaaataaacgaaccaagattaataatgaaaagtgttagatccatagacacttccttagaatctgaaggtatcactgacacaaaacttttcccaggaaatccaaatttaatgtgtatcacatctacagcattcaattcttctccattagtcataaacaccaaaatcacccaaattaacggtgtaagaaccgtggcacaaccatccatgcttataagggtagatgagattggatgcaagattcacaagtgcgaaatatctccaagaaacgacgcaattgccttcctcgaccgcaacggatctgtttacatcatgtgtgcccccaccatgatggacaacaacgaaaaaagaaggacaatcctcgttgaaaccgtggcaaatgcctacagggcttatgaatctgctactttgagatttaacccagagggcaacaagctttatattctcgacagaaaggggactttctttgtggaagactttgcatatggcttgccccaatctcgcgaaatcaccaaatgtaagcaaatattccacaaatga

SEQ ID NO: 3595 - DNA, 3108 bp, Saccharomyces cerevisiae
atgccagttgagtttgctaccaatccttttggcgaggccaaaaatgcaacttcactgccaaaatatggtacacccgtaactgccatttcatctgtgctgttcaataacgtggactccatttttgcttacaagtccttttctcaacccgatttgctacaccaagatctaaaaaaatggtctgaaaagcgtggtaacgaatcacgtgggaagccatttttccaagagctggatatcagatctggcgctggtttggctcctttagggttttctcatggattgaagaacactacagcaattgttgctccagggttttcgctgccatacttcattaactctttgaaaaccgtctctcatgatggtaagtttcttttgaatgttggtgctttaaactacgacaatgctaccggctctgtcaccaacgattatgtaaccgcattggatgctgcttccaagctgaagtatggtgtcgtgactccgatttccgctaacgaggtacaaagtgtcgccttactggcattggcgattgccactttcagtaataactccggagctatcaatttatttgacggattaaactactcgaaaaccgtcttgccgttggtcgaatctgttcctgaggcatctattttggcaaaactatccaaagttattgcaccagatgctgcctttgatgatgtcttggataagtttaatgaattgactggattgagactacataatttccaatactttggtgctcaggatgctgaaactgtgtttatcacttatgggtctttagaatccgaattgttcaactctgcgattagtggtaataattccaaaatcgggttaatcaacgtcagagtgccattaccttttaacgttgctaagtttgtcactcacgttccatccactaccaaacaaattgttgttataggccaaactttggatggttcttcgccttctttcttgagatctcaagtttcagccgccttattttaccacggccgcacctcaattagcgtttctgagtacatctatcaaccagatttcatttggtccccaaaagctgtcaaatcaattgtatcgtcattcatccctgaattcacttacaatgccgattcatctttcggcgaaggattcatttattgggcctctgataagagtatcaatattgatgttgcctccaaacttgtgaaagctctgtctttggaagatgggaaatttgtgtctttgagaacgaaatttgataacttggctaatgctggtaccttccaagctcaatttgtgacctcgaaagaacagatacctgtttcaaacatcgattctacgaaattatcagtcgttgaagatgtcagtttattgaagcatttagacgtagctgctaccgtcgcagaacaaggttcaattgcgttggtttcccaaaaggcagttaaagatttggatttaaattctgtagaaagttacgtcaagaatttgggaattcctgaatcattcctaatatctattgcgaagaaaaacatcaaattgtttatcatcgatggtgagaccactaacgacgagtccaaattgtccttgtttatccaagccgttttctggaaattggccttcggtctagatgtcgcagaatgtaccaaccgtatctggaaaagcattgattcaggtgcagacatttcagcagcctcgatttctgaatttctcactggtgcattcaaaaacttcctcagtgaggttccgctagcgctgtacactaaattttctgaaataaacattgaaaagaaagaggatgaggaagagcctgcagctttaccaattttcgttaatgaaacatctttcctcccaaataacagtaccattgaagaaataccattacctgagacctctgagatctctgatattgccaagaagttgtccttcaaagaggcatatgaagttgagaataaactaagacccgatttacccgtcaagaacttcgtcgtgaaagttaaagaaaatagacgtgttacgcctgctgattatgatagatatattttccatattgaattcgatatttctggtactggaatgacttatgacatcggtgaagccctcggtattcatgccagaaacaatgaatctttggtcaaagaattcttaaccttctatggtctaaatgaatccgatgttgtcttagtccccaacaaggacaaccaccatttgttagaaacaagaaccgtcttacaagcatttgtggaaaatttggatattttcggtaaaccaccaaaaagattttacgaatcattgattccatatgcctctaacgaagaggagaagaaaaaattagaggatttggttactcctgccggtgcagtagatttgaagagatttcaagatgtggagtattatacatatgctgacatttttgaattgttcccatctgttcgcccatctcttgaggaacttgttactatcattgaaccattgaagagaagagaatactcaattgcctcctctcagaaagttcatccaaatgaagttcatttattgatcgttgttgttgattgggtggataataaaggaagaaaaaggtacggtcaagcttctaagtatatctcagaccttgctgtcggttcagaattggtcgttagcgttaaaccatctgttatgaaattaccaccatctccaaagcaaccagttattatgagtggtttaggtactggtttggcaccattcaaggccattgttgaagagaaattatggcaaaagcagcaaggttatgagattggtgaagtcttcctatatctaggttcaagacacaaaagagaagaatatttatatggtgagttatgggaggcttacaaagatgcaggtattatcacacacatcggcgctgctttctcaagagaccaacctcaaaaaatttacattcaagatcgtatcaaagagaatttggatgaattaaaaactgcaatgattgataataaaggttcattttacttgtgtggccctacttggccagttccagatattactcaagctttgcaagacattctggctaaagacgccgaggaaagaggcatcaaagtcgacttggatgccgcaattgaagaattaaaggaagcatcaagatacattttagaagtctactaa

SEQ ID NO: 3596 - DNA, 3108 bp, Artificial Sequence
  Description of Artificial Sequence: Synthetic polynucleotide
atgccagttgagtttgctaccaatccttttggcgaggccaaaaatgcaacttctttaccaaaatatggtacacccgtaactgccatttcttctgtgcttttcaataacgtggactccatttttgcttacaagtccttttctcaacccgatttgttgcaccaagatttgaaaaaatggtctgaaaagcgtggtaacgaatcccgtgggaagccatttttccaagagttagatatcagatctggcgctggtttggctcctttagggttttctcatggattgaagaacactacagcaattgttgctccagggttttctttaccatacttcattaactctttgaaaaccgtctctcatgatggtaagtttcttttgaatgttggtgctttaaactacgacaatgctaccggctctgtcaccaacgattatgtaaccgcattggatgctgcttccaagttgaagtatggtgtcgtgactccgatttccgctaacgaggtacaaagtgtcgccttattggcattggcgattgccactttcagtaataactccggagctatcaatttatttgacggattaaactactctaaaaccgtcttgccgttggtcgaatctgttcctgaggcatctattttggcaaaactttccaaagttattgcaccagatgctgcctttgatgatgtcttggataagtttaatgaattgactggattgagattacataatttccaatactttggtgctcaggatgctgaaactgtgtttatcacttatgggtctttagaatccgaattgttcaactctgcgattagtggtaataattccaaaatcgggttaatcaacgtcagagtgccattaccttttaacgttgctaagtttgtcactcacgttccatccactaccaaacaaattgttgttataggccaaactttggatggttcttctccttctttcttgagatctcaagtttctgccgccttattttaccacggccgcacctctattagcgtttctgagtacatctatcaaccagatttcatttggtccccaaaagctgtcaaatccattgtatcttctttcatccctgaattcacttacaatgccgattcttctttcggcgaaggattcatttattgggcctctgataagagtatcaatattgatgttgcctccaaacttgtgaaagctttatctttggaagatgggaaatttgtgtctttgagaacgaaatttgataacttggctaatgctggtaccttccaagctcaatttgtgacctccaaagaacagatacctgtttctaacatcgattctacgaaattaagtgtcgttgaagatgtcagtttattgaagcatttagacgtagctgctaccgtcgcagaacaaggttccattgcgttggtttcccaaaaggcagttaaagatttggatttaaattctgtagaaagttacgtcaagaatttgggaattcctgaatctttcttgatatctattgcgaagaaaaacatcaaattgtttatcatcgatggtgagaccactaacgacgagtccaaattgtccttgtttatccaagccgttttctggaaattggccttcggtttggatgtcgcagaatgtaccaaccgtatctggaaaagcattgattctggtgcagacatttctgcagcctctatttctgaatttctcactggtgcattcaaaaacttcctcagtgaggttccgttagcgttgtacactaaattttctgaaataaacattgaaaagaaagaggatgaggaagagcctgcagctttaccaattttcgttaatgaaacatctttcctcccaaataacagtaccattgaagaaataccattacctgagacctctgagatctctgatattgccaagaagttgtccttcaaagaggcatatgaagttgagaataaattgagacccgatttacccgtcaagaacttcgtcgtgaaagttaaagaaaatagacgtgttacgcctgctgattatgatagatatattttccatattgaattcgatatttctggtactggaatgacttatgacatcggtgaagccctcggtattcatgccagaaacaatgaatctttggtcaaagaattcttaaccttctatggtttgaatgaatccgatgttgtcttagtccccaacaaggacaaccaccatttgttagaaacaagaaccgtcttacaagcatttgtggaaaatttggatattttcggtaaaccaccaaaaagattttacgaatctttgattccatatgcctctaacgaagaggagaagaaaaaattagaggatttggttactcctgccggtgcagtagatttgaagagatttcaagatgtggagtattatacatatgctgacatttttgaattgttcccatctgttcgcccatctcttgaggaacttgttactatcattgaaccattgaagagaagagaatactctattgcctcctctcagaaagttcatccaaatgaagttcatttattgatcgttgttgttgattgggtggataataaaggaagaaaaaggtacggtcaagcttctaagtatatcagtgaccttgctgtcggttctgaattggtcgttagcgttaaaccatctgttatgaaattaccaccatctccaaagcaaccagttattatgagtggtttaggtactggtttggcaccattcaaggccattgttgaagagaaattatggcaaaagcagcaaggttatgagattggtgaagtcttcctctatttgggttccagacacaaaagagaagaatatttatatggtgagttatgggaggcttacaaagatgcaggtattatcacacacatcggcgctgctttcagtagagaccaacctcaaaaaatttacattcaagatcgtatcaaagagaatttggatgaattaaaaactgcaatgattgataataaaggttctttttacttgtgtggccctacttggccagttccagatattactcaagctttgcaagacattttggctaaagacgccgaggaaagaggcatcaaagtcgacttggatgccgcaattgaagaattaaaggaagcatctagatacattttagaagtctactga

SEQ ID NO: 3597 - DNA, 3513 bp, Saccharomyces cerevisiae
atgaaggtagaggaattgattattgatggtttcaaatcatacgctacaagaacagtcattactgattgggaccctcaattcaatgctattacaggtctaaatgggtccggtaagtcgaacattttggacgccatttgcttcgtgctcggtatagcatcaatgagcactgtgcgagcatctagcctgcaagatttgatctataagcgtggtcaagcaggtgttaccaaggcaagcgtaaccattgtttttgataataccgataaatcaaattctcccattgggttcactaactctcctcaaatctctgttacaaggcaagtcgtgcttggtggaacttctaaatatctgataaatgggcatagggcacctcaacagtcggttttgcaactatttcaatccgtgcagttaaatatcaataatcctaattttttaatcatgcaaggtaaaattaccaaggttttgaatatgaaaccctcagagatcttatcactgattgaagaggcagcagggacaaaaatgttcgaggatcgtagggaaaaggcagaaagaacaatgtctaagaaagaaactaaattacaggagaacaggactctgttaactgaagagatcgaacctaaactggaaaaacttcgaaacgaaaagagaatgttcctagaatttcagtctactcagactgatttggaaaaaactgaacgaattgttgtatcctatgaatactataacattaaacataaacatacatcaataagagaaactctggagaacggtgagactcgtatgaaaatgttaaatgaatttgttaagaaaacttccgaagaaatagacagtttgaatgaggatgtcgaggaaatcaaacttcagaaagaaaaagaactacacaaagaaggcacaatctccaagttggaaaataaggagaacggtcttttaaatgaaatttctcgtttgaaaacttcactgtcgataaaagtagaaaatttgaatgatactactgaaaaatcaaaggctctggagtcagaaattgcaagttcctctgcaaagctaatcgaaaaaaaatcggcatacgctaacactgaaaaggattataaaatggtgcaggaacaactcagtaaacaaagggatctttataaacgaaaagaagaattagtttccactttaaccacaggtatttcctcgaccggtgccgcagacggtggttataacgcacagttggccaaggcaaagactgagctgaatgaagtctccttggcgataaaaaaatcaagcatgaaaatggagttgttgaagaaagagctattgacaattgaacctaaattaaaggaggccacgaaagataacgagttaaatgtgaagcatgttaaacaatgccaagaaacgtgcgataaactacgagcccgactagtcgaatatgggtttgatccatcacgaattaaagacctgaagcaaagagaggataaattgaagagccattattatcaaacatgtaagaactctgaatatttaaaaagacgcgtaacaaatctggaatttaactatacgaaaccttatcctaattttgaagccagctttgtccatggggtggtgggtcaacttttccagatagataatgataatattcgctatgctactgctttgcaaacttgtgccggaggtaggctattcaatgttgttgttcaagattctcagacggccactcagctattagaaagaggaagattacgcaagcgtgttaccatcatacctcttgataagatatatacgaggccaataagttctcaagtgcttgatttagccaagaaaattgctcctgggaaagttgaattggcaataaatttaataaggtttgatgaatctatcactaaagcgatggaatttatttttggaaatagtttaatctgtgaagatccggaaacagcaaagaaaattaccttccatccaaagatccgcgctagaagtatcacccttcaaggtgatgtatacgacccagagggtacattgtctggtggtagtagaaatacctctgaatcgttattagttgatattcaaaaatacaatcaaattcaaaaacaaattgagaccattcaggctgatctcaaccatgtaacggaagagctacagacgcaatatgctacatcgcaaaaaacaaagaccattcaaagtgatttaaatctctcgttgcataaattggatttggctaagcgtaatctcgacgcgaatccatcttcccaaataattgctaggaatgaagaaattttgagggacattggagagtgtgagaatgaaatcaaaaccaagcaaatgagcttaaagaaatgtcaagaagaagtttcgaccattgaaaaagacatgaaggagtacgatagcgataaaggatccaagttaaatgaattaaagaaggaattgaaactattggcgaaagagctggaggagcaggaatcggagtcagaacgtaaatatgacttgtttcaaaacttggaattagaaacagagcaattgagctcagaactagattctaataagacgctattgcataaccatttgaaatctattgaaagtttgaaattggaaaattctgatttggagggaaagatacgaggtgttgaagacgaccttgtaacagtccagacagaactgaacgaagaaaagaaaaggttgatggacattgatgatgaactaaatgaattagaaacattgataaagaaaaaacaggacgagaaaaaaagcagtgaattagaactacaaaaattggtccatgacttgaacaaatataagtctaatacgaacaacatggaaaagataattgaagatctgcgacagaaacacgaatttcttgaggattttgatctggtgagaaatatcgtcaaacaaaatgagggtatcgatttggatacttacagagaaaggagtaaacaattgaacgagaagtttcaagagctcagaaaaaaagttaatccaaatattatgaatatgatagaaaatgttgagaaaaaggaggcagcattaaaaacaatgattaaaacgattgaaaaagataagatgaaaatccaagagactatatcgaagttgaacgaatataaaagagaaactttagtcaaaacatgggagaaagtgacacttgattttggtaatatttttgcagaccttttaccaaattcatttgcaaaattggttccatgcgaaggtaaggacgtaacgcagggtttagaggttaaagtaaagcttggtaatatatggaaggaaagtttgattgaattgtccggtgggcaaaggtcgttgattgctttgtcattgattatggcattgttgcaatttcgaccagcgcctatgtatattttggatgaagttgatgctgctcttgatttaagtcatacgcaaaatataggtcatttgattaaaacaaggtttaaaggatctcagttcattgtagtctcgcttaaagaaggtatgtttgccaatgctaatagggtcttcaggacgagatttcaagatggtacctccgtagttagtataatgtga

SEQ ID NO: 3598 - DNA, 3513 bp, Artificial Sequence
  Description of Artificial Sequence: Synthetic polynucleotide
atgaaggtagaggaattgattattgatggtttcaaatcttacgctacaagaacagtcattactgattgggaccctcaattcaatgctattacaggtttgaatgggtccggtaagtctaacattttggacgccatttgcttcgtgctcggtatagcatctatgagcactgtgagggcatctagcttacaagatttgatctataagcgtggtcaagcaggtgttaccaaggcaagcgtaaccattgtttttgataataccgataaatctaattctcccattgggttcactaactctcctcaaatctctgttacaaggcaagtcgtgcttggtggaacttctaaatatttgataaatgggcatagggcacctcaacagtctgttttgcaattatttcaatccgtgcagttaaatatcaataatcctaattttttaatcatgcaaggtaaaattaccaaggttttgaatatgaaaccctctgagatcttatctttgattgaagaggcagcagggacaaaaatgttcgaggatcgtagggaaaaggcagaaagaacaatgtctaagaaagaaactaaattacaggagaacaggactttattaactgaagagatcgaacctaaattagaaaaacttagaaacgaaaagagaatgttcttggaatttcagtctactcagactgatttggaaaaaactgaaagaattgttgtatcctatgaatactataacattaaacataaacatacatctataagagaaactttagagaacggtgagactcgtatgaaaatgttaaatgaatttgttaagaaaacttccgaagaaatagacagtttgaatgaggatgtcgaggaaatcaaacttcagaaagaaaaagaattgcacaaagaaggcacaatctccaagttggaaaataaggagaacggtcttttaaatgaaatttctcgtttgaaaacttctttatctataaaagtagaaaatttgaatgatactactgaaaaatccaaggctttggagagtgaaattgcaagttcctctgcaaagttaatcgaaaaaaaatctgcatacgctaacactgaaaaggattataaaatggtgcaggaacaactcagtaaacaaagggatctttataaaagaaaagaagaattagtttccactttaaccacaggtatttcctccaccggtgccgcagacggtggttataacgcacagttggccaaggcaaagactgagttgaatgaagtctccttggcgataaaaaaaagtagcatgaaaatggagttgttgaagaaagagttattgacaattgaacctaaattaaaggaggccacgaaagataacgagttaaatgtgaagcatgttaaacaatgccaagaaacgtgcgataaacttcgtgccagattggtcgaatatgggtttgatccaagtagaattaaagacttgaagcaaagagaggataaattgaagagccattattatcaaacatgtaagaactctgaatatttaaaaagacgcgtaacaaatttggaatttaactatacgaaaccttatcctaattttgaagccagctttgtccatggggtggtgggtcaacttttccagatagataatgataatattcgctatgctactgctttgcaaacttgtgccggaggtaggttgttcaatgttgttgttcaagattctcagacggccactcagcttttagaaagaggaagattacgcaagcgtgttaccatcatacctcttgataagatatatacgaggccaataagttctcaagtgcttgatttagccaagaaaattgctcctgggaaagttgaattggcaataaatttaataaggtttgatgaatctatcactaaagcgatggaatttatttttggaaatagtttaatctgtgaagatccggaaacagcaaagaaaattaccttccatccaaagatccgcgctagaagtatcacccttcaaggtgatgtatacgacccagagggtacattgtctggtggtagtagaaatacctctgaatctttattagttgatattcaaaaatacaatcaaattcaaaaacaaattgagaccattcaggctgatctcaaccatgtaacggaagagttacagacgcaatatgctacatctcaaaaaacaaagaccattcaaagtgatttaaatctctctttgcataaattggatttggctaagcgtaatctcgacgcgaatccatcttcccaaataattgctaggaatgaagaaattttgagggacattggagagtgtgagaatgaaatcaaaaccaagcaaatgagcttaaagaaatgtcaagaagaagtttctaccattgaaaaagacatgaaggagtacgatagcgataaaggatccaagttaaatgaattaaagaaggaattgaaacttttggcgaaagagttagaggagcaggaaagtgagagtgaacgtaaatatgacttgtttcaaaacttggaattagaaacagagcaattgagctctgaattagattctaataagacgttattgcataaccatttgaaatctattgaaagtttgaaattggaaaattctgatttggagggaaagataagaggtgttgaagacgaccttgtaacagtccagacagaattgaacgaagaaaagaaaaggttgatggacattgatgatgaattgaatgaattagaaacattgataaagaaaaaacaggacgagaaaaaaagcagtgaattagaattacaaaaattggtccatgacttgaacaaatataagtctaatacgaacaacatggaaaagataattgaagatttaagacagaaacacgaatttcttgaggattttgatttggtgagaaatatcgtcaaacaaaatgagggtatcgatttggatacttacagagaaaggagtaaacaattgaacgagaagtttcaagagctcagaaaaaaagttaatccaaatattatgaatatgatagaaaatgttgagaaaaaggaggcagcattaaaaacaatgattaaaacgattgaaaaagataagatgaaaatccaagagactatatccaagttgaacgaatataaaagagaaactttagtcaaaacatgggagaaagtgacacttgattttggtaatatttttgcagaccttttaccaaattcttttgcaaaattggttccatgcgaaggtaaggacgtaacgcagggtttagaggttaaagtaaagcttggtaatatatggaaggaaagtttgattgaattgtccggtgggcaaaggtctttgattgctttgtctttgattatggcattgttgcaatttaggccagcgcctatgtatattttggatgaagttgatgctgctcttgatttaagtcatacgcaaaatataggtcatttgattaaaacaaggtttaaaggatctcagttcattgtagtctcccttaaagaaggtatgtttgccaatgctaatagggtcttcaggacgagatttcaagatggtacctccgtagttagtataatgtga

SEQ ID NO: 3599 - DNA, 765 bp, Saccharomyces cerevisiae
atgggtagagttattcgtaaccaaagaaagggtgctggttctatctttacctcccacaccagattgagacaaggtgctgccaagttgagaactttggattatgctgaacgtcacggttacattcgtggtatcgttaagcaaattgtccacgactccggtagaggtgccccattggccaaggttgtcttccgtgacccatacaagtacagattgcgtgaagaaatctttattgctaacgaaggtgtccacactggtcaattcatttacgccggtaagaaggcttctttgaacgtcggtaacgtcttgccattgggttctgtcccagaaggtaccattgtctccaacgttgaagaaaagccaggtgacagaggtgccctagccagagcttccggtaactacgttattatcatcggtcacaacccagacgaaaacaagactagagtcagattaccatccggtgccaagaaggttatctcttctgatgccagaggtgtcatcggtgtcattgccggtggtggtagagttgacaaaccattgttgaaggctggtcgtgctttccacaagtacagattgaagagaaactcttggccaaagacccgtggtgttgccatgaatccagttgatcaccctcacggtggtggtaaccatcaacatattggtaaggcttctaccatctctagaggtgctgtttctggtcaaaaggccggtttgattgccgccagaagaactggtttgttacgtggttctcaaaagacccaagattag

SEQ ID NO: 3600 - DNA, 765 bp, Artificial Sequence
  Description of Artificial Sequence: Synthetic polynucleotide
atgggtagagttattcgtaaccaaagaaagggtgctggttctatctttacctcccacaccagattgagacaaggtgctgccaagttgagaactttggattatgctgaacgtcacggttacattcgtggtatcgttaagcaaattgtccacgactccggtagaggtgccccattggccaaggttgtcttccgtgacccatacaagtacagattgcgtgaagaaatctttattgctaacgaaggtgtccacactggtcaattcatttacgccggtaagaaggcttctttgaacgtcggtaacgtcttgccattgggttctgtcccagaaggtaccattgtctccaacgttgaagaaaagccaggtgacagaggtgccttggccagagcttccggtaactacgttattatcatcggtcacaacccagacgaaaacaagactagagtcagattaccatccggtgccaagaaggttatctcttctgatgccagaggtgtcatcggtgtcattgccggtggtggtagagttgacaaaccattgttgaaggctggtcgtgctttccacaagtacagattgaagagaaactcttggccaaagacccgtggtgttgccatgaatccagttgatcaccctcacggtggtggtaaccatcaacatattggtaaggcttctaccatctctagaggtgctgtttctggtcaaaaggccggtttgattgccgccagaagaactggtttgttacgtggttctcaaaagacccaagattga

SEQ ID NO: 3601 - DNA, 870 bp, Saccharomyces cerevisiae
atgacagaacaagttaacaatgacactaccagtgacactaccactaccattaccacagtttacatttcgaacctgccattcacggcgagtgagcgagacctacatgccttcctaaacaactatggcgccagttcagtgttgattccaacgcagaccgtccgcagattcagcaaaaggcacaatagcaaccctcgcaaaccactaggcatagcatttgcccagttcgcaaacaatactctggctttgaaggccattcaagacttgaacggaaccgttttccaaaatcagaaactatttctaaagttacacgttccttacgaggcagactctactccagacacggatgtaaagaagcccaaagaaaaaaataaggttaagaagacaccagagactgccgcggatacggtttactgtcacgacctgccagacgatataaccgacagtgagatccgtgagttgttccagctctactcgcctcaagaaatctggatttacaggtccaaggtgtacaggagaaagtgtattccttttgctccacaccaaattactgccgctttggtcactttgcaatctgaaaccccaattggggacatttgtgacagtgtggccaagacagctactttgaggggcaaatcgataatagtgaagcccgcttacgtctctaagattcaagaaattaaacaattggtcaaggacaacttaaccaatgcgcgcgacccacctccagcagcattggcagagccagcgccagcgccagcgccagtagagccagcggagcaagtgcaggaagggcaagacaatgcggaaaccaatgatgtcccacctccgcctgcttcgtcttccgatcgtccaaccgtggctgctacttag

SEQ ID NO: 3602 - DNA, 870 bp, Artificial Sequence
  Description of Artificial Sequence: Synthetic polynucleotide
atgacagaacaagttaacaatgacactaccagtgacactaccactaccattaccacagtttacatttccaacttaccattcacggcgagtgagagagacttgcatgccttcttgaacaactatggcgccagttctgtgttgattccaacgcagaccgtccgcagattcagcaaaaggcacaatagcaaccctcgcaaaccattaggcatagcatttgcccagttcgcaaacaatactttggctttgaaggccattcaagacttgaacggaaccgttttccaaaatcagaaattatttttgaagttacacgttccttacgaggcagactctactccagacacggatgtaaagaagcccaaagaaaaaaataaggttaagaagacaccagagactgccgcggatacggtttactgtcacgacttaccagacgatataaccgacagtgagatccgtgagttgttccagctctactctcctcaagaaatctggatttacaggtccaaggtgtacaggagaaagtgtattccttttgctccacaccaaattactgccgctttggtcactttgcaatctgaaaccccaattggggacatttgtgacagtgtggccaagacagctactttgaggggcaaatctataatagtgaagcccgcttacgtctctaagattcaagaaattaaacaattggtcaaggacaacttaaccaatgcgcgcgacccacctccagcagcattggcagagccagcgccagcgccagcgccagtagagccagcggagcaagtgcaggaagggcaagacaatgcggaaaccaatgatgtcccacctccgcctgcttcttcttccgatcgtccaaccgtggctgctacttga

SEQ ID NO: 3603 - DNA, 180 bp, Saccharomyces cerevisiae
atggctaagtctaagaaccataccgctcacaaccaaaccagaaaggctcacagaaacggtatcaagaagccaaagacctacaagtacccttctttgaaaggtgttgatccaaagtttagaagaaaccacaagcatgccctacacggcactgctaaggctttggctgctgccaagaaataa

SEQ ID NO: 3604 - DNA, 180 bp, Artificial Sequence
  Description of Artificial Sequence: Synthetic polynucleotide
atggctaagtctaagaaccataccgctcacaaccaaaccagaaaggctcacagaaacggtatcaagaagccaaagacctacaagtacccttctttgaaaggtgttgatccaaagtttagaagaaaccacaagcatgccttgcacggcactgctaaggctttggctgctgccaagaaatga

SEQ ID NO: 3605 - DNA, 264 bp, Saccharomyces cerevisiae
atggtcgctagccgcgctcgggaaaaccagcgatattctcaatgtaggaagtctaccattttccctttaggctttgccataatctctggatacatacaatttcagaatatttcaatactgcatatttcaagattcaacccattattttataacatttttcattcaatattcaagaaccccggaacaacaatacagttagaaagtacgttatattatcatgaagtccccatttcgcccattggaaatgcaggtagccaaatctga

SEQ ID NO: 3606 - DNA, 264 bp, Artificial Sequence
  Description of Artificial Sequence: Synthetic polynucleotide
atggtcgctagccgcgctagagaaaaccagagatattctcaatgtaggaagtctaccattttccctttaggctttgccataatctctggatacatacaatttcagaatatttctatattacatatttctagattcaacccattattttataacatttttcattccatattcaagaaccccggaacaacaatacagttagaaagtacgttatattatcatgaagtccccatttctcccattggaaatgcaggtagccaaatctga

SEQ ID NO: 3607 - DNA, 444 bp, Saccharomyces cerevisiae
atgggcatgttggaactagttggtgagtactgggaacaactaaagataaccgttgtgcctgttgtggccgcggccgaagatgacgataacgagcagcatgaagaaaaggcagcagaaggagaagaaaaagaagaagaaaatggggatgaagatgaggatgaagacgaagacgaagatgatgatgatgatgacgacgaagatgaggaagaagaggaagaagtcactgatcagttggaagatttgagagaacatttcaagaacacggaggagggtaaggcccttgtgcaccactacgaggagtgtgctgagagagtcaagatacagcaacaacaacccggctacgcggatcttgaacacaaggaggactgtgtggaggagtttttccatctacagcactatttggacactgccacggcacctagattatttgacaaattaaagtag

SEQ ID NO: 3608 - DNA, 444 bp, Artificial Sequence
  Description of Artificial Sequence: Synthetic polynucleotide
atgggcatgttggaattggttggtgagtactgggaacaattgaagataaccgttgtgcctgttgtggccgcggccgaagatgacgataacgagcagcatgaagaaaaggcagcagaaggagaagaaaaagaagaagaaaatggggatgaagatgaggatgaagacgaagacgaagatgatgatgatgatgacgacgaagatgaggaagaagaggaagaagtcactgatcagttggaagatttgagagaacatttcaagaacacggaggagggtaaggcccttgtgcaccactacgaggagtgtgctgagagagtcaagatacagcaacaacaacccggctacgcggatcttgaacacaaggaggactgtgtggaggagtttttccatttacagcactatttggacactgccacggcacctagattatttgacaaattaaagtga

SEQ ID NO: 3609 - DNA, 939 bp, Saccharomyces cerevisiae
atgggccgtacaacttctgagggaatacacggttttgtggacgatctagagcccaagagcagcattcttgataaagtcggagactttatcaccgtaaacacgaaacggcatgatgggcgcgaggacttcaacgagcaaaacgacgagctgaacagtcaagagaaccacaacagcagtgagaatgggaacgagaatgaaaatgaacaagacagtctcgcgttggacgacctagaccgcgcctttgagctggtggaaggtatggatatggactggatgatgccctcgcatgcgcaccactccccagctacaactgctacaatcaagccgcggctattatattcgccgctaatacacacgcaaagtgcggttcccgtaaccatttcgccgaacttggtcgctactgctacttccaccacatccgctaacaaagtcactaaaaacaagagtaatagtagtccgtatttgaacaagcgcagaggtaaacccgggccggattcggccacttcgctgttcgaattgcccgacagcgttatcccaactccgaaaccgaaaccgaaaccaaagcaatatccgaaagttattctgccgtcgaacagcacaagacgcgtatcaccggtcacggccaagaccagcagcagcgcagaaggcgtggtcgtagcaagtgagtctcctgtaatcgcgccgcacggatcgagccattcgcggtcgctgagtaagcgacggtcatcgggcgcgctcgtggacgatgacaagcgcgaatcacacaagcatgcagagcaagcacggcgtaatcgattagcggtcgcgctgcacgaactggcgtctttaatccccgcggagtggaaacagcaaaatgtgtcggccgcgccgtccaaagcgaccaccgtggaggcggcctgccggtacatccgtcacctacagcagaacgtgagcacgtga

SEQ ID NO: 3610 - DNA, 939 bp, Artificial Sequence
  Description of Artificial Sequence: Synthetic polynucleotide
atgggccgtacaacttctgagggaatacacggttttgtggacgatttagagcccaagagcagcattcttgataaagtcggagactttatcaccgtaaacacgaaaagacatgatgggcgcgaggacttcaacgagcaaaacgacgagttgaacagtcaagagaaccacaacagcagtgagaatgggaacgagaatgaaaatgaacaagacagtctcgcgttggacgacttggaccgcgcctttgagttggtggaaggtatggatatggactggatgatgccctctcatgcgcaccactccccagctacaactgctacaatcaagccgagattattatattctccgttgatacacacgcaaagtgcggttcccgtaaccatttctccgaacttggtcgctactgctacttccaccacatccgctaacaaagtcactaaaaacaagagtaatagtagtccgtatttgaacaagcgcagaggtaaacccgggccggattctgccacttctttattcgaattgcccgacagcgttatcccaactccgaaaccgaaaccgaaaccaaagcaatatccgaaagttattttaccgtctaacagcacaagacgcgtatccccggtcacggccaagaccagcagcagcgcagaaggcgtggtcgtagcaagtgagtctcctgtaatcgcgccgcacggaagcagccattccagatctttgagtaagagaagatcttctggcgcgctcgtggacgatgacaagcgcgaatctcacaagcatgcagagcaagcaagacgtaatagattagcggtcgcgttgcacgaattggcgtctttaatccccgcggagtggaaacagcaaaatgtgtctgccgcgccgtccaaagcgaccaccgtggaggcggcctgcaggtacatccgtcacttgcagcagaacgtgagcacgtga

SEQ ID NO: 3611 - DNA, 345 bp, Saccharomyces cerevisiae
atgagcgcgagtgacaaaacaaagctctgcaataagggcatgagcaggacatcgcgaaccacaactttcgtaatcacacccgccttccgtgagagagacgatgagggtgccaattccctgtgtaaagctttcttgaacactttctcgaacctcaaatcaggtatgttcaaatgtttgttgggagttggcgccgtaggtacgttcatttctacgttcccacagtttttcttgctgccttgccttctttgcgtacggtgtgtatgtgtatgtctgtgtgcaagtatttcctatgctgcaagtgcgattttctcgttttctatttttttttttttttgcctcgcctaa

SEQ ID NO: 3612 - DNA, 345 bp, Artificial Sequence
  Description of Artificial Sequence: Synthetic polynucleotide
atgagcgcgagtgacaaaacaaagctctgcaataagggcatgagcaggacatctcgtaccacaactttcgtaatcacacccgccttccgtgagagagacgatgagggtgccaattccttatgtaaagctttcttgaacactttcagtaacctcaaatctggtatgttcaaatgtttgttgggagttggcgccgtaggtacgttcatttctacgttcccacagtttttcttgttaccttgccttctttgcgtaagatgtgtatgtgtatgtttatgtgcaagtatttcctatgctgcaagtgcgattttctccttttctatttttttttttttttgcctcgcctga

SEQ ID NO: 3613 - DNA, 375 bp, Saccharomyces cerevisiae
atgatcagaagggcccctaccaccttgcagctcagtcacgacgacgtaacctctctgatcgatgacctgaacgagcagaaactcaagcagcagctgaatatcgagaagacaaaatacttccaaggaaaaaatggcggatcgctgcactccaatacagactttcaggacacatcgcagaatatcgaagacaacaataacgataacgataacgatatcgatgaagatgacgacatgtcatcttacaacgacaaagcagcctcggtagcgcacaccagagtcctcaattccttgcatctgtccaccgacagcaataccgcccacgagacgtccaatgcaaacgacaaccacaaccccttctacatccgcgaggaataa

SEQ ID NO: 3614 - DNA, 375 bp, Artificial Sequence
  Description of Artificial Sequence: Synthetic polynucleotide
atgatcagaagggcccctaccaccttgcagctcagtcacgacgacgtaacctctttgatcgatgacttgaacgagcagaaactcaagcagcagttgaatatcgagaagacaaaatacttccaaggaaaaaatggcggatctttacactccaatacagactttcaggacacatctcagaatatcgaagacaacaataacgataacgataacgatatcgatgaagatgacgacatgtcttcttacaacgacaaagcagcctctgtagcgcacaccagagtcctcaattccttgcatttgtccaccgacagcaataccgcccacgagacgtccaatgcaaacgacaaccacaaccccttctacatccgcgaggaatga

SEQ ID NO: 3615 - DNA, 1674 bp, Saccharomyces cerevisiae
atgagcgacactgaaaaggataaggatgtccctatggtagactcgcacgaagcgaccgaggagccacccaccacaagcaccaacacgccatctttccctcacttagcacaggaacaggcgaaggaggaatctgccacattgggagcagaagtagctcataagaaaatcaattacgagcaagaagcacagaaactggaggagaaggcccttaggttcctggcaaagcaaactcacccggtgattattccgtcgtttgcctcttggtttgatatttcgaagatccacgagatcgaaaaaagatccaatcccgactttttcaacgattcatcaaggttcaagacaccaaaggcatataaggacacaagaaattttatcatcaacacgtaccgtctttcgccgtacgaatatttgaccattaccgctgtgagaagaaatgttgccatggatgttgcctcgatagtgaagattcacgcgttcttggaaaaatggggcttaatcaattatcagattgaccccaggaccaagcccagtcttattgggccaagttttacgggccacttccaagtggttctggacactccgcaggggttaaagccatttttaccagagaatgtgatcaagcaagaagtggaaggaggagatggagcggaaccacaagtcaagaaggaatttcccgttaatctcacaatcaagaagaacgtttacgattctgcacaagacttcaatgcattacaagacgaaagtagaaactccaggcagattcacaaagtttacatttgccatacatgcggtaacgagtcaatcaatgtgcgctaccacaatttgcgtgcacgggacaccaacctgtgctcccgttgtttccaagagggtcatttcggtgccaactttcaatcttcagatttcatcagattagaaaacaacggaaactcggttaaaaaaaactggtcagaccaggagatgctactattgctggagggtattgaaatgtatgaagaccagtgggagaagattgctgaccacgtgggtgggcacaagcgtgtagaagactgcattgaaaaattcctaagcttaccgatcgaggacaactacatccgagaagttgttggttcaacgctgaatggtaagggtggcgacagccgcgatggtagtgtgtccggttcgaagttgatggaatgcgtgaatgatgctgtccagacgctactgcaaggcgacgacaaattgggtaaggtctctgataagtcgagagagatctccgaaaagtacattgaagaaagccaagcgataatccaagagttagtcaagctgaccatggagaaattagagagcaagtttacaaagctgtgcgatctagaaacgcaactggagatggaaaaactgaaatatgtgaaggaatctgaaaagatgctgaacgaccgattatcactgagtaaacagattcttgacctgaacaagtcgctggaggagttgaatgtgtcgaagaaactggtactgatctcggagcaagtagactcgggcatacaactagtggagaaggaccaggagggcgatgacgaagacggcaatacggccacaggacatggcgtgaaacgtgtaggcaaggaaggcgaggaagtaggcgaaggcgactccattgcaaaattgcagccccaggtgtacaaaccgtggtcattgtaa

SEQ ID NO: 3616 - DNA, 1674 bp, Artificial Sequence
  Description of Artificial Sequence: Synthetic polynucleotide
atgagcgacactgaaaaggataaggatgtccctatggtagactctcacgaagcgaccgaggagccacccaccacaagcaccaacacgccatctttccctcacttagcacaggaacaggcgaaggaggaatctgccacattgggagcagaagtagctcataagaaaatcaattacgagcaagaagcacagaaattagaggagaaggcccttaggttcttggcaaagcaaactcacccggtgattattccgtcctttgcctcttggtttgatatttccaagatccacgagatcgaaaaaagatccaatcccgactttttcaacgattcttccaggttcaagacaccaaaggcatataaggacacaagaaattttatcatcaacacgtaccgtctttctccgtacgaatatttgaccattaccgctgtgagaagaaatgttgccatggatgttgcctctatagtgaagattcacgcgttcttggaaaaatggggcttaatcaattatcagattgaccccaggaccaagcccagtcttattgggccaagttttacgggccacttccaagtggttttggacactccgcaggggttaaagccatttttaccagagaatgtgatcaagcaagaagtggaaggaggagatggagcggaaccacaagtcaagaaggaatttcccgttaatctcacaatcaagaagaacgtttacgattctgcacaagacttcaatgcattacaagacgaaagtagaaactccaggcagattcacaaagtttacatttgccatacatgcggtaacgagagtatcaatgtgcgctaccacaatttgcgtgcaagagacaccaacttatgctcccgttgtttccaagagggtcatttcggtgccaactttcaatcttctgatttcatcagattagaaaacaacggaaactctgttaaaaaaaactggtctgaccaggagatgttattattgttggagggtattgaaatgtatgaagaccagtgggagaagattgctgaccacgtgggtgggcacaagcgtgtagaagactgcattgaaaaattcttgagcttaccgatcgaggacaactacatcagagaagttgttggttctacgttgaatggtaagggtggcgacagccgcgatggtagtgtgtccggttccaagttgatggaatgcgtgaatgatgctgtccagacgttattacaaggcgacgacaaattgggtaaggtctctgataagtctagagagatctccgaaaagtacattgaagaaagccaagcgataatccaagagttagtcaagttgaccatggagaaattagagagcaagtttacaaagttgtgcgatttggaaacgcaattggagatggaaaaattgaaatatgtgaaggaatctgaaaagatgttgaacgacagattatctttgagtaaacagattcttgacttgaacaagtctttggaggagttgaatgtgagcaagaaattagtattgatctctgagcaagtagacagtggcatacaattagtggagaaggaccaggagggcgatgacgaagacggcaatacggccacaggacatggcgtgaaacgtgtaggcaaggaaggcgaggaagtaggcgaaggcgactccattgcaaaattgcagccccaggtgtacaaaccgtggtctttgtga

SEQ ID NO: 3617 - DNA, 2562 bp, Saccharomyces cerevisiae
atgagcagatgctcaaacgcggcgctgatgactgttgttgaggatgctgttggggccagggtggctgcaaggacgagaaacatgagcaatggcgtcaattaccgggagaaggaagtcaatgacctaacggctgacatttcagattcagattcagatttggattcagaggacaataaacatggcaaaggcgacaatgacactgcccccatatggttacaagatgatgtgcattcagacgaagatattcagctggactcagaggacgattccgatacagaagctgttcaagcccaagtggtggataaattggcaaaagacacgaaatcagagcaaaaatccttggatgatgagctctccgagatggataccaagacggtttctttaaaacttaagaaactaaacgagtttgtgaggcagagtcaggtatattccagtataatcgccgatactttactacatcgatctaatgaagtggctaacgctaatacaaaagataacagcaactctgatgatgaagaacattcttcaaaaaaacgtaaaacaaaaaaaaaatcaataacagatttcttcaaaaaacagaaaaagaacgaagatacaaccacccaaaacggcgcaccagacgatgcagcaataaagcaacctcgcctattgaaaaactgtattttaaaaccttaccaactagaaggtcttaactggctgatcactctttatgaaaatggcctgaacggaattcttgccgatgaaatgggtcttggtaagactgttcaaagtattgctcttttggcgttcatatatgaaatggacacaaagggtccttttctagtgactgcaccattaagcaccctagataattggatgaacgaatttgcaaaattcgctcctgatctaccagttctaaaatattatgggaccaatggttataaggaacgttctgccaagttgaaaaatttctttaaacaacacggcggcacggggatcgtcatcacatcatatgaaattattttaagagataccgacttaatcatgagtcaaaattggaaatttttaattgttgatgaaggccaccgtctgaaaaatataaactgtagattgattaaagagttaaaaaaaatcaatacttccaatagactgctactaacagggacgcctttacaaaataacctagctgaattatggtcacttttgaatttcataatgcccgatatctttgccgatttcgagatattcaataaatggtttgacttcgacagcttaaatttaggctccggttccaactctgaagcattgaataagttaatcaacgatgaactacagaaaaatttgatttccaatttacacacaattctgaaaccattccttttgagaagattgaaaaaagttgttttggctaatattctgccgccaaagagagaatatatcataaattgtccgatgacgtctgcacaggaaaaattctataaggctggattgaatggaaagttgaaaaaaaccatgttcaaagaattaatcaaggattttttcacattgaacgatgaatacatcggccacgtttctaatcggtccatacgagatttcatcaattataaactatctggtaatgaaacttcaaatacagacaataaaatcaatccaaccttgttgcaaatggacaaactatataagaagaacctgcaaatggaaatttcaaataagaaattgcaaaatatgatgatgcaattgagacaaatcattgactcaacttttttgttttatttcccatatttacacccagaagacttgactttggaaactcttttaaagacgtctgggaaattacaaatcttacaaaaattaatccccccattaatatctgaggggcacaaagtgcttatttattctcagtttgttaacatgctcgatttgatcgaagattggtgtgatttaaattcgttcgcgacatttcgaattgatggttcagtaaacaatgaaacaagaaaggatcaactcgagaagtttaatagctcgaaagataagcataacattttcctattgtccacaagggcggcaggactgggtattaatctagtcggggcagatacagttgtcttgtttgatagtgattggaatccacaggtggatttacaagccatggacaggtgtcaccgtattggccaagaatcaccggttatagtatataggttgtgttgtgataacaccattgaacatgttatattgaccagagcggccaataagcgaaatttggaaagaatggttatccagatgggaaaattcaataacctgaaaaaattggcgttaaatgaaggttcttttttgaaggcaaacaaagcgggtgttaatgtcactaataaggacttagtccaggagttatctatgcttttaatgagcgatgaatccaatataggctttgaaaatgggggacagaaagaaaataaggctactgagggccaactgactgataaggaggttgaagaattgaccaacagatctcttgaagcgtacaaggccaacagagtcgtagatctgccgcacgtcaagctatttgaaacaacctccggtctttaa

SEQ ID NO: 3618 - DNA, 2562 bp, Artificial Sequence
  Description of Artificial Sequence: Synthetic polynucleotide
atgagcagatgcagcaacgcggcgttaatgactgttgttgaggatgctgttggggccagggtggctgcaaggacgagaaacatgagcaatggcgtcaattacagagagaaggaagtcaatgacttaacggctgacatttctgattctgattctgatttggattctgaggacaataaacatggcaaaggcgacaatgacactgcccccatatggttacaagatgatgtgcattctgacgaagatattcagttagactctgaggacgattccgatacagaagctgttcaagcccaagtggtggataaattggcaaaagacacgaaaagtgagcaaaaatccttggatgatgagctctccgagatggataccaagacggtttctttaaaacttaagaaattgaacgagtttgtgaggcagagtcaggtatattccagtataatcgccgatactttattacatagatctaatgaagtggctaacgctaatacaaaagataacagcaactctgatgatgaagaacattcttctaaaaaacgtaaaacaaaaaaaaaatctataacagatttcttcaaaaaacagaaaaagaacgaagatacaaccacccaaaacggcgcaccagacgatgcagcaataaagcaacctcgcttgttgaaaaactgtattttaaaaccttaccaattggaaggtcttaactggttgatcactctttatgaaaatggcttgaacggaattcttgccgatgaaatgggtcttggtaagactgttcaaagtattgctcttttggcgttcatatatgaaatggacacaaagggtccttttttagtgactgcaccattaagcaccttggataattggatgaacgaatttgcaaaattcgctcctgatttaccagttttgaaatattatgggaccaatggttataaggaacgttctgccaagttgaaaaatttctttaaacaacacggcggcacggggatcgtcatcacatcttatgaaattattttaagagataccgacttaatcatgagtcaaaattggaaatttttaattgttgatgaaggccaccgtttgaaaaatataaactgtagattgattaaagagttaaaaaaaatcaatacttccaatagattattattaacagggacgcctttacaaaataacttggctgaattatggagtcttttgaatttcataatgcccgatatctttgccgatttcgagatattcaataaatggtttgacttcgacagcttaaatttaggctccggttccaactctgaagcattgaataagttaatcaacgatgaattacagaaaaatttgatttccaatttacacacaattttgaaaccattccttttgagaagattgaaaaaagttgttttggctaatattttaccgccaaagagagaatatatcataaattgtccgatgacgtctgcacaggaaaaattctataaggctggattgaatggaaagttgaaaaaaaccatgttcaaagaattaatcaaggattttttcacattgaacgatgaatacatcggccacgtttctaatagatccataagagatttcatcaattataaattatctggtaatgaaacttccaatacagacaataaaatcaatccaaccttgttgcaaatggacaaactttataagaagaacttacaaatggaaatttctaataagaaattgcaaaatatgatgatgcaattgagacaaatcattgactctacttttttgttttatttcccatatttacacccagaagacttgactttggaaactcttttaaagacgtctgggaaattacaaatcttacaaaaattaatccccccattaatatctgaggggcacaaagtgcttatttattctcagtttgttaacatgctcgatttgatcgaagattggtgtgatttaaattctttcgcgacatttagaattgatggttctgtaaacaatgaaacaagaaaggatcaactcgagaagtttaatagcagtaaagataagcataacattttcttgttgtccacaagggcggcaggattaggtattaatttggtcggggcagatacagttgtcttgtttgatagtgattggaatccacaggtggatttacaagccatggacaggtgtcaccgtattggccaagaatctccggttatagtatataggttgtgttgtgataacaccattgaacatgttatattgaccagagcggccaataagagaaatttggaaagaatggttatccagatgggaaaattcaataacttgaaaaaattggcgttaaatgaaggttcttttttgaaggcaaacaaagcgggtgttaatgtcactaataaggacttagtccaggagttatctatgcttttaatgagcgatgaatccaatataggctttgaaaatgggggacagaaagaaaataaggctactgagggccaattgactgataaggaggttgaagaattgaccaacagatctcttgaagcgtacaaggccaacagagtcgtagatttaccgcacgtcaagttatttgaaacaacctccggtctttga

SEQ ID NO: 3619 - DNA, 1533 bp, Saccharomyces cerevisiae
atgaaggccgttttcaaagtaacgactgctttgctggcttgcgtgtttattgcaaggtatctggtctgtcagcaaaatggtctgggaagctttgccacagatttacagcccatttgccggcatactgaattttcagttggctcactattcgattctaaattggttgaaggttcagcggtttctgactatttagttggaaagtactcacaatcgataaaaccactgattgaaagataccccaactcatccttgaagagaattatgggatatttttaccgcttttggtacaatattttctcttttctaaggctaaatgagctctgctgttcgctacattccaagttgggacctttattaaatcatctaaggattgcctggtactatttaaagccatatacagacaatgtgaagaatgtactagagaatccatttaactcctctacggattggatgaaatacggctcctttagcgctgatggcacgctcaccaaacccatttttgagacagactcggaaacagaggattatgaggatgatgagaatgaaaatgaggatgaggatgaagatgaggatgaggatgatgtcggaattgaggatgaaaataaagaatacgagttcgatggagtacaggatggccacgggaactcacaactcgtcactgctgctattttgcaggatttgtcaaagattatcattggttccaatagccatgcagaattggaaacttacgaggcagaatcattaaaaatggaatatgaagcatggattaaggctatagattcgaaaatacacagtgcgatggcacttttggattcagagatacagtctgtgttcgaggccgaggtgcaaaataaatctatagaaatcactaggaatcttgatgaccttaacactaccgttaatgagcaattagtgtttctagattcaaaaatcaaagatattaattgtacctctaaattcgatcctgtgcaaaataaaataaagtattttgatgaatcgggtcaagttgaactggaagcttacattaccaaatcatctatcacatcgatactgaagaattataaaatacatttgttagactttgaaaaatcactgtttcattcattagattcttttcttaccgaaatggctaaactggcagaatcgattcgtcttgaaaacgtcgaagtgtacgaagagtggggcgatgtaatgataagtcaatggtcgcaaagaatggcatatatggacgtcagaggtctccatttggaagatcaatacgatcctgcctatatagaagagaatcattccaactggctccgtttcatggaattgaaaaagaaagttatttctgagaggaaccgtctggtaaaacatgatctggatatgactttgatactggaatggattactaaactaaaagctgatttccagaacacaaaaaataatattcaagatacctttctgcaacgaatgaatactgcggatactttattcaaaaaccgtgaactaaaggaacaactagaggaagaatttgtacggcaagaacattga

SEQ ID NO: 3620 - DNA, 1533 bp, Artificial Sequence
  Description of Artificial Sequence: Synthetic polynucleotide
atgaaggccgttttcaaagtaacgactgctttgttggcttgcgtgtttattgcaaggtatttagtctgtcagcaaaatggtttgggaagctttgccacagatttacagcccatttgcaggcatactgaattttctgttggctcccttttcgattctaaattggttgaaggttctgcggtttctgactatttagttggaaagtactctcaaagtataaaaccattgattgaaagataccccaactcttccttgaagagaattatgggatatttttaccgcttttggtacaatattttctcttttttaaggttgaatgagctctgctgttctttgcattccaagttgggacctttattaaatcatttaaggattgcctggtactatttaaagccatatacagacaatgtgaagaatgtattggagaatccatttaactcctctacggattggatgaaatacggctcctttagcgctgatggcacgctcaccaaacccatttttgagacagactctgaaacagaggattatgaggatgatgagaatgaaaatgaggatgaggatgaagatgaggatgaggatgatgtcggaattgaggatgaaaataaagaatacgagttcgatggagtacaggatggccacgggaactctcaactcgtcactgctgctattttgcaggatttgtccaagattatcattggttccaatagccatgcagaattggaaacttacgaggcagaatctttaaaaatggaatatgaagcatggattaaggctatagattctaaaatacacagtgcgatggcacttttggattctgagatacagtctgtgttcgaggccgaggtgcaaaataaatctatagaaatcactaggaatcttgatgaccttaacactaccgttaatgagcaattagtgtttttggattctaaaatcaaagatattaattgtacctctaaattcgatcctgtgcaaaataaaataaagtattttgatgaaagtggtcaagttgaattggaagcttacattaccaaatcttctatcacatctatattgaagaattataaaatacatttgttagactttgaaaaatctttatttcattctttagattcttttcttaccgaaatggctaaattggcagaaagtattcgtcttgaaaacgtcgaagtgtacgaagagtggggcgatgtaatgataagtcaatggtctcaaagaatggcatatatggacgtcagaggtctccatttggaagatcaatacgatcctgcctatatagaagagaatcattccaactggctccgtttcatggaattgaaaaagaaagttatttctgagaggaaccgtttagtaaaacatgatttggatatgactttgatattggaatggattactaaattgaaagctgatttccagaacacaaaaaataatattcaagatacctttttgcaaagaatgaatactgcggatactttattcaaaaaccgtgaattgaaggaacaattggaggaagaatttgtaaggcaagaacattga

SEQ ID NO: 3621 - DNA, 3009 bp, Saccharomyces cerevisiae
atgtcgttttggccatttggacagaatcttaatcactctaatattaataagatcctagatgaatattttcatgtgctacacgaactggaaaggattaacccaagcgttggtaaagccattcccgctattttcaacaacgttcaggaacgaggtacaagtgactccctagattctattccggaggagtatagtcatggtgatgaagtgaaaacggcacgtggagatcagaagagtcgatttgagaaggatgatcagcaagaacggtatgagaaagaggaagaggaacggagcatgaactctagcgaatcttccactacatctttttcttctgggtcaacttctaaaactgatttagatgaggaggatatcagcaatgctactgctcccatgatggtcaccacaaagaatttggataactcttttattgaaagaatgcttgtagagacagagctactgaacgaattatcgagacaaaacaagacgctacttgacttcatttgctttggatttttctttgataagaaaactaataagaaagtgaataatatggaatatctggtcgaccaactgatggaatgtatctcgaagattaaaaccgccaccacagtggatttgaataacctgatagattatcaagaacagcaacagcttgatgatagctcacaagaggacgtttatgtggaatctgatacggagcaagaagaggagaaagaggacgataataacagcaataacaagaagagacgaaaacgcggaagctcctcgtttggtaacgatgatatcaacaacaatgacgacgacgacgatgcgaatgaggacgatgaatctgcttatttgacaaaggccaccataatatctgaaatcttttccttagacatatggttgattagcgagtcattagttaaaaaccaatcatacttaaacaagatttggtctatcatcaaccagccaaatttcaattctgaaaactctcccttggtacccatattcttaaagattaaccaaaatctgttgttaaccaggcaggatcaatatttaaattttattcgaacggagagaagctttgttgatgatatgttaaagcatgttgatatttccctattgatggattttttcttgaaaataatatccacagataagattgaatcacccacgggaataattgaattagtatatgatcaaaacttgatcagcaaatgcttaagctttctaaataacaaagagtccccagctgacatccaagcatgcgtgggtgatttcttaaaggctctgattgccatttctgctaatgcacccttggatgatatttccattggtccaaactccttgacgagacagctagcatctcccgaatccattgcaaagctagtcgatatcatgatcaaccaaagaggtgccgcattaaataccacagtttcgattgtcattgagctgataaggaaaaacaattcagactacgatcaagttaatcttttaaccactactataaagactcatccaccttcaaatagagatccaatatatttaggctatctacttcggaaattttcaaaccatttgtccgattttttccaaatcattctagatattgaaaatgacgccaacatcccattacatgaaaatcagttgcacgaaaaatttaaacctttaggatttgaaagattcaaagtggtggaattaatcgccgagttactgcattgctctaatatgggattaatgaattccaaaagggcagaaagaatagccagaagaagagataaagtaaggagccagttatcccatcatttacaagatgcattaaacgatctgagtatcgaagaaaaggagcaacttaaaacgaagcactctccaacacgtgacactgatcacgacctaaaaaataacaacggtaaaatagataacgacaataatgataatgatgatgaaagtgactatggcgacgaaatagacgagagcttcgaaattccatacatcaatatgaagcaaaacataaaacttaggaccgaccccacggtcggggacctattcaaaatcaaactatatgatacgcgaattgtttccaaaataatggaactattcttaacacatccttggaacaatttttggcataatgttatattcgacataattcagcaaatcttcaatggaagaatggatttttcctataattccttccttgttttgtctctgtttaacttaaagagctcctatcaatttatgactgatatcgtcatatcagatgaaaaaggaacggatgtttcccgattttctcccgttattagagacccaaattttgatttcaaaataactacagacttcatattaaggggctaccaggattcatataaattttatgagctaaggaaaatgaatttgggatatatgggccatattgtcttgattgccgaagaagtggtcaaattttctaaattgtacaaagtggaactaatatctcccgatattcaagtaattttacaaaccgaagaatggcaatactactccgaagaagtcttaaacgaaacaagaatgatgtactctaaaattcttggcggtggaagttatattgatgatggaaatggtaacatcattccgcagctgcctgacaatactactgtattaactccaaatggtgatgcaagtaataataatgaaatccttgattcagataccgggagtagtaatggaacaagtggtggcggccaattaatcaatgttgagtctctagaagaacagttgtccttatctacagaatctgatttacacaacaagttaagggaaatgttaatcaatagggctcaagaagacgttgataataagaacacggaaaatggggttttcatactggggccgccggaggacaagaacagtaatagtaacattaacaataccaaccataatagtaataatagtaataacaacgataataacgataataatgataatgacaatgataatactcgtaattataatgaagatgctgataatgataatgattatgatcatgaatga

SEQ ID NO: 3622 - DNA, 3009 bp, Artificial Sequence
  Description of Artificial Sequence: Synthetic polynucleotide
atgagtttttggccatttggacagaatcttaatcactctaatattaataagatcttagatgaatattttcatgtgttacacgaattggaaaggattaacccaagcgttggtaaagccattcccgctattttcaacaacgttcaggaaagaggtacaagtgactccttggattctattccggaggagtatagtcatggtgatgaagtgaaaacggcacgtggagatcagaagagtagatttgagaaggatgatcagcaagaaagatatgagaaagaggaagaggaaagaagcatgaactctagcgaatcttccactacatctttttcttctgggtccacttctaaaactgatttagatgaggaggatatcagcaatgctactgctcccatgatggtcaccacaaagaatttggataactcttttattgaaagaatgcttgtagagacagagttattaaacgaattatctagacaaaacaagacgttacttgacttcatttgctttggatttttctttgataagaaaactaataagaaagtgaataatatggaatatttagtcgaccaattgatggaatgtatctccaagattaaaaccgccaccacagtggatttgaataacttgatagattatcaagaacagcaacagcttgatgatagctctcaagaggacgtttatgtggaatctgatacggagcaagaagaggagaaagaggacgataataacagcaataacaagaagagaagaaaacgcggaagctcctcttttggtaacgatgatatcaacaacaatgacgacgacgacgatgcgaatgaggacgatgaatctgcttatttgacaaaggccaccataatatctgaaatcttttccttagacatatggttgattagcgagtctttagttaaaaaccaatcttacttaaacaagatttggtctatcatcaaccagccaaatttcaattctgaaaactctcccttggtacccatattcttaaagattaaccaaaatttattgttaaccaggcaggatcaatatttaaattttattagaacggagagaagctttgttgatgatatgttaaagcatgttgatatttccttattgatggattttttcttgaaaataatatccacagataagattgaaagtcccacgggaataattgaattagtatatgatcaaaacttgatcagcaaatgcttaagctttttgaataacaaagagtccccagctgacatccaagcatgcgtgggtgatttcttaaaggctttgattgccatttctgctaatgcacccttggatgatatttccattggtccaaactccttgacgagacagttagcatctcccgaatccattgcaaagttggtcgatatcatgatcaaccaaagaggtgccgcattaaataccacagtttctattgtcattgagttgataaggaaaaacaatagtgactacgatcaagttaatcttttaaccactactataaagactcatccaccttccaatagagatccaatatatttaggctatttacttagaaaattttccaaccatttgtccgattttttccaaatcattttagatattgaaaatgacgccaacatcccattacatgaaaatcagttgcacgaaaaatttaaacctttaggatttgaaagattcaaagtggtggaattaatcgccgagttattacattgctctaatatgggattaatgaattccaaaagggcagaaagaatagccagaagaagagataaagtaaggagccagttatcccatcatttacaagatgcattaaacgatttgagtatcgaagaaaaggagcaacttaaaacgaagcactctccaacacgtgacactgatcacgacttgaaaaataacaacggtaaaatagataacgacaataatgataatgatgatgaaagtgactatggcgacgaaatagacgagagcttcgaaattccatacatcaatatgaagcaaaacataaaacttaggaccgaccccacggtcggggaccttttcaaaatcaaactttatgatacgagaattgtttccaaaataatggaattattcttaacacatccttggaacaatttttggcataatgttatattcgacataattcagcaaatcttcaatggaagaatggatttttcctataattccttccttgttttgtctttatttaacttaaagagctcctatcaatttatgactgatatcgtcatatctgatgaaaaaggaacggatgtttccagattttctcccgttattagagacccaaattttgatttcaaaataactacagacttcatattaaggggctaccaggattcttataaattttatgagttgaggaaaatgaatttgggatatatgggccatattgtcttgattgccgaagaagtggtcaaattttctaaattgtacaaagtggaattgatatctcccgatattcaagtaattttacaaaccgaagaatggcaatactactccgaagaagtcttaaacgaaacaagaatgatgtactctaaaattcttggcggtggaagttatattgatgatggaaatggtaacatcattccgcagttgcctgacaatactactgtattaactccaaatggtgatgcaagtaataataatgaaatccttgattctgataccgggagtagtaatggaacaagtggtggcggccaattaatcaatgttgagtctttggaagaacagttgtccttatctacagaatctgatttacacaacaagttaagggaaatgttaatcaatagggctcaagaagacgttgataataagaacacggaaaatggggttttcatattagggccgccggaggacaagaacagtaatagtaacattaacaataccaaccataatagtaataatagtaataacaacgataataacgataataatgataatgacaatgataatactcgtaattataatgaagatgctgataatgataatgattatgatcatgaatga

SEQ ID NO: 3623 - DNA, 888 bp, Saccharomyces cerevisiae
atgaacggttactggaaacctgcgttggttgtcctgggattggtatctctatcatatgcttttaccaccattgaaacagaaattttccaattacaaaatgaaataagtacgaaatatggcccagatatgaacttctacaagttcttgaagttacctaaactgcagaattctagtacaaaggagattacaaaaaacttaagaaagctatccaagaagtaccatccggataagaaccctaaataccgtaaattgtatgaaaggttaaacctcgctactcaaattctttcaaacagctctaatcgtaagatttatgattattatctacagaatggctttccaaactatgatttccataagggtggtttttatttttccagaatgaagcctaagacttggttcctgctggcctttatttggatagtcgttaatattgggcagtatatcatttctattattcaatatcgttctcaaagatcaagaattgaaaacttcatcagtcagtgtaaacaacaggatgataccaatggactaggcgtaaaacaactaacgtttaaacaacatgaaaaggatgagggtaaaagtttggttgtaaggtttagcgatgtctatgttgtagagcctgatggaagtgaaacactaatttcgccagataccttggataaaccttcagtaaagaactgtttgttttggagaatacctgcttcggtttggaacatgacgtttggcaaatctgttggtagcgcaggaaaagaagaaataataacggatagtaaaaagtatgatggtaaccaaacaaaaaaggggaacaaagtaaaaaagggttctgcaaagaaaggccaaaagaaaatggaattgcctaacggtaaagtgatctattcacgtaaatga

SEQ ID NO: 3624 - DNA, 888 bp, Artificial Sequence
  Description of Artificial Sequence: Synthetic polynucleotide
atgaacggttactggaaacctgcgttggttgtccttggattggtatctttatcttatgcttttaccaccattgaaacagaaattttccaattacaaaatgaaataagtacgaaatatggcccagatatgaacttctacaagttcttgaagttacctaaattacagaattctagtacaaaggagattacaaaaaacttaagaaagttatccaagaagtaccatccggataagaaccctaaataccgtaaattgtatgaaaggttaaacctcgctactcaaattctttccaacagctctaatcgtaagatttatgattattatttacagaatggctttccaaactatgatttccataagggtggtttttatttttccagaatgaagcctaagacttggttcttattagcctttatttggatagtcgttaatattgggcagtatatcatttctattattcaatatcgttctcaaagatctagaattgaaaacttcatcagtcagtgtaaacaacaggatgataccaatggattgggcgtaaaacaattaacgtttaaacaacatgaaaaggatgagggtaaaagtttggttgtaaggtttagcgatgtctatgttgtagagcctgatggaagtgaaacattaatttctccagataccttggataaaccttctgtaaagaactgtttgttttggagaatacctgcttctgtttggaacatgacgtttggcaaatctgttggtagcgcaggaaaagaagaaataataacggatagtaaaaagtatgatggtaaccaaacaaaaaaggggaacaaagtaaaaaagggttctgcaaagaaaggccaaaagaaaatggaattgcctaacggtaaagtgatctattctcgtaaatga

SEQ ID NO: 3625 - DNA, 603 bp, Saccharomyces cerevisiae
atggcaggtatcaagttgacgcataagctttatcagtattatcaattagccacaagctttttgtatgctgcattattgatacggtggctgatattaatgccactggtagggtctcggtttttaccgggaggaatccacgaattcttgatatatttgatgttttattccagcatcatggaagttatttggttgcttagattccacgggttcaaatatggtttgctttcaagaacgtttttgaaagacctaaattttatctatttagtcagcgtgatccatttttatgacgattatgagcatgcattgatcctcaagaatgcatcatattctagtttcattatttccttatctttatcacaggcatattgccattggtgcaaactttttaaacgtaagggcgtaaaggaaagaacacttgtatggaaggttaacacatttgttacattgccaattctctacctgagtgaatttgcattgctactattaaatatccaggttaagaactatcattctaccccgactttggacataatcaacagggtggttttactagcatacttccctgtactactaacagcatacaaaaaactattaacaaaatga

SEQ ID NO: 3626 - DNA, 603 bp, Artificial Sequence
  Description of Artificial Sequence: Synthetic polynucleotide
atggcaggtatcaagttgacgcataagctttatcagtattatcaattagccacaagctttttgtatgctgcattattgataagatggttgatattaatgccattagtagggtctagatttttaccgggaggaatccacgaattcttgatatatttgatgttttattccagcatcatggaagttatttggttgcttagattccacgggttcaaatatggtttgctttctagaacgtttttgaaagacttgaattttatctatttagtcagcgtgatccatttttatgacgattatgagcatgcattgatcctcaagaatgcaagttattctagtttcattatttccttatctttatctcaggcatattgccattggtgcaaactttttaaacgtaagggcgtaaaggaaagaacacttgtatggaaggttaacacatttgttacattgccaattctctacttgagtgaatttgcattgttattattaaatatccaggttaagaactatcattctaccccgactttggacataatcaacagggtggttttattggcatacttccctgtattattaacagcatacaaaaaattattaacaaaatga

SEQ ID NO: 3627 - DNA, 714 bp, Saccharomyces cerevisiae
atggttcttcaatacccccagaataaaatattggttttatcagatcacccacacaactttttaaaaacacaatttttgcaagacctgtttcattgctctagcacgggcatcagtatagttaaggaccaaacttgggaaaatagatactataaagtccattttgatctttatattgactcttgcaaagagataccagtatgggtggaagaatttataacgcctgaatgtgaaccgcttagaaatgtcatggcaggaattatcttaataacggacatccggcaaacaaaacctcaagaactgctgcaccaattcatgatagctgcccatcgaaatacttttgttgtgttggccaatgtgaacgaagaagtcgagcaagatgaaattgatgaactgaatgagatatggagcaatgcctttacaaacgtcatcgaattcgtaaactggaaaaggtcaaaaccaactgttaatcataacgactatggagaaaaattggggcttgataggatccaggagattatagatacccacgactggttaaattgtgaagttcaaccggctactaaaataagggaggaaattcctaatgaaatgcccctcgaacaaataattaggaatttgcaaagtgcaaggctaaaatataagtctatcgagaatagtagtgaagctgatgcttttgcaaatgaaatggctgacgaactatccagatatttatga

SEQ ID NO: 3628 - DNA, 714 bp, Artificial Sequence
  Description of Artificial Sequence: Synthetic polynucleotide
atggttcttcaatacccccagaataaaatattggttttaagtgatcacccacacaactttttaaaaacacaatttttgcaagacttatttcattgctctagcacgggcatcagtatagttaaggaccaaacttgggaaaatagatactataaagtccattttgatctttatattgactcttgcaaagagataccagtatgggtggaagaatttataacgcctgaatgtgaaccgcttagaaatgtcatggcaggaattatcttaataacggacatcagacaaacaaaacctcaagaattattacaccaattcatgatagctgcccatagaaatacttttgttgtgttggccaatgtgaacgaagaagtcgagcaagatgaaattgatgaattgaatgagatatggagcaatgcctttacaaacgtcatcgaattcgtaaactggaaaaggtccaaaccaactgttaatcataacgactatggagaaaaattggggcttgataggatccaggagattatagatacccacgactggttaaattgtgaagttcaaccggctactaaaataagggaggaaattcctaatgaaatgcccctcgaacaaataattaggaatttgcaaagtgcaaggttgaaatataagtctatcgagaatagtagtgaagctgatgcttttgcaaatgaaatggctgacgaattatccagatatttatga

SEQ ID NO: 3629 - DNA, 1446 bp, Saccharomyces cerevisiae
atgtctcactcacttacttccgttttccaaaagattgattctttaaagcctcagttcttcagcagactgactaaggctattcaaatccccgctgtttcttcggatgaatcactaaggtccaaagtcttcgataaggccaagtttatctccgagcaattatcacaatcggggttccatgacattaaaatggtggatctgggcattcaacctccaccaatttctacgccaaatctgtctctacctcctgtgattctgtctaggttcggcagcgacccttcaaaaaagactgtgttggtttacggtcactatgatgtgcaacctgctcaattggaagatggttgggatactgagccattcaagcttgtcattgatgaggctaaaggtatcatgaaaggaaggggtgtcaccgatgacactggtcccttattatcttggattaacgttgtggacgccttcaaagcctccggacaagaattccccgttaacttagttacttgtttcgaaggaatggaggaaagtggttctttgaaattggatgaattgattaaaaaggaagctaatggttactttaaaggtgtagatgccgtttgtatttccgataattactggctaggcactaagaagcctgttttgacttatggtctaagaggttgcaactactatcaaaccatcattgagggtccaagtgcagatttacactctggtatctttggtggtgttgttgctgaaccaatgatcgatttaatgcaagttctcggttcccttgtggattctaagggtaagatcctgattgacggtattgacgaaatggttgctcctctaaccgaaaaggagaaggctctatacaaggatatcgaatttagcgtcgaagaattgaacgctgcaactggctctaagacaagtttgtacgacaagaaggaagacatcttgatgcacagatggaggtatccttcgttgtccattcatggtgtggaaggcgccttttccgctcaaggtgcaaagactgtcattccagctaaggtcttcggtaagttttccattagaaccgtccccgacatggattctgagaaactgacctctttggtccagaagcattgtgatgccaaattcaagtccttgaactctccaaacaagtgcagaacagaattgatccatgatggtgcttattgggtttctgatccattcaacgcccaatttactgctgctaaaaaggccacaaaactggtctatggtgtcgatcctgattttaccagggaaggtggttccattcctatcactttgactttccaagatgccttgaacactagtgtcttattgctgccaatgggtagaggcgatgatggtgctcattcaatcaatgaaaagttagatatttcaaattttgttggtggtatgaagacgatggctgcttacttgcaatattactctgaatcgccagaaaactaa

SEQ ID NO: 3630 - DNA, 1446 bp, Artificial Sequence
  Description of Artificial Sequence: Synthetic polynucleotide
atgtctcactcccttacttccgttttccaaaagattgattctttaaagcctcagttcttcagcagattaactaaggctattcaaatccccgctgtttcttctgatgaatctttgaggtccaaagtcttcgataaggccaagtttatctccgagcaattatctcaaagtgggttccatgacattaaaatggtggatttgggcattcaacctccaccaatttctacgccaaatttatctttgcctcctgtgattttatctaggttcggcagcgacccttccaaaaagactgtgttggtttacggtcactatgatgtgcaacctgctcaattggaagatggttgggatactgagccattcaagcttgtcattgatgaggctaaaggtatcatgaaaggaaggggtgtcaccgatgacactggtcccttattatcttggattaacgttgtggacgccttcaaagcctccggacaagaattccccgttaacttagttacttgtttcgaaggaatggaggaaagtggttctttgaaattggatgaattgattaaaaaggaagctaatggttactttaaaggtgtagatgccgtttgtatttccgataattactggttaggcactaagaagcctgttttgacttatggtttaagaggttgcaactactatcaaaccatcattgagggtccaagtgcagatttacactctggtatctttggtggtgttgttgctgaaccaatgatcgatttaatgcaagttctcggttcccttgtggattctaagggtaagatcttgattgacggtattgacgaaatggttgctcctttgaccgaaaaggagaaggctttgtacaaggatatcgaatttagcgtcgaagaattgaacgctgcaactggctctaagacaagtttgtacgacaagaaggaagacatcttgatgcacagatggaggtatccttctttgtccattcatggtgtggaaggcgccttttccgctcaaggtgcaaagactgtcattccagctaaggtcttcggtaagttttccattagaaccgtccccgacatggattctgagaaattgacctctttggtccagaagcattgtgatgccaaattcaagtccttgaactctccaaacaagtgcagaacagaattgatccatgatggtgcttattgggtttctgatccattcaacgcccaatttactgctgctaaaaaggccacaaaattggtctatggtgtcgatcctgattttaccagggaaggtggttccattcctatcactttgactttccaagatgccttgaacactagtgtcttattgttaccaatgggtagaggcgatgatggtgctcattctatcaatgaaaagttagatatttctaattttgttggtggtatgaagacgatggctgcttacttgcaatattactctgaatctccagaaaactga

SEQ ID NO: 3631 - DNA, 930 bp, Saccharomyces cerevisiae
atggctaaccagaactctgacctttacaagcaaatcactgccggcagtgtagctgctgtgtttcaaacgacaatgacatacccatttgagtacttaaagactggtttacaattgcaaccgaagggtaccgctttcgaaatcattttacctcagattaagtcgtactttgttggctgctctgccctaaacgtggccgcatttggtaagactattttaaggttcgttacgttcgacaagttatgccactccctgaataataacattgataataatgataattttcaaagactgactggttataaccttttgatcgctggtacgttgacaggaatagtagaaagtttgtttattatcccttttgaaaacataaaaaccacccttatccaatcggcgatgatcgatcataaaaaattagagaagaatcaacctgtagttaacgcaaaggcaacctttcacaaggtggcgactaaatctactcctgtggctcgtatcgagaaactacttccagcggtaaaacacatgtatcaaacaagaggccctgctgcgttcgtccagggaacaacagccaccatatttaggcagatagctaacacctctattcaatttactgcatacacagcatttaaacggttgttacaagcaagaaacgacaaggcatcctcagtaataacggggttagccacatcttttacactcgtggcaatgactcagcccattgacgtcgtaaaaacaaggatgatgagtcaaaatgccaaaactgaatataaaaataccttaaattgcatgtatagaatatttgttcaagaaggcatggccacattctggaagggctccatctttaggtttatgaaagtcggtatttcaggaggcttaacgttcactgtttatgaacaggttagtttgttactaggcttctcttccaggtcttga

SEQ ID NO: 3632 - DNA, 930 bp, Artificial Sequence
  Description of Artificial Sequence: Synthetic polynucleotide
atggctaaccagaactctgacctttacaagcaaatcactgccggcagtgtagctgctgtgtttcaaacgacaatgacatacccatttgagtacttaaagactggtttacaattgcaaccgaagggtaccgctttcgaaatcattttacctcagattaagtcctactttgttggctgctctgccttgaacgtggccgcatttggtaagactattttaaggttcgttacgttcgacaagttatgccactccttgaataataacattgataataatgataattttcaaagattaactggttataaccttttgatcgctggtacgttgacaggaatagtagaaagtttgtttattatcccttttgaaaacataaaaaccacccttatccaaagtgcgatgatcgatcataaaaaattagagaagaatcaacctgtagttaacgcaaaggcaacctttcacaaggtggcgactaaatctactcctgtggctcgtatcgagaaattacttccagcggtaaaacacatgtatcaaacaagaggccctgctgcgttcgtccagggaacaacagccaccatatttaggcagatagctaacacctctattcaatttactgcatacacagcatttaaaagattgttacaagcaagaaacgacaaggcatcctctgtaataacggggttagccacatcttttacactcgtggcaatgactcagcccattgacgtcgtaaaaacaaggatgatgagtcaaaatgccaaaactgaatataaaaataccttaaattgcatgtatagaatatttgttcaagaaggcatggccacattctggaagggctccatctttaggtttatgaaagtcggtatttctggaggcttaacgttcactgtttatgaacaggttagtttgttattaggcttctcttccaggtcttga

SEQ ID NO: 3633 - DNA, 1086 bp, Saccharomyces cerevisiae
atgagcactcccaggaaggccgccggtaacaacgagaatacagaagtctcagagatcagaaccccctttcgggagagagcccttgaagaacaacgtctcaaggatgaggtactgatcagaaatacgccaggttatagaaaacttttatctgcttctactaagtctcatgacatcctcaataaagatccgaacgaagtacgaagttttttacaagacttaagccaagtgttagcacgcaaatcacaaggcaacgatacaactactaataaaactcaagcacggaatctaatagatgaattagcgtacgaagagagccaaccagaggagaatgagcttcttcggagcagaagtgagaaactgacagataacaacattggcaatgaaacgcaacctgattatacttccttatcgcaaacagtatttgcaaaattgcaggaaagagacaaaggcttgaaaagtaggaagattgacccgataataatacaagatgttcccacgacaggacacgaggatgaattgacagtgcactctccagataaagctaacagtatctctatggaagttttgcgcacgtcgccaagcattggaatggatcaggtagatgaaccgccagtacgtgatccggtaccaatttccataacgcaacaggaagaaccactatctgaagatttaccaagcgacgataaagaggagacagaagaagcagaaaacgaagattattcgtttgaaaacaccagtgacgaaaatttggatgatataggcaacgatcctatccgtttaaatgtccctgcggtgagacgttcttctataaaaccgctgcaaataatggatctaaaacatcttacaaggcaatttttgaatgagaataggataatattgccgaaacaaacgtggtctactatacaggaggaatctttaaatataatggatttcttgaaacaaaaaatcggcacgttacaaaaacaggaattggtagattcgtttatcgatatgggtattatcaataacgttgatgatatgtttgagctcgcgcacgaattgcttcccttagaacttcaatcaagaattgaaagttatttgttctaa

SEQ ID NO: 3634 - DNA, 1086 bp, Artificial Sequence
  Description of Artificial Sequence: Synthetic polynucleotide
atgagcactcccaggaaggccgccggtaacaacgagaatacagaagtcagtgagatcagaaccccctttagagagagagcccttgaagaacaacgtctcaaggatgaggtattgatcagaaatacgccaggttatagaaaacttttatctgcttctactaagtctcatgacatcctcaataaagatccgaacgaagtaaggagttttttacaagacttaagccaagtgttagcacgcaaatctcaaggcaacgatacaactactaataaaactcaagcaagaaatttgatagatgaattagcgtacgaagagagccaaccagaggagaatgagcttcttagaagcagaagtgagaaattaacagataacaacattggcaatgaaacgcaacctgattatacttccttatctcaaacagtatttgcaaaattgcaggaaagagacaaaggcttgaaaagtaggaagattgacccgataataatacaagatgttcccacgacaggacacgaggatgaattgacagtgcactctccagataaagctaacagtatctctatggaagttttgcgcacgtctccaagcattggaatggatcaggtagatgaaccgccagtacgtgatccggtaccaatttccataacgcaacaggaagaaccattatctgaagatttaccaagcgacgataaagaggagacagaagaagcagaaaacgaagattattcttttgaaaacaccagtgacgaaaatttggatgatataggcaacgatcctatccgtttaaatgtccctgcggtgagacgttcttctataaaaccgttacaaataatggatttgaaacatcttacaaggcaatttttgaatgagaataggataatattgccgaaacaaacgtggtctactatacaggaggaatctttaaatataatggatttcttgaaacaaaaaatcggcacgttacaaaaacaggaattggtagattcttttatcgatatgggtattatcaataacgttgatgatatgtttgagctcgcgcacgaattgcttcccttagaacttcaatctagaattgaaagttatttgttctga

SEQ ID NO: 3635 - DNA, 888 bp, Saccharomyces cerevisiae
atgcctgtttatgaacacttattgcccgttaatggagcatggagacaagacgtcaccaattggctgagcgaggacgttccttcttttgattttggtggatatgttgttggttccgacctaaaggaggccaatttgtactgtaagcaggatggtatgctgtgtggtgtcccctttgcgcaagaagtctttaatcagtgcgaattgcaagttgagtggttgtttaaggaaggctccttcttggagccttcgaagaatgactctggtaagattgttgtagctaaaattactgggcccgctaaaaacattctattagctgaaagaaccgccttgaacatccttagtagaagtagtggaattgccaccgcctcacataagataatcagtttggcgcgttcgactggttacaaggggaccattgcggggacaagaaagactacaccaggtttacgtagattagaaaagtattccatgcttgtaggtggctgcgacacgcacagatacgacctttcctctatggtcatgctcaaagataatcatatttgggctactggttctataacaaacgcagttaagaacgccagggccgtgtgcgggtttgctgtgaagatcgaagtggagtgtttgagtgaagatgaagccacagaggccattgaagctggtgcagacgttatcatgttggataatttcaaaggtgacggtttgaaaatgtgcgcccaaagtcttaagaacaaatggaatggtaaaaagcatttcctcttggaatgtagtggaggcttgaatttggacaacctcgaggagtatttgtgcgatgacattgacatttacagcactagtagcattcatcaaggcacaccagtgattgatttctcattgaaactggctcattga

SEQ ID NO: 3636 - DNA, 888 bp, Artificial Sequence
  Description of Artificial Sequence: Synthetic polynucleotide
atgcctgtttatgaacacttattgcccgttaatggagcatggagacaagacgtcaccaattggttaagcgaggacgttccttcttttgattttggtggatatgttgttggttccgacttgaaggaggccaatttgtactgtaagcaggatggtatgctttgtggtgtcccctttgcgcaagaagtctttaatcagtgcgaattgcaagttgagtggttgtttaaggaaggctccttcttggagccttctaagaatgactctggtaagattgttgtagctaaaattactgggcccgctaaaaacattttattagctgaaagaaccgccttgaacatccttagtagaagtagtggaattgccaccgcctctcataagataatcagtttggcgcgttccactggttacaaggggaccattgcggggacaagaaagactacaccaggtttacgtagattagaaaagtattccatgcttgtaggtggctgcgacacgcacagatacgacctttcctctatggtcatgctcaaagataatcatatttgggctactggttctataacaaacgcagttaagaacgccagggccgtgtgcgggtttgctgtgaagatcgaagtggagtgtttgagtgaagatgaagccacagaggccattgaagctggtgcagacgttatcatgttggataatttcaaaggtgacggtttgaaaatgtgcgcccaaagtcttaagaacaaatggaatggtaaaaagcatttcctcttggaatgtagtggaggcttgaatttggacaacctcgaggagtatttgtgcgatgacattgacatttacagcactagtagcattcatcaaggcacaccagtgattgatttcagtttgaaattggctcattga

SEQ ID NO: 3637 - DNA, 1989 bp, Saccharomyces cerevisiae
atgagttataaggctaaccaaccatctcctggggagatgccgaaaaggtcaccttccatcctggtgacagatgcaagaacatccaagaatagaatgagtgcaccgttcgctggacacgctgctggtagtaggaagaatatggaaaacgcaggagttacgaagtctcaaggagttcgctcttccgctattggcccttctccgctgcagagttttactcatccaagaaggcgatcgtctggcaggtttagcgatatatccatagataatattctttctgataattcagatattccctctgccagaagagaggaaaggctatccagctcttcaagcgataggcctcgccaatatgagcggttaagttcgcgtagaaagatgatcaatcccctgcctccaagaacatcgaagacgtcacaaaagttagtgttgataccggaagacgacaacttgaaccactttcaaactctaccaacgaacgcgctggataggcaaagaccgaaagtgggctctatgaagtctaattccttcgatcggctacctcgatactcaaaagaaaagtccatggcaagaatcaccgcatataatgttgctgatggcttcaatctcaaccaattgtataagtttctgcaggaaactcatgaggtttcaccaagattgtatgatgagtgtctatacgttgcgtatactttgccacttctaccaggtaaaggcggttttagaatcaaatcaaatttatctaagaaaacaatgggtggaaagacattaattgataatttaattgatacaagcgaacagagagatcatcattatgaatattactcaggtgtggaaactgtggaagatgcaaataataattacgaactagaaaccagtggaaataacaataacgctaatcaagacaccacaacagttcccgatcatctaccaaatccagttggtcagcaagactcttttaatcctatggaaccacaattttttgcggaagaaactcccttagagatagagaaacgggaaaggacagaaagaataaacatgctgaagaaggaggaaaacgacagtgatgcaagttgtggcaacgataataataataaaaataatgataagagtaaactttatgctgttgagggaaacgatcagtatgtacagtcctctcgttcaccagcttcgccatcatcaatatctacgccatcgccaccatcttcatcacagaatgattttgatcgtgtatataaaatgcatagggacaacgaccatgaaggcaatgatagacatgcagaaattttcatttttcactatggcgttattgttttttggaactttactgaaattcaagagaaaaatattcttggtgatataacatttgcagattataagaatttaatgatccggccgctggatgaacaagatattgaaactgaacaattccatttcgaatatgacagagataccgagagaccgagaattttcaatgatattgtcacattacgttcaggtgaccacattatcgagctgacactatcacatgcgattgcgcaatcttcgaaattatcaaggtttgaatccagaatttcgccgattttaatatcagtcacaaaactacctaaaagactagcattatatggtacccttgggttaaaaagggaacagcttttgaaaaaatcagggaagctctttaaattgagagtggatgttaacctttcatccaccatattggatacacccgagtttttttggtcgttcgaaccaagtttgcatccactgtacgtggcaatgagggagtatttagaaattgaccaaagagtacaagtattaaatgatcgttgcaaagttttcttggaattctttgatatatgcgttgactctgttgctgaaagaaacatggctcgtgttacatggtggtttattcttgtcattttatttggagttatattttcattaacagagattttcgttcgttatgtaattattcatcgtcatacttctacatag

SEQ ID NO: 3638 - DNA, 1989 bp, Artificial Sequence
  Description of Artificial Sequence: Synthetic polynucleotide
atgagttataaggctaaccaaccatctcctggggagatgccgaaaaggtctccttccatcttagtgacagatgcaagaacatccaagaatagaatgagtgcaccgttcgctggacacgctgctggtagtaggaagaatatggaaaacgcaggagttacgaagtctcaaggagttcgctcttccgctattggcccttctccgttgcagagttttactcatccaagaaggagatcttctggcaggtttagcgatatatccatagataatattctttctgataattctgatattccctctgccagaagagaggaaaggctttccagctcttctagcgataggcctcgccaatatgagagattaagttctcgtagaaagatgatcaatcccttacctccaagaacatccaagacgtctcaaaagttagtgttgataccggaagacgacaacttgaaccactttcaaactttaccaacgaacgcgttggataggcaaagaccgaaagtgggctctatgaagtctaattccttcgatagattacctcgttactctaaagaaaagtccatggcaagaatcaccgcatataatgttgctgatggcttcaatctcaaccaattgtataagtttttgcaggaaactcatgaggtttctccaagattgtatgatgagtgtctttacgttgcgtatactttgccacttttaccaggtaaaggcggttttagaatcaaatctaatttatctaagaaaacaatgggtggaaagacattaattgataatttaattgatacaagcgaacagagagatcatcattatgaatattactctggtgtggaaactgtggaagatgcaaataataattacgaattggaaaccagtggaaataacaataacgctaatcaagacaccacaacagttcccgatcatttaccaaatccagttggtcagcaagactcttttaatcctatggaaccacaattttttgcggaagaaactcccttagagatagagaaaagagaaaggacagaaagaataaacatgttgaagaaggaggaaaacgacagtgatgcaagttgtggcaacgataataataataaaaataatgataagagtaaactttatgctgttgagggaaacgatcagtatgtacagtcctctcgttctccagcttctccatcttctatatctacgccatctccaccatcttcttctcagaatgattttgatcgtgtatataaaatgcatagggacaacgaccatgaaggcaatgatagacatgcagaaattttcatttttcactatggcgttattgttttttggaactttactgaaattcaagagaaaaatattcttggtgatataacatttgcagattataagaatttaatgatcagaccgttagatgaacaagatattgaaactgaacaattccatttcgaatatgacagagataccgagagaccgagaattttcaatgatattgtcacattacgttctggtgaccacattatcgagttgacattatctcatgcgattgcgcaatcttctaaattatctaggtttgaatccagaatttctccgattttaatatctgtcacaaaattacctaaaagattagcattatatggtacccttgggttaaaaagggaacagcttttgaaaaaaagtgggaagctctttaaattgagagtggatgttaacctttcctccaccatattggatacacccgagtttttttggagtttcgaaccaagtttgcatccattgtacgtggcaatgagggagtatttagaaattgaccaaagagtacaagtattaaatgatcgttgcaaagttttcttggaattctttgatatatgcgttgactctgttgctgaaagaaacatggctcgtgttacatggtggtttattcttgtcattttatttggagttatattttctttaacagagattttcgttcgttatgtaattattcatcgtcatacttctacatga

SEQ ID NO: 3639 - DNA, 372 bp, Saccharomyces cerevisiae
atgattgctacacctataagattagcaaagagtgcatatgagccgatgataaaattcgtcggtacaaggcatcccttagtgaagcatgcaactgaggtcgttgttcatccttgcgctaccaacggaatgttacctggcagcaaagagtgtattccagtgagtaaattcatggaaaattataaaccattccgtgtagtgccaataaagcatagcgctaatgctggtctcagctcgtcaaagacctctgtattcgttaacaggccattgcaaaaagatgagcttgcttccattttcgagctacctgctaggtttcggtacaaacctattaacgagcatgaattggagagcataaatagcggtggtgcatggtga

SEQ ID NO: 3640 - DNA, 372 bp, Artificial Sequence
  Description of Artificial Sequence: Synthetic polynucleotide
atgattgctacacctataagattagcaaagagtgcatatgagccgatgataaaattcgtcggtacaaggcatcccttagtgaagcatgcaactgaggtcgttgttcatccttgcgctaccaacggaatgttacctggcagcaaagagtgtattccagtgagtaaattcatggaaaattataaaccattccgtgtagtgccaataaagcatagcgctaatgctggtctcagctcttccaagacctctgtattcgttaacaggccattgcaaaaagatgagcttgcttccattttcgagcttcctgctaggtttagatacaaacctattaacgagcatgaattggagagcataaatagcggtggtgcatggtga

SEQ ID NO: 3641 - DNA, 801 bp, Saccharomyces cerevisiae
atgaatcacgatcctttcagttggggcaggcccgcagactctacttatggtgcttacaatacacaaattgcgaacgcaggcgcctctcccatggttaatacacagcaaccaatagtaacaggtacttccgtcatatcaatgaaatatgataatggggttatcattgcagcagataatttaggttcatatggctctcttctaagattcaatggcgtggagaggcttattcccgtgggtgataacaccgttgtgggcatttcaggtgatatttctgatatgcaacacattgagagattattgaaagatctagtcactgaaaatgcgtatgacaatcctctagcggatgctgaagaagcgctcgaacccagctatatttttgaatatctagctaccgtcatgtaccagcgaagatcaaagatgaatccactttggaatgccatcattgttgctggtgtacagtctaatggtgatcaattcctaagatacgtaaatcttctaggtgttacgtattcgtctcccaccttggccacaggttttggggcacacatggcaaacccactgttaaggaaagttgtagatcgagaatctgatattccaaagaccactgtacaggttgctgaagaggcgatcgtaaatgcaatgagagttctttattatagagatgcccgttcttctagaaacttctcactggccataattgataagaacacaggtttaactttcaagaaaaacttgcaagttgaaaacatgaaatgggacttcgccaaggatattaaaggctacggtactcaaaaaatttag

SEQ ID NO: 3642 - DNA, 801 bp, Artificial Sequence
  Description of Artificial Sequence: Synthetic polynucleotide
atgaatcacgatcctttcagttggggcaggcccgcagactctacttatggtgcttacaatacacaaattgcgaacgcaggcgcctctcccatggttaatacacagcaaccaatagtaacaggtacttccgtcatatccatgaaatatgataatggggttatcattgcagcagataatttaggttcttatggctctcttttgagattcaatggcgtggagaggcttattcccgtgggtgataacaccgttgtgggcatttctggtgatatttctgatatgcaacacattgagagattattgaaagatttggtcactgaaaatgcgtatgacaatcctttagcggatgctgaagaagcgctcgaacccagctatatttttgaatatttggctaccgtcatgtaccagagaagatccaagatgaatccactttggaatgccatcattgttgctggtgtacagtctaatggtgatcaattcttaagatacgtaaatcttttgggtgttacgtattcttctcccaccttggccacaggttttggggcacacatggcaaacccattattaaggaaagttgtagatagagaatctgatattccaaagaccactgtacaggttgctgaagaggcgatcgtaaatgcaatgagagttctttattatagagatgcccgttcttctagaaacttctccttggccataattgataagaacacaggtttaactttcaagaaaaacttgcaagttgaaaacatgaaatgggacttcgccaaggatattaaaggctacggtactcaaaaaatttga

SEQ ID NO: 3643 - DNA, 1641 bp, Saccharomyces cerevisiae
atggtggttttggctgcttctatcactacgcgtcaggggaaacctctcttgtccaggcaattcaaagatctgtccaaggatcgagtcctagagttgctgtccaatttccagaacctagtctccgagatctcgtcagaccacacatttgtcgaggacaagcacgtccgctacgtgtataggccctttgataactactacattattcttatcacaaaccgccagtccaatattatcaaggatttggccacattaaatctgttttcacagacgatcaactcctacttgtctagtttccaagaccaagagatttttcacaatgcctttgagatcttgtcctcgttcgacgaaatcgtgtcaatgggcgggtacaaagagaacttgtcctttactcaagtgcaaacatacttgtctatggagtcgcacgaagaaagaatccaggaaattattgagcgtaataaagagatcgaagctactgaggagaggaagcgccgtgctaaggaaattgctagaaaagaacatgaaaggaaacacgggtttatgtcttcaaatggcgattacgacggcgccaataggttcatgggaagtaaagatcctaacgttacaaacgccatcaacagttactactcccatgcttctcctgcagcacaacagtcttatctacaaagttcccatgccgctgctgctgaggtggccccagtggcctccccaatggctacgtctcagcgtgcgggacattctgctactggcggtatgaaattgggtggtggtgccggaagaagagcgggtgccgcaccacggccaagtgcaatttcttcagcctcttctggcactccacctcctccggaggaggatgtcccagagaacaatggtattttgatctctatcaaggaggtaatcaatgcagaattctccagagatggtaccattcactcttctgaattgaaaggtgttttagaactaagaattaatgaccatgacttatctcactcgaacctaaaactagctgattctattgacgttcgcgataaatccttccagtttaagacccatccaaacatagataaacaatcgttcctatccactaaacttatctccctgcgtgataaatctaaggctttcccagccaacgaccaaagcctgggtgttctaagatggcgtaaagtcgctcccgcagaagatgactcattaattccattaactctaactacatgggtttccccctccgaatcacaacagggctttgatgtcattattgagtatgagagcgtcctggaaacagaactcgctgatgtgatcttcaccattccagttttccctcaggagccagtagacataaatacagagtcttctacatgctctgacgctgaagttgtcaacatggaccaagaaatgggaacctccattaagattagcaaaattgctgccaacgatgcaggtgcgctagcattcactatcgaagctccatatgaagatgcattgtacccaatgaccgtttccttccaagagtccacgagggataaattagctaagagtttcaccggtatggccatacaatctgttgtcatggccaatgaccacgatcaagagctcccttacgacgtcatcacctctttgaaatcagatgaatatcttgtccaatag

SEQ ID NO: 3644 - DNA, 1641 bp, Artificial Sequence
  Description of Artificial Sequence: Synthetic polynucleotide
atggtggttttggctgcttctatcactacgcgtcaggggaaacctctcttgtccaggcaattcaaagatttatccaaggatagggtcttggagttgttatccaatttccagaacttggtctccgagatctcttctgaccacacatttgtcgaggacaagcacgtccgctacgtgtataggccctttgataactactacattattcttatcacaaaccgccagtccaatattatcaaggatttggccacattaaatttattttcccagacgatcaactcctacttgtctagtttccaagaccaagagatttttcacaatgcctttgagatcttgtccagtttcgacgaaatcgtgtccatgggcgggtacaaagagaacttgtcctttactcaagtgcaaacatacttgtctatggagtctcacgaagaaagaatccaggaaattattgagcgtaataaagagatcgaagctactgaggagaggaagcgccgtgctaaggaaattgctagaaaagaacatgaaaggaaacacgggtttatgtcttccaatggcgattacgacggcgccaataggttcatgggaagtaaagatcctaacgttacaaacgccatcaacagttactactcccatgcttctcctgcagcacaacagtcttatttacaaagttcccatgccgctgctgctgaggtggccccagtggcctccccaatggctacgtctcagcgtgcgggacattctgctactggcggtatgaaattgggtggtggtgccggaagaagagcgggtgccgcaccaagaccaagtgcaatttcttctgcctcttctggcactccacctcctccggaggaggatgtcccagagaacaatggtattttgatctctatcaaggaggtaatcaatgcagaattctccagagatggtaccattcactcttctgaattgaaaggtgttttagaattgagaattaatgaccatgacttatctcactccaacttgaaattggctgattctattgacgttcgcgataaatccttccagtttaagacccatccaaacatagataaacaaagtttcttatccactaaacttatctccttacgtgataaatctaaggctttcccagccaacgaccaaagccttggtgttttgagatggcgtaaagtcgctcccgcagaagatgactctttaattccattaactttaactacatgggtttccccctccgaatctcaacagggctttgatgtcattattgagtatgagagcgtcttggaaacagaactcgctgatgtgatcttcaccattccagttttccctcaggagccagtagacataaatacagagtcttctacatgctctgacgctgaagttgtcaacatggaccaagaaatgggaacctccattaagattagcaaaattgctgccaacgatgcaggtgcgttggcattcactatcgaagctccatatgaagatgcattgtacccaatgaccgtttccttccaagagtccacgagggataaattagctaagagtttcaccggtatggccatacaatctgttgtcatggccaatgaccacgatcaagagctcccttacgacgtcatcacctctttgaaatctgatgaatatcttgtccaatga

SEQ ID NO: 3645 - DNA, 825 bp, Saccharomyces cerevisiae
atgccctcgttagccgaattgaccaagtcgttaagcatagcctttgaaaacggcgattatgccgcgtgtgagaagctcttgccccctatcaagatcgaacttatcaagaataaccttttaatacctgacttatccattcaaaatgacatctatttgaatgatttgatgattactaaaaggatcctggaagtaggtgcccttgctagcatccaaactttcaattttgacagcttcgagaattacttcaaccaattgaagccttactactttagcaacaatcataaattatctgaatctgacaagaaatcgaagctgataagtctgtatttgttgaacttattgtctcagaataacacaaccaagtttcactcggaattgcagtatctagataaacatatcaagaacttggaagacgattcacttttgtcttaccctatcaaactagacagatggctcatggaagggtcgtaccagaaagcatgggatcttctgcaatctgggtcgcagaatatatcagaattcgactcttttaccgatatcctaaaatcagctataagagacgaaattgctaaaaataccgagctatcctacgactttctccctctctccaacataaaggctttgctctttttcaacaacgaaaaagaaactgaaaaatttgcactagagagaaactggcctattgtcaactcgaaagtttacttcaataaccaatcaaaggagaaagctgattacgaagatgaaatgatgcatgaagaagaccaaaagacaaacattatcgaaaaagcaatggattatgccataagtattgaaaatattgtgtaa

SEQ ID NO: 3646 - DNA, 825 bp, Artificial Sequence
  Description of Artificial Sequence: Synthetic polynucleotide
atgccctctttagccgaattgaccaagtctttaagcatagcctttgaaaacggcgattatgccgcgtgtgagaagctcttgccccctatcaagatcgaacttatcaagaataaccttttaatacctgacttatccattcaaaatgacatctatttgaatgatttgatgattactaaaaggatcttggaagtaggtgcccttgctagcatccaaactttcaattttgacagcttcgagaattacttcaaccaattgaagccttactactttagcaacaatcataaattatctgaatctgacaagaaatccaagttaataagtctttatttgttgaacttattgtctcagaataacacaaccaagtttcacagtgaattgcagtatttggataaacatatcaagaacttggaagacgattctcttttgtcttaccctatcaaattagacagatggctcatggaagggtcttaccagaaagcatgggatcttttacaatctgggtctcagaatatatctgaattcgactcttttaccgatatcttgaaatctgctataagagacgaaattgctaaaaataccgagctttcctacgactttctccctctctccaacataaaggctttgctctttttcaacaacgaaaaagaaactgaaaaatttgcattagagagaaactggcctattgtcaactccaaagtttacttcaataaccaatccaaggagaaagctgattacgaagatgaaatgatgcatgaagaagaccaaaagacaaacattatcgaaaaagcaatggattatgccataagtattgaaaatattgtgtga

SEQ ID NO: 3647 - DNA, 1458 bp, Saccharomyces cerevisiae
atggttcatttaggtccaaagaaaccacaggctagaaagggttccatggctgatgtgcccaaggaattgatggatgaaattcatcagttggaagatatgtttacagttgacagcgagaccttgagaaaggttgttaagcactttatcgacgaattgaataaaggtttgacaaagaagggaggtaacattccaatgattcccggttgggtcatggaattcccaacaggtaaagaatctggtaactatttggccattgatttgggtggtactaacttaagagtcgtgttggtcaagttgagcggtaaccatacctttgacaccactcaatccaagtataaactaccacatgacatgagaaccactaagcaccaagaggagttatggtcctttattgccgactctttgaaggactttatggtcgagcaagaattgctaaacaccaaggacaccttaccattaggtttcaccttctcgtacccagcttcccaaaacaagattaacgaaggtattttgcaaagatggaccaagggtttcgatattccaaatgtcgaaggccacgatgtcgtcccattgctacaaaacgaaatttccaagagagagttgcctattgaaattgtagcattgattaatgatactgttggtactttaattgcctcatactacactgacccagagactaagatgggtgtgattttcggtactggtgtcaacggtgctttctatgatgttgtttccgatatcgaaaagttggagggcaaattagcagacgatattccaagtaactctccaatggctatcaattgtgaatatggttccttcgataatgaacatttggtcttgccaagaaccaagtacgatgttgctgtcgacgaacaatctccaagacctggtcaacaagcttttgaaaagatgacctccggttactacttgggtgaattgttgcgtctagtgttacttgaattaaacgagaagggcttgatgttgaaggatcaagatctaagcaagttgaaacaaccatacatcatggatacctcctacccagcaagaatcgaggatgatccatttgaaaacttggaagatactgatgacatcttccaaaaggactttggtgtcaagaccactctgccagaacgtaagttgattagaagactttgtgaattgatcggtaccagagctgctagattagctgtttgtggtattgccgctatttgccaaaagagaggttacaagactggtcacattgccgctgacggttctgtctataacaaatacccaggtttcaaggaagccgccgctaagggtttgagagatatctatggatggactggtgacgcaagcaaagatccaattacgattgttccagctgaggatggttcaggtgcaggtgctgctgttattgctgcattgtccgaaaaaagaattgccgaaggtaagtctcttggtatcattggcgcttaa

SEQ ID NO: 3648 - DNA, 1458 bp, Artificial Sequence
  Description of Artificial Sequence: Synthetic polynucleotide
atggttcatttaggtccaaagaaaccacaggctagaaagggttccatggctgatgtgcccaaggaattgatggatgaaattcatcagttggaagatatgtttacagttgacagcgagaccttgagaaaggttgttaagcactttatcgacgaattgaataaaggtttgacaaagaagggaggtaacattccaatgattcccggttgggtcatggaattcccaacaggtaaagaatctggtaactatttggccattgatttgggtggtactaacttaagagtcgtgttggtcaagttgagcggtaaccatacctttgacaccactcaatccaagtataaattaccacatgacatgagaaccactaagcaccaagaggagttatggtcctttattgccgactctttgaaggactttatggtcgagcaagaattgttgaacaccaaggacaccttaccattaggtttcaccttctcttacccagcttcccaaaacaagattaacgaaggtattttgcaaagatggaccaagggtttcgatattccaaatgtcgaaggccacgatgtcgtcccattgttgcaaaacgaaatttccaagagagagttgcctattgaaattgtagcattgattaatgatactgttggtactttaattgcctcttactacactgacccagagactaagatgggtgtgattttcggtactggtgtcaacggtgctttctatgatgttgtttccgatatcgaaaagttggagggcaaattagcagacgatattccaagtaactctccaatggctatcaattgtgaatatggttccttcgataatgaacatttggtcttgccaagaaccaagtacgatgttgctgtcgacgaacaatctccaagacctggtcaacaagcttttgaaaagatgacctccggttactacttgggtgaattgttgcgtttagtgttacttgaattaaacgagaagggcttgatgttgaaggatcaagatttgagcaagttgaaacaaccatacatcatggatacctcctacccagcaagaatcgaggatgatccatttgaaaacttggaagatactgatgacatcttccaaaaggactttggtgtcaagaccactttaccagaacgtaagttgattagaagactttgtgaattgatcggtaccagagctgctagattagctgtttgtggtattgccgctatttgccaaaagagaggttacaagactggtcacattgccgctgacggttctgtctataacaaatacccaggtttcaaggaagccgccgctaagggtttgagagatatctatggatggactggtgacgcaagcaaagatccaattacgattgttccagctgaggatggttctggtgcaggtgctgctgttattgctgcattgtccgaaaaaagaattgccgaaggtaagtctcttggtatcattggcgcttga

SEQ ID NO: 3649 - DNA, 579 bp, Saccharomyces cerevisiae
atgctctttgcatattcaggttgccttgcccctcaatgcatacctgatattagtagtttcaaggcgcttccattccgtgacactgagagtcggtttactaccgactcttccgtaatctcgagccgtttttcaagtagctttacgagtagttcgagcaaaattattattatcacttctattttttcctcaaaaatggataacgaacatgtaggtgcctctctaattgtttctttgagcatggctagtctaatcttaactaatgtgttcagttttagctctactagctattcctcgcaaccatctgattatattgcatgctcccccagtggtattgatgaccaacctgtggctgaaccttctggatacacacctgttggctcctcatctccacattctggttgtattacttctggtttggatgcaataggttaccaatcttcacttaatgaaggccaatcgacgaatgcatcttccagattcgtcacaaaagtttacagtcattctgccttaactcatataattttacatttactcagtatccttcagaagttttacctacaagtaagcaccatttcttaa

SEQ ID NO: 3650 - DNA, 579 bp, Artificial Sequence
  Description of Artificial Sequence: Synthetic polynucleotide
atgctctttgcatattctggttgccttgcccctcaatgcatacctgatattagtagtttcaaggcgcttccattccgtgacactgagagtagatttactaccgactcttccgtaatcagtagccgtttttctagtagctttacgagtagtagtagcaaaattattattatcacttctattttttcctctaaaatggataacgaacatgtaggtgcctctttgattgtttctttgagcatggctagtttaatcttaactaatgtgttcagttttagctctactagctattcctctcaaccatctgattatattgcatgctcccccagtggtattgatgaccaacctgtggctgaaccttctggatacacacctgttggctcctcttctccacattctggttgtattacttctggtttggatgcaataggttaccaatcttctcttaatgaaggccaatctacgaatgcatcttccagattcgtcacaaaagtttacagtcattctgccttaactcatataattttacatttactcagtatccttcagaagttttacttacaagtaagcaccatttcttga

SEQ ID NO: 3651 - DNA, 1023 bp, Saccharomyces cerevisiae
atgattgatcgtaccgagttatcgaagtttggtattactacgcaactgtctgttattggacgtaatccagatgaacaaagtggctttgttaatccacctttgtataaggggtcaaccatcattcttaaaaaacttagtgatttagaacaaaggaaaggaagattttacgggacagcaggttctccaactattgacaatttagaaaatgcctggacgcatttaaccggcggtgctgggacagtgctatcagcttctgggcttggttctatctctttggcgctattggccctttcgaaagctggtgatcatatcttgatgactgatagtgtctacgtgccaacacgtatgctatgtgatggtttattggccaagttcggtgttgaaacggattattatgacccatcaatagggaaggatatagaaaaactagttaagccaaatacaaccgtcattttcctcgaaagcccgggttctgggaccatggaagtacaggatattccagctttggtctctgttgccaaaaagcatgggataaagacaattctagacaacacatgggcaacgccactcttttttgatgctcatgcgcatggtatcgatatttcggtagaagctgggacaaaatatttgggtggtcattcagatcttcttattggtctggcctccgcaaatgaagaatgttggccgctattacggtcaacttatgatgcaatggcaatgttaccaggtgccgaggactgtcaattagcattgcgaggaatgcgtacattgcacttaagattgaaagaggtagaaagaaaagccctggatttggctgcttggctcggaaatcgagatgaggttgaaaaagtgcttcaccccgcctttgaagattgtcccggacatgaatactgggttcgtgactacaaaggttcttcaggcttattttccattgtccttaaaaatgggttcacaagagctggtctggagaaaatggtagaagggatgaaagttttgcaattgggattttcatggggtggctag

SEQ ID NO: 3652 - DNA, 1023 bp, Artificial Sequence
  Description of Artificial Sequence: Synthetic polynucleotide
atgattgatcgtaccgagttatccaagtttggtattactacgcaattatctgttattggacgtaatccagatgaacaaagtggctttgttaatccacctttgtataaggggtccaccatcattcttaaaaaacttagtgatttagaacaaaggaaaggaagattttacgggacagcaggttctccaactattgacaatttagaaaatgcctggacgcatttaaccggcggtgctgggacagtgctttctgcttctgggcttggttctatctctttggcgttattggccctttctaaagctggtgatcatatcttgatgactgatagtgtctacgtgccaacacgtatgctttgtgatggtttattggccaagttcggtgttgaaacggattattatgacccaagtatagggaaggatatagaaaaattggttaagccaaatacaaccgtcattttcctcgaaagcccgggttctgggaccatggaagtacaggatattccagctttggtctctgttgccaaaaagcatgggataaagacaattttggacaacacatgggcaacgccactcttttttgatgctcatgcgcatggtatcgatattagtgtagaagctgggacaaaatatttgggtggtcattctgatcttcttattggtttagcctccgcaaatgaagaatgttggccgttgttaagatctacttatgatgcaatggcaatgttaccaggtgccgaggactgtcaattagcattgagaggaatgcgtacattgcacttaagattgaaagaggtagaaagaaaagccttggatttggctgcttggctcggaaatagagatgaggttgaaaaagtgcttcaccccgcctttgaagattgtcccggacatgaatactgggttcgtgactacaaaggttcttctggcttattttccattgtccttaaaaatgggttcacaagagctggtttagagaaaatggtagaagggatgaaagttttgcaattgggattttcttggggtggctga

SEQ ID NO: 3653 - DNA, 456 bp, Saccharomyces cerevisiae
atgatatttggacctactagtgtctatagtaagtgctcggccaagtcaagcggtatcattaaagacaccgccaagcttccaatatcacgagtaaggatcaaagttatgttagagataactgtgagttttttattttttgatcgatttccaagatcattcctcaatcataatctatatgattcaatatgtcctttctttgcgtggcaatatacctcatattatctttctatttacaggcagtcctttctatttcatttcttacaaaaggattttagcaacgacttcgtctcagaagagttaatatatgcactagttgcactaggcgcaaaaaattcctttgacaatagcctttcaaagcatacatatgaatattacaaccactcaaagagaaatttactggaagattcgacaaataaaaattcagctttttcaagtgcaagcgtaacaaagccataa

SEQ ID NO: 3654 - DNA, 456 bp, Artificial Sequence
  Description of Artificial Sequence: Synthetic polynucleotide
atgatatttggacctactagtgtctatagtaagtgctctgccaagagcagcggtatcattaaagacaccgccaagcttccaatatctagagtaaggatcaaagttatgttagagataactgtgagttttttattttttgatagatttccaagatctttcctcaatcataatttatatgattctatatgtcctttctttgcgtggcaatatacctcttattatctttctatttacaggcagtcctttttgtttcatttcttacaaaaggattttagcaacgacttcgtcagtgaagagttaatatatgcattggttgcattgggcgcaaaaaattcctttgacaatagcctttccaagcatacatatgaatattacaaccactccaagagaaatttattggaagattctacaaataaaaattctgctttttctagtgcaagcgtaacaaagccatga

SEQ ID NO: 3655 - DNA, 1143 bp, Saccharomyces cerevisiae
atggatggagccaaatttgaaaatactgtagcttttttaccatctgaaatatttgattgctacaattccacgctacccaagaatgtattccgaagttttgttacctggtcctgctatgagaaattcaattccttagaattccgcacttggctattaatgtggttaccactcattattgcgtggaaaatacgtggtaaaagacactatctcgttatcgttactgctcttatgtttgaagtgctgtatttcttatggacatattcgtacatattccgagaacgcaccttaggaaagcaagtttctcaatttgctaaagagatcattacaaatactccgggtatagacactgaagactgggaacgtgttgcagtaaatttcaattcttatttatatgaaaataaactttggaatactgagtactttttttttgatggttccagctgccaagaagcgttcagaaagatgcttcttgagccattttccttgaaaaaaaatgactttgctaatgccaaggtacctgacggatctgtttgttacactgaaaaagctttgcaggtttattttacacagatagagagaaaatggcactggattaattctgaaggatttttacacaataaaaccacacagagtgttcaattttcgaaacatggttacggttccaaacttctctgggctttcaaggaagtgacaataatgaattcacgctttgcgttcttcagtattgcttacttaaacggtctccttactataccaagactaagaaattcactgcatatcctctatgtatgtgcagttctttcatctatgataattgaatatttaatagggatcgacaaattcaggttcaaatcaatgaatctgatacataaactacagttcttgtcatatattacatgtggacacgagaagtctgatgcaactaattggtctcaaattgcgaagaggacgaatacttacatgtttgagcagaaaatttggaattcgccaatactgttctcagatggtattgattgtgaaaagttttttaaatggtatttcagtacccctgtatcttcgcaagcgtctttgtcagttggttccactgattttgaactctggccatatataaaagaagcacaatcagcttgcaatgatgtgtaa

SEQ ID NO: 3656 - DNA, 1143 bp, Artificial Sequence
  Description of Artificial Sequence: Synthetic polynucleotide
atggatggagccaaatttgaaaatactgtagcttttttaccatctgaaatatttgattgctacaattccacgttacccaagaatgtattcagaagttttgttacctggtcctgctatgagaaattcaattccttagaattccgcacttggttgttaatgtggttaccactcattattgcgtggaaaatacgtggtaaaagacactatctcgttatcgttactgctcttatgtttgaagtgctttatttcttatggacatattcttacatattcagagaacgcaccttaggaaagcaagtttctcaatttgctaaagagatcattacaaatactccgggtatagacactgaagactgggaacgtgttgcagtaaatttcaattcttatttatatgaaaataaactttggaatactgagtactttttttttgatggttccagctgccaagaagcgttcagaaagatgcttcttgagccattttccttgaaaaaaaatgactttgctaatgccaaggtacctgacggatctgtttgttacactgaaaaagctttgcaggtttattttacacagatagagagaaaatggcactggattaattctgaaggatttttacacaataaaaccacacagagtgttcaattttccaaacatggttacggttccaaacttctctgggctttcaaggaagtgacaataatgaatagccgctttgcgttcttcagtattgcttacttaaacggtctccttactataccaagattgagaaattctttgcatatcctctatgtatgtgcagttctttcttctatgataattgaatatttaatagggatcgacaaattcaggttcaaatctatgaatttgatacataaattacagttcttgagttatattacatgtggacacgagaagtctgatgcaactaattggtctcaaattgcgaagaggacgaatacttacatgtttgagcagaaaatttggaattctccaatattattcagtgatggtattgattgtgaaaagttttttaaatggtatttcagtacccctgtatcttctcaagcgtctttgagtgttggttccactgattttgaactctggccatatataaaagaagcacaatctgcttgcaatgatgtgtga

SEQ ID NO: 3657 - DNA, 528 bp, Saccharomyces cerevisiae
atgcgtaataatgtgactgaattggtcaacagtataataggtgttcaaacacctggatcgctaccagatactctttctggggcacattcattgcagagacgcataagctattttgacgtcaattggatatcatggaattgggacaatgtaaatgttgatcttaataaagaggtaaaaaaaagtaggcccctccttggggaggaggacgatcaatgcatgttcggttggttcgcaaataatccagggtggaaatattactggtcggtaactgataatcctgatccaggatataaagagaattactctgacattggagatgaaaatgctgtccacggtgaattatattttaacacatatggggggttgatggcttctgtaatgacaacaaagatggtgctcaatgcgaagagacagcttgtggttattgatacaattgtggtaaaggccatctgcgattatgttatgaaatattggaaaaaaaaggttaaccttactacgatatcattatatttgatgttaaagttataa

SEQ ID NO: 3658 - DNA, 528 bp, Artificial Sequence
  Description of Artificial Sequence: Synthetic polynucleotide
atgcgtaataatgtgactgaattggtcaacagtataataggtgttcaaacacctggatctttaccagatactctttctggggcacattctttgcagagacgcataagctattttgacgtcaattggatatcttggaattgggacaatgtaaatgttgatcttaataaagaggtaaaaaaaagtaggcccctccttggggaggaggacgatcaatgcatgttcggttggttcgcaaataatccagggtggaaatattactggtctgtaactgataatcctgatccaggatataaagagaattactctgacattggagatgaaaatgctgtccacggtgaattatattttaacacatatggggggttgatggcttctgtaatgacaacaaagatggtgctcaatgcgaagagacagcttgtggttattgatacaattgtggtaaaggccatctgcgattatgttatgaaatattggaaaaaaaaggttaaccttactacgatatctttatatttgatgttaaagttatga

SEQ ID NO: 3659 - DNA, 363 bp, Saccharomyces cerevisiae
atggtcaaattaacttcaatcgccgctggtgtcgctgccatcgctgctactgcttccgcaaccaccactctagctcagtctgacgaaagagtcaatttggttgaattaggtgtctacgtctctgatatcagagctcacttggctcaatactacatgttccaagccgcccacccaacggaaacctacccagttgaagttgctgaagccgttttcaactacggtgacttcaccaccatgttgactggtattgccccagaccaagtgaccagaatgatcaccggtgttccatggtactccagcagattaaagccagccatctccagtgctctatccaaggacggtatctacactatcgcaaactag

SEQ ID NO: 3660 - DNA, 363 bp, Artificial Sequence
  Description of Artificial Sequence: Synthetic polynucleotide
atggtcaaattaacttctatcgccgctggtgtcgctgccatcgctgctactgcttccgcaaccaccactttggctcagtctgacgaaagagtcaatttggttgaattaggtgtctacgtctctgatatcagagctcacttggctcaatactacatgttccaagccgcccacccaacggaaacctacccagttgaagttgctgaagccgttttcaactacggtgacttcaccaccatgttgactggtattgccccagaccaagtgaccagaatgatcaccggtgttccatggtactccagcagattaaagccagccatctccagtgctttgtccaaggacggtatctacactatcgcaaactga

SEQ ID NO: 3661 - DNA, 231 bp, Saccharomyces cerevisiae
atggagatgctcttgtttctgaacgaatcatacatctttcatagacttcgtatgtggagtattgtattatggcactcatgtgtattcgtatgcgcagaatgtgggaatgccaattatagggtgccgaggtgccttataaaacccttttctgtgcctgtgacatttcctttttcggtcaaaaagaatatccgaattttagatttggaccctcgtacagaagcttattgttaa

SEQ ID NO: 3662 - DNA, 231 bp, Artificial Sequence
  Description of Artificial Sequence: Synthetic polynucleotide
atggagatgctcttgtttttgaacgaatcttacatctttcatagacttcgtatgtggagtattgtattatggcacagctgtgtattcgtatgcgcagaatgtgggaatgccaattatagggtgccgaggtgccttataaaacccttttctgtgcctgtgacatttcctttttctgtcaaaaagaatatcagaattttagatttggaccctcgtacagaagcttattgttga

SEQ ID NO: 3663 - DNA, 498 bp, Saccharomyces cerevisiae
atgcaattgttttccatcctctctttgttgtcatcattgatgtgttcattgaccgttttagggtcttccgcaagttcctatgttaagtttcctgttcaaaagtttgctgatattataaatataggcacacaggatgtttctaccgtcttcaaaagaaatgaggttcttaacaccacagtgataaatggaataggagtgtatgttgtcaagatggaaatcggaacgcctccacaaacggtgtacctacagttagatactggctcttcagatatgattgtgaataatgctgacattgcctattgcaaatcgatgtctgacggatctgactacgcttcaactgataattacgaactcacggcaacattcactgggcctcgttctactaccacctcaccagagcttataacactgtccgctcttataggggtaaattcaatgcaagaaactcatctacttttaagaataacgcgactttcttcaatgacatatacgtattag

SEQ ID NO: 3664 - DNA, 498 bp, Artificial Sequence
  Description of Artificial Sequence: Synthetic polynucleotide
atgcaattgttttccatcctctctttgttgagttctttgatgtgttctttgaccgttttagggtcttccgcaagttcctatgttaagtttcctgttcaaaagtttgctgatattataaatataggcacacaggatgtttctaccgtcttcaaaagaaatgaggttcttaacaccacagtgataaatggaataggagtgtatgttgtcaagatggaaatcggaacgcctccacaaacggtgtacttacagttagatactggctcttctgatatgattgtgaataatgctgacattgcctattgcaaatctatgtctgacggatctgactacgcttccactgataattacgaactcacggcaacattcactgggcctcgttctactaccacctctccagagcttataacattatccgctcttataggggtaaattctatgcaagaaactcatttgcttttaagaataacgagactttcttctatgacatatacgtattga

SEQ ID NO: 3665 - DNA, 234 bp, Saccharomyces cerevisiae
atggcatttgaaagacaaggaaagatcgaaaagaagatatcgtattccttatttttgaatggacctaatgtacactttgggagcatcttattcggtgcagtcgataaaagtaagtacgcagaagagctctgcacacatcctatgcgtcaagcttataatacccttgattcaaactcaagaataattatcacagtacagagtgttgcaattttggacggcaaacttgtatggtaa

SEQ ID NO: 3666 - DNA, 234 bp, Artificial Sequence
  Description of Artificial Sequence: Synthetic polynucleotide
atggcatttgaaagacaaggaaagatcgaaaagaagatatcttattccttatttttgaatggacctaatgtacactttgggagcatcttattcggtgcagtcgataaaagtaagtacgcagaagagctctgcacacatcctatgcgtcaagcttataatacccttgattccaactctagaataattatcacagtacagagtgttgcaattttggacggcaaacttgtatggtga

SEQ ID NO: 3667 - DNA, 621 bp, Saccharomyces cerevisiae
atgagtttcctaagcatttttacttttttcagcgtccttatttctgttgcaacaaccgtcagatttgatttgactaacgttacctgtaagggcctacatggacctcattgtggtacctacgttatggaagtcgttggtcaaaacggtacatttttgggtcaatctacgtttgttggcgccgacgtcttgactgaaagcgctggtgatgcttgggcaagatatttgggccaggaaacaagattcctcccaaagttgactactattgctagtaacgagacaaagaacttttctccactcatcttcaccaccaatatcaacacttgtaaccctcaatccattggtgacgctatggttccttttgctaacactgttactggtgaaattgaatataactcttgggcagacactgctgataacgcttccttcataaccggtttagctaaccaattgttcaactctaccgattatggcgttcaagttgcttcctgttacccaaattttgcttctgttatcttaagcaccccagctgtgaatattttcggtaaggatgacacattaccagattattgtaccgccattcagctaaaggccgtttgtccaccagaagctggttttgattaa

SEQ ID NO: 3668 - DNA, 621 bp, Artificial Sequence
  Description of Artificial Sequence: Synthetic polynucleotide
atgagtttcttgagcatttttacttttttcagcgtccttatttctgttgcaacaaccgtcagatttgatttgactaacgttacctgtaagggcttgcatggacctcattgtggtacctacgttatggaagtcgttggtcaaaacggtacatttttgggtcaatctacgtttgttggcgccgacgtcttgactgaaagcgctggtgatgcttgggcaagatatttgggccaggaaacaagattcctcccaaagttgactactattgctagtaacgagacaaagaacttttctccactcatcttcaccaccaatatcaacacttgtaaccctcaatccattggtgacgctatggttccttttgctaacactgttactggtgaaattgaatataactcttgggcagacactgctgataacgcttccttcataaccggtttagctaaccaattgttcaactctaccgattatggcgttcaagttgcttcctgttacccaaattttgcttctgttatcttaagcaccccagctgtgaatattttcggtaaggatgacacattaccagattattgtaccgccattcagttgaaggccgtttgtccaccagaagctggttttgattga

SEQ ID NO: 3669 - DNA, 1677 bp, Saccharomyces cerevisiae
atgagaagaaaaaatcgactgtttatattagttgtactactgggaattgtgttagtagtatattactctcagttgaattcgttagatttggtagaaccagttcaaagtagcagcagtggcaatggtggctgctggagttactatgaaggtcttacgcctgggtggttgaatgacttctacgacgtaaatcaaataaccccgaatcctgcaaaagatgtgattgaactggttacgaggattaagattttttttaattgcttgcagcaggttgatgggcataatattcagcgtttgagggatattgaaaagaagctctttccgtatattaactttgaaaaattagaaactgatgaaagtgccttctggcacacaactacgagatggaatggcgaggtttaccatgcgtctatgttggaatttgaccccaaaaaccatcaattccttcgttctaagcccatcaatttcgatacagggctatctttttgggagaattggttgcacactgtgactcaaagtggttcgaaaggcatagttattagtgcttctgacgtgcagttgaatgaaaccatacgcttattgaaagtgttgaggttcatcaaaaatgattatcctatacagattgttcataatgcagatctgagtcaagattccatgaaatctattatcaaatatgcgagaagtctagacaccgctgaatatcctgctcaagaattatggtttttaaatgtacatagtctgctaaacccgaaatattcgaaaaaatttaccacctattccaacaagtggttagcattgaccttctcatcctttgaaattcctattctaatggactcagatacagtgccctttgtttcaatagaaaaattttatgaattagaggaatttcaaaagactggagttctattctttaaagatcgggtaatatcagatgatctatttgaatcctctgaattaaaaattctaagggaaattgtctatgggtgtattgggcttgatttagaggatgaatccaagatacatgagcaagtagaggatccagtggttgcacaggttctggaaaacatgtttataaagaaatataaacatcatttggaaagcggcctggtaatattgcataaaggaaagcatctcttcagtatgcttacttcaatagctttacaattttctccaattgcagaatattttcatggtgataaggactttttttggctgggcgaattactttcgaacaatcgctttacgttccatcctgtggatgcatcaaacattggtcagttgggcaatgtagtttcaaaagagagtaccggtgagttttaccagatttgttctgtgcaactatctcatacagacagggacgggtccttgctatggctaaacgggggccttaatatttgtaaaaaaacttcatgggaatacgattatgagcatagacagagactaaatgatatgttccaaaatgcagatgaattacgtgaatattatgcatcaccagtaaaacttgaagggattataataccagatactagtatatcaggatggattaactcaggagagtgttttttgttcaattattgcacattattcaaggaaggtgagtttggaaagttgatcaaatttaaagaagacgaaaagctccggctttcacaaatagtcgacatatggaataaagatatttga

SEQ ID NO: 3670 - DNA, 1677 bp, Artificial Sequence
  Description of Artificial Sequence: Synthetic polynucleotide
atgagaagaaaaaatagattatttatattagttgtattgttgggaattgtgttagtagtatattactctcagttgaattctttagatttggtagaaccagttcaaagtagcagcagtggcaatggtggctgctggagttactatgaaggtcttacgcctgggtggttgaatgacttctacgacgtaaatcaaataaccccgaatcctgcaaaagatgtgattgaattggttacgaggattaagattttttttaattgcttgcagcaggttgatgggcataatattcagcgtttgagggatattgaaaagaagctctttccgtatattaactttgaaaaattagaaactgatgaaagtgccttctggcacacaactacgagatggaatggcgaggtttaccatgcgtctatgttggaatttgaccccaaaaaccatcaattccttcgttctaagcccatcaatttcgatacagggttatctttttgggagaattggttgcacactgtgactcaaagtggttccaaaggcatagttattagtgcttctgacgtgcagttgaatgaaaccatacgcttattgaaagtgttgaggttcatcaaaaatgattatcctatacagattgttcataatgcagatttgagtcaagattccatgaaatctattatcaaatatgcgagaagtttggacaccgctgaatatcctgctcaagaattatggtttttaaatgtacatagtttattaaacccgaaatattctaaaaaatttaccacctattccaacaagtggttagcattgaccttctcttcctttgaaattcctattttgatggacagtgatacagtgccctttgtttctatagaaaaattttatgaattagaggaatttcaaaagactggagttttgttctttaaagatagagtaatatctgatgatttatttgaatcctctgaattaaaaattttaagggaaattgtctatgggtgtattgggcttgatttagaggatgaatccaagatacatgagcaagtagaggatccagtggttgcacaggttttggaaaacatgtttataaagaaatataaacatcatttggaaagcggcttagtaatattgcataaaggaaagcatctcttcagtatgcttacttccatagctttacaattttctccaattgcagaatattttcatggtgataaggactttttttggttaggcgaattactttccaacaatcgctttacgttccatcctgtggatgcatctaacattggtcagttgggcaatgtagtttccaaagagagtaccggtgagttttaccagatttgttctgtgcaattatctcatacagacagggacgggtccttgttatggttgaacgggggccttaatatttgtaaaaaaacttcttgggaatacgattatgagcatagacagagattgaatgatatgttccaaaatgcagatgaattacgtgaatattatgcatctccagtaaaacttgaagggattataataccagatactagtatatctggatggattaactctggagagtgttttttgttcaattattgcacattattcaaggaaggtgagtttggaaagttgatcaaatttaaagaagacgaaaagctcagactttctcaaatagtcgacatatggaataaagatatttga

SEQ ID NO: 3671 - DNA, 1149 bp, Saccharomyces cerevisiae
atgtcttccgttactgggttttacattccaccaatctctttctttggtgaaggtgctttagaagaaaccgctgattacatcaaaaacaaggattacaaaaaggctttgatcgttactgatcctggtattgcagctattggtctctccggtagagtccaaaagatgttggaagaacgtgacttaaacgttgctatctatgacaaaactcaaccaaacccaaatattgccaatgtcacagctggtttgaaggttttgaaggaacaaaactctgaaattgttgtttccattggtggtggttctgctcacgacaatgctaaggccattgctttattggctactaacggtggggaaatcggagactatgaaggtgtcaatcaatctaagaaggctgctttaccactatttgccatcaacactactgctggtactgcttccgaaatgaccagattcactattatctctaatgaagaaaagaaaatcaagatggctatcattgacaacaacgtcactccagctgttgctgtcaacgatccatctaccatgtttggtttgccacctgctttgactgctgctactggtctagatgctttgactcactgtatcgaagcttatgtttccaccgcctctaacccaatcaccgatgcctgtgctttgaagggtattgatttgatcaatgaaagcttagtcgctgcatacaaagacggtaaagacaagaaggccagaactgacatgtgttacgctgaatacttggcaggtatggctttcaacaatgcttctctaggttatgttcatgcccttgctcatcaacttggtggtttctaccacttgcctcatggtgtttgtaacgctgtcttgttgcctcatgttcaagaggccaacatgcaatgtccaaaggccaagaagagattaggtgaaattgctttgcatttcggtgcttctcaagaagatccagaagaaaccatcaaggctttgcacgttttaaacagaaccatgaacattccaagaaacttgaaagaattaggtgttaaaaccgaagattttgaaattttggctgaacacgccatgcatgatgcctgccatttgactaacccagttcaattcaccaaagaacaagtggttgccattatcaagaaagcctatgaatattaa

SEQ ID NO: 3672 - DNA, 1149 bp, Artificial Sequence
  Description of Artificial Sequence: Synthetic polynucleotide
atgtcttccgttactgggttttacattccaccaatctctttctttggtgaaggtgctttagaagaaaccgctgattacatcaaaaacaaggattacaaaaaggctttgatcgttactgatcctggtattgcagctattggtctctccggtagagtccaaaagatgttggaagaacgtgacttaaacgttgctatctatgacaaaactcaaccaaacccaaatattgccaatgtcacagctggtttgaaggttttgaaggaacaaaactctgaaattgttgtttccattggtggtggttctgctcacgacaatgctaaggccattgctttattggctactaacggtggggaaatcggagactatgaaggtgtcaatcaatctaagaaggctgctttaccattatttgccatcaacactactgctggtactgcttccgaaatgaccagattcactattatctctaatgaagaaaagaaaatcaagatggctatcattgacaacaacgtcactccagctgttgctgtcaacgatccatctaccatgtttggtttgccacctgctttgactgctgctactggtttggatgctttgactcactgtatcgaagcttatgtttccaccgcctctaacccaatcaccgatgcctgtgctttgaagggtattgatttgatcaatgaaagcttagtcgctgcatacaaagacggtaaagacaagaaggccagaactgacatgtgttacgctgaatacttggcaggtatggctttcaacaatgcttctttgggttatgttcatgcccttgctcatcaacttggtggtttctaccacttgcctcatggtgtttgtaacgctgtcttgttgcctcatgttcaagaggccaacatgcaatgtccaaaggccaagaagagattaggtgaaattgctttgcatttcggtgcttctcaagaagatccagaagaaaccatcaaggctttgcacgttttaaacagaaccatgaacattccaagaaacttgaaagaattaggtgttaaaaccgaagattttgaaattttggctgaacacgccatgcatgatgcctgccatttgactaacccagttcaattcaccaaagaacaagtggttgccattatcaagaaagcctatgaatattga

SEQ ID NO: 3673 - DNA, 1131 bp, Saccharomyces cerevisiae
atgagcaacgttactacgccgtggtggaaacaatgggacccttctgaagttacacttgccgataaaacccctgatgatgtgtggaagacctgtgttttgcaaggtgtttactttggtggaaacgagtacaatggtaacttaggtgccagaatatcttccgtctttgttattcttttcgtgagtacttttttcaccatgttcccattaatctcaacaaaagtgaaaagattgagaattcctctatatgtttaccttttcgcaaagtattttggttccggtgttattgttgcaaccgcatttatccacttaatggaccctgcttatggtgcgattggtggtaccacttgtgtaggacaaaccggtaactggggtctttattcatggtgtcctgccattatgctaacgagtttgaccttcactttccttactgatctattcagtagcgtctgggttgaaagaaagtatggtctttcccatgaccatacccacgatgaaattaaagacactgttgtgagaaacactgcagctgtttcaagtgagaatgacaatgagaatggtactgcaaatggatctcatgacaccaagaacggagtagagtattatgaagattcagacgctacatccatggatgttgttcaatcatttcaagcacaattttatgcctttttaattttagaattcggtgtgattttccactccgttatgatcggtctaaacctgggaagtgttggtgatgagttctcctccctataccctgtcttagtgttccatcaatcatttgaaggtttaggtattggtgcaagattgtcagccattgaattccctagatcaaagagatggtggccatgggccctatgtgttgcgtatgggttaaccacaccaatctgtgtggccatcggtttgggtgttcgtaccagatacgtcagcggttcttacactgcgcttgttatctctggtgttttggatgccatttctgctggtatcttattgtacactggtttggttgaactactagcaagagactttatattcaatcctcaaagaacaaaggatctaagagaattgtccttcaacgttatatgcactcttttcggtgctggtatcatggctttgatcggtaagtgggcttaa

SEQ ID NO: 3674 - DNA, 1131 bp, Artificial Sequence
  Description of Artificial Sequence: Synthetic polynucleotide
atgagcaacgttactacgccgtggtggaaacaatgggacccttctgaagttacacttgccgataaaacccctgatgatgtgtggaagacctgtgttttgcaaggtgtttactttggtggaaacgagtacaatggtaacttaggtgccagaatatcttccgtctttgttattcttttcgtgagtacttttttcaccatgttcccattaatcagtacaaaagtgaaaagattgagaattcctttatatgtttaccttttcgcaaagtattttggttccggtgttattgttgcaaccgcatttatccacttaatggaccctgcttatggtgcgattggtggtaccacttgtgtaggacaaaccggtaactggggtctttattcttggtgtcctgccattatgcttacgagtttgaccttcactttccttactgatcttttcagtagcgtctgggttgaaagaaagtatggtctttcccatgaccatacccacgatgaaattaaagacactgttgtgagaaacactgcagctgtttctagtgagaatgacaatgagaatggtactgcaaatggatctcatgacaccaagaacggagtagagtattatgaagattctgacgctacatccatggatgttgttcaaagttttcaagcacaattttatgcctttttaattttagaattcggtgtgattttccactccgttatgatcggtttgaacttgggaagtgttggtgatgagttctcctccttgtaccctgtcttagtgttccatcaaagttttgaaggtttaggtattggtgcaagattgagtgccattgaattccctagatccaagagatggtggccatgggccctttgtgttgcgtatgggttaaccacaccaatctgtgtggccatcggtttgggtgttcgtaccagatacgtcagcggttcttacactgcgcttgttatctctggtgttttggatgccatttctgctggtatcttattgtacactggtttggttgaattattggcaagagactttatattcaatcctcaaagaacaaaggatttgagagaattgtccttcaacgttatatgcactcttttcggtgctggtatcatggctttgatcggtaagtgggcttga

SEQ ID NO: 3675 - DNA, 900 bp, Saccharomyces cerevisiae
atgacggatatagggagaaccaagtctagaaattacaaatgttcttttgacggttgtgagaaagtctacaacagacctagtttgcttcagcaacaccaaaattcgcataccaatcaaaagccgtatcattgtgatgagccgggatgtggcaaaaaatttataagaccgtgccatctacgagttcacaaatggactcattcacaaatcaagcccaaagcgtgcacattatgtcaaaaaagatttgtcacaaatcagcaattaagaaggcatttaaatagtcatgaaagaaaaagcaagcttgcatcaagaattgaccgtaaacacgaaggagtgaatgcgaatgtgaaagcagaactcaatggcaaggagggaggttttgacccaaaattaccttccggctctccaatgtgtggtgaagaattctcgcaaggtcatttgcctggatatgatgacatgcaagtgctacaatgcccatacaaatcatgtcaaaaagttaccagcttcaatgacgatctaataaatcatatgttgcaacatcatatagcaagtaagcttgttgtaccatctggagatccatctctgaaggaatcgcttccaacctctgagaaatccagcagcaccgacactacatccattccacaactttcatttagcactactgggacaagcagtagtgaaagcgttgatagcactacggcacaaaccccaactgatccagagagttactggtcggataaccggtgcaaacatagtgattgtcaagagcttagtccattcgcatctgtatttgatctcattgaccactatgaccacacgcacgccttcattcctgagacgctggtaaagtacagctacattcatttatataagcctagcgtctgggatttattcgaatactga

SEQ ID NO: 3676 - DNA, 900 bp, Artificial Sequence
  Description of Artificial Sequence: Synthetic polynucleotide
atgacggatatagggagaaccaagtctagaaattacaaatgttcttttgacggttgtgagaaagtctacaacagacctagtttgcttcagcaacaccaaaattctcataccaatcaaaagccgtatcattgtgatgagccgggatgtggcaaaaaatttataagaccgtgccatttgagagttcacaaatggactcattctcaaatcaagcccaaagcgtgcacattatgtcaaaaaagatttgtcacaaatcagcaattaagaaggcatttaaatagtcatgaaagaaaaagcaagcttgcatctagaattgaccgtaaacacgaaggagtgaatgcgaatgtgaaagcagaactcaatggcaaggagggaggttttgacccaaaattaccttccggctctccaatgtgtggtgaagaattctctcaaggtcatttgcctggatatgatgacatgcaagtgttgcaatgcccatacaaaagttgtcaaaaagttaccagcttcaatgacgatttgataaatcatatgttgcaacatcatatagcaagtaagcttgttgtaccatctggagatccatctttgaaggaatctcttccaacctctgagaaatccagcagcaccgacactacatccattccacaactttcttttagcactactgggacaagcagtagtgaaagcgttgatagcactacggcacaaaccccaactgatccagagagttactggtctgataacagatgcaaacatagtgattgtcaagagcttagtccattcgcatctgtatttgatctcattgaccactatgaccacacgcacgccttcattcctgagacgttggtaaagtacagctacattcatttatataagcctagcgtctgggatttattcgaatactga

SEQ ID NO: 3677 - DNA, 1461 bp, Saccharomyces cerevisiae
atggttcatttaggtccaaaaaaaccacaagccagaaagggttccatggccgatgtgccaaaggaattgatgcaacaaattgagaattttgaaaaaattttcactgttccaactgaaactttacaagccgttaccaagcacttcatttccgaattggaaaagggtttgtccaagaagggtggtaacattccaatgattccaggttgggttatggatttcccaactggtaaggaatccggtgatttcttggccattgatttgggtggtaccaacttgagagttgtcttagtcaagttgggcggtgaccgtacctttgacaccactcaatctaagtacagattaccagatgctatgagaactactcaaaatccagacgaattgtgggaatttattgccgactctttgaaagcttttattgatgagcaattcccacaaggtatctctgagccaattccattgggtttcaccttttctttcccagcttctcaaaacaaaatcaatgaaggtatcttgcaaagatggactaaaggttttgatattccaaacattgaaaaccacgatgttgttccaatgttgcaaaagcaaatcactaagaggaatatcccaattgaagttgttgctttgataaacgacactaccggtactttggttgcttcttactacactgacccagaaactaagatgggtgttatcttcggtactggtgtcaatggtgcttactacgatgtttgttccgatatcgaaaagctacaaggaaaactatctgatgacattccaccatctgctccaatggccatcaactgtgaatacggttccttcgataatgaacatgtcgttttgccaagaactaaatacgatatcaccattgatgaagaatctccaagaccaggccaacaaacctttgaaaaaatgtcttctggttactacttaggtgaaattttgcgtttggccttgatggacatgtacaaacaaggtttcatcttcaagaaccaagacttgtctaagttcgacaagcctttcgtcatggacacttcttacccagccagaatcgaggaagatccattcgagaacctagaagataccgatgacttgttccaaaatgagttcggtatcaacactactgttcaagaacgtaaattgatcagacgtttatctgaattgattggtgctagagctgctagattgtccgtttgtggtattgctgctatctgtcaaaagagaggttacaagaccggtcacatcgctgcagacggttccgtttacaacagatacccaggtttcaaagaaaaggctgccaatgctttgaaggacatttacggctggactcaaacctcactagacgactacccaatcaagattgttcctgctgaagatggttccggtgctggtgccgctgttattgctgctttggcccaaaaaagaattgctgaaggtaagtccgttggtatcatcggtgcttaa

SEQ ID NO: 3678 - DNA, 1461 bp, Artificial Sequence
  Description of Artificial Sequence: Synthetic polynucleotide
atggttcatttaggtccaaaaaaaccacaagccagaaagggttccatggccgatgtgccaaaggaattgatgcaacaaattgagaattttgaaaaaattttcactgttccaactgaaactttacaagccgttaccaagcacttcatttccgaattggaaaagggtttgtccaagaagggtggtaacattccaatgattccaggttgggttatggatttcccaactggtaaggaatccggtgatttcttggccattgatttgggtggtaccaacttgagagttgtcttagtcaagttgggcggtgaccgtacctttgacaccactcaatctaagtacagattaccagatgctatgagaactactcaaaatccagacgaattgtgggaatttattgccgactctttgaaagcttttattgatgagcaattcccacaaggtatctctgagccaattccattgggtttcaccttttctttcccagcttctcaaaacaaaatcaatgaaggtatcttgcaaagatggactaaaggttttgatattccaaacattgaaaaccacgatgttgttccaatgttgcaaaagcaaatcactaagaggaatatcccaattgaagttgttgctttgataaacgacactaccggtactttggttgcttcttactacactgacccagaaactaagatgggtgttatcttcggtactggtgtcaatggtgcttactacgatgtttgttccgatatcgaaaagttacaaggaaaattatctgatgacattccaccatctgctccaatggccatcaactgtgaatacggttccttcgataatgaacatgtcgttttgccaagaactaaatacgatatcaccattgatgaagaatctccaagaccaggccaacaaacctttgaaaaaatgtcttctggttactacttaggtgaaattttgcgtttggccttgatggacatgtacaaacaaggtttcatcttcaagaaccaagacttgtctaagttcgacaagcctttcgtcatggacacttcttacccagccagaatcgaggaagatccattcgagaacttggaagataccgatgacttgttccaaaatgagttcggtatcaacactactgttcaagaacgtaaattgatcagacgtttatctgaattgattggtgctagagctgctagattgtccgtttgtggtattgctgctatctgtcaaaagagaggttacaagaccggtcacatcgctgcagacggttccgtttacaacagatacccaggtttcaaagaaaaggctgccaatgctttgaaggacatttacggctggactcaaacctctttggacgactacccaatcaagattgttcctgctgaagatggttccggtgctggtgccgctgttattgctgctttggcccaaaaaagaattgctgaaggtaagtccgttggtatcatcggtgcttga

SEQ ID NO: 3679 - DNA, 1767 bp, Saccharomyces cerevisiae
atgtcaacacttagcgatagtgataccgagactgaggtcgtgtcgagaaacttgtgtggaatcgtcgacataggttctaatggtattcgttttagtatatcttccaaggctgcacatcatgcaagaattatgccttgtgtttttaaagatagggttggtctttctctatacgaagttcaatataatacacatacgaacgcaaaatgccctattcccagagatattataaaagaggtttgttctgccatgaagagattcaaattaatttgcgatgattttggtgtacctgaaactagtgtcagagtaattgcaacagaagccacgcgagatgctattaacgcggatgaatttgttaatgctgtttacggtagcactggctggaaagtagaaatattaggccaggaagatgaaactagggtcggcatatatggtgttgtttcctcatttaatacagtaagaggtctatatctagatgtggcaggtggtagtactcagttatcatgggtaataagctcgcacggagaagtcaagcaatccagcaaacctgtatctttgccatatggagctggaactcttttgagaagaatgagaacagatgataatagggcacttttttatgagattaaagaagcgtacaaagatgcgattgaaaaaattggtatacctcaagaaatgattgatgacgccaagaaagaaggtggatttgacctttggacccgtgggggtggtttaagaggtatgggacatctgcttctttaccagtcggaaggttatcccatccaaacaataattaacggatatgcttgcacttatgaagaattctcgtctatgtcagattatctattcctaaaacaaaaaataccaggttcttcaaaagagcataaaatatttaaggtttctgatagaagggctttacaacttcctgccgttggtttgttcatgagtgctgtttttgaagcgattccccagatcaaagctgtacattttagtgagggtggtgttcgagagggttcactttattctcttcttccaaaagaaattcgtgcacaagatccattgctaattgcgtcccgtccttatgctccattacttactgaaaaatatctatatctattgagaacatcaatcccacaagaagatataccagaaatagtaaacgaaaggattgctcctgctttatgtaacttagcatttgttcatgcctcttatccaaaggagttacaaccaacagctgcattacatgttgctacaagagggataatagccggctgtcatggattatctcacagagctagagcgctgataggaattgctctatgtagtagatggggcggcaacattccggaatctgaagaaaaatactcccaagaattagaacaagtagttctacgcgaaggtgataaagctgaagcattgagaattgtatggtggacgaagtatattggtacgattatgtatgtgatttgcggtgttcatccaggtggtaatatcagagataacgtatttgatttccatgtttctaagcgtagtgaggtggagaccagtttaaaagaattaatcattgatgatgcaaacactacaaaggtaaaagaagaatccacgcgtaaaaatcgcgggtatgaagtggttgtgagaattagtaaggacgatcttaaaacaagtgcttccgttcgttccagaattatcacgctacaaaagaaagtacgcaagctatctagaggaagtgtagagagggttaaaattggcgtgcaattttatgaagaataa

SEQ ID NO: 3680 - DNA, 1767 bp, Artificial Sequence
  Description of Artificial Sequence: Synthetic polynucleotide
atgtctacacttagcgatagtgataccgagactgaggtcgtgtccagaaacttgtgtggaatcgtcgacataggttctaatggtattcgttttagtatatcttccaaggctgcacatcatgcaagaattatgccttgtgtttttaaagatagggttggtctttctttgtacgaagttcaatataatacacatacgaacgcaaaatgccctattcccagagatattataaaagaggtttgttctgccatgaagagattcaaattaatttgcgatgattttggtgtacctgaaactagtgtcagagtaattgcaacagaagccacgagggatgctattaacgcggatgaatttgttaatgctgtttacggtagcactggctggaaagtagaaatattaggccaggaagatgaaactagggtcggcatatatggtgttgtttcctcttttaatacagtaagaggtttatatttggatgtggcaggtggtagtactcagttatcttgggtaataagctctcacggagaagtcaagcaatccagcaaacctgtatctttgccatatggagctggaactcttttgagaagaatgagaacagatgataatagggcacttttttatgagattaaagaagcgtacaaagatgcgattgaaaaaattggtatacctcaagaaatgattgatgacgccaagaaagaaggtggatttgacctttggacccgtgggggtggtttaagaggtatgggacatttgcttctttaccagtctgaaggttatcccatccaaacaataattaacggatatgcttgcacttatgaagaattcagttctatgagtgattatcttttcttgaaacaaaaaataccaggttcttctaaagagcataaaatatttaaggtttctgatagaagggctttacaacttcctgccgttggtttgttcatgagtgctgtttttgaagcgattccccagatcaaagctgtacattttagtgagggtggtgttagagagggttctctttattctcttcttccaaaagaaattcgtgcacaagatccattgttaattgcgtcccgtccttatgctccattacttactgaaaaatatttgtatcttttgagaacatctatcccacaagaagatataccagaaatagtaaacgaaaggattgctcctgctttatgtaacttagcatttgttcatgcctcttatccaaaggagttacaaccaacagctgcattacatgttgctacaagagggataatagccggctgtcatggattatctcacagagctagagcgttaataggaattgctctttgtagtagatggggcggcaacattccggaatctgaagaaaaatactcccaagaattagaacaagtagttttgcgcgaaggtgataaagctgaagcattgagaattgtatggtggacgaagtatattggtacgattatgtatgtgatttgcggtgttcatccaggtggtaatatcagagataacgtatttgatttccatgtttctaagcgtagtgaggtggagaccagtttaaaagaattaatcattgatgatgcaaacactacaaaggtaaaagaagaatccacgcgtaaaaatcgcgggtatgaagtggttgtgagaattagtaaggacgatcttaaaacaagtgcttccgttcgttccagaattatcacgttacaaaagaaagtacgcaagttatctagaggaagtgtagagagggttaaaattggcgtgcaattttatgaagaatga

SEQ ID NO: 3681 - DNA, 3564 bp, Saccharomyces cerevisiae
atgaaaacaaagtttgatcgcctcggtacaggaaaaagaagtagaccctctccaaataatattgactttaacgaccagtctgctacatttaaaagaaataagaaaaatagccgccaaccaagttttaaagtaggtttgtcttataacagtttactggatgattgtgatgatgaaaatgaaacagaggaaatatttgagggccgtggtctgcaattcttcgacaaagacgataatttttcaataacagcagatgatacacaagtaactagtaaattatttgatcacgatttagagcagacacctgatgaagaggcgaagaaacctaagaaggtcacgataaggaaatcagcgaagaaatgtttgagcacgaccatattaccagattcattcagaggggtttttaaatttacagaatttaataaaatgcaatcagaggcttttcctagtatttatgagagtaacgagaactgcataatttcttcaccaaccggatcaggcaagactgtattatttgaattggcaatattacgtcttataaaggaaacaaatagtgataccaataacaccaaaattatatacatcgcgccaaccaaatctctatgttacgagatgtacaagaactggtttccttcctttgtgaatctttctgttggtatgcttactagtgatacctcttttctggaaactgaaaaggctaaaaaatgtaacataataattacgacaccagaaaaatgggatttgttaacaagaagatggtccgattacagccgattattcgaattggtcaaacttgtcctagttgatgagattcataccataaaggagaaaagaggagcatctttggaagtaattctgacaaggatgaatacaatgtgtcaaaacattcggtttgttgctttaagtgcaacagttccaaatatagaagacctagcattgtggctcaaaactaacaacgagcttcctgcaaatattctttcttttgacgaatcgtacaggcaagttcagttaacgaagtttgtttatgggtactccttcaattgcaaaaatgacttccaaaaagatgctatatataattccaaattgattgaaataattgaaaagcatgccgataatcgtcccgtactaatattttgtccgactagggcttcaactatatcaacagcaaaatttttattaaataatcatattttttcaaaaagtaagaaaagatgtaatcataatccctccgataaaatattaaatgaatgtatgcaacaaggtatcgctttccatcatgctggaatttctttagaagaccgtactgccgttgagaaagaatttcttgcaggttcaattaatatattgtgttcaacttcaacgttagctgttggtgtgaaccttcccgcatatttggtcattatcaaaggcaccaaaagttggaactcttctgaaatccaagagtattcagacctagatgtactgcaaatgattgggcgggcaggaagacctcaatttgaaactcacgggtgcgcagtaatcatgacagactctaaaatgaagcaaacatatgaaaacttaattcatggaactgacgttttggaaagttcattacatttgaatttgatcgagcatttagcagcagaaacctctttggaaactgtatattcaattgaaactgcagtaaattggctacgaaacacattcttttacgttagatttgggaagaatccagctgcatatcaagaggtgaacagatacgttagttttcattccgttgaagactctcagataaatcaattctgtcagtatttgcttgacaccttagtaaaagtgaaaataatcgatatcagcaatggggagtacaaatctacagcgtacggaaatgcaatgacgcgacattatatatcctttgagtcgatgaaacaattcattaacgcaaaaaaatttctatcattacaagggatactaaatttactggccacttctgaagagttttcagttatgagggtgaggcacaatgaaaaaaaattgttcaaagaaatcaatttatcgccacttttgaaatatccatttttaaccgagaagaaacagagccaaataattgacagggttagtcaaaaggtttctcttttgattcaatatgagttaggtgggttagaatttccatcatacgaaggcgcttctaaactacatcaaactcttgttcaggataaattcctcgtttttagacattgttttagattactaaaatgcatggtagacacatttattgaaaaaagtgatggaacatcactgaaaaatactttgttcttactgcgaagcctgaatggtcactgctgggaaaacacgccaatggttcttaggcaattgaaaacaattggactagtttcagtaagaaggctaatacgacatggaattaccaatctagaagaaatggggcatttgtcagatactcagattgaatactatcttaacctcaagattggaaacggcataaaaattaaaaacgacatttctttgttgccttgtctgaatattagaacaaaactagaaaattgcaaaatagaaaatgaagagttgtggttgacatttaaagttgagattagtgcaacattcaagtctagcatttggcatggtcagcacctctcattagatatcgaaaccgagaaaagctcaggagagttaatcgactttagaagattgcaagttaacaaactacagtcaccaaggggctttagaatttcagcaaaaatatcaccaaaactagaaaaaatagaattctcaattcattgccaagaaatcgccggactcggcaaaacaatcgtatattccactgatcatttggcatcacagttctctgcgaagacaccaaatataaggaaagatctaaatagtttagaaaaatgcctcttctatgaaagcagtagtgacggagaagtggggaaaacgtctagggtttcccataaagatggattagaagaatcgctatcctcagatgatagtatactagattatttgaatgaaaggaagaaatcatcaaaggcggttgaatctgcagcagttattcacccggaggcacactcttcttcacattttagtaatggccgccaagtaagatctaatggcaattacgagtgttttcatagctgcaaagacaaaacgcaatgcagacatttatgttgtaaagagggtattccagtaaagtatataaaagaaaaaggaccctcctcaatcaagccagtatcaaaacctgatcaaatacgccagccactgcttgcaaaaaatatcaacacaacccctcacctggaaaaaagactgaatagtaaaccaaagcagtggcaagaagaaaatacagatattgcgacagttcatacacttccttcaaaaatttataatctatcgcaacagatgtcgtctatggaagcgggtgaacaagtcctaaaatcaggccccgaaaactgccctgaaataattcctattgatcttgaatcatccgatagttattctagtaatacagcggcgagctcaataagtgatccgaatggtgatctggatttcttgggttccgatatagagtttgaatga

SEQ ID NO: 3682 - DNA, 3564 bp, Artificial Sequence
  Description of Artificial Sequence: Synthetic polynucleotide
atgaaaacaaagtttgatcgcctcggtacaggaaaaagaagtagaccctctccaaataatattgactttaacgaccagtctgctacatttaaaagaaataagaaaaatagccgccaaccaagttttaaagtaggtttgtcttataacagtttattagatgattgtgatgatgaaaatgaaacagaggaaatatttgagggccgtggtttacaattcttcgacaaagacgataatttttccataacagcagatgatacacaagtaactagtaaattatttgatcacgatttagagcagacacctgatgaagaggcgaagaaacctaagaaggtcacgataaggaaatctgcgaagaaatgtttgagcacgaccatattaccagattctttcagaggggtttttaaatttacagaatttaataaaatgcaaagtgaggcttttcctagtatttatgagagtaacgagaactgcataatttcttctccaaccggatctggcaagactgtattatttgaattggcaatattacgtcttataaaggaaacaaatagtgataccaataacaccaaaattatatacatcgcgccaaccaaatctttatgttacgagatgtacaagaactggtttccttcctttgtgaatctttctgttggtatgcttactagtgatacctcttttttggaaactgaaaaggctaaaaaatgtaacataataattacgacaccagaaaaatgggatttgttaacaagaagatggtccgattacagcagattattcgaattggtcaaacttgtcttggttgatgagattcataccataaaggagaaaagaggagcatctttggaagtaattttaacaaggatgaatacaatgtgtcaaaacattagatttgttgctttaagtgcaacagttccaaatatagaagacttggcattgtggctcaaaactaacaacgagcttcctgcaaatattctttcttttgacgaatcttacaggcaagttcagttaacgaagtttgtttatgggtactccttcaattgcaaaaatgacttccaaaaagatgctatatataattccaaattgattgaaataattgaaaagcatgccgataatcgtcccgtattaatattttgtccgactagggcttccactatatctacagcaaaatttttattaaataatcatattttttccaaaagtaagaaaagatgtaatcataatccctccgataaaatattaaatgaatgtatgcaacaaggtatcgctttccatcatgctggaatttctttagaagaccgtactgccgttgagaaagaatttcttgcaggttccattaatatattgtgttccacttccacgttagctgttggtgtgaaccttcccgcatatttggtcattatcaaaggcaccaaaagttggaactcttctgaaatccaagagtattctgacttggatgtattacaaatgattgggcgcgcaggaagacctcaatttgaaactcacgggtgcgcagtaatcatgacagactctaaaatgaagcaaacatatgaaaacttaattcatggaactgacgttttggaaagttctttacatttgaatttgatcgagcatttagcagcagaaacctctttggaaactgtatattctattgaaactgcagtaaattggttaagaaacacattcttttacgttagatttgggaagaatccagctgcatatcaagaggtgaacagatacgttagttttcattccgttgaagactctcagataaatcaattctgtcagtatttgcttgacaccttagtaaaagtgaaaataatcgatatcagcaatggggagtacaaatctacagcgtacggaaatgcaatgacgaggcattatatatcctttgagtccatgaaacaattcattaacgcaaaaaaatttttatctttacaagggatattgaatttattagccacttctgaagagttttctgttatgagggtgaggcacaatgaaaaaaaattgttcaaagaaatcaatttatctccacttttgaaatatccatttttaaccgagaagaaacagagccaaataattgacagggttagtcaaaaggtttctcttttgattcaatatgagttaggtgggttagaatttccatcttacgaaggcgcttctaaattgcatcaaactcttgttcaggataaattcctcgtttttagacattgttttagattattgaaatgcatggtagacacatttattgaaaaaagtgatggaacatctttgaaaaatactttgttcttacttagaagcttgaatggtcactgctgggaaaacacgccaatggttcttaggcaattgaaaacaattggattggtttctgtaagaaggttgataagacatggaattaccaatttggaagaaatggggcatttgagtgatactcagattgaatactatcttaacctcaagattggaaacggcataaaaattaaaaacgacatttctttgttgccttgtttgaatattagaacaaaattagaaaattgcaaaatagaaaatgaagagttgtggttgacatttaaagttgagattagtgcaacattcaagtctagcatttggcatggtcagcacctctctttagatatcgaaaccgagaaaagcagtggagagttaatcgactttagaagattgcaagttaacaaattacagtctccaaggggctttagaatttctgcaaaaatatctccaaaattagaaaaaatagaattctccattcattgccaagaaatcgccggactcggcaaaacaatcgtatattccactgatcatttggcatcccagttctctgcgaagacaccaaatataaggaaagatttgaatagtttagaaaaatgcctcttctatgaaagcagtagtgacggagaagtggggaaaacgtctagggtttcccataaagatggattagaagaatctttatccagtgatgatagtatattggattatttgaatgaaaggaagaaatcttccaaggcggttgaatctgcagcagttattcacccggaggcacactcttcttctcattttagtaatggccgccaagtaagatctaatggcaattacgagtgttttcatagctgcaaagacaaaacgcaatgcagacatttatgttgtaaagagggtattccagtaaagtatataaaagaaaaaggaccctcctctatcaagccagtatccaaacctgatcaaatacgccagccattacttgcaaaaaatatcaacacaacccctcacttggaaaaaagattgaatagtaaaccaaagcagtggcaagaagaaaatacagatattgcgacagttcatacacttccttccaaaatttataatttatctcaacagatgtcttctatggaagcgggtgaacaagtcttgaaatctggccccgaaaactgccctgaaataattcctattgatcttgaatcttccgatagttattctagtaatacagcggcgagcagtataagtgatccgaatggtgatttggatttcttgggttccgatatagagtttgaatga

SEQ ID NO: 3683 - DNA, 726 bp, Saccharomyces cerevisiae
atgagtgaagaagaagcgcataaaacagtggaggtggatgacgtcggggttcaattggatgagggcgatgaagaagaccttttggagtatgatgatgaactcgtggaggaacaaccatcggacgcccgtatacgcaacgtggcagagactttaatgaaaagcgaattgcccaaagtcaccgtggaatataaagatactacatttctgttgttcacgtcggatgataagaacgaaagtaacaaccccataatatgtgaaaacgctgctctttatcagcgacccatgggggaattcatggaatccattcgtaaatttatgggaaatcgttttggcaggttggcttttgctacgaaggagttggttttacaactgaaaagcctcgatttgaccttgttcgaagataatgtctacaacaaccatatttcattcagcgatgtttatactatatttaaaatcctgaaggaaagatcggagtctaattttgaaactgatataccgacgcacttggctattgaattaagtacaaggccaagatttgtctctcggtacaacgccttggttgaattaactgaaagctcagctacgttgaaaaacataaagccattttctaacgatgaaacgcatcccttaattgtggatgacaatgaccaatatacacaccagaatacttcagaagtcattgtaatggacatagatgatgacgtaggtgaggattctgaagactaa

SEQ ID NO: 3684 - DNA, 726 bp, Artificial Sequence
  Description of Artificial Sequence: Synthetic polynucleotide
atgagtgaagaagaagcgcataaaacagtggaggtggatgacgtcggggttcaattggatgagggcgatgaagaagaccttttggagtatgatgatgaactcgtggaggaacaaccatctgacgcccgtatacgcaacgtggcagagactttaatgaaaagcgaattgcccaaagtcaccgtggaatataaagatactacatttttattgttcacgtctgatgataagaacgaaagtaacaaccccataatatgtgaaaacgctgctctttatcagaggcccatgggggaattcatggaatccattcgtaaatttatgggaaatcgttttggcaggttggcttttgctacgaaggagttggttttacaattgaaaagcctcgatttgaccttgttcgaagataatgtctacaacaaccatatttctttcagcgatgtttatactatatttaaaatcttgaaggaaagaagtgagtctaattttgaaactgatataccgacgcacttggctattgaattaagtacaaggccaagatttgtctctcgttacaacgccttggttgaattaactgaaagcagtgctacgttgaaaaacataaagccattttctaacgatgaaacgcatcccttaattgtggatgacaatgaccaatatacacaccagaatacttctgaagtcattgtaatggacatagatgatgacgtaggtgaggattctgaagactga

SEQ ID NO: 3685 - DNA, 2115 bp, Saccharomyces cerevisiae
atgattattgaacgttgggaagtaaagttatctaaatgtaaccaaaatgtgggcggctattctgttctgtcaggaaacttaaaagaaaacatcaaactgggaagacgagcacaaaaatatttgaaagagctaagaaatttgcaacttaaaccactgaaaatcggagggtatgaaaactgcggcacgatcaatggtgaagagtattttttggaggtaattcacatcacctctggaagacaaaaaatagatgtagccgttggcaaaacatggaatgtgactaacattgagaatgacaacaaagaagaactacagtatgagttattcaaggaaaagttaaaagtcgggaaacaggacatgttattttttagctggatgaaaagtctttcagttcaattaaatgctcctcttcaccaaaaaatgacggaacacggtttggcagacgataacacgaggttagagtggttcaacatcccacttctcagaagaagtcaatacaggaaaaaggtaccatatccgagtttaagacaaatgtcctctgtactggaagtgcaatgcagcacactaacggaggaaaagttgaacttctgcgttggattttctgataaacctttgtcagaatggaagccccaaatttttgagcaaacctacaatagataccgtttacaacggatctcacctgagaaatctttcaaatataagagtaggtgcagtaagtacaatttcaagaccagttcgcaaagctgggttgtgaaagtcccagaacatgatcaacagcttaatacgtttgaaaaacgttatgatgaactctttgatgctcaatttaataaactagaattttttaaaataagaatgaaaaaattgaaaaagaataagccaattgagaaaaagaactataaaatatggtgtctagaaaaagaagacctaaaggatttggtatgggatcctctgaaaagaatttgcaatcattctaggtatgcaatatttgagcatgttaccataaatagggaggcctattcgatcaaaccattaaggttaacttttcaaaaattagattccggctcccttgacctgatcgataatcaaaaaaagacgtttggtagtataaagcttgcaatgagtatgccagatgtaaaaaaaactgaaaatcagtcaattgaagaaagtgaaagacacgatgaaactgctattgaaacccaagaatttgatgaaaatgattgtctttcatctaaggcggatattaatacatcattagctcctcaaaagagatctttcatcgataatgaactaatgtccatgttagtcaccaaaaaaaaaataaagaaggacaaggatgttagtgacaccggtatatcttccacttcatacttgataaattctgggacatatgcaaattctcatattgaaattcctacctctaattcagtttacaatggaaaggaagattgctcatttaataactactcagtaaagcattcaatattggaagaagatattgagaataaatgcatagccgtaaatgaaaacaaggtgattgagaaccaaaaggtaattcagtcattatgtaaaaattcccatctagaccttatcgaacaatcttactttggcgaatgcgatttcattataaaccattcaacatgtgtatataaaattcaggcgagccgatttatgcaactcagaaataacggctcattgcattacgataaagcggtaaacgatcttttaactgaatttcagagagtcattataattgtggagttttctgaaataatacaagacgttgatcctgatcttttctggaaaatcaaactttatttattgaattcacgtgttgatgtttttttcattcatgagactactgacttttttattgattggatgaaatatttcattgcaagatgggccttttcatataacgatgagaaagaaaaaaatattgcaaatgccgatattcttctagatttgggatttaacatcctcttagtacggaaaattttccagacatatagtctcgaagaattttttatggcaataataaaggaagaaagcaaagctgttaaaatgcttacggtttcacaaatgactcgcctgaagaagttattaaccttagaatggtaa

SEQ ID NO: 3686 - DNA, 2115 bp, Artificial Sequence
  Description of Artificial Sequence: Synthetic polynucleotide
atgattattgaacgttgggaagtaaagttatctaaatgtaaccaaaatgtgggcggctattctgttttatctggaaacttaaaagaaaacatcaaattaggaagaagagcacaaaaatatttgaaagagttaagaaatttgcaacttaaaccattgaaaatcggagggtatgaaaactgcggcacgatcaatggtgaagagtattttttggaggtaattcacatcacctctggaagacaaaaaatagatgtagccgttggcaaaacatggaatgtgactaacattgagaatgacaacaaagaagaattacagtatgagttattcaaggaaaagttaaaagtcgggaaacaggacatgttattttttagctggatgaaaagtctttctgttcaattaaatgctcctcttcaccaaaaaatgacggaacacggtttggcagacgataacacgaggttagagtggttcaacatcccacttctcagaagaagtcaatacaggaaaaaggtaccatatccgagtttaagacaaatgtcctctgtattggaagtgcaatgcagcacattaacggaggaaaagttgaacttctgcgttggattttctgataaacctttgagtgaatggaagccccaaatttttgagcaaacctacaatagataccgtttacaaagaatctctcctgagaaatctttcaaatataagagtaggtgcagtaagtacaatttcaagaccagttctcaaagctgggttgtgaaagtcccagaacatgatcaacagcttaatacgtttgaaaaacgttatgatgaactctttgatgctcaatttaataaattagaattttttaaaataagaatgaaaaaattgaaaaagaataagccaattgagaaaaagaactataaaatatggtgtttagaaaaagaagacttgaaggatttggtatgggatcctttgaaaagaatttgcaatcattctaggtatgcaatatttgagcatgttaccataaatagggaggcctattctatcaaaccattaaggttaacttttcaaaaattagattccggctcccttgacttgatcgataatcaaaaaaagacgtttggtagtataaagcttgcaatgagtatgccagatgtaaaaaaaactgaaaatcagagtattgaagaaagtgaaagacacgatgaaactgctattgaaacccaagaatttgatgaaaatgattgtctttcttctaaggcggatattaatacaagtttagctcctcaaaagagatctttcatcgataatgaattgatgtccatgttagtcaccaaaaaaaaaataaagaaggacaaggatgttagtgacaccggtatatcttccacttcttacttgataaattctgggacatatgcaaattctcatattgaaattcctacctctaattctgtttacaatggaaaggaagattgctcttttaataactacagtgtaaagcattccatattggaagaagatattgagaataaatgcatagccgtaaatgaaaacaaggtgattgagaaccaaaaggtaattcagtctttatgtaaaaattcccatttggaccttatcgaacaatcttactttggcgaatgcgatttcattataaaccattctacatgtgtatataaaattcaggcgagcagatttatgcaactcagaaataacggctctttgcattacgataaagcggtaaacgatcttttaactgaatttcagagagtcattataattgtggagttttctgaaataatacaagacgttgatcctgatcttttctggaaaatcaaactttatttattgaattctcgtgttgatgtttttttcattcatgagactactgacttttttattgattggatgaaatatttcattgcaagatgggccttttcttataacgatgagaaagaaaaaaatattgcaaatgccgatattcttttagatttgggatttaacatcctcttagtaagaaaaattttccagacatatagtctcgaagaattttttatggcaataataaaggaagaaagcaaagctgttaaaatgcttacggtttctcaaatgactcgcttgaagaagttattaaccttagaatggtga

SEQ ID NO: 3687 - DNA, 1110 bp, Saccharomyces cerevisiae
atggttgtattcgaaataactatacttggggccaatggaggacccaccgaatacggaacacagtgttttatacttaagcctgctagaacagaggatccagaattaatagctgtagacggtggtgcaggaatgtaccagctacgggagatgttggtccaagggcgaaatgaaaatgaaggtgatgatgagcttgttccaagcttttatgaacatgatcgagagccaatagagttttttattgattccaaactgaacatacaaaagggattatccaagtccttgctacaatcattaaagaggcagggagagcattttgaaagcgccaatacaatgaagaaaacttacgaggttttccaaggaattaccgactactacattacccatccccatctggaccatattagtgggctggtagtaaactccccctcaatatatgagcaggaaaacagtaaaaagaaaactatttggggattaccgcatactattgacgttttgcaaaagcatgtctttaatgacttaatatggccagatttaacggcagaacgttcaagaaaattgaagctaaaatgcttgaatccgaaggaagttcaaaagtgcactatctttccttgggatgtaataccgttcaaagttcatcatgggataggcgtcaagactggcgcgccggtatacagcaccttctatatcttcagagacaggaaaagcaaagactgtataatagtttgcggagatgttgagcaggaccgcagagaatctgaagaatctctacttgaagaattttggtcttacgttgctgaaaatataccgcttgtgcatctcaagggtatattagtcgaatgttcatgcccattatcttccaagcccgagcaattgtatggtcatctatctccaatatatttaatcaacgaattatccaatttgaacactttatacaacagtagtaagggattaagcggtttgaatgttatcgttactcacgttaagtcaacacctgctaaaagagacccaagactaaccatactcgaagagttacgatttttagctgaggagaggaacttaggagacttgagaatatctattgcgctagaaggccacactttgtttctataa

SEQ ID NO: 3688 - DNA, 1110 bp, Artificial Sequence
  Description of Artificial Sequence: Synthetic polynucleotide
atggttgtattcgaaataactatacttggggccaatggaggacccaccgaatacggaacacagtgttttatacttaagcctgctagaacagaggatccagaattaatagctgtagacggtggtgcaggaatgtaccagttaagagagatgttggtccaagggagaaatgaaaatgaaggtgatgatgagcttgttccaagcttttatgaacatgatagagagccaatagagttttttattgattccaaattgaacatacaaaagggattatccaagtccttgttgcaatctttaaagaggcagggagagcattttgaaagcgccaatacaatgaagaaaacttacgaggttttccaaggaattaccgactactacattacccatccccatttggaccatattagtgggttggtagtaaactccccctccatatatgagcaggaaaacagtaaaaagaaaactatttggggattaccgcatactattgacgttttgcaaaagcatgtctttaatgacttaatatggccagatttaacggcagaacgttccagaaaattgaagttgaaatgcttgaatccgaaggaagttcaaaagtgcactatctttccttgggatgtaataccgttcaaagttcatcatgggataggcgtcaagactggcgcgccggtatacagcaccttctatatcttcagagacaggaaaagcaaagactgtataatagtttgcggagatgttgagcaggaccgcagagaatctgaagaatctttacttgaagaattttggtcttacgttgctgaaaatataccgcttgtgcatctcaagggtatattagtcgaatgtagttgcccattatcttccaagcccgagcaattgtatggtcatttatctccaatatatttaatcaacgaattatccaatttgaacactttatacaacagtagtaagggattaagcggtttgaatgttatcgttactcacgttaagagtacacctgctaaaagagacccaagattgaccatactcgaagagttaagatttttagctgaggagaggaacttaggagacttgagaatatctattgcgttagaaggccacactttgtttttatga

SEQ ID NO: 3689 - DNA, 594 bp, Saccharomyces cerevisiae
atggaactccgtagtttttctagacagcctgatggcatacttgctaacccaagattgggaagggaggaagtattggaaggtgaacatccgcaagatgctagattagcccgacaaagcatttggttgagcccaagtttaattgcggagtatatacagctttttttcaattttattataggaactataggactgtctcttgctattaaattcattttgatgataagaaacgatgttaacttaaaactggagcataacgtgagggaagaattagataaaattgcaacttgcaaatcaaggtattttgaaaaccagtgcgaacctcatatgagggttccagcattggaggtacgttgcaatgaatggtcaaaatgtatgaacaaggaaatagtgtctggctccgattaccaatgggctaaagcatgggctcgtactctggcggaggtaataaatgctttttttgaagcgttcagtatacgatctttccttttcattttaattagcataataggtataatatttgttaccaatacgagtttcggatcatacagggtttatctcaataataaagatacaaaatcggttcgccatgcatag

SEQ ID NO: 3690 - DNA, 594 bp, Artificial Sequence
  Description of Artificial Sequence: Synthetic polynucleotide
atggaactccgtagtttttctagacagcctgatggcatacttgctaacccaagattgggaagggaggaagtattggaaggtgaacatccgcaagatgctagattagccagacaaagcatttggttgagcccaagtttaattgcggagtatatacagctttttttcaattttattataggaactataggattatctcttgctattaaattcattttgatgataagaaacgatgttaacttaaaattagagcataacgtgagggaagaattagataaaattgcaacttgcaaatctaggtattttgaaaaccagtgcgaacctcatatgagggttccagcattggaggtacgttgcaatgaatggtccaaatgtatgaacaaggaaatagtgtctggctccgattaccaatgggctaaagcatgggctcgtactttggcggaggtaataaatgctttttttgaagcgttcagtataagatctttccttttcattttaattagcataataggtataatatttgttaccaatacgagtttcggatcttacagggtttatctcaataataaagatacaaaatctgttcgccatgcatga

SEQ ID NO: 3691 - DNA, 1164 bp, Saccharomyces cerevisiae
atgggtgttagtgcaaatttgttcgtaaagcaaagagggtcgacaacagctctgaagcagccaaaggaaataggattctattcaagaactaaggatgaagaatatttaattagcgatgatacgaatttgaattactactatcttccagacgctgaattggacaggaagttggatctttcatcaggatttcagaaatttaaggattattacaaagattttgaagacaggtgttccctgcgtgggctattagaaaccatagaaagctctgaaagacataaaggaaaaaaaattaatgctgatataattacttttagaggaatagcacggaaattaatttcatgtgcatttgactctccatcttttaatacagttgatcttcgtatcgtttcattcaacggccaactttttatcaaggaagtgcctgaagctgtcaatgcagctaaggcttcctctgcaactgaagcagggcgtaatataaatcaagatctgaatgtatttacagggtacaagtttgaaactttggctactctttccaatccgttgcagtatacaccccgtgaagtgatagaaaaaagaactaaaaggattgtatcgcatggagatgaatacattagtgttgtgagaactggtgtaggtaactgcaagttaattcttggtgctgaggtggattgtatatttgactttaaagaaaacggtagagacaatttaaaacattatgccgaattgaaatgtacgcagcaagttgcgaacatatcggatacgcataagtttgagcgtaaactgttccggacctggctgcaatgcttcttagttgggatcccaaggatcatatatggttttaaagacgaccattatgtattaaaaactgtggaagagttttcaacggaggaagtacctgttttattaaagaacaataatccacaagttggaagtgcatgtttagaagccattaaatggtatggtctccttactgagtggcttttgaaaatgataccaagagatgaggatcctcattctcaaataagagcatttaagttggttttcgaaaataatcacctaagattatccgaaattgaagaaagtgatgaggaatattcaggtttgattgatggagaacatatattatcgaacgggtttaaggagtggagaaaatctttgaaataa

SEQ ID NO: 3692 - DNA, 1164 bp, Artificial Sequence
  Description of Artificial Sequence: Synthetic polynucleotide
atgggtgttagtgcaaatttgttcgtaaagcaaagagggtctacaacagctttgaagcagccaaaggaaataggattctattctagaactaaggatgaagaatatttaattagcgatgatacgaatttgaattactactatcttccagacgctgaattggacaggaagttggatctttcttctggatttcagaaatttaaggattattacaaagattttgaagacaggtgttccttacgtgggttattagaaaccatagaaagctctgaaagacataaaggaaaaaaaattaatgctgatataattacttttagaggaatagcaagaaaattaattagttgtgcatttgactctccatcttttaatacagttgatcttcgtatcgtttctttcaacggccaactttttatcaaggaagtgcctgaagctgtcaatgcagctaaggcttcctctgcaactgaagcagggcgtaatataaatcaagatttgaatgtatttacagggtacaagtttgaaactttggctactctttccaatccgttgcagtatacaccccgtgaagtgatagaaaaaagaactaaaaggattgtatctcatggagatgaatacattagtgttgtgagaactggtgtaggtaactgcaagttaattcttggtgctgaggtggattgtatatttgactttaaagaaaacggtagagacaatttaaaacattatgccgaattgaaatgtacgcagcaagttgcgaacatatctgatacgcataagtttgagcgtaaattattcagaacctggttacaatgcttcttagttgggatcccaaggatcatatatggttttaaagacgaccattatgtattaaaaactgtggaagagttttctacggaggaagtacctgttttattaaagaacaataatccacaagttggaagtgcatgtttagaagccattaaatggtatggtctccttactgagtggcttttgaaaatgataccaagagatgaggatcctcattctcaaataagagcatttaagttggttttcgaaaataatcacttgagattatccgaaattgaagaaagtgatgaggaatattctggtttgattgatggagaacatatattatctaacgggtttaaggagtggagaaaatctttgaaatga

SEQ ID NO: 3693 - DNA, 2127 bp, Saccharomyces cerevisiae
atgccatctaccttgactattaatggaaaagccccaattgtggcttatgctgaactaattgctgctcgtattgtgaatgcgttagctcctaactccatagctattaagttggtggacgataagaaagcacctgctgccaagctcgatgatgctactgaagatgtcttcaacaagataactagcaaattcgccgccatcttcgataatggtgataaagagcaagttgctaaatgggttaatctggcccaaaaggaattagttatcaagaactttgctaaattatcacaatcattggaaacactagattctcaattgaacctaagaacctttattcttggcggcttgaagtattctgccgctgatgtagcatgttggggtgctttaagatccaatggtatgtgcggttccatcatcaagaacaaggttgatgttaacgtttctcgttggtacactttgttagaaatggatcccatcttcggcgaagctcacgatttcttgagcaaatctttactagaattaaagaaaagtgctaatgtgggtaagaagaaggaaactcacaaggctaactttgaaattgatttgccagatgccaaaatgggtgaagtcgtcactcgtttcccacctgaaccttctggatacttacatattggacatgccaaagctgccttgttgaaccaatattttgctcaagcttacaagggtaagttgattattagattcgatgacaccaacccatcgaaggaaaaggaagaattccaagactctattttggaagatttggatttattaggaatcaagggtgatagaataacctactcatctgactacttccaagaaatgtacgactactgtgttcaaatgatcaaggatggtaaagcttactgtgacgacactccaactgaaaagatgagagaagaacgtatggatggtgttgcttctgccagaagagatcgttctgttgaagagaacttaagaatttttaccgaagaaatgaaaaacggtactgaagaaggtttgaagaactgtgttcgtgccaagatcgattacaaggctttgaacaagactctaagagatcctgtcatttacagatgtaatctaacccctcaccacagaaccggatcaacttggaagatctacccaacttatgatttctgtgtcccaattgttgatgctattgaaggtgttacccacgctttacgtaccattgaatatagagaccgtaacgctcaatatgattggatgttacaagctttgcgtttgagaaaagtccatatttgggatttcgctcgtatcaatttcgttagaaccttgttgtctaagagaaagttacaatggatggttgacaaggacttggtcggaaattgggacgatccaaggttcccaactgtcaggggtgtgagaagaagaggtatgactgtcgaaggtttgaggaacttcgtcttatcccaaggtccatccagaaatgtcattaacttggaatggaacttgatctgggctttcaacaagaaggtcattgatccaattgctccaagacacactgctatcgtcaacccagttaaaatccacttggaaggctccgaagctccacaagaaccaaagattgaaatgaaaccaaaacacaagaaaaacccagctgtgggcgaaaagaaagtcatttactacaaagacattgttgtcgacaaagatgatgctgacgtcatcaatgttgatgaagaagtcactttaatggactggggtaatgtcattattactaaaaagaatgacgatggttctatggttgccaaattgaatttggaaggtgatttcaaaaagaccaagcacaagttgacttggttagctgatactaaagatgtcgtccctgttgatttagttgacttcgaccatttgattaccaaggacagattggaagaagacgaaagtttcgaagatttcttgactcctcaaacagaattccacacggatgccattgctgacttgaatgttaaggatatgaagattggtgatatcatccaattcgaaagaaagggctactacagattggatgctttacccaaggatggtaagccatatgtcttttttaccatcccagatggtaaatctgtcaacaagtatggtgcaaagaaataa

SEQ ID NO: 3694 - DNA, 2127 bp, Artificial Sequence
  Description of Artificial Sequence: Synthetic polynucleotide
atgccatctaccttgactattaatggaaaagccccaattgtggcttatgctgaattgattgctgctcgtattgtgaatgcgttagctcctaactccatagctattaagttggtggacgataagaaagcacctgctgccaagctcgatgatgctactgaagatgtcttcaacaagataactagcaaattcgccgccatcttcgataatggtgataaagagcaagttgctaaatgggttaatttggcccaaaaggaattagttatcaagaactttgctaaattatctcaatctttggaaacattagattctcaattgaacttgagaacctttattcttggcggcttgaagtattctgccgctgatgtagcatgttggggtgctttaagatccaatggtatgtgcggttccatcatcaagaacaaggttgatgttaacgtttctcgttggtacactttgttagaaatggatcccatcttcggcgaagctcacgatttcttgagcaaatctttattggaattaaagaaaagtgctaatgtgggtaagaagaaggaaactcacaaggctaactttgaaattgatttgccagatgccaaaatgggtgaagtcgtcactcgtttcccacctgaaccttctggatacttacatattggacatgccaaagctgccttgttgaaccaatattttgctcaagcttacaagggtaagttgattattagattcgatgacaccaacccatctaaggaaaaggaagaattccaagactctattttggaagatttggatttattaggaatcaagggtgatagaataacctactcttctgactacttccaagaaatgtacgactactgtgttcaaatgatcaaggatggtaaagcttactgtgacgacactccaactgaaaagatgagagaagaacgtatggatggtgttgcttctgccagaagagatcgttctgttgaagagaacttaagaatttttaccgaagaaatgaaaaacggtactgaagaaggtttgaagaactgtgttcgtgccaagatcgattacaaggctttgaacaagactttgagagatcctgtcatttacagatgtaatttgacccctcaccacagaaccggatctacttggaagatctacccaacttatgatttctgtgtcccaattgttgatgctattgaaggtgttacccacgctttacgtaccattgaatatagagaccgtaacgctcaatatgattggatgttacaagctttgcgtttgagaaaagtccatatttgggatttcgctcgtatcaatttcgttagaaccttgttgtctaagagaaagttacaatggatggttgacaaggacttggtcggaaattgggacgatccaaggttcccaactgtcaggggtgtgagaagaagaggtatgactgtcgaaggtttgaggaacttcgtcttatcccaaggtccatccagaaatgtcattaacttggaatggaacttgatctgggctttcaacaagaaggtcattgatccaattgctccaagacacactgctatcgtcaacccagttaaaatccacttggaaggctccgaagctccacaagaaccaaagattgaaatgaaaccaaaacacaagaaaaacccagctgtgggcgaaaagaaagtcatttactacaaagacattgttgtcgacaaagatgatgctgacgtcatcaatgttgatgaagaagtcactttaatggactggggtaatgtcattattactaaaaagaatgacgatggttctatggttgccaaattgaatttggaaggtgatttcaaaaagaccaagcacaagttgacttggttagctgatactaaagatgtcgtccctgttgatttagttgacttcgaccatttgattaccaaggacagattggaagaagacgaaagtttcgaagatttcttgactcctcaaacagaattccacacggatgccattgctgacttgaatgttaaggatatgaagattggtgatatcatccaattcgaaagaaagggctactacagattggatgctttacccaaggatggtaagccatatgtcttttttaccatcccagatggtaaatctgtcaacaagtatggtgcaaagaaatga

SEQ ID NO: 3695 - DNA, 1677 bp, Saccharomyces cerevisiae
atgtctgatttagatgaggatttattagccttggctggtgccgatgaatccgaagaagaagatcaagttttgacaactacatctgccaaaagggcaaaaaacaacgaccaatctctttccaagaaaaggagaattgaagtcggcagtgtagaggatgatgatgaggaggacgattataacccttactctgtaggaaatgcagactacggttccgaagaagaagaagaagctaatccttttcccttggaaggaaagtacaaggatgagagcgacagagagcacctggaatccttacctgaaatggaacgtgagactctattatttgaaagatctcaaatcatgcagaagtaccaggagaggaaactttttagagcacgtggaagagatatgaaggaacaacaacagagagccaagaacgacgaagattccagaaagaccagagcttccactagatcaacccatgctactgggcattctgatatcaaggcttcaaaactttcgcaattaaagaaacaaagagcgaggaaaaaccgtcactacagcgataatgaagacgaagacgatgaggaagattacagggaagaagactacaaggacgatgaagggagtgaatacggggatgatgaagaatacaatccttttgatagaagggatacatacgacaaaagagaagaagtggagtgggctgaagaggaggacgagcaagacagagagcctgagatttctgatttcaacaaactaaggatcggtcgttcatttgtcgcaaaattttgtttttatcccgggtttgaagatgcagtcaaaggttgttatgggagagtcaatgttggcacagataaacgtaccggcaaaacttcttaccgtatggtgagaattgagagagttttcttgcaaaaaccttacaatatgggtaagttctatactaaccagtatttcggtgttacccaaggtaaagacagaaaggtttttcaaatgaattattttagtgatggtttgtttgccgaagacgaataccaaaggtatctcagggcattggataattcgcaaatgattaaaccttctttacattctttgagtaacaaaacgaaagaggttatggattttgtcaatacaccattgactgataaaactacagatgaggttgttcgccataggatgcaattcaataaaaaactatctggtacgaatgcagtcttggagaaaactgtattgagagaaaaattgcaatatgccaaggagactaataatgaaaaggacattgcaaaatactctgctcagttaagaaactttgagaaacgaatgtctgtatacgagaagcatcatgaaaatgaccaatctgacattaaaaaactaggcgagttgacctctaagaatagaaaattgaatatgagtaacatcagaaatgcagagcatgtgaaaaaagaagacagtaataactttgattcaaagagcgatcctttcagcaggctaaaaaccaggaccaaagtttactatcaggagatacaaaaggaagaaaacgcaaaagctaaagaaattgcacaacaagagaagctacaagaagataaagatgctaaagataagcgtgagaaagagctacttgtggcacaattcaggcgccttggtgggttggagcgcatggttggtgaattggatatcaaatttgaccttaagttttag

SEQ ID NO: 3696 - DNA, 1677 bp, Artificial Sequence
  Description of Artificial Sequence: Synthetic polynucleotide
atgtctgatttagatgaggatttattagccttggctggtgccgatgaatccgaagaagaagatcaagttttgacaactacatctgccaaaagggcaaaaaacaacgaccaatctctttccaagaaaaggagaattgaagtcggcagtgtagaggatgatgatgaggaggacgattataacccttactctgtaggaaatgcagactacggttccgaagaagaagaagaagctaatccttttcccttggaaggaaagtacaaggatgagagcgacagagagcacttggaatccttacctgaaatggaacgtgagactttattatttgaaagatctcaaatcatgcagaagtaccaggagaggaaactttttagagcacgtggaagagatatgaaggaacaacaacagagagccaagaacgacgaagattccagaaagaccagagcttccactagatctacccatgctactgggcattctgatatcaaggcttccaaactttctcaattaaagaaacaaagagcgaggaaaaaccgtcactacagcgataatgaagacgaagacgatgaggaagattacagggaagaagactacaaggacgatgaagggagtgaatacggggatgatgaagaatacaatccttttgatagaagggatacatacgacaaaagagaagaagtggagtgggctgaagaggaggacgagcaagacagagagcctgagatttctgatttcaacaaattgaggatcggtcgttcttttgtcgcaaaattttgtttttatcccgggtttgaagatgcagtcaaaggttgttatgggagagtcaatgttggcacagataaacgtaccggcaaaacttcttaccgtatggtgagaattgagagagttttcttgcaaaaaccttacaatatgggtaagttctatactaaccagtatttcggtgttacccaaggtaaagacagaaaggtttttcaaatgaattattttagtgatggtttgtttgccgaagacgaataccaaaggtatctcagggcattggataattctcaaatgattaaaccttctttacattctttgagtaacaaaacgaaagaggttatggattttgtcaatacaccattgactgataaaactacagatgaggttgttcgccataggatgcaattcaataaaaaattatctggtacgaatgcagtcttggagaaaactgtattgagagaaaaattgcaatatgccaaggagactaataatgaaaaggacattgcaaaatactctgctcagttaagaaactttgagaaaagaatgtctgtatacgagaagcatcatgaaaatgaccaatctgacattaaaaaattgggcgagttgacctctaagaatagaaaattgaatatgagtaacatcagaaatgcagagcatgtgaaaaaagaagacagtaataactttgattctaagagcgatcctttcagcaggttgaaaaccaggaccaaagtttactatcaggagatacaaaaggaagaaaacgcaaaagctaaagaaattgcacaacaagagaagttacaagaagataaagatgctaaagataagcgtgagaaagagttgcttgtggcacaattcaggcgccttggtgggttggagcgcatggttggtgaattggatatcaaatttgaccttaagttttga

SEQ ID NO: 3697 - DNA, 1203 bp, Saccharomyces cerevisiae
atggtttcgtgccaaggaacaaggccatgcatagtaaaccttctcactatgccaagtgaggataaattgggtgaagagatatcaacgagggtgattaatgagtattcaaaactaaaatctgcctgcagaccaataattaggccttcaggtatcagagagtggacaatattggcaggtgttgcagctattaacagagatggcggtgcgaataagatagagatactttccatagctactggtgtgaaggctttgccagattcagaactacaaagaagtgaggggaagattctgcatgactgtcatgcagaaatactggcattacgaggtgctaatacagttttattaaaccgtattcaaaactataatccatcaagtggtgataaattcattcaacataatgacgagatacctgccagattcaatttaaaggaaaactgggagttggcattgtacatctcgagattgccctgtggtgatgccagcatgagtttcctgaatgataattgcaaaaatgatgatttcatcaaaatagaagatagcgacgaatttcaatacgtcgaccgtagtgtgaaaacaatattgaggggacgcttgaatttcaatagaagaaatgtcgttaggactaaaccaggaagatatgattccaatatcactttatctaaatcctgttctgataaattattaatgaaacaacggtcgtcggtactgaattgtttaaattatgaactctttgaaaaacctgtatttttaaagtacattgtgattcctaatttagaagatgaaacgaaacatcatctagagcaatcatttcacactcgtctaccgaatctagataatgaaattaaattcctgaattgcctcaaaccattttatgatgataaattggatgaggaggatgttcctggtctaatgtgtagtgtcaagctctttatggatgactttagcaccgaagaagcgattcttaatggcgtgaggaatggattttataccaaatcatcgaaaccactgaggaaacactgtcaatcgcaagtaagccggtttgcacaatgggaactattcaaaaaaataagaccagagtatgaaggaataagctatttggaatttaaatctcgtcaaaaaaagagaagccagttaattatcgcaataaagaacattttatctcccgatggttggatacccaccagaacggatgatgtgaagtaa

SEQ ID NO: 3698 - DNA, 1203 bp, Artificial Sequence
  Description of Artificial Sequence: Synthetic polynucleotide
atggtttcttgccaaggaacaaggccatgcatagtaaaccttctcactatgccaagtgaggataaattgggtgaagagatatctacgagggtgattaatgagtattctaaattgaaatctgcctgcagaccaataattaggccttctggtatcagagagtggacaatattggcaggtgttgcagctattaacagagatggcggtgcgaataagatagagatactttccatagctactggtgtgaaggctttgccagattctgaattacaaagaagtgaggggaagattttgcatgactgtcatgcagaaatattggcattaagaggtgctaatacagttttattaaaccgtattcaaaactataatccatctagtggtgataaattcattcaacataatgacgagatacctgccagattcaatttaaaggaaaactgggagttggcattgtacatctccagattgccctgtggtgatgccagcatgagtttcttgaatgataattgcaaaaatgatgatttcatcaaaatagaagatagcgacgaatttcaatacgtcgaccgtagtgtgaaaacaatattgaggggacgcttgaatttcaatagaagaaatgtcgttaggactaaaccaggaagatatgattccaatatcactttatctaaatcctgttctgataaattattaatgaaacaaagatcttctgtattgaattgtttaaattatgaactctttgaaaaacctgtatttttaaagtacattgtgattcctaatttagaagatgaaacgaaacatcatttagagcaaagttttcacactcgtttaccgaatttggataatgaaattaaattcttgaattgcctcaaaccattttatgatgataaattggatgaggaggatgttcctggtttgatgtgtagtgtcaagctctttatggatgactttagcaccgaagaagcgattcttaatggcgtgaggaatggattttataccaaaagcagtaaaccattaaggaaacactgtcaatctcaagtaagcagatttgcacaatgggaattattcaaaaaaataagaccagagtatgaaggaataagctatttggaatttaaatctcgtcaaaaaaagagaagccagttaattatcgcaataaagaacattttatctcccgatggttggatacccaccagaacggatgatgtgaagtga

SEQ ID NO: 3699 - DNA, 546 bp, Saccharomyces cerevisiae
atgaatactgaaggtgcttctttaagtgaacaattgctggatgcagctagaagaaacaatctggatcttttggagaccgtatttgatagcttagataatgatcctgagaagattgcaaagctaattaacgaatccaaagaaccactggggaatacagcgttacatttatgttgtaagtatggatcctgggaagttctcgacaagattctcgatcaagacggtgaaatcgaaatagacccacaaaacgacgttgatggcgacactccgttacatgttactgtcagatacagtcaagaggagcctgagcatggaacttttattgctagaaacttaattgaagtgggtgcggatcctagggtgagaaactataacaatcaaaagccagttgatttggttcatggtgatgaactggatgaattaattgaccttttgcagggtgccgagttagcgattgatagtaccaatggatcaggtgataacaatgaggatggggaaatgatagatgatggtccatctgacgatgacgaagaagatgataaaaaatga

SEQ ID NO: 3700 - DNA, 546 bp, Artificial Sequence
  Description of Artificial Sequence: Synthetic polynucleotide
atgaatactgaaggtgcttctttaagtgaacaattgttggatgcagctagaagaaacaatttggatcttttggagaccgtatttgatagcttagataatgatcctgagaagattgcaaagttgattaacgaatccaaagaaccattagggaatacagcgttacatttatgttgtaagtatggatcctgggaagttctcgacaagattctcgatcaagacggtgaaatcgaaatagacccacaaaacgacgttgatggcgacactccgttacatgttactgtcagatacagtcaagaggagcctgagcatggaacttttattgctagaaacttaattgaagtgggtgcggatcctagggtgagaaactataacaatcaaaagccagttgatttggttcatggtgatgaattagatgaattaattgaccttttgcagggtgccgagttagcgattgatagtaccaatggatctggtgataacaatgaggatggggaaatgatagatgatggtccatctgacgatgacgaagaagatgataaaaaatga

SEQ ID NO: 3701 - DNA, 3015 bp, Saccharomyces cerevisiae
atggatattaatgaattgataataggtgctcaatcagctgataaacacactagagaagttgcggaaacgcaattgttacagtggtgtgattccgatgcatctcaagtgtttaaagcgctggcaaacgttgccttacagcacgaagcttctctagaatcgagacagtttgctttattgtcgttaagaaaattgatcaccatgtattggagtccaggatttgaatcataccgttctacatcgaacgtcgaaatagatgttaaagattttatccgagaagtgctactgaaattatgcttaaatgacaatgaaaataccaaaataaaaaatggtgcatcttactgtattgttcagatatctgcggttgattttcctgatcaatggccgcagcttttaacagttatttatgatgctatctctcatcagcattcattaaatgcgatgtctttattgaatgaaatttacgatgatgtcgtatctgaagaaatgttctttgaaggcggaattggcttggcgacaatggagatcgttttcaaagtactcaatacagaaacttctactttgatagccaaaattgctgctttgaagctacttaaagcatgtcttctacaaatgagctcccataatgagtatgatgaggcgtcacgaaaaagttttgtctcccaatgtttagctacttctttacagatattgggacaattgttgactttgaattttggaaacgtagatgttatttctcagttgaaatttaaatccattatatacgagaatttggtttttattaaaaatgatttctctagaaagcatttctcaagtgaattacaaaaacagttcaaaataatggcaatccaagatctggaaaacgttacccatataaatgcaaatgtcgaaactactgaaagtgaaccccttttagaaacagttcatgattgttctatttatattgtagaatttttgactagtgtttgcactttgcaatttagtgttgaagagatgaacaaaattataacatctttaaccattctttgtcagctaagttctgagacaagagagatatggacaagcgatttcaatacatttgtatcgaaggaaacaggcctagcagcatcatataatgttagagatcaagccaatgaattttttacttcattacccaatcctcaactttccctaattttcaaagttgtttccaacgatatagaacacagcacgtgtaattattcaactttagaatctttactatatctcttacagtgtattttgcttaatgatgatgagataactggtgaaaatatcgatcaatctttgcaaattttaataaaaacgttagaaaatatcttagtatcacaagaaataccagaattaatattggcgcgtgcaattttgactattcccagagtactagacaaatttatagatgcattacctgatatcaaacccttgacatctgcattcttggcaaaaagtcttaatttggcgctaaaatctgataaagagctcattaaatccgcaacattaatagcatttacgtactattgttattttgccgaactagattcagtccttggaccagaggtctgctcagaaacccaggaaaaagtaattcgaataatcaaccaggttagtagtgatgccgaagaggacactaatggggctttaatggaagtattaagtcaagtcattagctacaatccgaaagaacctcattcaagaaaggaaattttacaggctgaatttcatcttgtgttcacgatctcatccgaggatccagcaaatgtacaggtcgttgtacaaagtcaagaatgcttggagaaactattggataatatcaatatggataattacaaaaattacattgaattatgtctcccatcatttattaatgtgctagattccaacaatgcaaacaattatagatactcacccctgctatcattagtcttggaattcatcacagtttttttgaagaaaaaacccaacgatggatttttaccagatgaaataaatcaatacctatttgaaccattagcaaaagtattagcgttctctactgaagatgagaccctacagttagccacggaggcattcagctacctgattttcaacacagatacacgagccatggagccaaggttaatggatatcatgaaggttctagaaaggctgctgtctttggaggtatcggattcagccgctatgaacgtcggtccattggtagttgccatattcacaaggttttcaaaggaaatccaaccgttaataggaagaattttggaagccgttgtggtaaggttaattaagacacaaaacatttctactgagcaaaaccttctttctgtattatgcttcttaacgtgtaatgatcctaaacaaacggtggattttttgtctagtttccaaattgacaatactgatgctttgacattggtgatgcgaaaatggatagaagcctttgaagtcattagaggtgaaaaaagaatcaaagaaaatatcgttgctttgagcaaccttttcttcctgaacgacaaaaggctacagaaagtggttgtcaatggtaacttgataccatacgaaggggacctgatcattacaagatcaatggctaagaaaatgccagacaggtatgtacaagttccactttataccaagatcattaaattgtttgtttctgagttaagcttccaaagtaaacaaccgaatccagaacaattgatcacaagcgatattaagcaagaagtggtaaatgctaataaagatgacgacaatgatgattgggaagatgtagatgatgtactcgattacgataagttgaaagaatatattgatgatgatgtcgatgaagaagcagacgacgattcagacgatataacgggactcatggacgtgaaggaatctgttgttcagctactggtaagattctttaaagaggttgcaagcaaagatgtgagtggcttccattgtatttacgagactctatccgacagtgaacgtaaagttctttcagaagcccttttgtag

SEQ ID NO: 3702 - DNA, 3015 bp, Artificial Sequence
  Description of Artificial Sequence: Synthetic polynucleotide
atggatattaatgaattgataataggtgctcaatctgctgataaacacactagagaagttgcggaaacgcaattgttacagtggtgtgattccgatgcatctcaagtgtttaaagcgttggcaaacgttgccttacagcacgaagcttctttggaatctagacagtttgctttattgtctttaagaaaattgatcaccatgtattggagtccaggatttgaatcttaccgttctacaagtaacgtcgaaatagatgttaaagattttatcagagaagtgttgttgaaattatgcttaaatgacaatgaaaataccaaaataaaaaatggtgcatcttactgtattgttcagatatctgcggttgattttcctgatcaatggccgcagcttttaacagttatttatgatgctatctctcatcagcattctttaaatgcgatgtctttattgaatgaaatttacgatgatgtcgtatctgaagaaatgttctttgaaggcggaattggcttggcgacaatggagatcgttttcaaagtactcaatacagaaacttctactttgatagccaaaattgctgctttgaagcttcttaaagcatgtcttttacaaatgagctcccataatgagtatgatgaggcgtctagaaaaagttttgtctcccaatgtttagctacttctttacagatattgggacaattgttgactttgaattttggaaacgtagatgttatttctcagttgaaatttaaatccattatatacgagaatttggtttttattaaaaatgatttctctagaaagcatttctctagtgaattacaaaaacagttcaaaataatggcaatccaagatttggaaaacgttacccatataaatgcaaatgtcgaaactactgaaagtgaaccccttttagaaacagttcatgattgttctatttatattgtagaatttttgactagtgtttgcactttgcaatttagtgttgaagagatgaacaaaattataacatctttaaccattctttgtcagttgagttctgagacaagagagatatggacaagcgatttcaatacatttgtatccaaggaaacaggcttggcagcaagttataatgttagagatcaagccaatgaattttttacttctttacccaatcctcaactttccttgattttcaaagttgtttccaacgatatagaacacagcacgtgtaattattctactttagaatctttattatatctcttacagtgtattttgcttaatgatgatgagataactggtgaaaatatcgatcaatctttgcaaattttaataaaaacgttagaaaatatcttagtatctcaagaaataccagaattaatattggcgcgtgcaattttgactattcccagagtattggacaaatttatagatgcattacctgatatcaaacccttgacatctgcattcttggcaaaaagtcttaatttggcgttgaaatctgataaagagctcattaaatccgcaacattaatagcatttacgtactattgttattttgccgaattagattctgtccttggaccagaggtctgcagtgaaacccaggaaaaagtaattagaataatcaaccaggttagtagtgatgccgaagaggacactaatggggctttaatggaagtattaagtcaagtcattagctacaatccgaaagaacctcattccagaaaggaaattttacaggctgaatttcatcttgtgttcacgatctcttccgaggatccagcaaatgtacaggtcgttgtacaaagtcaagaatgcttggagaaacttttggataatatcaatatggataattacaaaaattacattgaattatgtctcccatcttttattaatgtgttggattccaacaatgcaaacaattatagatactctcccttattatctttagtcttggaattcatcacagtttttttgaagaaaaaacccaacgatggatttttaccagatgaaataaatcaatacttgtttgaaccattagcaaaagtattagcgttctctactgaagatgagaccttgcagttagccacggaggcattcagctacttgattttcaacacagatacaagagccatggagccaaggttaatggatatcatgaaggttttggaaaggttattatctttggaggtatctgattctgccgctatgaacgtcggtccattggtagttgccatattcacaaggttttccaaggaaatccaaccgttaataggaagaattttggaagccgttgtggtaaggttaattaagacacaaaacatttctactgagcaaaaccttctttctgtattatgcttcttaacgtgtaatgatcctaaacaaacggtggattttttgtctagtttccaaattgacaatactgatgctttgacattggtgatgagaaaatggatagaagcctttgaagtcattagaggtgaaaaaagaatcaaagaaaatatcgttgctttgagcaaccttttcttcttgaacgacaaaaggttacagaaagtggttgtcaatggtaacttgataccatacgaaggggacttgatcattacaagaagtatggctaagaaaatgccagacaggtatgtacaagttccactttataccaagatcattaaattgtttgtttctgagttaagcttccaaagtaaacaaccgaatccagaacaattgatcacaagcgatattaagcaagaagtggtaaatgctaataaagatgacgacaatgatgattgggaagatgtagatgatgtactcgattacgataagttgaaagaatatattgatgatgatgtcgatgaagaagcagacgacgattctgacgatataacgggactcatggacgtgaaggaatctgttgttcagttattggtaagattctttaaagaggttgcaagcaaagatgtgagtggcttccattgtatttacgagactttatccgacagtgaacgtaaagttctttctgaagcccttttgtga

SEQ ID NO: 3703 - DNA, 753 bp, Saccharomyces cerevisiae
atggacccgattggaataaacaaagtcttggaccatttagcaccctcagagcttatcaaacctgttaagagttgccataataaaccttcagtgttggtgttggatgacaggattgtggatgcggcaaccaaagatctctacgtgaatgggttccaagaagagattcagtatcagaatcctacaccggagaacttgcaacatatgttccaccaaggtattgaaatattggattcggcaaggatgatcaacgtgacacatttagcgctttggaagccttcttcttttaagttggggaatcctgtggactttgctctagatgataactacgatacgttttggcagagcgatggagggcaaccacaccaattggacattatgtttagtaagagaatggacatctgtgtcatggcaatattcttttcgatgattgcggacgagtcctatgctccaagcttagtgaaagtttacgcggggcatagtccttctgatgcgaggttttataagatgcttgaagtgagaaatgtgaatggctgggtggcactaaggtttctagataatagggaggacgaccagctgctgaaatgtcaattcatcaggcttttgtttccagtcaaccatgaaaacggaaaagatacacatctgagaggcataaggctatatgttccatctaatgagccacatcaagatacccatgagtgggcacagaccctcccagaaactaacaatgtcttccaggatgctatattacgttaa

SEQ ID NO: 3704 - DNA, 753 bp, Artificial Sequence
  Description of Artificial Sequence: Synthetic polynucleotide
atggacccgattggaataaacaaagtcttggaccatttagcaccctctgagcttatcaaacctgttaagagttgccataataaaccttctgtgttggtgttggatgacaggattgtggatgcggcaaccaaagatctctacgtgaatgggttccaagaagagattcagtatcagaatcctacaccggagaacttgcaacatatgttccaccaaggtattgaaatattggattctgcaaggatgatcaacgtgacacatttagcgctttggaagccttcttcttttaagttggggaatcctgtggactttgctttagatgataactacgatacgttttggcagagcgatggagggcaaccacaccaattggacattatgtttagtaagagaatggacatctgtgtcatggcaatattcttttccatgattgcggacgagtcctatgctccaagcttagtgaaagtttacgcggggcatagtccttctgatgcgaggttttataagatgcttgaagtgagaaatgtgaatggctgggtggcattaaggtttttggataatagggaggacgaccagttattgaaatgtcaattcatcaggcttttgtttccagtcaaccatgaaaacggaaaagatacacatttaagaggcataaggttatatgttccatctaatgagccacatcaagatacccatgagtgggcacagaccctcccagaaactaacaatgtcttccaggatgctatattacgttga

SEQ ID NO: 3705 - DNA, 2883 bp, Saccharomyces cerevisiae
atgtccgatttggaaaccgtagctaaatttctggccgaatcagttattgcttctaccgctaaaacttcggaaagaaatttgaggcagttggagacgcaagatggattcggtttaactttattgcacgttattgcttccacaaacctgccgttatccaccagattagcaggtgctttgttcttcaaaaatttcatcaagcgcaagtgggtagatgaaaatggtaatcatttgctgccggctaacaacgtagaactgatcaaaaaggaaatcgttcctttaatgatcagtctaccaaataatttgcaggtccaaataggagaggcaatttccagtattgctgactctgattttcctgataggtggcctacacttttgagtgatttagcttccagattgagtaatgatgatatggtgacgaataaaggtgtccttacagtggcacattctatttttaaaagatggagacctttatttagatcagatgaactttttttggagattaaattggttcttgacgtgtttactgctccatttttgaacttattgaaaacggtcgatgaacagataacagcgaatgaaaataacaaggcatcgctaaatattttatttgatgtattgctagtattaattaaactatactacgattttaattgtcaagatataccagagttttttgaggataacattcaagtgggtatgggtatcttccataagtatttgtcatattctaatcctttattggaagaccctgacgaaactgaacatgcgtctgtcctaataaaagtaaagtcctctatccaggagctggttcaattgtacacaacaagatatgaagatgtctttggacctatgatcaatgaattcatacaaataacttggaatcttctgacctcaatttcaaaccaacctaaatacgacatcttagtatccaagtccttgtcatttttgactgcagtaacacgtattccaaaatactttgaaatattcaacaacgaatctgccatgaataatatcacagaacaaatcattctgccaaatgttacactacgtgaggaagatgttgaactttttgaagacgatccaattgaatatatccgtagagatctggaaggttcagataccgacactagaagaagggcatgtactgatttcttgaaggaattgaaggaaaaaaatgaagtgttagtcacaaatatttttttggcgcatatgaaagggttcgttgaccagtacatgagtgatccatccaaaaattggaaatttaaagatctttatatttatctattcactgcattggccattaatgggaatattaccaatgccggtgtttcatccacaaacaacttactaaatgttgtagattttttcaccaaggaaattgccccggaccttacttccaacaatattcctcatattattttgagagtggatgccataaaatatatctacactttcagaaatcagttgaccaaagctcagttgattgaactaatgcccattttggccaccttcttacaaacagatgaatatgttgtctacacgtatgctgccattactattgaaaaaattttgactattagagaatcaaatacgtctcctgcttttatttttcataaggaagatatttcgaatagtacagaaattcttttgaaaaatcttattgcattaatcttgaagcatggcagctcccctgaaaaactagctgaaaacgaatttttaatgagatcaatctttagagttttgcagacgtcagaagattccattcaacctttatttcctcagttgttggcacaatttattgaaattgtaacgataatggcaaagaacccatcaaatccaagatttactcattacacttttgaatctattggtgccatcttgaattacactcaaagacaaaacttaccactacttgtagattctatgatgccaacatttttaacggttttctccgaggatattcaagaattcattccatatgtgttccaaatcatcgcatttgttgttgagcagtctgcaacaattccagaaagtatcaagccgttggcacaacctttattagcaccaaatgtatgggaattgaaaggtaatattcctgccgtgacaaggctactaaagagttttataaagacagattcatcgatcttccccgatctagtccctgttttaggtatttttcaaagattgatcgcatcaaaggcttatgaagttcatgggtttgacttattagagcacatcatgcttctaatcgacatgaaccgcttgagaccatatattaaacaaatcgcagttttattattacaaagattacagaactctaaaacagaaaggtatgttaaaaaattaacggtattttttggtttgatatctaataaattaggctctgattttttgatccactttattgacgaagtgcaagatgggctttttcaacaaatatggggtaattttattattaccacattacctactattggtaacctgctagatcgtaaaattgcattaattggtgttttgaacatggttataaacggccaatttttccaaagcaaatatccaactttgatttcaagcacaatgaattccattatagagacagcatcatcacaaagtattgcaaacttgaaaaacgattatgttgatttagataacttggaggaaatctccacgtttggttctcatttcagtaagttggttagtattagcgaaaaaccattcgatcctttgcctgaaatcgatgtcaataatggtgtgagattatatgttgctgaagcactaaacaaatataatgctatctctgggaatacatttttaaataccattttgcctcaattgacccaagaaaatcaagtaaaattaaatcaattattagttggtaattaa

SEQ ID NO: 3706 - DNA, 2883 bp, Artificial Sequence
  Description of Artificial Sequence: Synthetic polynucleotide
atgtccgatttggaaaccgtagctaaatttttggccgaatctgttattgcttctaccgctaaaacttctgaaagaaatttgaggcagttggagacgcaagatggattcggtttaactttattgcacgttattgcttccacaaacttaccgttatccaccagattagcaggtgctttgttcttcaaaaatttcatcaagcgcaagtgggtagatgaaaatggtaatcatttgttaccggctaacaacgtagaattgatcaaaaaggaaatcgttcctttaatgatcagtttaccaaataatttgcaggtccaaataggagaggcaatttccagtattgctgactctgattttcctgataggtggcctacacttttgagtgatttagcttccagattgagtaatgatgatatggtgacgaataaaggtgtccttacagtggcacattctatttttaaaagatggagacctttatttagaagtgatgaactttttttggagattaaattggttcttgacgtgtttactgctccatttttgaacttattgaaaacggtcgatgaacagataacagcgaatgaaaataacaaggcatctttgaatattttatttgatgtattgttagtattaattaaactttactacgattttaattgtcaagatataccagagttttttgaggataacattcaagtgggtatgggtatcttccataagtatttgagttattctaatcctttattggaagaccctgacgaaactgaacatgcgtctgtcttgataaaagtaaagtcctctatccaggagttagttcaattgtacacaacaagatatgaagatgtctttggacctatgatcaatgaattcatacaaataacttggaatcttttaacctctatttccaaccaacctaaatacgacatcttagtatccaagtccttgagttttttgactgcagtaacacgtattccaaaatactttgaaatattcaacaacgaatctgccatgaataatatcacagaacaaatcattttaccaaatgttacattacgtgaggaagatgttgaactttttgaagacgatccaattgaatatatccgtagagatttggaaggttctgataccgacactagaagaagggcatgtactgatttcttgaaggaattgaaggaaaaaaatgaagtgttagtcacaaatatttttttggcgcatatgaaagggttcgttgaccagtacatgagtgatccatccaaaaattggaaatttaaagatctttatatttatcttttcactgcattggccattaatgggaatattaccaatgccggtgtttcttccacaaacaacttattgaatgttgtagattttttcaccaaggaaattgccccggaccttacttccaacaatattcctcatattattttgagagtggatgccataaaatatatctacactttcagaaatcagttgaccaaagctcagttgattgaattgatgcccattttggccaccttcttacaaacagatgaatatgttgtctacacgtatgctgccattactattgaaaaaattttgactattagagaaagtaatacgtctcctgcttttatttttcataaggaagatatttctaatagtacagaaattcttttgaaaaatcttattgcattaatcttgaagcatggcagctcccctgaaaaattggctgaaaacgaatttttaatgagatctatctttagagttttgcagacgagtgaagattccattcaacctttatttcctcagttgttggcacaatttattgaaattgtaacgataatggcaaagaacccatccaatccaagatttactcattacacttttgaatctattggtgccatcttgaattacactcaaagacaaaacttaccattacttgtagattctatgatgccaacatttttaacggttttctccgaggatattcaagaattcattccatatgtgttccaaatcatcgcatttgttgttgagcagtctgcaacaattccagaaagtatcaagccgttggcacaacctttattagcaccaaatgtatgggaattgaaaggtaatattcctgccgtgacaaggcttttgaagagttttataaagacagattcttctatcttccccgatttggtccctgttttaggtatttttcaaagattgatcgcatccaaggcttatgaagttcatgggtttgacttattagagcacatcatgcttttgatcgacatgaaccgcttgagaccatatattaaacaaatcgcagttttattattacaaagattacagaactctaaaacagaaaggtatgttaaaaaattaacggtattttttggtttgatatctaataaattaggctctgattttttgatccactttattgacgaagtgcaagatgggctttttcaacaaatatggggtaattttattattaccacattacctactattggtaacttattagatcgtaaaattgcattaattggtgttttgaacatggttataaacggccaatttttccaaagcaaatatccaactttgatttctagcacaatgaattccattatagagacagcatcttctcaaagtattgcaaacttgaaaaacgattatgttgatttagataacttggaggaaatctccacgtttggttctcatttcagtaagttggttagtattagcgaaaaaccattcgatcctttgcctgaaatcgatgtcaataatggtgtgagattatatgttgctgaagcattgaacaaatataatgctatctctgggaatacatttttaaataccattttgcctcaattgacccaagaaaatcaagtaaaattaaatcaattattagttggtaattga

SEQ ID NO: 3707 - DNA, 798 bp, Saccharomyces cerevisiae
atgtcagcagacgaaacggatgcgaaatttcatccattagaaacagatctgcaatctgatacagcggctgcaacatcaacggcagcagcttcacgcagtccctctcttcaagagaagcccatagagatgcccttggatatgggaaaagcgccttctccaagaggcgaagatcaacgggttacaaatgaagaagatttgtttttgtttaacagattgcgggcatcacagaatagagttatggactccttggaaccacaacaacagtcacagtatacatcttccagtgtcagtacgatggaaccatctgccgactttactagtttctctgcagtgactactttaccgcctcctcctcatcaacaacaacagcaacaacagcagcagcagcagcagcagcaattggtggttcaagcccagtacacccaaaatcaaccaaacttgcaaagcgatgttttaggaaccgctatagcagagcaaccattttatgttaatgccaagcagtactaccgaattttgaaaaggcgatatgcaagagctaaactagaggaaaagctacgaatatcaagagaacgaaagccatacttacacgaatctcgacataaacatgcgatgcgaagacctcgtggtgaaggtgggaggttcttgacagccgctgagatcaaagccatgaaatcgaagaaaagtggggctagcgatgatcctgacgatagtcatgaggataaaaaaatcactactaaaataatacaagaacagccgcatgctacttccaccgcagctgcagcagacaaaaaaacataa

SEQ ID NO: 3708 - DNA, 798 bp, Artificial Sequence
  Description of Artificial Sequence: Synthetic polynucleotide
atgtctgcagacgaaacggatgcgaaatttcatccattagaaacagatttgcaatctgatacagcggctgcaacaagtacggcagcagctagtcgcagtccctctcttcaagagaagcccatagagatgcccttggatatgggaaaagcgccttctccaagaggcgaagatcaaagagttacaaatgaagaagatttgtttttgtttaacagattgagagcatcccagaatagagttatggactccttggaaccacaacaacagtctcagtatacatcttccagtgtcagtacgatggaaccatctgccgactttactagtttctctgcagtgactactttaccgcctcctcctcatcaacaacaacagcaacaacagcagcagcagcagcagcagcaattggtggttcaagcccagtacacccaaaatcaaccaaacttgcaaagcgatgttttaggaaccgctatagcagagcaaccattttatgttaatgccaagcagtactacagaattttgaaaaggagatatgcaagagctaaattagaggaaaagttaagaatatctagagaaagaaagccatacttacacgaatctagacataaacatgcgatgagaagacctcgtggtgaaggtgggaggttcttgacagccgctgagatcaaagccatgaaatccaagaaaagtggggctagcgatgatcctgacgatagtcatgaggataaaaaaatcactactaaaataatacaagaacagccgcatgctacttccaccgcagctgcagcagacaaaaaaacatga

SEQ ID NO: 3709 - DNA, 2010 bp, Saccharomyces cerevisiae
atgctgcgtgtaacaaccttggcgtcttcgtgtacttcatttcccttacaggtcctcaggaggcggttgaccatatcttctttgacaagcttccaacccacaaccaagacacaggtcgtggtcatcggtgctggacatgcaggctgcgaagctgcagctgcgtcatctaggactggtgcgcatactactctcattacaccatcgttaacagatattggtaagtgttcgtgcaacccctctattggtggagtgggtaagggcatccttgtaaaggaaatcgacgctctcgatgggctgatgggcaaagtaactgatctcgctggagtgcaattcaaaatgctgaacagaagcaagggtcctgctgtgtgggggcccagagcccagatagacagagagttatataagaaatacatgcaaagggaactttccgacaagaaagcacaccccaacttgtctctgctgcagaacaaagttgctgacttgatcttgtatgaccccggatgtggccacaaggtcatcaaaggtgtggttctggatgacggtacccaggttggggcagatcaggtcataatcactacaggtacgtttctcagtgcagaaattcacatcggcgacaagcgtattgcagcaggaagaattggcgagcagccaacatatgggatcagcaatactctacaaaatgaggtgggctttcagttagggcgtttgaaaacaggcactccggctaggctggccaaggaatccattgatttcagcgctctggaggtccagaagggagatgcgttgcctgtccctatgagttttctgaatgaaaccgtgtcagtcgaacccacgaagcaactggattgctttggcacacataccacacctcaaatgcacgactttttgcgcaataacttgcatcaatccattcatattcaggacacgaccatcaaaggcccccgctattgtccctccatcgaagctaagattctaaggtttcctgatagatcttcccataagatatggttggaaccagaaggtttcaactccgacgtcatttatccgaacgggatatccaattctatgcctgaggatgtccagttacaaatgatgaggctcatcccgggcatggcaaacgttgagatcttgcagccggcatacggcgtggaatacgactacgtagacccacggcaattaaagcctagcttggaaacaaaattggtggatggactattcttggccggacaaataaatggtactacaggctacgaggaagccgctgcacaggggatcattgcaggtatcaatgcaggattactatcgcgccaagaacgggagcaattggtcttgaaaaggtccgaagcgtacattggtgtgctcattgacgatctaatcaataatggcgtcatagaaccatatagaatgtttacttccagatcagaattcagaatcagcgtaagagccgataacgcagacttcagactgacgcccattggtgctcaactagggattatatctcctgtccgtttaagtcaatattcaagagacaagcacctatatgatgaaacaatacgggcgcttcaaaatttcaagctaagctctcaaaaatggtctagcttactacaggctaatatcgcgccacaggctgaaaacagatctgcttgggaaatattcagattcaaagatatggatctacataaactctacgagtgcattcccgatttacccattaatttgctggacatcccaatgcatgttgtcaccaaaattaacattcaaggtaaatacgaaccttacattgtcaaacagaaccagtttgtgaaggcatttcaggcagacgaaaatatgctgttgccgcaagattacgattaccgtcagttacccacgctttccactgaatgcaaactactcttgaaccgcgtacagccattgaccataggccaagcaagacggattcaaggtatcactgcggcagccctatttgaactctaccgtgtggcacggaagccaagccaaccagtcatgtaa

SEQ ID NO: 3710 - DNA, 2010 bp, Artificial Sequence
  Description of Artificial Sequence: Synthetic polynucleotide
atgcttcgtgtaacaaccttggcgtcttcttgtacttcttttcccttacaggtcctcaggaggagattgaccatatcttctttgacaagcttccaacccacaaccaagacacaggtcgtggtcatcggtgctggacatgcaggctgcgaagctgcagctgcgtcttctaggactggtgcgcatactactctcattacaccatctttaacagatattggtaagtgtagttgcaacccctctattggtggagtgggtaagggcatccttgtaaaggaaatcgacgctctcgatgggttgatgggcaaagtaactgatctcgctggagtgcaattcaaaatgttgaacagaagcaagggtcctgctgtgtgggggcccagagcccagatagacagagagttatataagaaatacatgcaaagggaactttccgacaagaaagcacaccccaacttgtctttattgcagaacaaagttgctgacttgatcttgtatgaccccggatgtggccacaaggtcatcaaaggtgtggttttggatgacggtacccaggttggggcagatcaggtcataatcactacaggtacgtttctcagtgcagaaattcacatcggcgacaagcgtattgcagcaggaagaattggcgagcagccaacatatgggatcagcaatactttacaaaatgaggtgggctttcagttagggcgtttgaaaacaggcactccggctaggttggccaaggaatccattgatttcagcgctttggaggtccagaagggagatgcgttgcctgtccctatgagttttttgaatgaaaccgtgtctgtcgaacccacgaagcaattggattgctttggcacacataccacacctcaaatgcacgactttttgcgcaataacttgcatcaatccattcatattcaggacacgaccatcaaaggcccccgctattgtccctccatcgaagctaagattttaaggtttcctgatagatcttcccataagatatggttggaaccagaaggtttcaactccgacgtcatttatccgaacgggatatccaattctatgcctgaggatgtccagttacaaatgatgaggctcatcccgggcatggcaaacgttgagatcttgcagccggcatacggcgtggaatacgactacgtagacccaagacaattaaagcctagcttggaaacaaaattggtggatggattattcttggccggacaaataaatggtactacaggctacgaggaagccgctgcacaggggatcattgcaggtatcaatgcaggattattatctcgccaagaaagagagcaattggtcttgaaaaggtccgaagcgtacattggtgtgctcattgacgatttgatcaataatggcgtcatagaaccatatagaatgtttacttccagaagtgaattcagaatcagcgtaagagccgataacgcagacttcagattgacgcccattggtgctcaattagggattatatctcctgtccgtttaagtcaatattctagagacaagcacttgtatgatgaaacaataagagcgcttcaaaatttcaagttgagctctcaaaaatggtctagcttattgcaggctaatatcgcgccacaggctgaaaacagatctgcttgggaaatattcagattcaaagatatggatttgcataaactctacgagtgcattcccgatttacccattaatttgttggacatcccaatgcatgttgtcaccaaaattaacattcaaggtaaatacgaaccttacattgtcaaacagaaccagtttgtgaaggcatttcaggcagacgaaaatatgcttttgccgcaagattacgattaccgtcagttacccacgctttccactgaatgcaaattactcttgaaccgcgtacagccattgaccataggccaagcaagaagaattcaaggtatcactgcggcagccttatttgaactctaccgtgtggcaagaaagccaagccaaccagtcatgtga

SEQ ID NO: 3711 - DNA, 537 bp, Saccharomyces cerevisiae
atgaccttgtggccacatccggggtcatacaagatcaagtcagcaactttgttctgcagcagagacaagttggggtgtgctttcttgtcggaaagttccctttgcatgtatttcttatataactctctgtctatctgggctctgggcccccacacagcaggacccttgcttctgttcagcattttgaattgcactccagcgagatcagttactttgcccatcagcccatcgagagcgtcgatttcctttacaaggatgcccttacccactccaccaatagaggggttgcacgaacacttaccaatatctgttaacgatggtgtaatgagagtagtatgcgcaccagtcctagatgacgcagctgcagcttcgcagcctgcatgtccagcaccgatgaccacgacctgtgtcttggttgtgggttggaagcttgtcaaagaagatatggtcaaccgcctcctgaggacctgtaagggaaatgaagtacacgaagacgccaaggttgttacacgcagcatcgttctttggggcgtttag

SEQ ID NO: 3712 - DNA, 537 bp, Artificial Sequence
  Description of Artificial Sequence: Synthetic polynucleotide
atgaccttgtggccacatccggggtcttacaagatcaagtctgcaactttgttctgcagcagagacaagttggggtgtgctttcttgagtgaaagttccctttgcatgtatttcttatataactctttatctatctgggctttgggcccccacacagcaggacccttgcttttattcagcattttgaattgcactccagcgagatctgttactttgcccatcagcccatctagagcgtccatttcctttacaaggatgcccttacccactccaccaatagaggggttgcacgaacacttaccaatatctgttaacgatggtgtaatgagagtagtatgcgcaccagtcttggatgacgcagctgcagcttctcagcctgcatgtccagcaccgatgaccacgacctgtgtcttggttgtgggttggaagcttgtcaaagaagatatggtcaaccgcctcttgaggacctgtaagggaaatgaagtacacgaagacgccaaggttgttacacgcagcatcgttctttggggcgtttga

SEQ ID NO: 3713 - DNA, 2409 bp, Saccharomyces cerevisiae
atgctcaacattctcgttttaggaaacggtgcaagagaacacgttcttgtcaccaagctggctcagtcacccaccgtgggtaagatctatgtcgctccaggtaatggagggaccgcaaccatggatccttcgcgtgtgataaactgggatattacgccagatgtcgccaattttgctcgtttgcagtcgatggctgtggaacataagatcaacttggtcgttcctggtccagaattacctctagtcaacggcatcacctccgtgttccatagcgttggtattcccgtttttggaccttccgtcaaagccgctcagttggaagcttccaaggctttctccaagagatttatgtcaaaacacaatattccaaccgcgtcttatgatgtcttcactaatccagaagaagccatttcattcttgcaagctcatactgacaaagcttttgtcatcaaggccgacgggatcgctgctgggaaaggtgttattatcccatctagcatcgacgagtccgtccaagctatcaaggacataatggtcaccaagcaattcggtgaagaagcgggcaagcaggttgtgatagaacaattcttggaaggtgatgaaatctctctactcaccattgttgacgggtactctcacttcaatctccccgtcgcacaagatcacaagaggatctttgatggcgacaagggcttgaacaccggtgggatgggtgcctatgcccccgctcctgtggccacaccatctttgttgaagaccatagattcacagattgtgaagcctacgattgatgggatgagacgtgatggtatgccctttgttggtgtgctgttcaccgggatgattttggtgaaggattctaagacaaatcaacttgttcccgaagtgttagaatataatgtcagattcggtgacccagagacacaggctgttttgagtttacttgatgatcaaaccgatttggcgcaagtgtttttggctgctgctgaacatcgtttggattccgtaaacataggaatcgatgacacaagatctgccgttactgtcgtagtggctgcaggtggttatcctgaatcatacgccaaaggtgacaaaattaccttggataccgataaattacctccacatacacaaatcttccaagcaggtaccaaatacgattccgccaccgattctttattgaccaatggtggtagagttctttctgtgacctccactgctcaggacttgagaacagcagtagatacagtatatgaagccgtcaaatgcgtccatttccaaaattcttactacagaaaggacatcgcataccgtgcgttccaaaactcagaatcatcaaaagttgccatcacatacgcagactcaggtgtctctgttgataatggtaacaatctcgtacaaactatcaaagaaatggtcagatccacaagaaggccaggtgcagactctgatattggtggttttggtggtttattcgatttggctcaagcaggtttccgtcaaaacgaagataccttactagtaggtgctacagatggtgtcggtactaaattaatcattgcccaagagaccgggattcataatactgtcggtattgacctggtggccatgaatgttaacgatttggtggtacaaggtgctgagcctctattctttttggactactttgccactggtgctcttgacattcaagttgcctctgattttgtgtccggtgttgctaatggttgtattcaaagtggttgtgctcttgtgggtggtgaaacttcggaaatgcccggtatgtatccacccggccactacgatactaatggtaccgctgttggtgctgtattaagacaagatatcttgcccaagataaatgaaatggccgcaggagatgttcttctgggtctcgcctctagcggtgttcattctaatggtttctctttggttagaaaaattattcaacatgtagcattaccatgggacgctccatgtccatgggatgaatctaagacgttaggtgaaggtattcttgaaccaacaaaaatttacgtcaagcaattattgccatcaattagacaaagactactactaggtttagctcatataacaggtggtggtttagtagagaatatcccaagagctattccagaccacctacaggcccgcgttgatatgtcaacctgggaagtaccccgtgtcttcaaatggtttggtcaagcaggtaatgttccacacgatgacattttaagaaccttcaacatgggtgttggtatggttttgattgtcaagagagaaaacgtcaaggctgtttgtgattcattgactgaagaaggtgaaattatttgggagcttggttctttgcaagaaagaccaaaggatgctcccggttgtgtgattgaaaacggaactaagctttactaa

SEQ ID NO: 3714 - DNA, 2409 bp, Artificial Sequence
  Description of Artificial Sequence: Synthetic polynucleotide
atgctcaacattctcgttttaggaaacggtgcaagagaacacgttcttgtcaccaagttggctcagtctcccaccgtgggtaagatctatgtcgctccaggtaatggagggaccgcaaccatggatccttctcgtgtgataaactgggatattacgccagatgtcgccaattttgctcgtttgcagtccatggctgtggaacataagatcaacttggtcgttcctggtccagaattacctttggtcaacggcatcacctccgtgttccatagcgttggtattcccgtttttggaccttccgtcaaagccgctcagttggaagcttccaaggctttctccaagagatttatgtccaaacacaatattccaaccgcgtcttatgatgtcttcactaatccagaagaagccatttctttcttgcaagctcatactgacaaagcttttgtcatcaaggccgacgggatcgctgctgggaaaggtgttattatcccatctagcatcgacgagtccgtccaagctatcaaggacataatggtcaccaagcaattcggtgaagaagcgggcaagcaggttgtgatagaacaattcttggaaggtgatgaaatctctttactcaccattgttgacgggtactctcacttcaatctccccgtcgcacaagatcacaagaggatctttgatggcgacaagggcttgaacaccggtgggatgggtgcctatgcccccgctcctgtggccacaccatctttgttgaagaccatagattctcagattgtgaagcctacgattgatgggatgagacgtgatggtatgccctttgttggtgtgcttttcaccgggatgattttggtgaaggattctaagacaaatcaacttgttcccgaagtgttagaatataatgtcagattcggtgacccagagacacaggctgttttgagtttacttgatgatcaaaccgatttggcgcaagtgtttttggctgctgctgaacatcgtttggattccgtaaacataggaatcgatgacacaagatctgccgttactgtcgtagtggctgcaggtggttatcctgaatcttacgccaaaggtgacaaaattaccttggataccgataaattacctccacatacacaaatcttccaagcaggtaccaaatacgattccgccaccgattctttattgaccaatggtggtagagttctttctgtgacctccactgctcaggacttgagaacagcagtagatacagtatatgaagccgtcaaatgcgtccatttccaaaattcttactacagaaaggacatcgcataccgtgcgttccaaaactctgaatcttctaaagttgccatcacatacgcagactctggtgtctctgttgataatggtaacaatctcgtacaaactatcaaagaaatggtcagatccacaagaaggccaggtgcagactctgatattggtggttttggtggtttattcgatttggctcaagcaggtttccgtcaaaacgaagataccttattggtaggtgctacagatggtgtcggtactaaattaatcattgcccaagagaccgggattcataatactgtcggtattgacttggtggccatgaatgttaacgatttggtggtacaaggtgctgagcctcttttctttttggactactttgccactggtgctcttgacattcaagttgcctctgattttgtgtccggtgttgctaatggttgtattcaaagtggttgtgctcttgtgggtggtgaaacttctgaaatgcccggtatgtatccacccggccactacgatactaatggtaccgctgttggtgctgtattaagacaagatatcttgcccaagataaatgaaatggccgcaggagatgttcttttgggtctcgcctctagcggtgttcattctaatggtttctctttggttagaaaaattattcaacatgtagcattaccatgggacgctccatgtccatgggatgaatctaagacgttaggtgaaggtattcttgaaccaacaaaaatttacgtcaagcaattattgccatctattagacaaagattattattgggtttagctcatataacaggtggtggtttagtagagaatatcccaagagctattccagaccacttgcaggcccgcgttgatatgtctacctgggaagtaccccgtgtcttcaaatggtttggtcaagcaggtaatgttccacacgatgacattttaagaaccttcaacatgggtgttggtatggttttgattgtcaagagagaaaacgtcaaggctgtttgtgattctttgactgaagaaggtgaaattatttgggagcttggttctttgcaagaaagaccaaaggatgctcccggttgtgtgattgaaaacggaactaagctttactga

SEQ ID NO: 3715 - DNA, 2733 bp, Saccharomyces cerevisiae
atggaccaagaaggccagccattgctttcaaaagattttcagcaggttttactggctactgcatccggaaacaattcatcgtggacagaaagggctgttctcaacaatgaaagtacagatgcagtgaaacacgaacctgcgctgggccaaaatgatgtgtttgatttagatcctttatcctttgataagtgggtaccttttttaagaagggctcttgataaaaatcaattggaccccgtaattgatgaattggaaaattcaattgaggataactttcaaggtctggaattgcaattattacaagattcccaaatgaatgataagctggaaacatctatagacgaaattgcaaacatccaaggtatggtgcaagacactttatccagtgaaatttccaaatttcaaataagattgagtgaatcagctaatgaactaattgtcaagaaacaaatgtatgttaataacaaaaaaatttcactaaaaatttcagaagcaacaattttaatcactaaggttgttagaatcttggaattatccagcaaatgtcaagaattgatcaccgaaagaaagtttttcaaagttttacaaaacttggatagtctggagaaattgtatctacaagaatttaagaattataatttccaatttttaattgaaatttacaattctataccatttttacagaaagtcaccaaggatgagtgtataaatttgataaggaattctctaaatttaaatttagggaagaacttgataaaagtggggcaagaattcgtggcaatttatgagaatgaattacttccgcaatggctcgaaacgagatctaaaatgaagttgacaaatttcaaatttaattcgcctatagagatctccatgagagatgaatcctttctagcaaagctaaacttgggtgaatttttccagttagatgactttcacgattctataatgatttttcaaaacttaaatgagttgagcgtcctctctggagagtttaacaaagaatatgaactgagaaagacaaaactaatgtatccattgatatggaagaagaataaaacagctgcatatcaaatggattcgttattacggggtacaggtactactcctggatcaaccgcgcatgacgtttccacagatgatcctttcacacaaagtctaagtttacactttttgcaggattactttttgaaaattctcggcttcttattatatgatattaatttgaataaagctacagaatttatcctcgttgataataactataattctacaaatgaattttgggatggactcatggacaggttgtcaccatatttgagttatttcatagatgagaagctgaaaacagaagaagacatgattaaattgaaagattttctttgtatttatgttgccattttagaaaatttcaaactgaacatcgaacctttatataaaattttggtttcaattttcgagaaattctgctctgtttccttgagagcttttgacgatgaatttcaaatcttgttaaacgatgatgattttatgcctttatccattaatgacaagacattatatgagaaagttttgaagatttgctggatgaaggagggcgaacacctttccctgccagatccaaccaacggagagccatttgctgtgactttgcctttttctccattatacccaatgacgtgtacacttgctaagaaaacatattctaaaataaccgcatttctttccatattttatcgtcatgagctacacactttgaataatattttggtcaaaacaatggacgatatatttaatgatatcgtcaataaaaaaattcgttctaaacttgaaagtacgtcgagagaagaaattgcacaaatcttagtcaatttagattattttatcatagcagcaaaagaatttagtaacttcatgacaagagagaatattttacaaaacccggatatggaaatacggttatcctcgataaaatatcttgcggaaagcagaaaattggcagaaacaaagttaattgaattaatcgattctaagatatcagatattcttgaaactattgaaattgactggcaaataacggaggtaaggcaagacccggatatctccatcattgatctggcacaatttttagaaatgatgtttgccagcacgctacaaaatttaccatacagcgtccaaacattattgattttccgtgaatttgactccttgacgagacaattcatgggtctattattgcatgacacaccaagtacaattacacatgaaagcataatgaattttgaagttgatgtcaattatttagagagcattattcccagaattttcccctctacaccaggtactatagatagtaatggataccagtcgccaatgaccccttcgacgcctacatttccaaatgccaacggtgttgacgcaccaacattatttgaaaataatatcaaatcgctagaagctacatttatggagttgaagcagtgtatagagttattaaagactcagggaaaagattataatgaaccagaaataagattaagaaaatattcaagaattagacaggaagatgcggctcttttgttgagcaagattcagcacttcgtctcatctgtagaaggagctaacggcgatgacactagcgtaatggatagtagcagcatattcaactctgaatcagcgagtgtcattgactctaatacgagtaggatagccaaattttttaatagacgttaa

SEQ ID NO: 3716 - DNA, 2733 bp, Artificial Sequence
  Description of Artificial Sequence: Synthetic polynucleotide
atggaccaagaaggccagccattgctttctaaagattttcagcaggttttattagctactgcatccggaaacaattcttcttggacagaaagggctgttctcaacaatgaaagtacagatgcagtgaaacacgaacctgcgttgggccaaaatgatgtgtttgatttagatcctttatcctttgataagtgggtaccttttttaagaagggctcttgataaaaatcaattggaccccgtaattgatgaattggaaaattctattgaggataactttcaaggtttggaattgcaattattacaagattcccaaatgaatgataagttggaaacatctatagacgaaattgcaaacatccaaggtatggtgcaagacactttatccagtgaaatttccaaatttcaaataagattgagtgaatctgctaatgaattgattgtcaagaaacaaatgtatgttaataacaaaaaaatttctttgaaaatttctgaagcaacaattttaatcactaaggttgttagaatcttggaattatccagcaaatgtcaagaattgatcaccgaaagaaagtttttcaaagttttacaaaacttggatagtttggagaaattgtatttacaagaatttaagaattataatttccaatttttaattgaaatttacaattctataccatttttacagaaagtcaccaaggatgagtgtataaatttgataaggaattctttgaatttaaatttagggaagaacttgataaaagtggggcaagaattcgtggcaatttatgagaatgaattacttccgcaatggctcgaaacgagatctaaaatgaagttgacaaatttcaaatttaattctcctatagagatctccatgagagatgaatcctttttggcaaagttgaacttgggtgaatttttccagttagatgactttcacgattctataatgatttttcaaaacttaaatgagttgagcgtcctctctggagagtttaacaaagaatatgaattgagaaagacaaaattaatgtatccattgatatggaagaagaataaaacagctgcatatcaaatggattctttattaagaggtacaggtactactcctggatctaccgcgcatgacgtttccacagatgatcctttcacacaaagtttaagtttacactttttgcaggattactttttgaaaattctcggcttcttattatatgatattaatttgaataaagctacagaatttatcctcgttgataataactataattctacaaatgaattttgggatggactcatggacaggttgtctccatatttgagttatttcatagatgagaagttgaaaacagaagaagacatgattaaattgaaagattttctttgtatttatgttgccattttagaaaatttcaaattgaacatcgaacctttatataaaattttggtttctattttcgagaaattctgctctgtttccttgagagcttttgacgatgaatttcaaatcttgttaaacgatgatgattttatgcctttatccattaatgacaagacattatatgagaaagttttgaagatttgctggatgaaggagggcgaacacctttccttgccagatccaaccaacggagagccatttgctgtgactttgcctttttctccattatacccaatgacgtgtacacttgctaagaaaacatattctaaaataaccgcatttctttccatattttatcgtcatgagttgcacactttgaataatattttggtcaaaacaatggacgatatatttaatgatatcgtcaataaaaaaattcgttctaaacttgaaagtacgtccagagaagaaattgcacaaatcttagtcaatttagattattttatcatagcagcaaaagaatttagtaacttcatgacaagagagaatattttacaaaacccggatatggaaataagattatcctccataaaatatcttgcggaaagcagaaaattggcagaaacaaagttaattgaattaatcgattctaagatatctgatattcttgaaactattgaaattgactggcaaataacggaggtaaggcaagacccggatatctccatcattgatttggcacaatttttagaaatgatgtttgccagcacgttacaaaatttaccatacagcgtccaaacattattgattttccgtgaatttgactccttgacgagacaattcatgggtttattattgcatgacacaccaagtacaattacacatgaaagcataatgaattttgaagttgatgtcaattatttagagagcattattcccagaattttcccctctacaccaggtactatagatagtaatggataccagtctccaatgaccccttctacgcctacatttccaaatgccaacggtgttgacgcaccaacattatttgaaaataatatcaaatctttggaagctacatttatggagttgaagcagtgtatagagttattaaagactcagggaaaagattataatgaaccagaaataagattaagaaaatattctagaattagacaggaagatgcggctcttttgttgagcaagattcagcacttcgtcagctctgtagaaggagctaacggcgatgacactagcgtaatggatagtagcagcatattcaactctgaaagtgcgagtgtcattgactctaatacgagtaggatagccaaattttttaatagacgttga

SEQ ID NO: 3717 - DNA, 870 bp, Saccharomyces cerevisiae
atgggtgaaaaacgtaaccgtaatggtaaggatgcaaattcccaaaacaggaagaaatttaaagtatcttccggattcttagaccctggtacgtctggaatatatgccacatgttctagaagacatgaacgtcaagcagcccaagagttgcagcttttattcgaagaaaaatttcaagaactctatggggatatcaaagaaggagaagatgaaagtgaaaatgacgaaaagaaagatctatcaattgaagaccagataaaaaaggaattacaagaattgaaaggtgaagaaacaggcaaagatttatcttcaggggagacaaagaagaaagaccccttagccttcatcgacttgaactgtgagtgcgtgacattttgtaaaacaagaaagccaattgttcccgaagaatttgtgctaagtatcatgaaagacttagcggatcccaaaaatatggttaaacgtactagatatgttcagaaattaacacctattacgtactcttgtaatgcaaaaatggagcaattaatcaagttggccaatttggttattgggccacactttcatgacccttcgaatgttaaaaaaaattataaatttgctgtagaagtgacaagaagaaatttcaatacgattgaaagaatggacatcattaatcaagttgtgaagctggtcaataaagagggttctgagtttaatcatactgtggacttgaagaactatgataaattgattctagtggaatgttttaagagcaatatcggaatgtgtgtagtcgatggggattataaaaccaaatatcgtaaatacaacgttcaacagctttatgaatcgaaattccgaaaggatgaagataagagtgtaaaacaataa

SEQ ID NO: 3718 - DNA, 870 bp, Artificial Sequence
  Description of Artificial Sequence: Synthetic polynucleotide
atgggtgaaaaacgtaaccgtaatggtaaggatgcaaattcccaaaacaggaagaaatttaaagtatcttccggattcttagaccctggtacgtctggaatatatgccacatgttctagaagacatgaacgtcaagcagcccaagagttgcagcttttattcgaagaaaaatttcaagaactctatggggatatcaaagaaggagaagatgaaagtgaaaatgacgaaaagaaagatttatccattgaagaccagataaaaaaggaattacaagaattgaaaggtgaagaaacaggcaaagatttatcttctggggagacaaagaagaaagaccccttagccttcatcgacttgaactgtgagtgcgtgacattttgtaaaacaagaaagccaattgttcccgaagaatttgtgttgagtatcatgaaagacttagcggatcccaaaaatatggttaaacgtactagatatgttcagaaattaacacctattacgtactcttgtaatgcaaaaatggagcaattaatcaagttggccaatttggttattgggccacactttcatgacccttccaatgttaaaaaaaattataaatttgctgtagaagtgacaagaagaaatttcaatacgattgaaagaatggacatcattaatcaagttgtgaagttggtcaataaagagggttctgagtttaatcatactgtggacttgaagaactatgataaattgattttggtggaatgttttaagagcaatatcggaatgtgtgtagtcgatggggattataaaaccaaatatcgtaaatacaacgttcaacagctttatgaaagtaaattcagaaaggatgaagataagagtgtaaaacaatga

SEQ ID NO: 3719 - DNA, 573 bp, Saccharomyces cerevisiae
atgagtgaacaggagccttacgaatgggctaaacacctattggacaccaagtatatcgaaaaatacaacattcagaactcaaacacattaccttcaccaccaggatttgaaggtaattcctctaaaggaaatgttacaagaaaacaacaagatgctacatctcaaactacttctttggcacaaaaaaaccaaataacagtattacaagtacagaaggcatggcaaattgcgttacaaccagccaaatctattccgatgaatatttttatgtcgtatatgtccggtacatccttacaaatcattcctataatgactgccctcatgctactctctggacccattaaagcaatattttcaacaaggagtgcattcaaaccagtgttgggtaataaagcaacacaaagtcaagtgcaaactgctatgttcatgtatatcgtattccaaggcgtcttaatgtacattggatacaggaaactaaattcaatgggtctcattcctaacgctaagggtgattggctaccctgggaacgaattgctcattataataatggattacaatggttttccgattga

SEQ ID NO: 3720 - DNA, 573 bp, Artificial Sequence
  Description of Artificial Sequence: Synthetic polynucleotide
atgagtgaacaggagccttacgaatgggctaaacacttattggacaccaagtatatcgaaaaatacaacattcagaactccaacacattaccttctccaccaggatttgaaggtaattcctctaaaggaaatgttacaagaaaacaacaagatgctacatctcaaactacttctttggcacaaaaaaaccaaataacagtattacaagtacagaaggcatggcaaattgcgttacaaccagccaaatctattccgatgaatatttttatgtcttatatgtccggtacatccttacaaatcattcctataatgactgccctcatgttgctctctggacccattaaagcaatattttctacaaggagtgcattcaaaccagtgttgggtaataaagcaacacaaagtcaagtgcaaactgctatgttcatgtatatcgtattccaaggcgtcttaatgtacattggatacaggaaattgaattctatgggtctcattcctaacgctaagggtgattggttgccctgggaaagaattgctcattataataatggattacaatggttttccgattga

SEQ ID NO: 3721 - DNA, 444 bp, Saccharomyces cerevisiae
atgggaattattacactatccggcaatgttctacatttattgaaagcctacccaaaaaagggccttgaagaggtttctcaaccagagcctaatacagcaaatgattcctcgactgaatataaaggaaaaagcaaggatgattttcaaatggtcgaaaaatccaatacagatgagagatacaattttacaagaacgaaaaaatggtttttattgatgacctcagaatattacaaactaatggaaaacagacttttaatgttttgcattatcgcttgctcttttatttgtgctatccaatttcttttctttataatttattggaccaacattgttccacggaagacgcaaagggcaataactaacctaaattacgattatttaacagcccatctaaaagagcaatgcgttccatatgcgaaaattcttgaccaatgtattctctag

SEQ ID NO: 3722 - DNA, 444 bp, Artificial Sequence
  Description of Artificial Sequence: Synthetic polynucleotide
atgggaattattacattatccggcaatgttttgcatttattgaaagcctacccaaaaaagggccttgaagaggtttctcaaccagagcctaatacagcaaatgattccagcactgaatataaaggaaaaagcaaggatgattttcaaatggtcgaaaaatccaatacagatgagagatacaattttacaagaacgaaaaaatggtttttattgatgaccagtgaatattacaaattaatggaaaacagacttttaatgttttgcattatcgcttgctcttttatttgtgctatccaatttcttttctttataatttattggaccaacattgttccaagaaagacgcaaagggcaataactaacttgaattacgattatttaacagcccatttgaaagagcaatgcgttccatatgcgaaaattcttgaccaatgtattctctga

SEQ ID NO: 3723 - DNA, 2457 bp, Saccharomyces cerevisiae
atgtcactatggccctttggagagacgctgagtcattccggaattgattcgatacttgaagagtactatctaatttttcgtagtttggagggaaatgagacctcttcaactgacgacaagaagaatgagccttctatggagtcagagtccgaatttggtaccgagtctcgggataggagtgaccttaaccagtcatttattgataggatcttgttggaaacagctttgctggatgaactgaatggagcagccaacgacagactcgtcgacttcatttgcttgggatatttctatgacgaccgttcccagcaggtccgccacatggactacctagtggacatgttgatggcttacctgaaggacatagaccgcactggttatagaaccccatttcttttagagaattcattccatcaaacaggtgaatatgaagatcaggacgatgaagacccaatgctgtatgtcaacattatttccagtattttttgttcgaaaagtgcgcccatagtggaggcactcgtgcaaaataccccatttttgtcctctctgttcgaggttttccagtttgaaaatattgaggcagaaaattgtcctatcttggctgttttccttaagattaacgaaactcttctgtttgaacagacatctagctatttggaatttttcaaatcgcaaccgaacattgtggacaagttcttatatcatattgaagtctcacccttggttgaatttctcattaaaatcatgctgactgatcaagttgaatcacctacgaacattattgacttcttgtatcaccaggatctgatacctaagtgtttgaatctcttggaaaatagcaaatactcacctggtattcaaaacagtagcggagagcttctaaaagcactgatcagcatttccaccaattttaaactggatactttgtggatcggacctaaccgattgacaagacagcttgcctctccgcaatatgtcgaccaacttattaatataatcttatttcaaagaggccatgcaatgggagttgccgtatctattataattgagttgatcaggaagaataattccgactatgacgaagtagatttgttaagtaccaccatagtagacaatccgccttctcaaagagatccagtctatttgggccatttgttatatgagctcactatgcatatggaagatttttatgcattactaattaaacttgaaaatgatgatgacgatgatcatgacactgcttcaaaagctcttccatctgttaagcatcacctactagaaaaccaattgcatgaatcattcaggcctttgggctttgaaagagtcaagattacagaattgatatcggaaatgttacactgttcaaatatgggattgatgaattcaaaaagaggcgaaaaaatagcacgtaccagagataaatgcagggacactcttgatcaaaactcactagagaaagccatgaaaaatttaaatataaatgataatactattacttccaatacattagaagataaatgtaataataatgatagtaatgacagtaatgacaaccaaaaacaaaaaaaaaatattaaaaaaaagtttcatgataatgaattgtattctacttttgatacatctgatgacaatattgatgatgatgatgatatgagttttgaaattccttacgtcagtgaaacgcaaaatttgaaaatacgtaaaaaccctaccattggagatttattcaaaattaaacttcatgaccttgggttttttccaaagtttctacaattattcttaagatatccttggaataacttttggcacaacattgtatttgatattattcagcagatattcaatggtcgaatggatttttcttataactcatttttggtctattctttgtttgatttcaaaaagtctacaagatttatcccaaaacctttgtacggcagcaaccaaaagttacctgttaaagacttccatattatctctgatttcattttacaaggccacaaggattcgtttgaattttacgaaaaagagaaaacaaatttaggttatatgggtcaattagtattaattgccgaagaaattgcgaagtattccaaaatttataagaccgatctaattgctccagatatatatgccttcttacaagatgaagtttggatgtcatattctagtgacatcttgaacgaaacaaggacaatgtgttcaataattcttggtggaggccagttctgtgccgaaagcgatgaaaatactaaccaggactttttggaaaaagctgatatgagtaaaccagctcatccatccacaatggatgagaatgaaattgttcacgaggaggatgttaagttgcatgataaagttgccgagctcatagatgaattgggtcaattaaccgaattagatattcatgataaaattaaagatgttattgttgatcatcattccgacttaaattga

SEQ ID NO: 3724 - DNA, 2457 bp, Artificial Sequence
  Description of Artificial Sequence: Synthetic polynucleotide
atgtctctttggccctttggagagacgttgagtcattccggaattgattctatacttgaagagtactatttgatttttcgtagtttggagggaaatgagacctcttctactgacgacaagaagaatgagccttctatggagagtgagtccgaatttggtaccgagtctagagataggagtgaccttaaccagtcttttattgataggatcttgttggaaacagctttgttggatgaattgaatggagcagccaacgacagactcgtcgacttcatttgcttgggatatttctatgacgaccgttcccagcaggtccgccacatggactacttggtggacatgttgatggcttacttgaaggacatagaccgcactggttatagaaccccatttcttttagagaattctttccatcaaacaggtgaatatgaagatcaggacgatgaagacccaatgctttatgtcaacattatttccagtattttttgttctaaaagtgcgcccatagtggaggcactcgtgcaaaataccccatttttgtcctctttattcgaggttttccagtttgaaaatattgaggcagaaaattgtcctatcttggctgttttccttaagattaacgaaactcttttatttgaacagacatctagctatttggaatttttcaaatctcaaccgaacattgtggacaagttcttatatcatattgaagtctctcccttggttgaatttctcattaaaatcatgttgactgatcaagttgaatctcctacgaacattattgacttcttgtatcaccaggatttgatacctaagtgtttgaatctcttggaaaatagcaaatactctcctggtattcaaaacagtagcggagagcttttgaaagcattaatcagcatttccaccaattttaaattggatactttgtggatcggacctaacagattgacaagacagcttgcctctccgcaatatgtcgaccaacttattaatataatcttatttcaaagaggccatgcaatgggagttgccgtatctattataattgagttgatcaggaagaataattccgactatgacgaagtagatttgttaagtaccaccatagtagacaatccgccttctcaaagagatccagtctatttgggccatttgttatatgagctcactatgcatatggaagatttttatgcattattgattaaacttgaaaatgatgatgacgatgatcatgacactgcttccaaagctcttccatctgttaagcatcacttattggaaaaccaattgcatgaatctttcaggcctttgggctttgaaagagtcaagattacagaattgatatctgaaatgttacactgttctaatatgggattgatgaattctaaaagaggcgaaaaaatagcacgtaccagagataaatgcagggacactcttgatcaaaactctttggagaaagccatgaaaaatttaaatataaatgataatactattacttccaatacattagaagataaatgtaataataatgatagtaatgacagtaatgacaaccaaaaacaaaaaaaaaatattaaaaaaaagtttcatgataatgaattgtattctacttttgatacatctgatgacaatattgatgatgatgatgatatgagttttgaaattccttacgtcagtgaaacgcaaaatttgaaaatacgtaaaaaccctaccattggagatttattcaaaattaaacttcatgaccttgggttttttccaaagtttttgcaattattcttaagatatccttggaataacttttggcacaacattgtatttgatattattcagcagatattcaatggtagaatggatttttcttataactcttttttggtctattctttgtttgatttcaaaaagtctacaagatttatcccaaaacctttgtacggcagcaaccaaaagttacctgttaaagacttccatattatctctgatttcattttacaaggccacaaggattcttttgaattttacgaaaaagagaaaacaaatttaggttatatgggtcaattagtattaattgccgaagaaattgcgaagtattccaaaatttataagaccgatttgattgctccagatatatatgccttcttacaagatgaagtttggatgtcttattctagtgacatcttgaacgaaacaaggacaatgtgttctataattcttggtggaggccagttctgtgccgaaagcgatgaaaatactaaccaggactttttggaaaaagctgatatgagtaaaccagctcatccatccacaatggatgagaatgaaattgttcacgaggaggatgttaagttgcatgataaagttgccgagctcatagatgaattgggtcaattaaccgaattagatattcatgataaaattaaagatgttattgttgatcatcattccgacttaaattga

SEQ ID NO: 3725 - DNA, 1734 bp, Saccharomyces cerevisiae
atgggaaagctgataaagttaatcacaactctgacggtgttggtatcgttgcttcagtactgttgcgaattcaatagtgggagcatatcgtgtgaacgcacgcaaacgctttgccattataccaatccaagagtctggaacacctacttttcaagaaattgtgaattatacaaaaataaagttagtcccggtttcgatatagtggcgcgtaaatatgacacggctgtcaaacctgtcatcgatgacgctacagtaaaagtgaacaaggtcgctatacagcctgcattcaaggtcatccattcacaatgtaagaaatggaactgtggaaagtattaccaattggtccgctccccaatggtcaagactagacgatttttcttcgcaaaatacaatgcttttgtgaaacctaacttagacaaattctttactgcggagtttcgctctcatttgaaggaaagaattttaaagtataaaaatataggccattattactttactatcacttcaagatgcatcaaatccaaatacgactttattgttggtaatacagaggaaaaattaatgggaaagttcaagaataaggacacgcatggcattcatggttctgtcacacgtgagccttcctcggaggacatggttttaaccgtaagtactatggagtctgacgaagaggagctaactacaacaagtactcaaacagtggttgaaacaattactttggaccaggaagaggctagcgctgttgctaatcatgcgcacgacgatgaggcttccacagacgttgaaggctccacagacgtcaatgtcaatgaacaggctctgttgcaagaggattttgacatgtggagtgagactatattgcagaaaacacaagacgtcatacagctatttgaaaaggatgtttccaaatacatcaatggtaaattggttgaggaggccaaccattttaaagccaagtttcaatctttagatgataaatctaagaagttcttctccaagatttcgctagccattaacgatattgaatgtgtggaaggcattgatagtgaaactggcaagaaaattttcttcgataaatctggaagtactgagatttctcagtacataacgagagagttagttcgtgagtacttcaacgagacgcgctcgacgttagacgaactgacaaatgctatggagaaagatttgagcgaaatcactgatgaaattgaaaaaaaagttaatgcaattagagaggaaaacgtcgaggtatttgaagaatggggtgatatcattgtaaatgaatggtccaaaagaatggcttatgtggatgttatcaacgctcacatgggtgcagatgatgacactacgcttgatgaagagaaagcaaagtcttctgttaactggaagaagtttttgaagggcaagaaacagatcatagaatctagagacaagctggctcaccattccgctgacttatcccgtgttaacgcgtttaggcaaaaagtgcaaaagaagatattatcgttcactcaagagagtggtgagtttttgtatattctaagatcgaaagccaacctgcaatttcaggaacgtgaaagaaaggaacgtgaaagaaaagagcgtgaaaaagctgcagcagaagagttccaaaggcagcaggagctattacgacaacaggaagaagaagacgaagaagacgtatcctacacctctacttcgaccatcaccacaaccattaccatgacattgtga

SEQ ID NO: 3726 - DNA, 1734 bp, Artificial Sequence
  Description of Artificial Sequence: Synthetic polynucleotide
atgggaaagttaataaagttaatcacaactttaacggtgttggtatctttgcttcagtactgttgcgaattcaatagtgggagcatatcttgtgaacgcacgcaaacgctttgccattataccaatccaagagtctggaacacctacttttccagaaattgtgaattatacaaaaataaagttagtcccggtttcgatatagtggcgcgtaaatatgacacggctgtcaaacctgtcatcgatgacgctacagtaaaagtgaacaaggtcgctatacagcctgcattcaaggtcatccattctcaatgtaagaaatggaactgtggaaagtattaccaattggtccgctccccaatggtcaagactagaagatttttcttcgcaaaatacaatgcttttgtgaaacctaacttagacaaattctttactgcggagtttcgctctcatttgaaggaaagaattttaaagtataaaaatataggccattattactttactatcacttccagatgcatcaaatccaaatacgactttattgttggtaatacagaggaaaaattaatgggaaagttcaagaataaggacacgcatggcattcatggttctgtcacacgtgagccttcctctgaggacatggttttaaccgtaagtactatggagtctgacgaagaggagttaactacaacaagtactcaaacagtggttgaaacaattactttggaccaggaagaggctagcgctgttgctaatcatgcgcacgacgatgaggcttccacagacgttgaaggctccacagacgtcaatgtcaatgaacaggctttattgcaagaggattttgacatgtggagtgagactatattgcagaaaacacaagacgtcatacagttatttgaaaaggatgtttccaaatacatcaatggtaaattggttgaggaggccaaccattttaaagccaagtttcaatctttagatgataaatctaagaagttcttctccaagatttctttggccattaacgatattgaatgtgtggaaggcattgatagtgaaactggcaagaaaattttcttcgataaatctggaagtactgagatttctcagtacataacgagagagttagttcgtgagtacttcaacgagacgcgctccacgttagacgaattaacaaatgctatggagaaagatttgagcgaaatcactgatgaaattgaaaaaaaagttaatgcaattagagaggaaaacgtcgaggtatttgaagaatggggtgatatcattgtaaatgaatggtccaaaagaatggcttatgtggatgttatcaacgctcacatgggtgcagatgatgacactacgcttgatgaagagaaagcaaagtcttctgttaactggaagaagtttttgaagggcaagaaacagatcatagaatctagagacaagttggctcaccattccgctgacttatcccgtgttaacgcgtttaggcaaaaagtgcaaaagaagatattatctttcactcaagagagtggtgagtttttgtatattttaagaagtaaagccaacttacaatttcaggaacgtgaaagaaaggaacgtgaaagaaaagagcgtgaaaaagctgcagcagaagagttccaaaggcagcaggagttattaagacaacaggaagaagaagacgaagaagacgtatcctacacctctacttctaccatcaccacaaccattaccatgacattgtga

SEQ ID NO: 3727 - DNA, 2877 bp, Saccharomyces cerevisiae
atgtctgaatatatggatgacgtagaccgcgaattcattaactgtttgttcccgagctacttgctgcaacagcctgtggcttatgatttatggattttatatttgcaacatagaaaactctttcacaaactgaagaacactaacttaatcaacgctgatgaaaatcccactggcgttggaatgggcaggacaaagttaactgctttaacaaggaaagaaatctggtctaaattgatgaatttgggtgttctaggcacaatttcgtttgaagctgtcaacgacgattacctgattcaagtctataaatatttctatccagacgttaatgattttactttgagatttggtgttaaagattcaaataaaaattcagtgcgagttatgaaagcttcctcagacatgaggaaaaatgctcaggaactattagaacccgttttatccgaacgtgaaatggcgcttaactctaataccagcctggaaaatgacagaaatgacgatgatgatgacgatgatgatgatgacgatgatgacgatgacgatgacgacgacgacgatgaatccgatctggaaagcttagaaggggaagtggatactgacacggacgataacaacgaaggagatggctctgacaatcacgaggaaggtggagaagaaggaagtagaggagctgatgctgatgtgtccagtgcacagcagcgtgccgaaagggttgcggacccatggatatatcaaagatctagatcagctattaatatagaaacagaatcaaggaatttgtgggatacatctgacaagaacagtggtctacaatactacccccctgatcagtctccaagttcttccttttcttctcctagagtatcgtctggtaacgacaaaaatgacaatgaggcaacaaatgttttgtccaacagtggtagcaaaaagaaaaactcaatgatccctgatatttacaaaatacttgggtactttttaccttctagatggcaagctcaaccaaataacagcttgcagctatctcaagatggtattactcatttacaacctaatcctgattatcactcatacatgacttatgaaagatcaagcgcttcttctgcctctaccagaaatagactgagaacctcttttgagaactctgggaaagtggactttgcagtcacttgggcaaataagtcattgccagacaataagttaactatattctattacgagattaaagttctcagtgtaacgagtacagagagtgctgaaaatagtaacattgttatcggatacaagttagtagagaatgaattaatggaagcgactacaaaaaagagtgtttctcgttcaagcgtggccggttctagtagtagcttaggtggtagtaataacatgagttccaatagagtaccttctacttctttcactatggaaggtactcaaaggcgtgattatatttatgaagggggcgtttcagccatgtctcttaacgtggatggttccataaataagtgtcagaaatacggatttgatcttaatgtatttggctattgcggatttgacggtttgataactaattctacagaacaatctaaggaatatgctaagccttttggtagggatgacgttattggttgtggcataaattttatcgatggctcaatttttttcacgaagaatggtatccatttaggtaacgcattcaccgacttgaatgatctagaattcgtcccatatgtggccttacgacctgggaattctatcaaaacaaattttgggttaaatgaggattttgtatttgacattattggatatcaagataaatggaagagtttggcgtatgagcatatttgtcgtggacgccaaatggacgtttcaattgaagaattcgactctgatgaaagtgaggaagatgaaactgaaaatgggcctgaagaaaataaatcaacaaacgttaatgaagatttgatggatattgatcaagaggatggtgccgctggtaataaggatacaaagaagcttaacgatgagaaggacaacaatctgaagtttcttttgggagaagataataggtttatagatggaaagctagttagaccagacgtgaacaatattaacaacttaagcgtggatgacggttcattgcctaatacattaaacgtgatgataaatgattatttgatccacgaaggattggtggatgttgcaaaggggtttttgaaagatttgcaaaaagatgcggttaatgtcaatgggcaacattctgaaagtaaagatgttatcaggcacaatgaaagacagatcatgaaagaagaacgtatggtaaagataaggcaagaattaagatacttgataaacaaaggtcaaattagcaaatgcatcaattatatcgataacgaaattccagatctgttaaaaaataatctagaattggtatttgagttaaaactagcgaattatctggtgatgattaaaaagagttcatccaaagatgatgacgaaattgaaaatttaattttgaagggtcaagaattatctaatgaatttatctacgatactaaaattccacaatctttgagggataggtttagtggacaattgagtaatgtctctgcattgttagcatattccaatccacttgtggaggcaccaaaggagatatcaggatatttgagtgacgaatacttacaagagagattatttcaagttagtaacaacacaatactaacatttttacataaggatagcgaatgcgcattagagaatgtaatatcaaacactagagctatgctttctacattacttgagtataacgcgttcggttcaaccaactcttcagatccaagatattacaaagctattaacttcgacgaagatgtgttgaatttatga

SEQ ID NO: 3728 - DNA, 2877 bp, Artificial Sequence
  Description of Artificial Sequence: Synthetic polynucleotide
atgtctgaatatatggatgacgtagaccgcgaattcattaactgtttgttcccgagctacttgttgcaacagcctgtggcttatgatttatggattttatatttgcaacatagaaaactctttcacaaattgaagaacactaacttaatcaacgctgatgaaaatcccactggcgttggaatgggcaggacaaagttaactgctttaacaaggaaagaaatctggtctaaattgatgaatttgggtgttttaggcacaatttcctttgaagctgtcaacgacgattacttgattcaagtctataaatatttctatccagacgttaatgattttactttgagatttggtgttaaagattctaataaaaattctgtgagagttatgaaagcttccagtgacatgaggaaaaatgctcaggaattattagaacccgttttatccgaacgtgaaatggcgcttaactctaataccagcttggaaaatgacagaaatgacgatgatgatgacgatgatgatgatgacgatgatgacgatgacgatgacgacgacgacgatgaatccgatttggaaagcttagaaggggaagtggatactgacacggacgataacaacgaaggagatggctctgacaatcacgaggaaggtggagaagaaggaagtagaggagctgatgctgatgtgtccagtgcacagcagcgtgccgaaagggttgcggacccatggatatatcaaagatctagatctgctattaatatagaaacagaaagtaggaatttgtgggatacatctgacaagaacagtggtttacaatactacccccctgatcagtctccaagttcttccttttcttctcctagagtatcttctggtaacgacaaaaatgacaatgaggcaacaaatgttttgtccaacagtggtagcaaaaagaaaaactccatgatccctgatatttacaaaatacttgggtactttttaccttctagatggcaagctcaaccaaataacagcttgcagctttctcaagatggtattactcatttacaacctaatcctgattatcactcttacatgacttatgaaagaagcagcgcttcttctgcctctaccagaaatagattgagaacctcttttgagaactctgggaaagtggactttgcagtcacttgggcaaataagtctttgccagacaataagttaactatattctattacgagattaaagttctcagtgtaacgagtacagagagtgctgaaaatagtaacattgttatcggatacaagttagtagagaatgaattaatggaagcgactacaaaaaagagtgtttctcgttccagcgtggccggttctagtagtagcttaggtggtagtaataacatgagttccaatagagtaccttctacttctttcactatggaaggtactcaaaggcgtgattatatttatgaagggggcgtttctgccatgtctcttaacgtggatggttccataaataagtgtcagaaatacggatttgatcttaatgtatttggctattgcggatttgacggtttgataactaattctacagaacaatctaaggaatatgctaagccttttggtagggatgacgttattggttgtggcataaattttatcgatggctccatttttttcacgaagaatggtatccatttaggtaacgcattcaccgacttgaatgatttggaattcgtcccatatgtggccttaagacctgggaattctatcaaaacaaattttgggttaaatgaggattttgtatttgacattattggatatcaagataaatggaagagtttggcgtatgagcatatttgtcgtggacgccaaatggacgtttctattgaagaattcgactctgatgaaagtgaggaagatgaaactgaaaatgggcctgaagaaaataaatctacaaacgttaatgaagatttgatggatattgatcaagaggatggtgccgctggtaataaggatacaaagaagcttaacgatgagaaggacaacaatttgaagtttcttttgggagaagataataggtttatagatggaaagttggttagaccagacgtgaacaatattaacaacttaagcgtggatgacggttctttgcctaatacattaaacgtgatgataaatgattatttgatccacgaaggattggtggatgttgcaaaggggtttttgaaagatttgcaaaaagatgcggttaatgtcaatgggcaacattctgaaagtaaagatgttatcaggcacaatgaaagacagatcatgaaagaagaacgtatggtaaagataaggcaagaattaagatacttgataaacaaaggtcaaattagcaaatgcatcaattatatcgataacgaaattccagatttattaaaaaataatttggaattggtatttgagttaaaattagcgaattatttggtgatgattaaaaagagttcttccaaagatgatgacgaaattgaaaatttaattttgaagggtcaagaattatctaatgaatttatctacgatactaaaattccacaatctttgagggataggtttagtggacaattgagtaatgtctctgcattgttagcatattccaatccacttgtggaggcaccaaaggagatatctggatatttgagtgacgaatacttacaagagagattatttcaagttagtaacaacacaatattaacatttttacataaggatagcgaatgcgcattagagaatgtaataagcaacactagagctatgctttctacattacttgagtataacgcgttcggttctaccaactcttctgatccaagatattacaaagctattaacttcgacgaagatgtgttgaatttatga

SEQ ID NO: 3729 - DNA, 261 bp, Saccharomyces cerevisiae
atgacttatgaacaattatacaaagagttccattcctcaaagagcttccagccatttatccacttagacactcaaccaaaatttgcaatttgtggtttaatcgttacattagctgtattatcatctgccctgttcgccgtcggttctaaatcttcatacattaagaaactcttcttctacacaattttaagtgtaattggcagcttgtttgctggcttgaccactgtttttgcttcgaattctttcggtgtctacgtctag

SEQ ID NO: 3730 - DNA, 261 bp, Artificial Sequence
  Description of Artificial Sequence: Synthetic polynucleotide
atgacttatgaacaattatacaaagagttccattcctccaagagcttccagccatttatccacttagacactcaaccaaaatttgcaatttgtggtttaatcgttacattagctgtattatcttctgcccttttcgccgtcggttctaaatcttcctacattaagaaactcttcttctacacaattttaagtgtaattggcagcttgtttgctggcttgaccactgtttttgcttctaattctttcggtgtctacgtctga

SEQ ID NO: 3731 - DNA, 372 bp, Saccharomyces cerevisiae
atgatgggacgaaacggtattcggctagcactgaaaagatctttcagcacttatcagccaccggtagtagagattacgaatataacgaagttatggcccactctacgacctgaagttagggatgaaatcaaggaatacttacgatggaggatgcaagaagattggagacatataccgctggaggagaccaaagcagcgtatttcttatcttatggaccctgtggtggcagatccaagggcaacgaatggaacgtagggtacacgggaatgcggatagtgttcaaccttgttttatttggcggtgcagcgactgcattttataattggaaacaagataaaaagctagaggaacaattaagggatcttgtataa

SEQ ID NO: 3732 - DNA, 372 bp, Artificial Sequence
  Description of Artificial Sequence: Synthetic polynucleotide
atgatgggaagaaacggtattagattagcattgaaaagatctttcagcacttatcagccaccggtagtagagattacgaatataacgaagttatggcccactttaagacctgaagttagggatgaaatcaaggaatacttaagatggaggatgcaagaagattggagacatataccgttagaggagaccaaagcagcgtatttcttatcttatggaccctgtggtggcagatccaagggcaacgaatggaacgtagggtacacgggaatgagaatagtgttcaaccttgttttatttggcggtgcagcgactgcattttataattggaaacaagataaaaagttggaggaacaattaagggatcttgtatga

SEQ ID NO: 3733 - DNA, 1014 bp, Saccharomyces cerevisiae
atgtctgaattgaaaacaggtcatgcaggccataacccttgggcttcagttgccaattccggtccgatctctattttatcctactgtggttcctctattttaatgacggtgactaacaagttcgtcgtcaatttgaaggatttcaacatgaactttgtcatgcttttcgtgcaatctttggtttgtactataaccttgattatcctacgtatactgggctatgcgaagttccgttcattaaacaaaacagacgccaagaactggttccctatttcctttttactggtcttgatgatctacacctcttcgaaggctttacaatacttggctgttccaatttacaccattttcaagaatttgactattatcttgattgcttatggtgaggttctcttttttggtggctctgtcacctccatggaattgtcatcatttttgttgatggtcctttcttctgtcgttgcaacttggggtgaccagcaagctgtggctgccaaggctgcttcattggctgaaggagcagccggtgctgttgcctcctttaacccaggttatttctggatgttcaccaactgtatcacttctgcattattcgttcttataatgagaaagagaattaagttaactaacttcaaggatttcgacactatgttttacaacaatgttttggctctacctattctattgctgttttctttctgtgtggaagattggtcttcagttaatttgaccaataacttttctaacgattcgctaactgctatgatcatcagtggtgttgcatccgtcggtatttcttactgttccggttggtgtgttcgtgttacttcgtctactacatattcgatggtaggggctttgaacaagctgccaattgccttgtctggtttgattttctttgatgctccaagaaacttcttatctattctctccatttttattggtttcctatcaggtattatttatgctgttgccaaacaaaagaagcaacaagcccaacctttacgtaaatga

SEQ ID NO: 3734 - DNA, 1014 bp, Artificial Sequence
  Description of Artificial Sequence: Synthetic polynucleotide
atgtctgaattgaaaacaggtcatgcaggccataacccttgggcttctgttgccaattccggtccgatctctattttatcctactgtggttcctctattttaatgacggtgactaacaagttcgtcgtcaatttgaaggatttcaacatgaactttgtcatgcttttcgtgcaatctttggtttgtactataaccttgattatcttacgtatattgggctatgcgaagttccgttccttaaacaaaacagacgccaagaactggttccctatttcctttttattggtcttgatgatctacacctcttccaaggctttacaatacttggctgttccaatttacaccattttcaagaatttgactattatcttgattgcttatggtgaggttctcttttttggtggctctgtcacctccatggaattgagttcttttttgttgatggtcctttcttctgtcgttgcaacttggggtgaccagcaagctgtggctgccaaggctgcttctttggctgaaggagcagccggtgctgttgcctcctttaacccaggttatttctggatgttcaccaactgtatcacttctgcattattcgttcttataatgagaaagagaattaagttaactaacttcaaggatttcgacactatgttttacaacaatgttttggctttacctattttattgttattttctttctgtgtggaagattggtcttctgttaatttgaccaataacttttctaacgattctttgactgctatgatcatcagtggtgttgcatccgtcggtatttcttactgttccggttggtgtgttcgtgttacttcttctactacatattccatggtaggggctttgaacaagttaccaattgccttgtctggtttgattttctttgatgctccaagaaacttcttatctattctctccatttttattggtttcttatctggtattatttatgctgttgccaaacaaaagaagcaacaagcccaacctttacgtaaatga

SEQ ID NO: 3735 - DNA, 843 bp, Saccharomyces cerevisiae
atgactgttgaatatactgcatccgatttggcaacctatcagaatgaggtgaacgaacaaattgccaagaataaagcacatcttgaatcattgactcatccaggttcgaaagtgacatttccgatcgatcaagatatttctgctacacctcaaaacccgaacttaaaagttttcttttttgatatcgacaactgtctctataaatcatccacgagaattcacgatcttatgcaacaatctatactgaggttctttcaaacacacttgaaactatcacctgaagatgctcacgttttgaataactcttactacaaagagtatggacttgccataaggggacttgtaatgttccacaaagtgaacgcactggaatataaccggcttgtggatgattccttaccactacaagatatcttgaaacctgatataccattaaggaatatgctgttgagattgagacaatcgggaaagattgataaattgtggcttttcaccaacgcttataaaaaccacgcaatacgttgcctgagattgttgggtatagcggatttatttgatggattgacatattgtgactactctaggacagatacgctggtctgcaaaccacatgttaaagcatttgaaaaagccatgaaggaaagcgggttggcaagatacgagaatgcttattttatagatgacagtgggaaaaacatcgagacaggtatcaaattgggcatgaaaacatgtattcatttagttgagaatgaagtaaatgaaattttggggcaaacaccagaaggcgctattgtcattagtgatatattggagttaccacacgttgtgtccgacctgttctaa

SEQ ID NO: 3736 - DNA, 843 bp, Artificial Sequence
  Description of Artificial Sequence: Synthetic polynucleotide
atgactgttgaatatactgcatccgatttggcaacctatcagaatgaggtgaacgaacaaattgccaagaataaagcacatcttgaatctttgactcatccaggttccaaagtgacatttccgatcgatcaagatatttctgctacacctcaaaacccgaacttaaaagttttcttttttgatatcgacaactgtctctataaatcttccacgagaattcacgatcttatgcaacaatctatattaaggttctttcaaacacacttgaaattatctcctgaagatgctcacgttttgaataactcttactacaaagagtatggacttgccataaggggacttgtaatgttccacaaagtgaacgcattggaatataacaggcttgtggatgattccttaccattgcaagatatcttgaaacctgatataccattaaggaatatgcttttgagattgagacaaagtggaaagattgataaattgtggcttttcaccaacgcttataaaaaccacgcaatacgttgcttgagattgttgggtatagcggatttatttgatggattgacatattgtgactactctaggacagatacgttagtctgcaaaccacatgttaaagcatttgaaaaagccatgaaggaaagcgggttggcaagatacgagaatgcttattttatagatgacagtgggaaaaacatcgagacaggtatcaaattgggcatgaaaacatgtattcatttagttgagaatgaagtaaatgaaattttggggcaaacaccagaaggcgctattgtcattagtgatatattggagttaccacacgttgtgtccgaccttttctga

SEQ ID NO: 3737 - DNA, 1254 bp, Saccharomyces cerevisiae
atggatgaagtcttaccattgtttcgcgattctcatattccacagattaaagattatcaattggagttacagaacgatttgactaaaaccaatgaggccttccaaaagaatttgctaaagaactataacaagatcttaagcttgaccgattctgttaatgacttgtcgctcaatttgaaaaatgttgatcaagattttaaatccctgtgtttcaatgatgaaaaatttcagttgaataagttaactccactaccataccaaaccactacccatatatcaccacctcgtgacgaagaaaaagtcagcataccatcgcaaaacattttagtaatttcaaattggaccatctccatcaacaacttctgtaatcgtatagttacttccactactccgtcgcggatattcgacgagctactgttgaatttccacgaattatctttgataccagttccttccaaatttgaagcgcttgtcaaggacaaatgttgtcgactacagaagttcttggtggactctatgaagacattaaacttaactttactacagtgggtaaaactatacaatttactaaacacggagttttcctcgaagtgggacgatgatttactttctatattcaatgaatccctattcgagacactatttaacgataacgttcaagcgttactgatatcaagtgccaacagcaaagatcatcaatatcactccaatcagcaatataaggacgcgattgttgtcgattttgtgaattcgtccacctttagagaccatctcattcggagaaccgtgaaagaaataaacacacatttggatacactctctactttgagagccaagcttaaggagcctgaaactcttcataaattagatatcttccatgataatgatacgaacctcaatgatggcactgtatctccacttgatgatgatgcattgaaacaatatattgatacagcggtattctattcaaaaggtttaaccaatgataccacgttgcaaatttatcaaacggtgcagcctacgattgaaatcctacaaaacttagaattgtataaatgccctcaagagacactgacagatttgagaaataaattgattactcaattgcaagagtttaagactcagatctcatcccgcttaccttcaccactggaaaactcaacgagtgttgtggatgattttataacttcgtacaacaatcacaatctcttgcaattagtcatcgatcaaattactcaattaaggcaacagtaa

SEQ ID NO: 3738 - DNA, 1254 bp, Artificial Sequence
  Description of Artificial Sequence: Synthetic polynucleotide
atggatgaagtcttaccattgtttcgcgattctcatattccacagattaaagattatcaattggagttacagaacgatttgactaaaaccaatgaggccttccaaaagaatttgttgaagaactataacaagatcttaagcttgaccgattctgttaatgacttgtctctcaatttgaaaaatgttgatcaagattttaaatccttatgtttcaatgatgaaaaatttcagttgaataagttaactccattaccataccaaaccactacccatatatctccacctcgtgacgaagaaaaagtcagcataccatctcaaaacattttagtaatttctaattggaccatctccatcaacaacttctgtaatcgtatagttacttccactactccgtctagaatattcgacgagttattattgaatttccacgaattatctttgataccagttccttccaaatttgaagcgcttgtcaaggacaaatgttgtaggttacagaagttcttggtggactctatgaagacattaaacttaactttattgcagtgggtaaaactttacaatttattaaacacggagttttcctccaagtgggacgatgatttactttctatattcaatgaatcccttttcgagacattatttaacgataacgttcaagcgttattgatatctagtgccaacagcaaagatcatcaatatcactccaatcagcaatataaggacgcgattgttgtcgattttgtgaattcttccacctttagagaccatctcattagaagaaccgtgaaagaaataaacacacatttggatacactctctactttgagagccaagcttaaggagcctgaaactcttcataaattagatatcttccatgataatgatacgaacctcaatgatggcactgtatctccacttgatgatgatgcattgaaacaatatattgatacagcggtattctattctaaaggtttaaccaatgataccacgttgcaaatttatcaaacggtgcagcctacgattgaaatcttgcaaaacttagaattgtataaatgccctcaagagacattaacagatttgagaaataaattgattactcaattgcaagagtttaagactcagatctcttcccgcttaccttctccattggaaaactccacgagtgttgtggatgattttataacttcttacaacaatcacaatctcttgcaattagtcatcgatcaaattactcaattaaggcaacagtga

SEQ ID NO: 3739 - DNA, 528 bp, Saccharomyces cerevisiae
atgtcgacggataccatgtatttcaacagctccaggctgttgccatcggctggcaggaacaagacaaataatctaatcaaacaaaaaactagaaataatcgtgcgaggggaaatgctgctaagaacgccaataataacaactatatcacagatataccacctcctcaaactcttcctaacggtcagaaacctaacttcggccattcttccaacaagaaaccatcatttaatcaaaagaagcactctccaccttcttccccttcctctacaactactttaggtaaaaaaaacagacagaataataaagaaacgccacgacagaacaacaaagatgatactcgtttactgagtcagaacctaaagaatctgcttctgaaccagaaacaatccccgcatggctctcaagggataataccaatgggttgtaatggcagtgccaaaaaactcagtcactcttatgcaggctccactttcgccactaatggtccaagggaggctaaaaacttgcccaaaccaagttttttataa

SEQ ID NO: 3740 - DNA, 528 bp, Artificial Sequence
  Description of Artificial Sequence: Synthetic polynucleotide
atgtctacggataccatgtatttcaacagctccaggttattgccatctgctggcaggaacaagacaaataatttgatcaaacaaaaaactagaaataatcgtgcgaggggaaatgctgctaagaacgccaataataacaactatatcacagatataccacctcctcaaactcttcctaacggtcagaaacctaacttcggccattcttccaacaagaaaccatcttttaatcaaaagaagcactctccaccttcttccccttcctctacaactactttaggtaaaaaaaacagacagaataataaagaaacgccaagacagaacaacaaagatgatactcgtttattaagtcagaacttgaagaatttacttttgaaccagaaacaatccccgcatggctctcaagggataataccaatgggttgtaatggcagtgccaaaaaactcagtcactcttatgcaggctccactttcgccactaatggtccaagggaggctaaaaacttgcccaaaccaagttttttatga

SEQ ID NO: 3741 - DNA, 867 bp, Saccharomyces cerevisiae
atgagcagagctattactagagcacaattggacaaacttgtgcgtagcattaccaagttctaccctcaaaagtacgcagacaagagctgggacaatacgggtcttctcatcgattgttccactgcacaagtcaccactgccgatgcaaacgctaaaacaaaggtccttttgactgtagacctcacgaagtcagttgctcaagaagctgtggatgctaactgcaacgtaattgttgcttaccatccttttattttcccaagctggaacagattaagcccacatacaaacccacaacacgagacagctataaagctaatccagtacggaatatccgtatactgccctcacactgccgtagatgccgctcgtggcggtgtaaatgactggttggttaggggtttgaacaacggagagaacgtcgcaaagtcttatgccttggaaactgtaagtggcgaaactgacgacttgattggctacggtagattcgtagaattcaataaagacatctctttggagcaaattgtcaaaaatgtcaagcgtgttttacgggttccctatgtacaagtagcatctcttgctgctccatccgcatggaatcaactcaaaatcaaaaaagtcgctgtctgtgccgggagcggttctggcgtgtttaagcaactaaaagaggacgtagacctttactatacgggagaaatgtcacatcatgaagtactgaagtggaaagaaatgggcaagaccgttattgtttgcaaccactcaaatactgagcgtggattccttcaagacgttatgaagggcttgttgcaagatgagggccacgaagtagtcgtaagcaaaatggattgcgatcctttgactgttgcatag

SEQ ID NO: 3742 - DNA, 867 bp, Artificial Sequence
  Description of Artificial Sequence: Synthetic polynucleotide
atgagcagagctattactagagcacaattggacaaacttgtgcgtagcattaccaagttctaccctcaaaagtacgcagacaagagctgggacaatacgggtcttctcatcgattgttccactgcacaagtcaccactgccgatgcaaacgctaaaacaaaggtccttttgactgtagacctcacgaagtctgttgctcaagaagctgtggatgctaactgcaacgtaattgttgcttaccatccttttattttcccaagctggaacagattaagcccacatacaaacccacaacacgagacagctataaagttaatccagtacggaatatccgtatactgccctcacactgccgtagatgccgctcgtggcggtgtaaatgactggttggttaggggtttgaacaacggagagaacgtcgcaaagtcttatgccttggaaactgtaagtggcgaaactgacgacttgattggctacggtagattcgtagaattcaataaagacatctctttggagcaaattgtcaaaaatgtcaagcgtgttttaagagttccctatgtacaagtagcatctcttgctgctccatccgcatggaatcaactcaaaatcaaaaaagtcgctgtctgtgccgggagcggttctggcgtgtttaagcaattgaaagaggacgtagacctttactatacgggagaaatgtcccatcatgaagtattgaagtggaaagaaatgggcaagaccgttattgtttgcaaccactctaatactgagcgtggattccttcaagacgttatgaagggcttgttgcaagatgagggccacgaagtagtcgtaagcaaaatggattgcgatcctttgactgttgcatga

SEQ ID NO: 3743 - DNA, 363 bp, Saccharomyces cerevisiae
atgacaggtgaaagaattgaaaaggtgaaaataaatgacgaatttgcaaaatcacatttcctaacaactcagtggagagaaacaaagcgccaacgacactataagatgcccgttactgaacagggactccgcgagaggatagaatcagccataccgcaagtttaccatatcattgtgacggatctttcgtacggttgtggtcagtcgtttgatattgtggtggtcagcgacttctttcaaggtaaaagcaaactaatgaggagtcgtgcagtgaacaaggctgtgaaagaagagctgcaggagattcatgcctttagctgcaagtgctacactgaggaggaatggtctaagattgtggtatga

SEQ ID NO: 3744 - DNA, 363 bp, Artificial Sequence
  Description of Artificial Sequence: Synthetic polynucleotide
atgacaggtgaaagaattgaaaaggtgaaaataaatgacgaatttgcaaaatctcatttcttaacaactcagtggagagaaacaaagcgccaaagacactataagatgcccgttactgaacagggactccgcgagaggatagaaagtgccataccgcaagtttaccatatcattgtgacggatctttcttacggttgtggtcagtcttttgatattgtggtggtcagcgacttctttcaaggtaaaagcaaattaatgaggagtcgtgcagtgaacaaggctgtgaaagaagagttacaggagattcatgcctttagctgcaagtgctacactgaggaggaatggtctaagattgtggtatga

SEQ ID NO: 3745 - DNA, 1380 bp, Saccharomyces cerevisiae
atgtcatttagattcaacgaagctgtgtttggtgataactctttcaatgaacgaatacgggaaaagttatctacggctttgaactcaccgtctaaaaagaaattagatatcttgaaaagcggaattaaggtacagaaggtggattttcctacaataccacagctagaaattctggacctagacattatcacgcagcccaagtctctggccaaggggatttgcaagatttcatgtaaggatgctatgttgcggatacagacagtcatagagtcgaatcttttattgattaacgaacaggatacacccagctttaccatgccccagctcatcaataatggatcgttcacaattcctataactatgacgttcagttccatcgagctagaagccatcacgaatatttttgtaaagaaccctggaattgggatatcctttaatgacgttgatttggattttaagtttgattgttctgtaaaaattctccaaagcaccattgagagaaggctaaaagagtccatgcatgtagtgttcaaggatgttcttccttctttgatcttcaacacgtcacagaactggttcaccaatcgcggcgagagcaccagtaccatccctggtaaaagagagcatcatcatcaacaaactacaatgtctaggaatgtaatcttggacggatcagattttcaagagctttctccaataaacatgctacgtctttcaagcattgtgtcgtcgaggtcaacactgtcactacattccactgtgatgaattctctttccgctatacctggttgcttggaaagacaaaacttgtacagatttatatcaaggatgccctctttaaacaattactactcttcgcaatcatttccacaaccaaagtcatcaaccgtatcatcaaaacaattggtaaagccattctactgttcccacaatctattacctaaaacagtgttagattccagccagtacgatttggctacgataaccaagattcagtctcgacttttcgataggagtaacagcaacgacgacaatgccaaaccaaggagaagaaagatcaaatgcaaaaagacccgcacaccatcgaacctacaatcacaaggagaacaggctgttgatgatagtactgctattgaaacagttacgtccacaccggtccaaacaccgatacccgagcttgaagaacaatctcccccatatttgaaaacaacagtatcgataagggataaatacgttataccagaaaaaatatcgctaaatttggactccaagaaagatacatctaaaaagaaaccgttttacttcataggtttgaactcgcaagaaccttcaaataactggaaatggggcatggaggatagccccccaccatatcattaa

SEQ ID NO: 3746 - DNA, 1380 bp, Artificial Sequence
  Description of Artificial Sequence: Synthetic polynucleotide
atgagttttagattcaacgaagctgtgtttggtgataactctttcaatgaaagaataagagaaaagttatctacggctttgaactctccgtctaaaaagaaattagatatcttgaaaagcggaattaaggtacagaaggtggattttcctacaataccacagttagaaattttggacttggacattatcacgcagcccaagtctttggccaaggggatttgcaagattagttgtaaggatgctatgttgagaatacagacagtcatagagagcaatcttttattgattaacgaacaggatacacccagctttaccatgccccagctcatcaataatggaagtttcacaattcctataactatgacgttcagttccatcgagttagaagccatcacgaatatttttgtaaagaaccctggaattgggatatcctttaatgacgttgatttggattttaagtttgattgttctgtaaaaattctccaaagcaccattgagagaaggttgaaagagtccatgcatgtagtgttcaaggatgttcttccttctttgatcttcaacacgagccagaactggttcaccaatcgcggcgagagcaccagtaccatccctggtaaaagagagcatcatcatcaacaaactacaatgtctaggaatgtaatcttggacggaagtgattttcaagagctttctccaataaacatgcttcgtctttctagcattgtgtcttccaggtctacattaagtttgcattccactgtgatgaattctctttccgctatacctggttgcttggaaagacaaaacttgtacagatttatatctaggatgccctctttaaacaattactactcttctcaaagttttccacaaccaaagagttctaccgtatcttctaaacaattggtaaagccattctactgttcccacaatttattacctaaaacagtgttagattccagccagtacgatttggctacgataaccaagattcagtctaggcttttcgataggagtaacagcaacgacgacaatgccaaaccaaggagaagaaagatcaaatgcaaaaagacccgcacaccatctaacttacaatctcaaggagaacaggctgttgatgatagtactgctattgaaacagttacgtccacaccggtccaaacaccgatacccgagcttgaagaacaatctcccccatatttgaaaacaacagtatctataagggataaatacgttataccagaaaaaatatctttgaatttggactccaagaaagatacatctaaaaagaaaccgttttacttcataggtttgaactctcaagaaccttccaataactggaaatggggcatggaggatagccccccaccatatcattga

SEQ ID NO: 3747 - DNA, 2418 bp, Saccharomyces cerevisiae
atgaacgtgcctgaaacaagacaatcctccatagtcgtagctataagagtaaggccctttacgtcaatggaaaaaacaagattggtcaatgaagctagtggtgcagaagctaactttcccggtttgggggattcgtcgttaatattacccatgagtaataactccgactccgatatagacatagacgctgaagaaggttctacgcggagcaaaagaaatagcttgctgaggagaaaagtaattagaccggagggtatacgtaaaattgtggattgtgtggatgatagaatgctcatattcgacccagctgatagaaacccattgaacaaagtgagtgatcaggtcctgaactcgatgcgtgcaagggccactaaggccactgcgtcctctatcaataacagcaatgctacgaacaaattttcttcgcaacgtcgaaggcacggtggcgaaatcaagtttgtatttgataaattgtttgatgaaacctcttcccaagcccgtgtatacaaagagaccaccagcccgctcctagattctgttttagatggattcaacagtaccgtatttgcttacggtgctactggttgtggcaagacatatactgtgagtggcacaccttcacagccggggatcatatttctagccatggaggaactattcaataaaattacagacctgaaggacgaaaaagacttcgagatttcactgtcttacttggaaatatacaatgaaagaatcagagaccttttgaaaccagagacaccatctaaaagattggtcattagagaagatacgcagaaccacatcaaagtggcgaatttgtcgtatcaccacccaaatacggtagaagatgtgatggacttagttgtccagggaaacataaacaggactacgtcaccgacggaagcaaacgaagtatcttcacgatctcatgcagtgctgcaaatacacatcatgcagacaaataagcttgtagacttgacctcgcaacatacatttgctacactttcaataatcgatctagctgggagcgaaagagccgccgcaacaagaaaccgtggtataagattacacgaaggtgcgaatataaatagatccctactagcactgggcaattgcattaacgcgttgtgcttgaatgatggcagcagaagctgtcatattccatacagggattccaagttaactaggctgttgaaattttcactgggtggcaattgcaaaacagtcatgattgtttgcatatcgcccagcagttcacattatgatgagacattgaatactttgaaatatgcaaatcgtgctaaagaaataaagaccaaaataatcagaaatcagcagtctttgagtagacacgttggatcttatttgaaaatgattacggaacaaaagcgacaaatcgaagagttacgcgaacgtgaagagaagatgatttctttgaagctaacgaaatacaaactaaacaaagaaaagatccagttagccattaacgagtgcgtcaatcgtgttcagcaaacgtatgcaggagtggaaacgtatcaagtagccaagaccttgaaatcattaatactttgtaaaaggcggtttttgcaaatggtcaagctagaagtggataatttgatactattatttgaacgggaggaaagtacagccgccgagatgcagccggtgattagtaattgccgaatgatcagtggtcagctttataacaaaatacacgagttagaaatgaaatttgatgaaaccgacactctgagttccgtcattcatcaggtacattccattgacttgaacaagttaagagagatggaggactgggatgaaacttacgacctggtgtacttggagtcgtgtttaaatcaaatatcagaattacaaagaaacgaaatcttggttaattcctccataatgacagaaaaattaatgtcagatccgggtttgaactcccgatttaaatttctatcaaagtggctgatgaataggacacctaacattgaatccataattcaagacctggttcatatcgacgaggagtttgaatcttttgccagaacttttatcgccaatcccgatagcaattttacaaacacaaatataaatataataaacacgacggcagctgacttggctgttcccgctgagaccctacaacggcaaaatttttcccaaaaaaaagtaaagtggacgagtcccgaccttagtcccagccctatgattgaaccacaaccggagctagaaccagaactacaccaagatcaagacgccattgcaagtgaagtggacgtaagtatgcaagataccacattcaatgagcaggggccctcgaccccctccgctccgactacagcggttccaagaaggaagatgcgctcctcccttcttactcatcaaagtctactggccactgccaggaaataa

SEQ ID NO: 3748 - DNA, 2418 bp, Artificial Sequence
  Description of Artificial Sequence: Synthetic polynucleotide
atgaacgtgcctgaaacaagacaatcctccatagtcgtagctataagagtaaggccctttacgtctatggaaaaaacaagattggtcaatgaagctagtggtgcagaagctaactttcccggtttgggggattcttctttaatattacccatgagtaataactccgactccgatatagacatagacgctgaagaaggttctacgagaagcaaaagaaatagcttgttgaggagaaaagtaattagaccggagggtatacgtaaaattgtggattgtgtggatgatagaatgctcatattcgacccagctgatagaaacccattgaacaaagtgagtgatcaggtcttgaactccatgcgtgcaagggccactaaggccactgcgtcctctatcaataacagcaatgctacgaacaaattttcttctcaacgtagaaggcacggtggcgaaatcaagtttgtatttgataaattgtttgatgaaacctcttcccaagcccgtgtatacaaagagaccaccagcccgctcttggattctgttttagatggattcaacagtaccgtatttgcttacggtgctactggttgtggcaagacatatactgtgagtggcacaccttctcagccggggatcatatttttggccatggaggaattattcaataaaattacagacttgaaggacgaaaaagacttcgagatttctttatcttacttggaaatatacaatgaaagaatcagagaccttttgaaaccagagacaccatctaaaagattggtcattagagaagatacgcagaaccacatcaaagtggcgaatttgagttatcaccacccaaatacggtagaagatgtgatggacttagttgtccagggaaacataaacaggactacgtctccgacggaagcaaacgaagtatcttctcgttctcatgcagtgttgcaaatacacatcatgcagacaaataagcttgtagacttgacctctcaacatacatttgctacactttccataatcgatttggctgggagcgaaagagccgccgcaacaagaaaccgtggtataagattacacgaaggtgcgaatataaatagatccttattggcattgggcaattgcattaacgcgttgtgcttgaatgatggcagcagaagctgtcatattccatacagggattccaagttaactaggttattgaaattttctttgggtggcaattgcaaaacagtcatgattgtttgcatatctcccagcagttctcattatgatgagacattgaatactttgaaatatgcaaatcgtgctaaagaaataaagaccaaaataatcagaaatcagcagtctttgagtagacacgttggatcttatttgaaaatgattacggaacaaaagagacaaatcgaagagttacgcgaacgtgaagagaagatgatttctttgaagttgacgaaatacaaattgaacaaagaaaagatccagttagccattaacgagtgcgtcaatcgtgttcagcaaacgtatgcaggagtggaaacgtatcaagtagccaagaccttgaaatctttaatactttgtaaaaggaggtttttgcaaatggtcaagttggaagtggataatttgatattattatttgaaagagaggaaagtacagccgccgagatgcagccggtgattagtaattgcagaatgatcagtggtcagctttataacaaaatacacgagttagaaatgaaatttgatgaaaccgacactttaagttccgtcattcatcaggtacattccattgacttgaacaagttaagagagatggaggactgggatgaaacttacgacttggtgtacttggagagttgtttaaatcaaatatctgaattacaaagaaacgaaatcttggttaattcctccataatgacagaaaaattaatgagtgatccgggtttgaactccagatttaaatttttatccaagtggttaatgaataggacacctaacattgaatccataattcaagacttggttcatatcgacgaggagtttgaatcttttgccagaacttttatcgccaatcccgatagcaattttacaaacacaaatataaatataataaacacgacggcagctgacttggctgttcccgctgagaccttacaaagacaaaatttttcccaaaaaaaagtaaagtggacgagtcccgaccttagtcccagccctatgattgaaccacaaccggagttagaaccagaattgcaccaagatcaagacgccattgcaagtgaagtggacgtaagtatgcaagataccacattcaatgagcaggggccctctaccccctccgctccgactacagcggttccaagaaggaagatgcgctcctcccttcttactcatcaaagtttattagccactgccaggaaatga

SEQ ID NO: 3749 - DNA, 1359 bp, Saccharomyces cerevisiae
atggctaatactttcaagtattatcctgaaacgatgggtaattctagtggttatccaattagtttgccttttccgaaaggttcggctacttctgctgttaatgttgctaggcaactgcctaaatatttaggtcatgttccctcgcaatcagttcatactcagttgccatccatggcttctttaggttacttcaatcagccaagttctacttactatgctcctcctgcaccacttcaacagcaccagcaaccacctatccttccccctccgggcctaatgtacactagtaacaataacagcaacgttattcctcctcctgttcaaatgattcgggatggacaacaacaaccacaacaatctaaccaagtaaatgggggcgtcagtgagaacttggactacgatatttctataatgtcaaaatttatcatggaaaatgcctttgttgccttcaacgcgaactatagtactgatgaccagaccactgatctttttttcaagggcatatcttctgtgttgaatgccacgagattgccttcagctactatttttttggctatagattatcttttcaagtatatcaataaattatctaatgggatacattcaattggtggcaattcgatcaatatcatttatcaaaatactatgattgcgttcatattagcaaacaagttcaacgatgacaaaactttcaccaataactcatggtcacaggcaacaggaatactgataaatgttatcaatgatttcgagagacaatggttgagaatatttaactgggaattgtatgatagtgcttttctttattttgagttcgtcaagaattttgagattttcaagcaaaatcaactcaaacctgctgtagcggttcctacgttattatctccaattgtcaacgttggtgatacgagaaacgtaaatttcaacttgaagcctacttccacaaacaacctattatctccagtttccaattatgaaacccccatgctgatgccgcataacatgttttcatcaccatcttatcagagtaactcaaggtctgaattttctagtatgaatggttattataactattacaactataatcagccaagattgaattactatcaacaattccccaatatatattcttcaccaatttcggaaactcagtttgattacgacttctacaatttcagtagtcaacaacaacagcaacaacaaaaacaacactcacttttacctgccgctccacaattacctccccctcacgtccataatcagtcttacggtcatcatcttggctggaagtcaatggatgacacaataaatcattcaagatttgagcgaaactactttccgtattcggcagtgtattag

SEQ ID NO: 3750 - DNA, 1359 bp, Artificial Sequence
  Description of Artificial Sequence: Synthetic polynucleotide
atggctaatactttcaagtattatcctgaaacgatgggtaattctagtggttatccaattagtttgccttttccgaaaggttctgctacttctgctgttaatgttgctaggcaattacctaaatatttaggtcatgttccctctcaatctgttcatactcagttgccatccatggcttctttaggttacttcaatcagccaagttctacttactatgctcctcctgcaccacttcaacagcaccagcaaccacctatccttccccctccgggcttaatgtacactagtaacaataacagcaacgttattcctcctcctgttcaaatgattagagatggacaacaacaaccacaacaatctaaccaagtaaatgggggcgtcagtgagaacttggactacgatatttctataatgtccaaatttatcatggaaaatgcctttgttgccttcaacgcgaactatagtactgatgaccagaccactgatctttttttcaagggcatatcttctgtgttgaatgccacgagattgccttctgctactatttttttggctatagattatcttttcaagtatatcaataaattatctaatgggatacattctattggtggcaattccatcaatatcatttatcaaaatactatgattgcgttcatattagcaaacaagttcaacgatgacaaaactttcaccaataacagttggtctcaggcaacaggaatattaataaatgttatcaatgatttcgagagacaatggttgagaatatttaactgggaattgtatgatagtgcttttctttattttgagttcgtcaagaattttgagattttcaagcaaaatcaactcaaacctgctgtagcggttcctacgttattatctccaattgtcaacgttggtgatacgagaaacgtaaatttcaacttgaagcctacttccacaaacaacttattatctccagtttccaattatgaaacccccatgttaatgccgcataacatgttttcttctccatcttatcagagtaacagcaggtctgaattttctagtatgaatggttattataactattacaactataatcagccaagattgaattactatcaacaattccccaatatatattcttctccaatttctgaaactcagtttgattacgacttctacaatttcagtagtcaacaacaacagcaacaacaaaaacaacactcccttttacctgccgctccacaattacctccccctcacgtccataatcagtcttacggtcatcatcttggctggaagtctatggatgacacaataaatcattccagatttgagagaaactactttccgtattctgcagtgtattga

SEQ ID NO: 3751 - DNA, 1194 bp, Saccharomyces cerevisiae
atgtccaaagtgtttattgccacagcaaatgcaggtaaagctcatgacgctgatattttctcggtttctgcttgcaattcatttacggtaagttgttcaggtgacggttacttaaaggtgtgggataataagctgttagataatgaaaatccaaaagataagtcatattctcactttgtccataagtccggattgcaccatgtcgatgtcttgcaagctattgagagagatgcatttgaattatgccttgttgctaccacttcattttctggcgatttactcttctatcgtatcactagagaagatgagactaaaaaagttatattcgagaaattggatcttctagactcagacatgaaaaagcattccttttgggcattaaaatggggtgcctcaaatgacagactactttcccataggctggttgctacagacgtcaaagggaccacttacatttggaagtttcacccgtttgcagatgagtcaaattctttaacactaaattggagccccacgttagaattacaaggcactgtcgaatcgcctatgactccaagtcaatttgccacttctgtggatatctctgaacgaggactaattgccacaggttttaataatggaacagtacaaatttcagaactatctacattacgcccgttgtacaattttgaatctcagcattctatgattaataattcgaattccatcagatcggtgaaattttctcctcaaggatccttattagccattgctcacgattcaaattcatttggttgcatcactctatatgaaactgaatttggtgaaagaataggctccttatccgtaccaacccatagctcgcaggcaagtctgggtgaatttgcacattctagctgggtcatgagtctatcgtttaatgattctggtgaaacattatgcagtgccggatgggatggtaaattgagattttgggatgtaaaaacaaaggaaagaatcactacattgaatatgcattgtgatgatattgaaattgaagaggatatcttagctgttgatgaacatggagattctttagctgaacctggtgtctttgacgtgaagtttttgaaaaaaggttggagatctggtatgggagctgatttaaatgaaagtttatgctgtgtttgtttagatagaagcatcaggtggtttagagaagctggcggtaaataa

SEQ ID NO: 3752 - DNA, 1194 bp, Artificial Sequence
  Description of Artificial Sequence: Synthetic polynucleotide
atgtccaaagtgtttattgccacagcaaatgcaggtaaagctcatgacgctgatattttctctgtttctgcttgcaattcttttacggtaagttgttctggtgacggttacttaaaggtgtgggataataagcttttagataatgaaaatccaaaagataagagttattctcactttgtccataagtccggattgcaccatgtcgatgtcttgcaagctattgagagagatgcatttgaattatgccttgttgctaccacttctttttctggcgatttactcttctatcgtatcactagagaagatgagactaaaaaagttatattcgagaaattggatcttttggacagtgacatgaaaaagcattccttttgggcattaaaatggggtgcctctaatgacagattactttcccataggttggttgctacagacgtcaaagggaccacttacatttggaagtttcacccgtttgcagatgagagcaattctttaacattaaattggagccccacgttagaattacaaggcactgtcgaatctcctatgactccaagtcaatttgccacttctgtggatatctctgaaagaggattgattgccacaggttttaataatggaacagtacaaatttctgaattatctacattacgcccgttgtacaattttgaatctcagcattctatgattaataatagtaattccatcagatctgtgaaattttctcctcaaggatccttattagccattgctcacgattctaattcttttggttgcatcactttatatgaaactgaatttggtgaaagaataggctccttatccgtaccaacccatagctctcaggcaagtttgggtgaatttgcacattctagctgggtcatgagtttatcttttaatgattctggtgaaacattatgcagtgccggatgggatggtaaattgagattttgggatgtaaaaacaaaggaaagaatcactacattgaatatgcattgtgatgatattgaaattgaagaggatatcttagctgttgatgaacatggagattctttagctgaacctggtgtctttgacgtgaagtttttgaaaaaaggttggagatctggtatgggagctgatttaaatgaaagtttatgctgtgtttgtttagatagaagcatcaggtggtttagagaagctggcggtaaatga

SEQ ID NO: 3753 - DNA, 951 bp, Saccharomyces cerevisiae
atggcagctaattctgtagggaaaatgagtgaaaagttaagaatcaaggtggacgatgttaaaatcaaccccaagtatgttttatacggtgttagtacaccaaacaagcgcctttacaaaaggtattccgagttttggaaactgaagacacgattggagagagatgtaggaagcaccatcccatatgacttccctgaaaagcccggtgtattggacaggaggtggcaaagaagatatgatgatccggaaatgatcgatgaaagacggatcggactagagaggttcctcaatgaattgtataacgatcgttttgattctcgatggagagacacaaaaatagcgcaagacttcctgcagttgtcaaagccaaatgtttctcaagaaaagtcacagcagcatctagaaactgctgacgaagtgggatgggatgagatgataagagatattaaattggatttagataaggagagtgatggcacacccagcgtgcgtggagcactaagggcacgtacgaagctccacaagttacgagagcgactagaacaggatgtgcaaaagaagtctcttccaagcacggaagtgactcgtcgcgccgctctattgaggtccttgctcaaggaatgcgatgacattggtacagcaaacatagctcaggaccgtggacgacttctgggggttgccaccagtgacaactcttcaaccacggaagttcaaggaagaacgaataacgatttgcaacaggggcagatgcaaatggtgcgcgatcaagaacaagagttggttgcactgcaccgaattatccaggcacaacgtggattggccttagagatgaacgaggagctgcaaacacagaatgagctacttacagcacttgaagatgacgtcgataacactggtaggaggttacagatagccaacaagaaggctagacattttaacaacagtgcttga

SEQ ID NO: 3754 - DNA, 951 bp, Artificial Sequence
  Description of Artificial Sequence: Synthetic polynucleotide
atggcagctaattctgtagggaaaatgagtgaaaagttaagaatcaaggtggacgatgttaaaatcaaccccaagtatgttttatacggtgttagtacaccaaacaagcgcctttacaaaaggtattccgagttttggaaattgaagacaagattggagagagatgtaggaagcaccatcccatatgacttccctgaaaagcccggtgtattggacaggaggtggcaaagaagatatgatgatccggaaatgatcgatgaaagaagaatcggattggagaggttcctcaatgaattgtataacgatcgttttgattctcgttggagagacacaaaaatagcgcaagacttcttacagttgtccaagccaaatgtttctcaagaaaagtctcagcagcatttggaaactgctgacgaagtgggatgggatgagatgataagagatattaaattggatttagataaggagagtgatggcacacccagcgtgcgtggagcattaagggcacgtacgaagctccacaagttaagagagagattagaacaggatgtgcaaaagaagtctcttccaagcacggaagtgactcgtcgcgccgctttattgaggtccttgctcaaggaatgcgatgacattggtacagcaaacatagctcaggaccgtggaaggcttttgggggttgccaccagtgacaactcttccaccacggaagttcaaggaagaacgaataacgatttgcaacaggggcagatgcaaatggtgcgcgatcaagaacaagagttggttgcattgcacagaattatccaggcacaacgtggattggccttagagatgaacgaggagttacaaacacagaatgagttgcttacagcacttgaagatgacgtcgataacactggtaggaggttacagatagccaacaagaaggctagacattttaacaacagtgcttga

SEQ ID NO: 3755 - DNA, 1080 bp, Saccharomyces cerevisiae
atgtcgtttactgctccttcagatcccgtcaataaaccgacaaaagtgaaggtatcacagttgtgtgaactatgtcattcaagaaaggctctcattagaagacccaaaaacctgtctaaactttgcaaacaatgcttctgcctcgtgttcgagacggagatccataacactattgtagcaaataacttgtttcagaggggagaaaaagtagccgtgggggcctctggtggtaaagactccacggtgttagcgcatatgctgaagcttctgaatgaccgttacgattacggcattgagattgtactgttgagtattgacgaaggaatcatcggatacagagatgattccttggccacggtgaaaaggaatcagcagcagtatggccttcctttggagattttttcctttaaggacctctatgattggacaatggatgagattgtatccgttgctggtataaggaacagttgcacgtattgtggtgtttttagaagacaatcattggaccgtggtgctgcaaagctgggcatatctcacgttgtcaccggccacaatgcagacgatatggcagagacagtactaatgaatatcctacgtggtgacgtagcaagattggaaaaatcgactgcgattatcacacaaagtagcggctctcccatcaagagatcaaaaccatttaaatattcttaccaaaaggaaattgtcctgtatgcgcactacatgaagctggattatttttccactgagtgtacctatgccccagaagcgtttaggggcactgcgagagaatacatgaagaatctggaagcagtgaggcccagttgcattatagacatcatccaaagtggcgaaaatttggcattaaaggctaaaaaatctaacgctggaaagagagtcgtcaaatttgttgacggcaatagatgcgctagatgtggatatctgtcgtcaaataacatttgcaaggcgtgcatgttgctggaaggactggagaaaagtagagcccaagtggcaatcgagaatgacacttctgccgatggtgcagccttgaagctgagagctcttgagaaactcagcttttga

SEQ ID NO: 3756 - DNA, 1080 bp, Artificial Sequence
  Description of Artificial Sequence: Synthetic polynucleotide
atgagttttactgctccttctgatcccgtcaataaaccgacaaaagtgaaggtatctcagttgtgtgaattatgtcattccagaaaggctctcattagaagacccaaaaacttatctaaactttgcaaacaatgcttctgcctcgtgttcgagacggagatccataacactattgtagcaaataacttgtttcagaggggagaaaaagtagccgtgggggcctctggtggtaaagactccacggtgttagcgcatatgttgaagcttttgaatgaccgttacgattacggcattgagattgtacttttgagtattgacgaaggaatcatcggatacagagatgattccttggccacggtgaaaaggaatcagcagcagtatggccttcctttggagattttttcctttaaggacctctatgattggacaatggatgagattgtatccgttgctggtataaggaacagttgcacgtattgtggtgtttttagaagacaatctttggaccgtggtgctgcaaagttgggcatatctcacgttgtcaccggccacaatgcagacgatatggcagagacagtattaatgaatatcttacgtggtgacgtagcaagattggaaaaatctactgcgattatcacacaaagtagcggctctcccatcaagagaagtaaaccatttaaatattcttaccaaaaggaaattgtcctttatgcgcactacatgaagttggattatttttccactgagtgtacctatgccccagaagcgtttaggggcactgcgagagaatacatgaagaatttggaagcagtgaggcccagttgcattatagacatcatccaaagtggcgaaaatttggcattaaaggctaaaaaatctaacgctggaaagagagtcgtcaaatttgttgacggcaatagatgcgctagatgtggatatttatcttccaataacatttgcaaggcgtgcatgttgttggaaggattggagaaaagtagagcccaagtggcaatcgagaatgacacttctgccgatggtgcagccttgaagttgagagctcttgagaaactcagcttttga

SEQ ID NO: 3757 - DNA, 669 bp, Saccharomyces cerevisiae
atgagcaacgaagattacggatacgactacgattatttatttaagatagttcttatcggcgactccggtgtgggtaaatctaatctgttgtcgagatttacaaccgatgaattcaacattgaatccaaatccacgattggcgtggaattcgctacaagaaccattgaagttgaaaacaagaagataaaagcacagatttgggacacggcaggtcaagaacgttacagggccatcacgtctgcgtactaccgtggtgctgtaggtgcacttatagtgtatgatataagcaaatcaagttcatacgaaaattgcaaccactggcttaccgaactgagagagaacgcagatgacaacgtggctgttgggttgatagggaacaaatcagatctggctcatttaagagcagtaccaaccgatgaagcgaaaaatttcgcaatggaaaaccaaatgttatttactgagacaagtgctttaaatagtgataatgtagataaagcatttagagaactgatcgtagccatcttccaaatggtaagcaaacatcaagtagacttaagcgggtcgggtaccaacaacatgggctctaatggcgctccaaagggtcctaccatcagcttaacaccggcaccaaaggaagacaagaagaaaaaatccagcaactgttgttaa

SEQ ID NO: 3758 - DNA, 669 bp, Artificial Sequence
  Description of Artificial Sequence: Synthetic polynucleotide
atgagcaacgaagattacggatacgactacgattatttatttaagatagttcttatcggcgactccggtgtgggtaaatctaatttattgtccagatttacaaccgatgaattcaacattgaatccaaatccacgattggcgtggaattcgctacaagaaccattgaagttgaaaacaagaagataaaagcacagatttgggacacggcaggtcaagaacgttacagggccatcacgtctgcgtactaccgtggtgctgtaggtgcacttatagtgtatgatataagcaaatctagtagttacgaaaattgcaaccactggcttaccgaattgagagagaacgcagatgacaacgtggctgttgggttgatagggaacaaatctgatttggctcatttaagagcagtaccaaccgatgaagcgaaaaatttcgcaatggaaaaccaaatgttatttactgagacaagtgctttaaatagtgataatgtagataaagcatttagagaattgatcgtagccatcttccaaatggtaagcaaacatcaagtagacttaagcgggtctggtaccaacaacatgggctctaatggcgctccaaagggtcctaccatcagcttaacaccggcaccaaaggaagacaagaagaaaaaatccagcaactgttgttga

SEQ ID NO: 3759 - DNA, 1149 bp, Saccharomyces cerevisiae
atgcctaaaaagcaaacgaatttcccagtagataacgaaaacagaccttttagatgtgatacctgtcaccgtggtttccatcggttagaacataaaaagagacacttgagaacacacactggggaaaaacctcatcattgcgcatttcctggttgtgggaaaagtttcagtagaagcgatgaactgaaaaggcacatgagaacgcatacagggcaatctcaaaggagattgaagaaagctagcgtacagaaacaggagtttttgacagtaagcggaattcctaccattgcatcgggcgtgatgatacaccaaccaataccgcaagtcctaccagcaaatatggccataaatgttcaggcagtaaatggaggtaacattatacacgctcccaatgcggtgcacccaatggtgataccaatcatggcccaaccagcccccattcatgcctccgctgcatctttccagcctgcaacttctcctatgccaatttctacatacactccagttccatcgcaatcattcacctctttccagagctctattggctccatacagtcaaatagtgatgtttcatctatcttctcgaacatgaatgttcgcgtaaacactccacgctctgtgccaaactctccgaatgatggatatttacaccagcaacatatcccacagcagtatcagcatcaaactgccagcccttctgttgccaagcagcagaaaacttttgcacattctcttgcatctgcattatctaccttacaaaaaagaacgcctgtaagtgccccttccaccactatagaatcaccatcctcaccaagtgattccagtcatacctctgcatccagcagcgctatctctttgcctttcagcaatgctccttctcagctcgccgtggccaaagaacttgagtccgtctatttagattccaatagatacaccaccaagactaggagggaaagagcaaaattcgaaattcctgaagaacaagaagaagataccaataacagcagcagtggtagtaatgaggaggagcacgagtcgctagatcatgaatctagcaaaagccgaaagaaattgtcaggcgtaaaattgccgcctgtacgtaacctactgaaacaaattgatgttttcaacggtcccaaaagagtttaa

SEQ ID NO: 3760 - DNA, 1149 bp, Artificial Sequence
  Description of Artificial Sequence: Synthetic polynucleotide
atgcctaaaaagcaaacgaatttcccagtagataacgaaaacagaccttttagatgtgatacctgtcaccgtggtttccatagattagaacataaaaagagacacttgagaacacacactggggaaaaacctcatcattgcgcatttcctggttgtgggaaaagtttcagtagaagcgatgaattgaaaaggcacatgagaacgcatacagggcaatctcaaaggagattgaagaaagctagcgtacagaaacaggagtttttgacagtaagcggaattcctaccattgcatctggcgtgatgatacaccaaccaataccgcaagtcttgccagcaaatatggccataaatgttcaggcagtaaatggaggtaacattatacacgctcccaatgcggtgcacccaatggtgataccaatcatggcccaaccagcccccattcatgcctccgctgcatctttccagcctgcaacttctcctatgccaatttctacatacactccagttccatctcaaagtttcacctctttccagagctctattggctccatacagtctaatagtgatgtttcttctatcttcagtaacatgaatgttcgcgtaaacactccacgctctgtgccaaactctccgaatgatggatatttacaccagcaacatatcccacagcagtatcagcatcaaactgccagcccttctgttgccaagcagcagaaaacttttgcacattctcttgcatctgcattatctaccttacaaaaaagaacgcctgtaagtgccccttccaccactatagaatctccatcctctccaagtgattccagtcatacctctgcatccagcagcgctatctctttgcctttcagcaatgctccttctcagctcgccgtggccaaagaacttgagtccgtctatttagattccaatagatacaccaccaagactaggagggaaagagcaaaattcgaaattcctgaagaacaagaagaagataccaataacagcagcagtggtagtaatgaggaggagcacgagtctttagatcatgaatctagcaaaagcagaaagaaattgagcggcgtaaaattgccgcctgtacgtaacttattgaaacaaattgatgttttcaacggtcccaaaagagtttga

SEQ ID NO: 3761 - DNA, 1248 bp, Saccharomyces cerevisiae
atgggtactacgacaagtcatccagcccaaaaaaagcaaacaacaaaaaagtgtcgtgcacctatcatgagtgacgttagagaaaaacccagcaatgctcaaggctgcgaaccgcaagaaatggatgctgtgagcaagaaagttactgaactgagcttaaataaatgttcagattcccaagacgcggggcagccttcaagggagggatctattaccaaaaaaaaatcgacgttattgctgcgtgatgaggacgagcccactatgccaaagctatctgttatggaaactgctgtggacactgactctgggtcttcgtctactagcgatgatgaagagggagatattattgcccagacgacagagcccaagcaagatgccagtcctgatgatgatcgctcaggccattcttcgcccagagaggagggacaacagcaaatacgtgccaaagaagcttcgggaggtccaagtgaaatcaagagctcattaatggttcccgtggagataaggtggcagcaaggtggttcaaaagtttacgtgacaggctcattcaccaaatggaggaaaatgatcggtttgatacctgattctgacaataatggctcatttcatgtgaagctaaggctgcttccaggcacacatagattcagatttatagtggataatgagcttagagttagtgatttcctgcccacagcaactgatcagatgggaaacttcgtcaattacatagaagtcaggcaaccagaaaaaaacccaactaacgaaaagataaggtccaaggaagcagattccatgcgacctcccaccagcgatcgatcctcaattgctctacaaattggtaaggatccagacgattttggtgacggatatacaaggtttcatgaagatctgtcacccagacctccgttggaatatacaacagacattcccgccgtgtttactgacccgtctgtcatggaacgatactattataccttggatcgtcagcaaagcaatactgatacgtcatggctgacaccaccccaattacctcctcagttggagaatgttatcttgaataaatactatgccacgcaagaccagttcaacgagaacaactcaggcgctctgcccattccgaaccatgtggtgcttaaccacttggttactagtagcattaagcacaatacactttgtgtagcctccatcgttcgatataaacagaaatatgtcacccagattctttatacgcccatagagtcctcgtaa

SEQ ID NO: 3762 - DNA, 1248 bp, Artificial Sequence
  Description of Artificial Sequence: Synthetic polynucleotide
atgggtactacgacaagtcatccagcccaaaaaaagcaaacaacaaaaaagtgtcgtgcacctatcatgagtgacgttagagaaaaacccagcaatgctcaaggctgcgaaccgcaagaaatggatgctgtgagcaagaaagttactgaattgagcttaaataaatgttctgattcccaagacgcggggcagccttctagggagggatctattaccaaaaaaaaatctacgttattgttacgtgatgaggacgagcccactatgccaaagttatctgttatggaaactgctgtggacactgactctgggtcttcttctactagcgatgatgaagagggagatattattgcccagacgacagagcccaagcaagatgccagtcctgatgatgatcgcagtggccattcttctcccagagaggagggacaacagcaaatacgtgccaaagaagcttctggaggtccaagtgaaatcaagagctctttaatggttcccgtggagataaggtggcagcaaggtggttccaaagtttacgtgacaggcagtttcaccaaatggaggaaaatgatcggtttgatacctgattctgacaataatggctcttttcatgtgaagttaaggttacttccaggcacacatagattcagatttatagtggataatgagcttagagttagtgatttcttgcccacagcaactgatcagatgggaaacttcgtcaattacatagaagtcaggcaaccagaaaaaaacccaactaacgaaaagataaggtccaaggaagcagattccatgaggcctcccaccagcgatagatccagtattgctttacaaattggtaaggatccagacgattttggtgacggatatacaaggtttcatgaagatttatctcccagacctccgttggaatatacaacagacattcccgccgtgtttactgacccgtctgtcatggaaagatactattataccttggatcgtcagcaaagcaatactgatacgagctggttgacaccaccccaattacctcctcagttggagaatgttatcttgaataaatactatgccacgcaagaccagttcaacgagaacaacagtggcgctcttcccattccgaaccatgtggtgcttaaccacttggttactagtagcattaagcacaatacactttgtgtagcctccatcgttagatataaacagaaatatgtcacccagattctttatacgcccatagagtccagctga

SEQ ID NO: 3763 - DNA, 3108 bp, Saccharomyces cerevisiae
atggaagagctgaatattgattttgacgtatttaagaaaaggattgaattgttgtattccaagtacaatgagtttgaaggttctccaaattcgctgctgtttgttttaggttcgtccaacgctgaaaacccgtaccagaagacgaccatattgcataattggttgctaagttacgaatttcccgctactttgattgcattagttcccggaaaggttattataattactagttctgccaaggccaagcatttacaaaaggcaattgatctatttaaagaccctgaaagcaaaattacgctggaattgtggcaaagaaacaataaagaaccagaactcaataaaaagttatttgatgacgttattgccttaatcaatagcgctggtaaaacagtgggtatccctgaaaaggactcttaccaaggtaaatttatgactgagtggaacccagtatgggaagcggctgtgaaggagaacgaattcaatgtcattgatatttcgctgggtctttctaaagtttgggaagtgaaggatgttaacgaacaagccttcctgtccgtttcaagtaaggggtcggacaaatttatggaccttttatccaatgaaatggttcgggcagttgacgaggagttgaaaatcaccaatgccaagttatcagacaaaattgaaaataaaattgatgatgtgaaatttttgaagcaattgagtcccgatttaagcgcattatgcccaccaaactacaaattcaactttgatttattggattggacctattctccaatcattcagtccgggaaaaagtttgatcttagggtttctgcccgttctaccaatgatcagttgtacggcaacggttgtattttagcttcatgtggtattcgttacaataattattgttctaatattactaggacctttttgatcgatccatctgaagaaatggccaacaactacgattttctattaactttgcaaaaagaaattgtaactaacattctgaagcccggccgtacaccaaaagaagtttatgaatcagtaatagaatacatcgaaaaaaccaaacctgaactagtgcccaatttcaccaaaaacattggttcattgattggtctcgaatttagagattctaactttatattaaatgttaagaatgattaccgtaaaatccaacgcggtgactgctttaatatttcgtttggtttcaataatctgaaagattctcaaagtgctaacaactacgctttacaattagctgatacggttcaaattcctctcgatgaaacagagcctccacgcttcttaacaaattacaccaaagccaaatcccagatatcattttatttcaataatgaagaagaagacaataataaaaagaaatcttcacctgccaccaaagtccctagtaaaccagacagaaattccaaaattttaagaacaaagttacgtggcgaagcccgtggtggtgccgaagacgctcaaaaggagcaaattcgtaaagaaaaccaaaagaagctacacgaaaaattggaaaagaatggattactcagatttagtgctgctgatgccaatggcccagatagtgaacctcgtcaatacttcaaaaaatatgaatcttatgttcgggattcacaactaccaaccaatattcgtgatctaagaattcatgtcgactggaaaagccaaacaattattctacccatttacggtaggccagtcccatttcatataaattcatataagaatggttctaaaaacgaagaaggcgaatatacgtatttacgtttgaactttaattcaccgggatcttctggtggtatttctaaaaaagtggaggaattgccgtatgaggaatcagcagacaatcaatttgtacgttcgattacactaagatccaaagatggtgaccgcatgagtgaaacctttaaacaaattgcagatttgaaaaaagaagccacaaagagagagcaagaacgtaaggcgcttgctgatgttgttcaacaggacaaattgattgaaaataaaactggaagaacgaaaagactggatcaaatttttgtgaggccaaatccagatacaaaacgtgtacctagtactgtctttatccatgaaaatggtatcagatttcaatccccactaaggactgatagcagaatagacatattattctcaaacattaagaatctaatttttcaatcttgtaaaggtgaattaattgtcgtcattcatattcatttgaagaatccaattttaatgggtaaaaagaaaatacaagacgtccaattctatcgtgaagcttctgatatgtccgtcgatgaaactggaggtggaagacgaggtcaatccagattcagaagatatggtgatgaggatgagctggaacaagaacaagaagaaagaagaaaacgagctgcgcttgataaagaatttaagtattttgcagacgcaatcgcagaagcatcaaacggtttattgacggtggagaatacatttagagatttgggcttccaaggtgtcccaaatagatcggcagttttctgtatgccaactacagattgtttagttcaattgattgaaccaccatttttggtgattaacctagaggaagtcgaaatctgtattttagaaagagttcaatttggtttgaaaaacttcgacatggtttttgtttataaagatttcaataaacccgtcactcatatcaatacagttccgatcgaatctttagatttcttgaagcagtggttaacagatatggatattccttacactgtctcaacaatcaatttgaattgggcaactattatgaagtcattacaagatgatccatatcagtttttcttagatggtggttggaattttctggctactggttcagatgatgaagcatctgatgaaagtgaagaagaagttagtgaatatgaggcttcagaagacgacgtaagtgatgaaagcgcattttctgaagatgaagaaggatcagaggtggatgacgatattagtggtgatgaaagtgaggactatactggcgacgagagtgaggaaggtgaagactgggatgaattagagaaaaaggctgctagggctgataggggtgcaaactttagagattag

SEQ ID NO: 3764 - DNA, 3108 bp, Artificial Sequence
  Description of Artificial Sequence: Synthetic polynucleotide
atggaagagttgaatattgattttgacgtatttaagaaaaggattgaattgttgtattccaagtacaatgagtttgaaggttctccaaattctttactttttgttttaggttcttccaacgctgaaaacccgtaccagaagacgaccatattgcataattggttgttaagttacgaatttcccgctactttgattgcattagttcccggaaaggttattataattactagttctgccaaggccaagcatttacaaaaggcaattgatttatttaaagaccctgaaagcaaaattacgttagaattgtggcaaagaaacaataaagaaccagaactcaataaaaagttatttgatgacgttattgccttaatcaatagcgctggtaaaacagtgggtatccctgaaaaggactcttaccaaggtaaatttatgactgagtggaacccagtatgggaagcggctgtgaaggagaacgaattcaatgtcattgatatttctttgggtctttctaaagtttgggaagtgaaggatgttaacgaacaagccttcttatccgtttctagtaaggggagtgacaaatttatggaccttttatccaatgaaatggttagagcagttgacgaggagttgaaaatcaccaatgccaagttaagtgacaaaattgaaaataaaattgatgatgtgaaatttttgaagcaattgagtcccgatttaagcgcattatgcccaccaaactacaaattcaactttgatttattggattggacctattctccaatcattcagtccgggaaaaagtttgatcttagggtttctgcccgttctaccaatgatcagttgtacggcaacggttgtattttagcttcttgtggtattcgttacaataattattgttctaatattactaggacctttttgatcgatccatctgaagaaatggccaacaactacgattttttattaactttgcaaaaagaaattgtaactaacattttgaagcccggccgtacaccaaaagaagtttatgaaagtgtaatagaatacatcgaaaaaaccaaacctgaattagtgcccaatttcaccaaaaacattggttctttgattggtctcgaatttagagattctaactttatattaaatgttaagaatgattaccgtaaaatccaacgcggtgactgctttaatatttcctttggtttcaataatttgaaagattctcaaagtgctaacaactacgctttacaattagctgatacggttcaaattcctctcgatgaaacagagcctccacgcttcttaacaaattacaccaaagccaaatcccagatatccttttatttcaataatgaagaagaagacaataataaaaagaaatcttctcctgccaccaaagtccctagtaaaccagacagaaattccaaaattttaagaacaaagttacgtggcgaagcccgtggtggtgccgaagacgctcaaaaggagcaaattcgtaaagaaaaccaaaagaagttgcacgaaaaattggaaaagaatggattactcagatttagtgctgctgatgccaatggcccagatagtgaacctcgtcaatacttcaaaaaatatgaatcttatgttagagattctcaattaccaaccaatattcgtgatttgagaattcatgtcgactggaaaagccaaacaattattttgcccatttacggtaggccagtcccatttcatataaattcttataagaatggttctaaaaacgaagaaggcgaatatacgtatttacgtttgaactttaattctccgggatcttctggtggtatttctaaaaaagtggaggaattgccgtatgaggaaagtgcagacaatcaatttgtacgttctattacattaagatccaaagatggtgaccgcatgagtgaaacctttaaacaaattgcagatttgaaaaaagaagccacaaagagagagcaagaacgtaaggcgcttgctgatgttgttcaacaggacaaattgattgaaaataaaactggaagaacgaaaagattagatcaaatttttgtgaggccaaatccagatacaaaacgtgtacctagtactgtctttatccatgaaaatggtatcagatttcaatccccattaaggactgatagcagaatagacatattattcagtaacattaagaatttaatttttcaatcttgtaaaggtgaattaattgtcgtcattcatattcatttgaagaatccaattttaatgggtaaaaagaaaatacaagacgtccaattctatcgtgaagcttctgatatgtccgtcgatgaaactggaggtggaagaagaggtcaatccagattcagaagatatggtgatgaggatgagttagaacaagaacaagaagaaagaagaaaaagagctgcgcttgataaagaatttaagtattttgcagacgcaatcgcagaagcatctaacggtttattgacggtggagaatacatttagagatttgggcttccaaggtgtcccaaatagaagtgcagttttctgtatgccaactacagattgtttagttcaattgattgaaccaccatttttggtgattaacttggaggaagtcgaaatctgtattttagaaagagttcaatttggtttgaaaaacttcgacatggtttttgtttataaagatttcaataaacccgtcactcatatcaatacagttccgatcgaatctttagatttcttgaagcagtggttaacagatatggatattccttacactgtctctacaatcaatttgaattgggcaactattatgaagtctttacaagatgatccatatcagtttttcttagatggtggttggaattttttggctactggttctgatgatgaagcatctgatgaaagtgaagaagaagttagtgaatatgaggcttctgaagacgacgtaagtgatgaaagcgcattttctgaagatgaagaaggatctgaggtggatgacgatattagtggtgatgaaagtgaggactatactggcgacgagagtgaggaaggtgaagactgggatgaattagagaaaaaggctgctagggctgataggggtgcaaactttagagattga

SEQ ID NO: 3765 - DNA, 4962 bp, Saccharomyces cerevisiae
atgagtgacctacccattgaatttaccgaattggtcgatctgatgtccttaggaatttcccctcaattccttgacttcagatcaactactttcgagagtgaccacttcgtcactgttagagaaacaaaggacggtacaaactctgttgcaatcgtggatttggccaaaggcaatgaagtgacaaggaagaatatgggcggtgattctgctatcatgcatccatctcagatggttatttccgttagagcaaatggtactatcgtgcagatatttaatttggaaactaagagcaagttaaagtcttttactttagatgaacctgttattttttggaggtggttgagtgaaaccactttgggttttgttaccgcaagatccatactgacctcgaacgtctttgatggtaacgtaaatgctaagcctcaattgcttaccttgagacacgctaacttgaacaatacccaaattatcaattttgtggctaacaaaaaccttgactggttcgcagttgttggtatcttacaagaaaatggccgtattgccggtagaattcaattattctcaaaacaacgtaacatctcccaagctatcgacggtcatgttgctatctttacgaatatattactagagggtaatggctcgaccccggtacaagttttcgttactggtaacagaaatgccaccaccggtgctggagaattaagaattatcgagattgatcacgatgcttcattgccttctcaatatcaaaaggaaactaccgatattttctttccaccagatgcaacgaatgatttcccaatcgctgttcaggtgtctgagaaatacggcataatttacctattaaccaagtatggcttcatccatttgtacgaattggaaaccggtaccaatttattcgttaatagaattacagcagaatctgtttttactgcagctccgtacaatcacgagaacggtattgcatgcatcaataaaaaaggtcaagttttagcagtagagatttctacttctcaaatcgttccatatatcttgaataaattatctaatgtggcactggccttaatcgttgctacaagaggtggcttaccaggtgcagatgatttatttcaaaaacagtttgaatctttattgttacaaaacgattatcaaaatgcagctaaagttgcagcctcttccacttctttaaggaaccaaaacaccatcaacaggttgaaaaacattcaagcaccaccaggcgccatttctcctatcctactttacttttcaacactattggataaagggaaattgaataaagaggaaacaattgaattggctagaccagttctacaacaagacagaaaacaattgttcgaaaaatggttaaaggaagataaactagaatgttcagaagaactaggtgacatcgttaagcctttcgatactactttagcgctagcttgctacttaagagcaggtgcccatgcaaaagttatatcttgtcttgccgaattacaacagtttgaaaaaattattccttactgccaaaaggttggatatcaacctaactttttagtgctgatttcttctttgattagatcatcaccagacagagcttctgaatttgccgtatctctattacaaaatccggaaactgcttctcagatcgacatagaaaaaatcgcagatctattcttttcccaaaaccatatccaacaaggaacctctctacttctagacgcgttaaaaggagataccccagaccaaggtcacttgcaaactcgtgttcttgaagtcaatctactacacgcaccacaagttgctgacgccatattgggaaacaacatcttttctcattatgacaaaccaactattgcttccttatccgaaaaggcgggactataccagagagctttagaaaattacacagacatcaaagatatcaagagatgcgttgtccacaccaatgcattacctatcgattggttagtcggatactttggtaagttgaacgttgaacaatctttggcgtgcttaaaagctttaatggataacaatattcaggctaacatccagaccgtagtacaggtggcaactaaattctctgatttgatcggtccatctactttgattaaattattcgaagattataatgctacggaaggtttatactattacttagcctctttagtcaacctaaccgaagataaagatgtggtttacaaatacattgaagctgctgctaaaatgaaacaatacagagaaattgaaagaattgtgaaggataacaatgtctatgatccagaaagagtcaagaatttcttgaaggatgccaatctagaagaccagttgcctctagtcatagtttgtgaccgtttcgactttgttcatgaaatgattttatatttgtacaaatcacagaacttaaaatttattgaaacttacgtgcagcaggttaacccttcaaagactgcccaagttgttggcgcattacttgatatggactgtgatgaggcatttattcaaagtctgctacaatcagtcttaggtcaagtccctattaatgaattaactactgaggttgaaaagagaaatagactaaaaatattgctacctttcctagaacaaagcttaagtcaaggtatccaggatcaagctgtttacaatgccttagcaaaaatttatattgattccaataattctcctgaaaagtttttgaaggaaaacgaccaatatgacaccttagacgttggtcattactgcgaaaaaagagatccctaccttgcatatattgcgtatgaaaaaggtcaaaatgatgatgacttgattagaatcactaatgaaaatagcatgtacaagtaccaggcaagatatttgttggaacgttctgatctcgatttatggaacaaagttttgaatcaagaaaatattcacagaagacaattaattgattcggtcatctccgttggtatccctgaattaactgatcctgaacctgtttccttaactgttcaagcattcatgaccaatggattaaaactggaactaattgagttgctagaaaaaatcatattggaaccttctcctttcaacgaaaatgtggctttacaagggttgctattattgtctgctattaagtatgaaccaactaaggtttcaagctatatcgaaaaattagataactacgacgccgatgaaattgctccattatgtattgaacatgatttgaaggaggaagcttttgaaatctatgacaaacatgaaatgtacggtaaagctttaaaggttttaatcgaagacatcatgtctttagatagagctgcttcttatgctgataaaatcaatactcccgaattgtggtctcaaattggtacggctcagttagatggattaagaatcccagatgctattgagtcttatattaaagcagaagacccatcaaattacgaaaatgtaattgatatagccgaacaagccggtaaatacgaagaattaattccatttttactaatggctagaaagactttgaaagaaccaaagatcgacggtgctttaatcttggcctatgctgaactaaacaagattcatgaaattgagaacttgttggcaggttccaatgttgcaaacttagatcatgttggtgataaattattcgagaataaagagtataaagcggccaggctatgttattctgctgtttctaattactccaagcttgcttctaccttggtttacctgggagattatcaggctgctgttgacactgctagaaaggcttcaaacattaaagtttggaaactggttaacgacgcttgtattgaaaagaaagaattcaagctggctcaaatttgtgggttgaacttgatcgttcacgctgaagaattagatgaactggtggaaaggtatgaatcaaacggctatttcgaagaactgatttcattgtttgaagctggtttgggacttgaaagagctcatatgggcatgttcactgaattggccattttgtattccaaatatgaaccagacaagaccttcgaacacttgaagctattctggtccagaataaatattccaaaggttattagagctgtcgaacaagctcacctctggtcggaattggtctttttatatgctcactatgatgaatgggataatgctgctttaacactaatcgaaaaatcaaccaaagacttggatcacgcctatttcaaagaagttgttgtcaaagtttctaacttagaaatctattacaaggccattaatttctacgtcaaatttcacccatcattactagttgatcttttgacctcattgacaccaagattagatattccaagaactgtcaaaattttctcgaaatccgacaacttgcctttaatcaagcctttcttgatcaatgtcttaccaaaaaataactcagttgtcaaccaagcctaccacgatctgatgattgaagaagaagattataaagctttgcaagacgctgttgattcttatgacaaatttgaccaattgggattggcatctcgtttggaatctcataagctaatttttttcaagaaaataggagccctgttataccgtagaaataagaagtgggcaaagagtctttcaatcttgaaggaagaaaagctatggaaggacgctattgagacggcagcaatctctcaggatccaaaggtagtggaggctctactcacatatttcgttgaaaccggtaacagagaaggctttgttgctttgctatatgctgcttacaacttagtgagaattgaatttgttttagaaatatcatggatgaattctttggaggactacattaagccatttgaaatctccataaaaaaagagcagaatgattccattaagaaaatcaccgaagaactcgctaaaaagtccggatctaatgaagagcacaaagatggccaacctttgatgctgatgaacagcgcgatgaacgttcaacccacaggattttaa

SEQ ID NO: 3766 - DNA, 4962 bp, Artificial Sequence
  Description of Artificial Sequence: Synthetic polynucleotide
atgagtgacttgcccattgaatttaccgaattggtcgatttgatgtccttaggaatttcccctcaattccttgacttcagatctactactttcgagagtgaccacttcgtcactgttagagaaacaaaggacggtacaaactctgttgcaatcgtggatttggccaaaggcaatgaagtgacaaggaagaatatgggcggtgattctgctatcatgcatccatctcagatggttatttccgttagagcaaatggtactatcgtgcagatatttaatttggaaactaagagcaagttaaagtcttttactttagatgaacctgttattttttggaggtggttgagtgaaaccactttgggttttgttaccgcaagatccatattgaccagtaacgtctttgatggtaacgtaaatgctaagcctcaattgcttaccttgagacacgctaacttgaacaatacccaaattatcaattttgtggctaacaaaaaccttgactggttcgcagttgttggtatcttacaagaaaatggccgtattgccggtagaattcaattattctccaaacaacgtaacatctcccaagctatcgacggtcatgttgctatctttacgaatatattattggagggtaatggctctaccccggtacaagttttcgttactggtaacagaaatgccaccaccggtgctggagaattaagaattatcgagattgatcacgatgcttctttgccttctcaatatcaaaaggaaactaccgatattttctttccaccagatgcaacgaatgatttcccaatcgctgttcaggtgtctgagaaatacggcataatttacttattaaccaagtatggcttcatccatttgtacgaattggaaaccggtaccaatttattcgttaatagaattacagcagaatctgtttttactgcagctccgtacaatcacgagaacggtattgcatgcatcaataaaaaaggtcaagttttagcagtagagatttctacttctcaaatcgttccatatatcttgaataaattatctaatgtggcattggccttaatcgttgctacaagaggtggcttaccaggtgcagatgatttatttcaaaaacagtttgaatctttattgttacaaaacgattatcaaaatgcagctaaagttgcagcctcttccacttctttaaggaaccaaaacaccatcaacaggttgaaaaacattcaagcaccaccaggcgccatttctcctatcttactttacttttctacattattggataaagggaaattgaataaagaggaaacaattgaattggctagaccagttttgcaacaagacagaaaacaattgttcgaaaaatggttaaaggaagataaattagaatgttctgaagaattgggtgacatcgttaagcctttcgatactactttagcgttagcttgctacttaagagcaggtgcccatgcaaaagttatatcttgtcttgccgaattacaacagtttgaaaaaattattccttactgccaaaaggttggatatcaacctaactttttagtgttgatttcttctttgattagaagttctccagacagagcttctgaatttgccgtatctttattacaaaatccggaaactgcttctcagatcgacatagaaaaaatcgcagatcttttcttttcccaaaaccatatccaacaaggaacctctttacttttggacgcgttaaaaggagataccccagaccaaggtcacttgcaaactcgtgttcttgaagtcaatttattacacgcaccacaagttgctgacgccatattgggaaacaacatcttttctcattatgacaaaccaactattgcttccttatccgaaaaggcgggattataccagagagctttagaaaattacacagacatcaaagatatcaagagatgcgttgtccacaccaatgcattacctatcgattggttagtcggatactttggtaagttgaacgttgaacaatctttggcgtgcttaaaagctttaatggataacaatattcaggctaacatccagaccgtagtacaggtggcaactaaattctctgatttgatcggtccatctactttgattaaattattcgaagattataatgctacggaaggtttatactattacttagcctctttagtcaacttgaccgaagataaagatgtggtttacaaatacattgaagctgctgctaaaatgaaacaatacagagaaattgaaagaattgtgaaggataacaatgtctatgatccagaaagagtcaagaatttcttgaaggatgccaatttggaagaccagttgcctttggtcatagtttgtgaccgtttcgactttgttcatgaaatgattttatatttgtacaaatctcagaacttaaaatttattgaaacttacgtgcagcaggttaacccttctaagactgcccaagttgttggcgcattacttgatatggactgtgatgaggcatttattcaaagtttattacaatctgtcttaggtcaagtccctattaatgaattaactactgaggttgaaaagagaaatagattgaaaatattgttacctttcttggaacaaagcttaagtcaaggtatccaggatcaagctgtttacaatgccttagcaaaaatttatattgattccaataattctcctgaaaagtttttgaaggaaaacgaccaatatgacaccttagacgttggtcattactgcgaaaaaagagatccctaccttgcatatattgcgtatgaaaaaggtcaaaatgatgatgacttgattagaatcactaatgaaaatagcatgtacaagtaccaggcaagatatttgttggaacgttctgatctcgatttatggaacaaagttttgaatcaagaaaatattcacagaagacaattaattgattctgtcatctccgttggtatccctgaattaactgatcctgaacctgtttccttaactgttcaagcattcatgaccaatggattaaaattagaattgattgagttgttggaaaaaatcatattggaaccttctcctttcaacgaaaatgtggctttacaagggttgttattattgtctgctattaagtatgaaccaactaaggtttccagctatatcgaaaaattagataactacgacgccgatgaaattgctccattatgtattgaacatgatttgaaggaggaagcttttgaaatctatgacaaacatgaaatgtacggtaaagctttaaaggttttaatcgaagacatcatgtctttagatagagctgcttcttatgctgataaaatcaatactcccgaattgtggtctcaaattggtacggctcagttagatggattaagaatcccagatgctattgagtcttatattaaagcagaagacccatccaattacgaaaatgtaattgatatagccgaacaagccggtaaatacgaagaattaattccatttttattgatggctagaaagactttgaaagaaccaaagatcgacggtgctttaatcttggcctatgctgaattgaacaagattcatgaaattgagaacttgttggcaggttccaatgttgcaaacttagatcatgttggtgataaattattcgagaataaagagtataaagcggccaggttatgttattctgctgtttctaattactccaagcttgcttctaccttggtttacttgggagattatcaggctgctgttgacactgctagaaaggcttctaacattaaagtttggaaattggttaacgacgcttgtattgaaaagaaagaattcaagttggctcaaatttgtgggttgaacttgatcgttcacgctgaagaattagatgaattagtggaaaggtatgaatctaacggctatttcgaagaattgatttctttgtttgaagctggtttgggacttgaaagagctcatatgggcatgttcactgaattggccattttgtattccaaatatgaaccagacaagaccttcgaacacttgaagcttttctggtccagaataaatattccaaaggttattagagctgtcgaacaagctcacctctggtctgaattggtctttttatatgctcactatgatgaatgggataatgctgctttaacattgatcgaaaaatctaccaaagacttggatcacgcctatttcaaagaagttgttgtcaaagtttctaacttagaaatctattacaaggccattaatttctacgtcaaatttcacccatctttattggttgatcttttgacctctttgacaccaagattagatattccaagaactgtcaaaattttctccaaatccgacaacttgcctttaatcaagcctttcttgatcaatgtcttaccaaaaaataactctgttgtcaaccaagcctaccacgatttgatgattgaagaagaagattataaagctttgcaagacgctgttgattcttatgacaaatttgaccaattgggattggcatctcgtttggaatctcataagttgatttttttcaagaaaataggagccttattataccgtagaaataagaagtgggcaaagagtctttctatcttgaaggaagaaaagttatggaaggacgctattgagacggcagcaatctctcaggatccaaaggtagtggaggctttactcacatatttcgttgaaaccggtaacagagaaggctttgttgctttgttatatgctgcttacaacttagtgagaattgaatttgttttagaaatatcttggatgaattctttggaggactacattaagccatttgaaatctccataaaaaaagagcagaatgattccattaagaaaatcaccgaagaactcgctaaaaagtccggatctaatgaagagcacaaagatggccaacctttgatgttaatgaacagcgcgatgaacgttcaacccacaggattttga

SEQ ID NO: 3767 - DNA, 2247 bp, Saccharomyces cerevisiae
atgacgagacgtactactattaatcccgattcggtggttctgaatcctcaaaaatttatccagaaagaaagggcggattcgaaaatcaaagttgaccaagttaacacatttttagagtcatccccggagaggagaactctgacgcacgccttaatagaccaaatagtgaatgatcctatattgaaaactgatacggactattacgatgctaaaaaaatgcaagagagagaaattactgccaaaaaaatagctaggcttgctagttatatggagcacgatatcaaaacagtgcgcaaacactttcgcgacactgacctgatgaaagagttgcaagcaaatgatccagacaaagcttcgcctttaacaaacaaagacctttttatattcgataagagattgtcacttgtagcaaatattgatcctcaattgggtacgcgcgtgggtgtacacttggggctatttggtaattgtatcaagggcaatggtactgatgagcaaatccggtattggttgcaggagagaggtgccactttgatgaaaggtatatatggctgttttgcaatgactgagttaggacatggttccaatgttgcccagctgcagactagggctgtgtacgataagcaaaatgatacttttgtaattgatacacctgatctaactgccaccaaatggtggattggtggggctgcccattctgccacgcacgctgccgtgtacgccagattgatcgttgaaggtaaagactacggtgtaaaaacattcgttgttcctctgagagacccttcgactttccaactgttagctggtgtttccataggggatattggagcgaagatgggtcgtgacggtattgataatggctggatccagttcagaaacgtagttatccctagagaatttatgctaagtagatttaccaaagttgtccgttctccagatggttcagtcaccgtcaaaactgagccacaattggatcaaatttctggttatagtgcattgttaagtggtagagttaacatggtcatggattcatttaggtttggctccaaatttgctactattgctgtacgttacgcggttggtcgtcagcaattcgcacctagaaagggattgtctgaaacacaattaatcgactatccccttcaccaatatcgtgttttaccacaattgtgtgttccatatttggtgtcacctgtagcttttaagttaatggacaactattattccactttggacgagttatacaacgcttcctcatctgcatacaaagctgctctggttaccgtgagtaaaaagttgaagaatttatttattgatagcgccagcttgaaagccaccaatacttggttaattgctacactgattgatgagttgagacagacttgcggaggacatgggtattcacagtataacggatttggtaaaggctatgacgactgggtggttcagtgcacatgggagggtgataataatgttttatctttaacttcagcaaaatcaatattgaaaaaatttatcgattcagccacaaagggtagatttgacaacacactggatgtggactcattctcttacttaaaacctcagtacataggatctgtggtttctggagaaataaagagtggtttaaaggagttgggtgattatactgaaatttggtctatcaccttaatcaaattactggcacatattggtactttagttgaaaaatcaagaagtattgatagcgtttctaagcttttagtcttagtatccaaatttcatgccttgcgctgcatgttgaaaacctattacgacaagttaaactctcgtgattcacatatttccgatgaaattacaaaggaatctatgtggaatgtttataagttattttccttgtattttattgacaagcattccggagaattccaacaattcaagatcttcactcctgatcagatctctaaagttgtgcagccacaactattggctcttttgccaattgtgaggaaagactgtataggtctgacagactcctttgaattacctgacgcgatgttaaattctcctataggttactttgatggcgatatctatcacaattacttcaatgaagtttgccgcaataatccagtggaggcagatggggcagggaagccttcttatcatgcgctgttgagcagcatgctcggtagaggtttcgaatttgaccaaaagttaggtggtgcagctaatgcggaaattttatcgaaaataaacaagtga

SEQ ID NO: 3768 - DNA, 2247 bp, Artificial Sequence
  Description of Artificial Sequence: Synthetic polynucleotide
atgacgagacgtactactattaatcccgattctgtggttttgaatcctcaaaaatttatccagaaagaaagggcggattctaaaatcaaagttgaccaagttaacacatttttagagtcttccccggagaggagaactttaacgcacgccttaatagaccaaatagtgaatgatcctatattgaaaactgatacggactattacgatgctaaaaaaatgcaagagagagaaattactgccaaaaaaatagctaggcttgctagttatatggagcacgatatcaaaacagtgcgcaaacactttcgcgacactgacttgatgaaagagttgcaagcaaatgatccagacaaagcttcccctttaacaaacaaagacctttttatattcgataagagattgtctcttgtagcaaatattgatcctcaattgggtacgcgcgtgggtgtacacttggggttgtttggtaattgtatcaagggcaatggtactgatgagcaaatcagatattggttgcaggagagaggtgccactttgatgaaaggtatatatggctgttttgcaatgactgagttaggacatggttccaatgttgcccagttacagactagggctgtgtacgataagcaaaatgatacttttgtaattgatacacctgatttgactgccaccaaatggtggattggtggggctgcccattctgccacgcacgctgccgtgtacgccagattgatcgttgaaggtaaagactacggtgtaaaaacattcgttgttcctttgagagacccttccactttccaattattagctggtgtttccataggggatattggagcgaagatgggtcgtgacggtattgataatggctggatccagttcagaaacgtagttatccctagagaatttatgttaagtagatttaccaaagttgtccgttctccagatggttctgtcaccgtcaaaactgagccacaattggatcaaatttctggttatagtgcattgttaagtggtagagttaacatggtcatggattcttttaggtttggctccaaatttgctactattgctgtacgttacgcggttggtcgtcagcaattcgcacctagaaagggattgtctgaaacacaattaatcgactatccccttcaccaatatcgtgttttaccacaattgtgtgttccatatttggtgtctcctgtagcttttaagttaatggacaactattattccactttggacgagttatacaacgcttcctcttctgcatacaaagctgctttggttaccgtgagtaaaaagttgaagaatttatttattgatagcgccagcttgaaagccaccaatacttggttaattgctacattaattgatgagttgagacagacttgcggaggacatgggtattctcagtataacggatttggtaaaggctatgacgactgggtggttcagtgcacatgggagggtgataataatgttttatctttaacttctgcaaaatctatattgaaaaaatttatcgattctgccacaaagggtagatttgacaacacattagatgtggactctttctcttacttaaaacctcagtacataggatctgtggtttctggagaaataaagagtggtttaaaggagttgggtgattatactgaaatttggtctatcaccttaatcaaattattggcacatattggtactttagttgaaaaatctagaagtattgatagcgtttctaagcttttagtcttagtatccaaatttcatgccttgcgctgcatgttgaaaacctattacgacaagttaaactctcgtgattctcatatttccgatgaaattacaaaggaatctatgtggaatgtttataagttattttccttgtattttattgacaagcattccggagaattccaacaattcaagatcttcactcctgatcagatctctaaagttgtgcagccacaattattggctcttttgccaattgtgaggaaagactgtataggtttaacagactcctttgaattacctgacgcgatgttaaattctcctataggttactttgatggcgatatctatcacaattacttcaatgaagtttgccgcaataatccagtggaggcagatggggcagggaagccttcttatcatgcgttattgagcagcatgctcggtagaggtttcgaatttgaccaaaagttaggtggtgcagctaatgcggaaattttatccaaaataaacaagtga

SEQ ID NO: 3769 - DNA, 306 bp, Saccharomyces cerevisiae
atgaatggaactgatatccttcgttttttgcaatcttcccccaccattagttacagcaaacattttatacttataacagcatgccctctgtttgtattaggactattattgttaggtcttagaacagcaatgttcaaacaagtaagaggtaaaacgacaacaagtagaaatagaggtgtcattgcggcaaagttattagttgcatggtatcttgccaccatagttatgtatattgctaaaagcgaaatgtggaaatatgcctttgctgtttcgctacttcttaatagtttggcactatttttttga

SEQ ID NO: 3770 - DNA, 306 bp, Artificial Sequence
  Description of Artificial Sequence: Synthetic polynucleotide
atgaatggaactgatatccttcgttttttgcaatcttcccccaccattagttacagcaaacattttatacttataacagcatgccctttatttgtattaggattattattgttaggtcttagaacagcaatgttcaaacaagtaagaggtaaaacgacaacaagtagaaatagaggtgtcattgcggcaaagttattagttgcatggtatcttgccaccatagttatgtatattgctaaaagcgaaatgtggaaatatgcctttgctgtttctttacttcttaatagtttggcattatttttttga

SEQ ID NO: 3771 - DNA, 2190 bp, Saccharomyces cerevisiae
atgttttacaataggtggctcggaacgtggctagccatgtctgctttaataaggatctcagtatcccttccgtcatctgaggagtacaaagtggcatatgagctgttgccagggttatctgaagtgccagacccttcaaatattccacagatgcatgctggccatattcctttacgttccgaagatgcggatgaacaggatagctctgacttggagtactttttttggaagtttaccaataacgactctaatggcaatgtcgaccgtcccttaattatatggttaaatggtggacccggttgctcttccatggatggtgccttggtcgaatccggcccttttagggtgaattcagacggtaaactttatctaaatgaagggtcctggatatccaaaggcgatcttttatttatcgaccaacctactggtactgggttttctgtcgaacaaaataaagacgaaggtaaaatcgacaaaaacaaatttgacgaagacctagaagatgtgaccaagcattttatggattttctggagaactatttcaagatttttccagaagacctcactaggaaaatcatactatcgggtgaaagttacgctggccaatacataccattctttgccaatgcaattttgaaccataacaaattttcaaagatcgacggggatacatacgacttgaaggcgctattgattggtaacggttggattgaccccaatacacagtccctatcgtaccttccgtttgctatggagaagaaactgattgatgaaagcaaccccaatttcaaacacttaacgaacgcacacgagaattgccagaatctgataaactctgccagtacagatgaggcagcccatttttcgtatcaggaatgtgagaatattttaaaccttctattgtcttataccagggaatcttcgcaaaagggaacagcggattgcttgaacatgtataacttcaatttaaaagatagttatccatcttgtggtatgaattggccgaaagatatttcctttgtcagtaaattcttcagcacacctggtgttattgattcgttgcatcttgattctgataaaattgatcattggaaggaatgcactaatagcgttggaactaaattgtctaatcctatttcaaagccatctatccatttattacctggtctacttgaaagtggaatagagattgtcttgttcaatggtgacaaagacttgatttgtaataacaagggcgtattagatactatagacaatctaaaatggggtggaataaagggatttagcgacgatgctgtttcgttcgattggatccataaatcgaagagtacagacgacagcgaagaatttagcggatacgtgaagtatgatagaaatttgacgtttgttagcgtttataatgcttctcacatggtacccttcgataaaagtttagtgagtagaggcattgtcgatatttactcgaacgatgttatgatcattgacaacaatgggaaaaatgttatgattactactgacgacgatagtgatcaagatgctactactgaaagcggtgataagccaaaagaaaacctcgaagaggaagaacaggaagcgcagaatgaggaaggaaaggaaaaagaaggcaataaagataaagatggcgatgatgataacgacaatgatgacgacgatgaagacgatcacaactccgagggcgacgacgatgatgacgatgacgatgatgaagacgataataatgaaaaacaaagtaatcaaggcctcgaggatagtagacataaatcttcagaatatgaacaagaagaggaagaggtagaagaatttgcagaagagatttcaatgtataaacacaaagcggtagtagttaccatcgttacatttttgatagtggttttaggagtttatgcgtatgatagaagagtgaggagaaaagcgcgtcacacaattttagttgatccaaataatagacaacatgacagtcccaataagacagtttcatgggcagatgatctggaaagcggactcggggcagaagatgatttagaacaagatgagcagttagaaggcggagcacccataagtagcacttctaacaaagcaggatctaaattgaaaactaagaaaaagaagaagtatactagccttccgaacactgaaatcgatgaatcttttgagatgactgatttttaa

SEQ ID NO: 3772 - DNA, 2190 bp, Artificial Sequence
  Description of Artificial Sequence: Synthetic polynucleotide
atgttttacaataggtggctcggaacgtggttggccatgtctgctttaataaggatctctgtatcccttccgtcttctgaggagtacaaagtggcatatgagttattgccagggttatctgaagtgccagacccttccaatattccacagatgcatgctggccatattcctttacgttccgaagatgcggatgaacaggatagctctgacttggagtactttttttggaagtttaccaataacgactctaatggcaatgtcgaccgtcccttaattatatggttaaatggtggacccggttgctcttccatggatggtgccttggtcgaatccggcccttttagggtgaatagtgacggtaaactttatttgaatgaagggtcctggatatccaaaggcgatcttttatttatcgaccaacctactggtactgggttttctgtcgaacaaaataaagacgaaggtaaaatcgacaaaaacaaatttgacgaagacttggaagatgtgaccaagcattttatggattttttggagaactatttcaagatttttccagaagacctcactaggaaaatcatattatctggtgaaagttacgctggccaatacataccattctttgccaatgcaattttgaaccataacaaattttccaagatcgacggggatacatacgacttgaaggcgttattgattggtaacggttggattgaccccaatacacagtccttatcttaccttccgtttgctatggagaagaaattgattgatgaaagcaaccccaatttcaaacacttaacgaacgcacacgagaattgccagaatttgataaactctgccagtacagatgaggcagcccatttttcttatcaggaatgtgagaatattttaaaccttttattgtcttataccagggaatcttctcaaaagggaacagcggattgcttgaacatgtataacttcaatttaaaagatagttatccatcttgtggtatgaattggccgaaagatatttcctttgtcagtaaattcttcagcacacctggtgttattgattctttgcatcttgattctgataaaattgatcattggaaggaatgcactaatagcgttggaactaaattgtctaatcctatttccaagccatctatccatttattacctggtttacttgaaagtggaatagagattgtcttgttcaatggtgacaaagacttgatttgtaataacaagggcgtattagatactatagacaatttgaaatggggtggaataaagggatttagcgacgatgctgtttctttcgattggatccataaatccaagagtacagacgacagcgaagaatttagcggatacgtgaagtatgatagaaatttgacgtttgttagcgtttataatgcttctcacatggtacccttcgataaaagtttagtgagtagaggcattgtcgatatttactctaacgatgttatgatcattgacaacaatgggaaaaatgttatgattactactgacgacgatagtgatcaagatgctactactgaaagcggtgataagccaaaagaaaacctcgaagaggaagaacaggaagcgcagaatgaggaaggaaaggaaaaagaaggcaataaagataaagatggcgatgatgataacgacaatgatgacgacgatgaagacgatcacaactccgagggcgacgacgatgatgacgatgacgatgatgaagacgataataatgaaaaacaaagtaatcaaggcctcgaggatagtagacataaatcttctgaatatgaacaagaagaggaagaggtagaagaatttgcagaagagatttccatgtataaacacaaagcggtagtagttaccatcgttacatttttgatagtggttttaggagtttatgcgtatgatagaagagtgaggagaaaagcgcgtcacacaattttagttgatccaaataatagacaacatgacagtcccaataagacagtttcctgggcagatgatttggaaagcggactcggggcagaagatgatttagaacaagatgagcagttagaaggcggagcacccataagtagcacttctaacaaagcaggatctaaattgaaaactaagaaaaagaagaagtatactagccttccgaacactgaaatcgatgaatcttttgagatgactgatttttga

SEQ ID NO: 3773 - DNA, 1503 bp, Saccharomyces cerevisiae
atgactttacctgaatcaaaagacttttcttacttgttttcggatgaaaccaatgctcgtaaaccatccccattgaaaacctgcatccatcttttccaagatcctaacattatctttttgggtggtggcctgccattaaaagattatttcccatgggataatctatctgtagattcacccaagcctccttttccccagggtattggagctccaattgacgagcagaattgcataaaatacaccgtcaacaaagattacgctgataaaagtgccaatccttccaacgatattcctttgtcaagagctttgcaatacgggttcagtgctggtcaacctgaactattaaacttcattagagatcataccaagattatccacgatttgaagtataaggactgggacgttttagccactgcaggtaacacaaatgcctgggaatctactttaagagtcttttgtaaccgaggtgatgtcatcttagttgaggcacattctttttcctcttcattggcttctgcagaggctcaaggtgtcattaccttccccgtgccaattgacgctgatggtatcattcctgaaaaattagctaaagtcatggaaaactggacacctggtgctcctaaaccaaagttgttatacactattccaacgggccaaaatccaactggtacttccattgcagaccatagaaaggaggcaatttacaagatcgctcaaaagtacgacttcctaattgtggaagatgaaccttattatttcttacaaatgaatccctacatcaaagacttgaaggaaagagagaaggcacaaagttctccaaagcaggaccatgacgaatttttgaagtccttggcaaacactttcctttccttggatacagaaggccgtgttattagaatggattccttttcaaaagttttggccccagggacaagattgggttggattactggttcatccaaaatcttgaagccttacttgagtttgcatgaaatgacgattcaagccccagcaggttttacacaagttttggtcaacgctacgctatccaggtggggtcaaaagggttacttggactggttgcttggcctgcgtcatgaatacactttgaaacgtgactgtgccatcgatgccctttacaagtatctaccacaatctgatgctttcgtgatcaatcctccaattgcaggtatgtttttcaccgtgaacattgacgcatctgtccaccctgagtttaaaacaaaatacaactcagacccttaccagctagaacagagtctttaccacaaagtggttgaacgtggtgttttagtggttcccggttcttggttcaagagtgagggtgagacggaacctcctcaacccgctgaatctaaagaagtcagtaatccaaacataattttcttcagaggtacctatgcagctgtctctcctgagaaactgactgaaggtctgaagagattaggtgatactttatacgaagaatttggtatttccaaatag

SEQ ID NO: 3774 - DNA, 1503 bp, Artificial Sequence
  Description of Artificial Sequence: Synthetic polynucleotide
atgactttacctgaaagtaaagacttttcttacttgttttctgatgaaaccaatgctcgtaaaccatccccattgaaaacctgcatccatcttttccaagatcctaacattatctttttgggtggtggcttaccattaaaagattatttcccatgggataatttatctgtagattctcccaagcctccttttccccagggtattggagctccaattgacgagcagaattgcataaaatacaccgtcaacaaagattacgctgataaaagtgccaatccttccaacgatattcctttgtccagagctttgcaatacgggttcagtgctggtcaacctgaattattaaacttcattagagatcataccaagattatccacgatttgaagtataaggactgggacgttttagccactgcaggtaacacaaatgcctgggaatctactttaagagtcttttgtaacagaggtgatgtcatcttagttgaggcacattctttttcctcttctttggcttctgcagaggctcaaggtgtcattaccttccccgtgccaattgacgctgatggtatcattcctgaaaaattagctaaagtcatggaaaactggacacctggtgctcctaaaccaaagttgttatacactattccaacgggccaaaatccaactggtacttccattgcagaccatagaaaggaggcaatttacaagatcgctcaaaagtacgacttcttgattgtggaagatgaaccttattatttcttacaaatgaatccctacatcaaagacttgaaggaaagagagaaggcacaaagttctccaaagcaggaccatgacgaatttttgaagtccttggcaaacactttcctttccttggatacagaaggccgtgttattagaatggattccttttccaaagttttggccccagggacaagattgggttggattactggttcttccaaaatcttgaagccttacttgagtttgcatgaaatgacgattcaagccccagcaggttttacacaagttttggtcaacgctacgttatccaggtggggtcaaaagggttacttggactggttgcttggcttgcgtcatgaatacactttgaaacgtgactgtgccatcgatgccctttacaagtatttaccacaatctgatgctttcgtgatcaatcctccaattgcaggtatgtttttcaccgtgaacattgacgcatctgtccaccctgagtttaaaacaaaatacaacagcgacccttaccagttagaacagagtctttaccacaaagtggttgaacgtggtgttttagtggttcccggttcttggttcaagagtgagggtgagacggaacctcctcaacccgctgaatctaaagaagtcagtaatccaaacataattttcttcagaggtacctatgcagctgtctctcctgagaaattaactgaaggtttgaagagattaggtgatactttatacgaagaatttggtatttccaaatga

SEQ ID NO: 3775 - DNA, 3054 bp, Saccharomyces cerevisiae
atgtcatccccttttccagctgacacaccaagcagtaatagaccttccaactcctctccgccaccatcgtcgataggtgctggcttcggaagcagtagcggactcgattcgcaaataggctctaggttacatttcccaagttcttctcaaccgcatgtcagtaattcacaaacaggcccttttgttaacgattccactcagtttagttctcaaaggttgcaaaccgatggttccgcgactaatgatatggagggaaatgaacctgccagaagcttcaaaagtagagctttgaatcacgttaagaaagttgatgacgttactggtgaaaaagtccgtgaagcgttcgagcagtttttggaagacttttccgttcaatccactgatactggtgaagttgaaaaagtttatagagctcaaattgaatttatgaaaatatatgacctaaacaccatttatatagattatcagcatttatccatgagagaaaatggtgctctagctatggctatctcagaacaatattacagatttttgccttttttacaaaagggtttaagaagagtagtaagaaagtatgcacctgaattgttaaacacaagtgactcattgaagagatccgaaggtgacgaaggtcaagcggatgaagatgagcaacaggacgatgatatgaatgggtcgagtctaccaagagattctggatcatcagccgcaccagggaatgggacatctgccatggcaacgaggtcaataacaacttctacgtcacctgaacagacggaacgtgtttttcaaatcagtttcttcaatctaccaacagttcacagaattcgtgatataagatctgaaaagattggttcactattgagtatatcagggacagtgacaagaacatctgaggtccgtccagaattatacaaggcaagctttacgtgtgatatgtgccgtgctatcgtagataacgtagaacagtccttcaagtacactgaaccgacattttgcccgaacccatcatgcgaaaatagagccttttggacattaaatgttacaagatccaggtttcttgattggcaaaaagtcagaattcaagaaaatgctaacgaaatacctacaggctccatgccgcgtacgctggacgtcattcttcgaggtgatagtgtcgaaagagccaagccaggtgaccgttgcaaatttacgggtgtggaaattgtagtacctgatgttacacaattggggctaccaggtgtgaagccaagttcaacattagatactagaggtatttcgaagactactgaaggtttgaatagtggtgttactggtttacgctctcttggtgttcgtgatttgacatacaagattagctttctggcatgccatgttatcagtattggatcaaacattggtgcaagtagccctgatgcaaattctaacaaccgagaaactgaactacagatggctgctaatttacaagctaataatgtataccaagataatgaaagagatcaagaagtattcttgaacagtttgagttcagatgaaataaatgagctgaaggaaatggtaaaggatgaacatatttatgataaattggtcagatctattgctccagctgtgtttggccatgaagccgtaaagaagggtatcttgcttcagatgctcggtggtgttcataagagtactgtagaaggtattaagttaagaggagatatcaacatctgtgttgttggtgatccctctacttctaagtctcaatttttaaaatacgtagtgggatttgcaccaagatcagtttacacttccggtaaggcctcgtcggctgctggtttaacagctgcggttgtgagagatgaggaaggaggtgattatacaattgaagcaggtgctttaatgcttgctgataacggtatttgttgtatcgatgaatttgataaaatggatatttcagatcaagttgccattcatgaagctatggaacaacagaccatctctattgctaaagctggtattcacgctactttaaatgcaagaacatcaattctagcggctgccaacccggtaggtggaagatacaataggaaactatcactgaggggtaatttaaatatgaccgcaccgatcatgtccagatttgatttattttttgttattcttgatgactgtaacgaaaaaattgataccgaattggcatctcatatcgttgacttacacatgaaaagagacgaagccattgagccgccatttagtgcagaacaactacgtcgttatatcaaatatgcacgtacttttaaaccaatattaacgaaagaagcccgttcctatttagtcgagaagtataaggaactgagaaaggatgatgcccagggatttagtagatcgagttatagaatcacagttaggcaacttgaaagtatgattagattatcagaagctattgcgagggctaattgtgtcgatgaaattactccatcattcattgcagaagcttacgatcttttaaggcaaagtattattcgtgttgatgtggatgatgtggaaatggatgaagaatttgataacatagagagtcaaagtcacgccgcttctggaaacaatgatgacaatgatgatgggactgggtcaggtgtaattacgagtgagccaccagcagatatagaagaaggacaaagcgaagctacagctcgtccaggtacaagcgagaagaagaaaacaacggtgacgtatgataaatatgtgtccatgatgaacatgatcgttagaaagattgctgaagtagatagggagggtgcagaagaactaacagctgtggatatagttgattggtatttattacagaaggaaaatgatttgggttcgttagcagaatattgggaagagagaagattagcgttcaaagtcataaaaaggttggtcaaagataggattttaatggagattcatggtaccagacacaatttaagagatcttgagaatgaggaaaatgaaaataataaaactgtttatgttattcatccaaactgtgaggttttggatcaattggaaccacaggattccagctaa

SEQ ID NO: 3776 - DNA, 3054 bp, Artificial Sequence
  Description of Artificial Sequence: Synthetic polynucleotide
atgtcttccccttttccagctgacacaccaagcagtaatagaccttccaactcctctccgccaccatcttctataggtgctggcttcggaagcagtagcggactcgattctcaaataggctctaggttacatttcccaagttcttctcaaccgcatgtcagtaattctcaaacaggcccttttgttaacgattccactcagtttagttctcaaaggttgcaaaccgatggttccgcgactaatgatatggagggaaatgaacctgccagaagcttcaaaagtagagctttgaatcacgttaagaaagttgatgacgttactggtgaaaaagtccgtgaagcgttcgagcagtttttggaagacttttccgttcaatccactgatactggtgaagttgaaaaagtttatagagctcaaattgaatttatgaaaatatatgacttgaacaccatttatatagattatcagcatttatccatgagagaaaatggtgctttggctatggctatcagtgaacaatattacagatttttgccttttttacaaaagggtttaagaagagtagtaagaaagtatgcacctgaattgttaaacacaagtgactctttgaagagatccgaaggtgacgaaggtcaagcggatgaagatgagcaacaggacgatgatatgaatgggagtagtttaccaagagattctggaagttctgccgcaccagggaatgggacatctgccatggcaacgaggtctataacaacttctacgtctcctgaacagacggaacgtgtttttcaaatcagtttcttcaatttaccaacagttcacagaattcgtgatataagatctgaaaagattggttctttgttgagtataagcgggacagtgacaagaacatctgaggtccgtccagaattatacaaggcaagctttacgtgtgatatgtgccgtgctatcgtagataacgtagaacagtccttcaagtacactgaaccgacattttgcccgaacccaagttgcgaaaatagagccttttggacattaaatgttacaagatccaggtttcttgattggcaaaaagtcagaattcaagaaaatgctaacgaaatacctacaggctccatgccgcgtacgcttgacgtcattcttcgtggtgatagtgtcgaaagagccaagccaggtgaccgttgcaaatttacgggtgtggaaattgtagtacctgatgttacacaattggggttaccaggtgtgaagccaagttctacattagatactagaggtatttccaagactactgaaggtttgaatagtggtgttactggtttacgctctcttggtgttcgtgatttgacatacaagattagctttttggcatgccatgttatcagtattggaagtaacattggtgcaagtagccctgatgcaaattctaacaacagagaaactgaattacagatggctgctaatttacaagctaataatgtataccaagataatgaaagagatcaagaagtattcttgaacagtttgagttctgatgaaataaatgagttgaaggaaatggtaaaggatgaacatatttatgataaattggtcagatctattgctccagctgtgtttggccatgaagccgtaaagaagggtatcttgcttcagatgctcggtggtgttcataagagtactgtagaaggtattaagttaagaggagatatcaacatctgtgttgttggtgatccctctacttctaagtctcaatttttaaaatacgtagtgggatttgcaccaagatctgtttacacttccggtaaggcctcttctgctgctggtttaacagctgcggttgtgagagatgaggaaggaggtgattatacaattgaagcaggtgctttaatgcttgctgataacggtatttgttgtatcgatgaatttgataaaatggatatttctgatcaagttgccattcatgaagctatggaacaacagaccatctctattgctaaagctggtattcacgctactttaaatgcaagaacatccattttggcggctgccaacccggtaggtggaagatacaataggaaattatctttgaggggtaatttaaatatgaccgcaccgatcatgtccagatttgatttattttttgttattcttgatgactgtaacgaaaaaattgataccgaattggcatctcatatcgttgacttacacatgaaaagagacgaagccattgagccgccatttagtgcagaacaattgcgtcgttatatcaaatatgcacgtacttttaaaccaatattaacgaaagaagcccgttcctatttagtcgagaagtataaggaattgagaaaggatgatgcccagggatttagtagaagtagttatagaatcacagttaggcaacttgaaagtatgattagattatctgaagctattgcgagggctaattgtgtcgatgaaattactccatctttcattgcagaagcttacgatcttttaaggcaaagtattattcgtgttgatgtggatgatgtggaaatggatgaagaatttgataacatagagagtcaaagtcacgccgcttctggaaacaatgatgacaatgatgatgggactgggtctggtgtaattacgagtgagccaccagcagatatagaagaaggacaaagcgaagctacagctcgtccaggtacaagcgagaagaagaaaacaacggtgacgtatgataaatatgtgtccatgatgaacatgatcgttagaaagattgctgaagtagatagggagggtgcagaagaattaacagctgtggatatagttgattggtatttattacagaaggaaaatgatttgggttctttagcagaatattgggaagagagaagattagcgttcaaagtcataaaaaggttggtcaaagataggattttaatggagattcatggtaccagacacaatttaagagatcttgagaatgaggaaaatgaaaataataaaactgtttatgttattcatccaaactgtgaggttttggatcaattggaaccacaggattccagctga

SEQ ID NO: 3777 - DNA, 612 bp, Saccharomyces cerevisiae
atggcctcatttgctactaagtttgtcattgcttgcttcctgttcttctcggcgtccgcccataatgtccttcttccagcttatggccgtagatgcttcttcgaagacttgagtaagggtgacgagctctccatttcgttccagttcggtgatagaaaccctcaatccagtagccagctgactggtgactttatcatctacgggccggaaagacatgaagttttgaaaacggttagggacacgtcgcacggtgaaatcacattgtctgctccatacaagggacatttccaatactgtttcttgaacgagaacaccggtatcgagacaaaagacgtgactttcaacattcatggggtggtatatgtggatttggacgacccaaacaccaatacattggatagtgctgtcagaaagttgtccaaattaaccagggaagtcaaggacgaacaaagttatattgttattagagaaaggacgcatagaaatactgcagagtcgaccaacgatcgtgttaaatggtggtccatcttccaattgggcgtcgttattgcaaactctcttttccagatatactacttgagaagattctttgaggtcacatctctagtctaa

SEQ ID NO: 3778 - DNA, 612 bp, Artificial Sequence
  Description of Artificial Sequence: Synthetic polynucleotide
atggcctcttttgctactaagtttgtcattgcttgcttccttttcttctctgcgtccgcccataatgtccttcttccagcttatggccgtagatgcttcttcgaagacttgagtaagggtgacgagctctccatttctttccagttcggtgatagaaaccctcaatccagtagccagttgactggtgactttatcatctacgggccggaaagacatgaagttttgaaaacggttagggacacgagccacggtgaaatcacattgtctgctccatacaagggacatttccaatactgtttcttgaacgagaacaccggtatcgagacaaaagacgtgactttcaacattcatggggtggtatatgtggatttggacgacccaaacaccaatacattggatagtgctgtcagaaagttgtccaaattaaccagggaagtcaaggacgaacaaagttatattgttattagagaaaggacgcatagaaatactgcagagtctaccaacgatcgtgttaaatggtggtccatcttccaattgggcgtcgttattgcaaactctcttttccagatatactacttgagaagattctttgaggtcacatctttggtctga

SEQ ID NO: 3779 - DNA, 708 bp, Saccharomyces cerevisiae
atgtcatacggaagagaagacactacgattgagcccgacttcatagaaccagatgcacctttggctgcttccgggggtgttgctgacaacataggcggaactatgcagaattcaggcagcagagggacgctcgacgagactgtgctgcaaacactaaagcgagatgtggtggagattaattccagactgaaacaagtggtatacccgcatttcccctcattctttagcccctctgatgacgggataggggcggctgataacgacatttcagccaattgcgacctgtgggcgccccttgcgtttatcatattgtattctctatttgtatcgcatgcgcggtcgctgttctcgagcctatttgtgtctagttggttcattttgctggtgatggcattgcatctgagactcaccaagccacaccagagggtgtcgctgatttcgtacatctccatttccgggtattgcttattcccacaagtgctgaatgccttagtctcgcagatactacttccattggcctaccatattggaaagcaaaatcgctggattgtgagggtcctgtcgctcgtgaaactggtggtcatggcgctgtgcctgatgtggtctgtggccgccgtttcgtgggttaccaagagcaagaccattatcgagatataccctctggcactctgtctttttggcatggcctggttgtcaactattttataa

SEQ ID NO: 3780 - DNA, 708 bp, Artificial Sequence
  Description of Artificial Sequence: Synthetic polynucleotide
atgagttacggaagagaagacactacgattgagcccgacttcatagaaccagatgcacctttggctgcttccgggggtgttgctgacaacataggcggaactatgcagaatagtggcagcagagggacgctcgacgagactgtgttgcaaacattgaagagagatgtggtggagattaattccagattgaaacaagtggtatacccgcatttcccctctttctttagcccctctgatgacgggataggggcggctgataacgacatttctgccaattgcgacttatgggcgccccttgcgtttatcatattgtattctttatttgtatctcatgcgagatctttattcagtagcttgtttgtgtctagttggttcattttgttggtgatggcattgcatttaagactcaccaagccacaccagagggtgtctttgatttcttacatctccatttccgggtattgcttattcccacaagtgttgaatgccttagtctcccagatattacttccattggcctaccatattggaaagcaaaatcgctggattgtgagggtcctttctctcgtgaaattagtggtcatggcgttatgcttgatgtggtctgtggccgccgtttcctgggttaccaagagcaagaccattatcgagatataccctttggcactctgtctttttggcatggcctggttgtctactattttatga

SEQ ID NO: 3781 - DNA, 4464 bp, Saccharomyces cerevisiae
atgcctttattacaaccatccacttgcttctgctaccctttgaagcttccgccattaccactgacttccgattccaacgagtttgatgaatgcgccaggaaaaggttaacgctggactatagaacaggttcagcggtgacgctaacaaggtctaatatatttgtacatggtggtctaaccatcccgttgaacctgccagttgtaaattctatgcaattacaaaaggagcttattctcttttttgcaaaggaaaaaaacaacggtagttcttttaggaatttaaacgagtggataagtaaggagacgtttttcttagacttgatgtctagaacctggtacagagtcaagacctcctttgaccaaaggacagaggaattattaaaggcagagagttctagcgccaaagcagataatgacacaaacgagattagaacggacattaagaaaggtaaatcccttgaatctccgctcaaggagaggctattccattccttatgttatttagatggctgtttatatatatttggtggtctcacagtgtctcctcagagcggatatgagttgattgctaccaatgagttgtggaaactggatttaaacacgaagaagtggtcgcttttgagtgatgaccctcaaatagcgagaaggttcaaccataccatgcatgtaaagaacgaaaataacgataatagagacacgaaattaataattgtcggaggtcttaataacatggatcagccggtcaagaaaatagacatctataacatctcacagaattgctggcaatccgaaaccatacccaaacaaccgatggaaatcactacaaatgtcaatggcataccattagcattatcaaaggatcagaatttttcgattttagttgaaaataatgaggccaacgttccagcgctggcattctatatgagaagtgatcaaatagacgaatatctcggaaaggattcatcaaagataaaggagaattcgcctatagtggcgttgccgctattgtctgaatcgcaaggtattagaatgccctcaaacccggcattaccgaaaaaactattgaatgttccgtatgagctattagcaccgacaggtgactattttggattcaatatcataatcggtgggtttcatccaaattaccaatcctctaactttcattgttttatatacgatattaactccggaaagtggtcacgagtcgctaccgcctgccctgactgcgatatcaataaacatcgattctggagggtatttgtttggaaatcgcatcatcagacgattttgttgggtaccaagactgatgattattattcacccagtgtacaaagattcgaccatctttccacttttggattaccgctggtaaatatttttaacaagacgatccaattaccccatcacaagatctcagcttcgtctttaccaatacccatagaaaattttgcgaagcataaggatactccattaaaaaaggtgagcttcacttcatcagctacctcccaatttgaaaactacattagatatatagctccgcccttggaaatgtcttctatccaatctgtgtttccaccgtatgccatggttctaggtaaagacgctttagagatttacgggaagcctctttctgattttgaatttattactagtgaaggtgactccattggtataccatgctatttgctgaggaaaagatggggccgttatttcgacatgcttttatcccagagttatacaaaagtttgtgctgattatgaaactactgatacgcaatctacactaataaaattttcaccacattcatctagaaacagttctaaagctgtgaggcaagaaggtagactctcttcatcgggttcactggacaattatttcgaaaaaaacttcccaatctttgcgagaacaagtgtttccgaggcccagaacacacaacctcaggtagcgaatgctgatgcgaaagctccaaatacacctagtacgtcagatgaaccaagctcttcctcctcttccgatttatactccactcctcattaccaacgtaataatgatgaagaggatgacgaggacccggtttccccgaagcctgtatcaaaatcaaacagtatctatagacccattagaaagacagaaagttcatcaacaacgagttcttcaaacggtatgattttcagagtacctttcaaggaaaaagcggctgtaacgtcaaacactgaagccctcttggagtcaaacctttcacttcaagaattgagccgaagaagatcatcacttatgagcatcccgtctggtgaacttctaaggtcctctatatctgaagcggaacatcaacgtcgtgcatctcatccactcacttcatcaccgctctttgaagatagtggaaccccttgcggcaaacaactgcaacaactgcaacaacatactatacaaaatcctcataaccatttgtcgccccggaggttttcaagaagtgcaagaagttcaatttcctacgtgagttcttcttccgatagacgtggaaattcaatttctagcaggagcacaagcgatagctttggaactccaccagttttgggcgttttgaatgtaccattacctcctcaaacaagagaacctaatgaaccacctccaccatgtcctgcaatgagtaccggctcaaatacaaggcgaagcaacaccttaacggattatatgcattctaacaaggctagcccgttttcttctcgtagatcgtcgcatatcggtagacgttctagtacaccggaaacggaaaacgcattctctgcaacaccaagagcatccttagatggtcaaatgttaggaaaatctttgaaggaaggttctacatcacagtacacacagccaaggatgaactctttcccaaaggctaatgaaaccatacaaacacccacatcatcaaacaatgaatggagccgtcaatccgttacttcaaatacagatagttttgacagtttgcaatctaattttgcgttagagttggaaccacttttaacaccgaggtcactttatatgccttggccaacctccacagttcgagcatttgcggaatttttttacactgggcaagtaaacagtaaatggcttttggcaccagttgctcttgatttattagtaatggccaagatttatgaaataccattactgtataaattgatccttgaagttttatattcgattctggctaaaaaagaagaaagtttatccttaatatgtacttcgttaatggagacctttcgcaccaaaactctgaactcctataaaggtgatgaagaaaaaacaaatacttatttgacttcaaacgataactatcaggaactgttgaaattaaaagtgtcgctggagaatatcgacaatgggtattatgacccagatttgttacgcaaacagtcaagagcacagtcttcaagcacacaagaaagcagtggtagtgcaaacggcgaaaaaactgcaactggcgctggctctctggagacttcttcaaccaatgtccctacagtatttgctggcggtcccagagatagccacaattcagtaggctccattggttttccaaacagtatgaatatacaaggctcaagaagatcgacatcaggattttctccacgcgttaagatgaaatcgagcttaagcaaggaaatagatcccaaaactttttatgaagagtacgaaccaaaagagggcaaaagttttgatgataacgatgatcaacaaaccaacatcggaagttttaaccttcatttgtttgatatgaattatggttccatcagcagcagtagcactaacagcattagtagcagtgatttagaagagaaagaagaacaagagcaacttcaagatttattggaaatagaaagagaagattctgctgagatcttagacgcaagattcagaaacaaagaagatgataaagtgacgaaggatatatcaaatgacaagaaacgcaattacttaccgcatgaaaaaaataacttgaaagccaaggaaggtaaggaaactagagacgtaagggaggaggaggaagaattcgattttggtttgggaatgctttcgctcaataaaataaaaagagaagccaagcatgtcgataaggtggacgattctgtagaccctttatttaaatcatctgctttccctcaaagtcccattcgagcatacgggtctaccacaagaactagttcggcttctggaaagccattcagggacaatcgttcatttaatgcattttctgttttgacattagaaaatatggcgtctgcaaatgccctacctcccgttgattatgtcataaaatcaatatacagaaccactgtgttagtgaacgatatcagactaatggttcgttgcatggattgcattgaattatctaaaaatttacgagcgctcaagaaaaaaactatggaagatatttcgaaattgaaaggcatctctaaaccgtcaccatag

SEQ ID NO: 3782 - DNA, 4464 bp, Artificial Sequence
  Description of Artificial Sequence: Synthetic polynucleotide
atgcctttattacaaccatccacttgcttctgctaccctttgaagcttccgccattaccattgacttccgattccaacgagtttgatgaatgcgccaggaaaaggttaacgcttgactatagaacaggttctgcggtgacgttgacaaggtctaatatatttgtacatggtggtttgaccatcccgttgaacttaccagttgtaaattctatgcaattacaaaaggagcttattctcttttttgcaaaggaaaaaaacaacggtagttcttttaggaatttaaacgagtggataagtaaggagacgtttttcttagacttgatgtctagaacctggtacagagtcaagacctcctttgaccaaaggacagaggaattattaaaggcagagagttctagcgccaaagcagataatgacacaaacgagattagaacggacattaagaaaggtaaatcccttgaatctccgctcaaggagaggttgttccattccttatgttatttagatggctgtttatatatatttggtggtctcacagtgtctcctcagagcggatatgagttgattgctaccaatgagttgtggaaattggatttaaacacgaagaagtggagtcttttgagtgatgaccctcaaatagcgagaaggttcaaccataccatgcatgtaaagaacgaaaataacgataatagagacacgaaattaataattgtcggaggtcttaataacatggatcagccggtcaagaaaatagacatctataacatctctcagaattgctggcaatccgaaaccatacccaaacaaccgatggaaatcactacaaatgtcaatggcataccattagcattatccaaggatcagaatttttctattttagttgaaaataatgaggccaacgttccagcgttggcattctatatgagaagtgatcaaatagacgaatatctcggaaaggattcttccaagataaaggagaattctcctatagtggcgttgccgttattgtctgaatctcaaggtattagaatgccctctaacccggcattaccgaaaaaacttttgaatgttccgtatgagttattagcaccgacaggtgactattttggattcaatatcataatcggtgggtttcatccaaattaccaatcctctaactttcattgttttatatacgatattaactccggaaagtggagcagagtcgctaccgcctgccctgactgcgatatcaataaacatagattctggagggtatttgtttggaaatctcatcatcagacgattttgttgggtaccaagactgatgattattattctcccagtgtacaaagattcgaccatctttccacttttggattaccgttagtaaatatttttaacaagacgatccaattaccccatcacaagatctctgcttcttctttaccaatacccatagaaaattttgcgaagcataaggatactccattaaaaaaggtgagcttcacttcttctgctacctcccaatttgaaaactacattagatatatagctccgcccttggaaatgtcttctatccaatctgtgtttccaccgtatgccatggttttaggtaaagacgctttagagatttacgggaagcctctttctgattttgaatttattactagtgaaggtgactccattggtataccatgctatttgttgaggaaaagatggggccgttatttcgacatgcttttatcccagagttatacaaaagtttgtgctgattatgaaactactgatacgcaatctacattaataaaattttctccacattcttctagaaacagttctaaagctgtgaggcaagaaggtagactctcttcttctggttctttggacaattatttcgaaaaaaacttcccaatctttgcgagaacaagtgtttccgaggcccagaacacacaacctcaggtagcgaatgctgatgcgaaagctccaaatacacctagtacgtctgatgaaccaagctcttcctcctcttccgatttatactccactcctcattaccaacgtaataatgatgaagaggatgacgaggacccggtttccccgaagcctgtatccaaaagtaacagtatctatagacccattagaaagacagaaagttcttctacaacgagttcttccaacggtatgattttcagagtacctttcaaggaaaaagcggctgtaacgtccaacactgaagccctcttggagagcaacctttctcttcaagaattgagcagaagaagaagttctcttatgagcatcccgtctggtgaacttttgaggtcctctatatctgaagcggaacatcaacgtcgtgcatctcatccactcacttcttctccgctctttgaagatagtggaaccccttgcggcaaacaattacaacaattacaacaacatactatacaaaatcctcataaccatttgagccccagaaggttttccagaagtgcaagaagttctatttcctacgtgagttcttcttccgatagacgtggaaattctatttctagcaggagcacaagcgatagctttggaactccaccagttttgggcgttttgaatgtaccattacctcctcaaacaagagaacctaatgaaccacctccaccatgtcctgcaatgagtaccggcagtaatacaaggagaagcaacaccttaacggattatatgcattctaacaaggctagcccgttttcttctcgtagatcttctcatatcggtagacgttctagtacaccggaaacggaaaacgcattctctgcaacaccaagagcatccttagatggtcaaatgttaggaaaatctttgaaggaaggttctacatctcagtacacacagccaaggatgaactctttcccaaaggctaatgaaaccatacaaacacccacatcttccaacaatgaatggagccgtcaatccgttacttccaatacagatagttttgacagtttgcaatctaattttgcgttagagttggaaccacttttaacaccgaggagtctttatatgccttggccaacctccacagttagagcatttgcggaatttttttacactgggcaagtaaacagtaaatggcttttggcaccagttgctcttgatttattagtaatggccaagatttatgaaataccattattatataaattgatccttgaagttttatattctattttggctaaaaaagaagaaagtttatccttaatatgtacttctttaatggagacctttcgcaccaaaactttgaactcctataaaggtgatgaagaaaaaacaaatacttatttgacttctaacgataactatcaggaattattgaaattaaaagtgtctttggagaatatcgacaatgggtattatgacccagatttgttacgcaaacagtctagagcacagtcttctagcacacaagaaagcagtggtagtgcaaacggcgaaaaaactgcaactggcgctggctctttggagacttcttccaccaatgtccctacagtatttgctggcggtcccagagatagccacaattctgtaggctccattggttttccaaacagtatgaatatacaaggctccagaagatctacatctggattttctccacgcgttaagatgaaaagtagcttaagcaaggaaatagatcccaaaactttttatgaagagtacgaaccaaaagagggcaaaagttttgatgataacgatgatcaacaaaccaacatcggaagttttaaccttcatttgtttgatatgaattatggttccatcagcagcagtagcactaacagcattagtagcagtgatttagaagagaaagaagaacaagagcaacttcaagatttattggaaatagaaagagaagattctgctgagatcttagacgcaagattcagaaacaaagaagatgataaagtgacgaaggatatatccaatgacaagaaacgcaattacttaccgcatgaaaaaaataacttgaaagccaaggaaggtaaggaaactagagacgtaagggaggaggaggaagaattcgattttggtttgggaatgctttctctcaataaaataaaaagagaagccaagcatgtcgataaggtggacgattctgtagaccctttatttaaatcttctgctttccctcaaagtcccattagagcatacgggtctaccacaagaactagttctgcttctggaaagccattcagggacaatcgttcttttaatgcattttctgttttgacattagaaaatatggcgtctgcaaatgccttgcctcccgttgattatgtcataaaatctatatacagaaccactgtgttagtgaacgatatcagattaatggttcgttgcatggattgcattgaattatctaaaaatttaagagcgctcaagaaaaaaactatggaagatatttccaaattgaaaggcatctctaaaccgtctccatga

SEQ ID NO: 3783 - DNA, 1287 bp, Saccharomyces cerevisiae
atgagcgatgttctatctcaatataaagggtgctcagtcagagatttacccacacccaatttcgttattaatgaagaaaaatttgataagaattgtacgacaatgttgaacaacgttgaaaagctcagccaggaatgtggcgtaccaatcaaatttcgtgcacacgtaaaaacgcataagacagcaaagggaactttgaaacaattgggccacggacttccattggctaaacgcactacaagagccatattagtatcaactttgaaagaagcagaagaacttcttaattatcaagatagacaatgttcggattatattgacgatataacatatagtttaccctgttgcgttccagagtttattcctcttttgagcaatttgtcaagaagggtgaataattttcaggtttttgttgataacattgaacacttggagaatttaaagaatttcggtaggcctgcttccggcaagaaatggtcggtttttatcaaggttgatatggggactaagagggcaggtcttgctttcgactctccagaatttttgagtcttttaaaaaaactgacttcctcagaaattaaagaagtaattgagccatatgggttttatgctcatgccggacacagctactcttcaacctcgatcaacgacactcagaatcttttgatggaagaagtgaaagcagtcaattctgccgctaaagttttgtgctctgtggatcctcagtttgatccttctaaattaacactttctgtgggcgctactccgacttccaattctttgaaactcgataataaaagtacccttgttaaattcattactactcaattagttagtacgcttgaaatccactgcggtaattactgcatgtatgacctgcaacaggtggcaacaggctgtgtccaagatcacgaattgtctggttttgtattaggaacagtactatcatcttacccttctagaggtgaattgttgagtaatacaggtgtaatgtgtctaacgcgagaagcatcctcaataaaagggtttggaatatgtgctgatttggaacatgtgttaaaatccgagagtttcagtagggaatggtatgtagcaagggtctctcaagaacacgggatactgaggccaataagaaactggaacgaaactactccattaaaattaggcagcaaaattgccgtccttcctcaacacgcttgtatcacaatgggacaatttccatattatttcgtggtaaacagcgaaggcattgtcaacgatgtttggttaccttttcagaaatggtaa

SEQ ID NO: 3784 - DNA, 1287 bp, Artificial Sequence
  Description of Artificial Sequence: Synthetic polynucleotide
atgagcgatgttttatctcaatataaagggtgcagcgtcagagatttacccacacccaatttcgttattaatgaagaaaaatttgataagaattgtacgacaatgttgaacaacgttgaaaagctcagccaggaatgtggcgtaccaatcaaatttcgtgcacacgtaaaaacgcataagacagcaaagggaactttgaaacaattgggccacggacttccattggctaaacgcactacaagagccatattagtatccactttgaaagaagcagaagaacttcttaattatcaagatagacaatgttctgattatattgacgatataacatatagtttaccctgttgcgttccagagtttattcctcttttgagcaatttgtccagaagggtgaataattttcaggtttttgttgataacattgaacacttggagaatttaaagaatttcggtaggcctgcttccggcaagaaatggtctgtttttatcaaggttgatatggggactaagagggcaggtcttgctttcgactctccagaatttttgagtcttttaaaaaaattaacttccagtgaaattaaagaagtaattgagccatatgggttttatgctcatgccggacacagctactcttccacctctatcaacgacactcagaatcttttgatggaagaagtgaaagcagtcaattctgccgctaaagttttgtgctctgtggatcctcagtttgatccttctaaattaacactttctgtgggcgctactccgacttccaattctttgaaactcgataataaaagtacccttgttaaattcattactactcaattagttagtacgcttgaaatccactgcggtaattactgcatgtatgacttgcaacaggtggcaacaggctgtgtccaagatcacgaattgtctggttttgtattaggaacagtattatcttcttacccttctagaggtgaattgttgagtaatacaggtgtaatgtgtttgacgagagaagcatcctccataaaagggtttggaatatgtgctgatttggaacatgtgttaaaatccgagagtttcagtagggaatggtatgtagcaagggtctctcaagaacacgggatattaaggccaataagaaactggaacgaaactactccattaaaattaggcagcaaaattgccgtccttcctcaacacgcttgtatcacaatgggacaatttccatattatttcgtggtaaacagcgaaggcattgtcaacgatgtttggttaccttttcagaaatggtga

SEQ ID NO: 3785 - DNA, 8019 bp, Saccharomyces cerevisiae
atgacagctatcttaaactgggaagatatatcccctgttttagagaaaggcacccgcgaatcacacgtgtctaaaagagttccctttttgcaagatatatcacaattagttcgtcaagaaacattggaaaaacctcaattatctgaaattgctttcgttttattgaataccttcacgatttacgaagacaataggtctaaaagtttggtaacttcaatattgcttgacatcttaaatctagagccatgtctcctagaaaactttatccgattcatttccgacgtggtcatcagtaatccggctaccaaagcagtcgctgattaccttaatttgttagattggattaattctttcttgatttttgtgtcgcataattctaatttatttgaagagtacattccaaaattgttggtcgcccattcttatgcaacgttcggtgtggaaactattcttgacaatcaagaagaaggcaagaaatcccaagataagcagaaccagcatagaaagagaattcgttattgcattttccaaacaacggtcaaagcattccttaagtgcttgaaggataatgacgacagtatttccttcatgaagatttcaattaaaactgtactggagagctactctaagctgaagataaccagtgttggagtagttatgataatgggtgcactaactcaggctgcacttcagttattatcgaggcaaccagctctgcactccgttttaaaggaaaattctgcagagaaatattgcgaatatttgggcaaagaagtgtttttaggcaaaaacccaccatcttccttttgcttagagattggtttgaagccatttttaaaagaatttgtttcacaagagttattcattaagtttttcatccctaatattgaaaaagcagttttaagatctcctgaggttggtttttcgattttatctgagttatatgctggtgtttctcctgaaaaagtaaatctcttaaatgcctttgcttcctcgaaactgattaatcaatacttctcgtcatttaaaagctcaaaagaggtagttagatccgtctcgcttcagtctatgataatcttattgagaaaaatttccaatactgacactaccttggaagatttgaccaagcttattgacgaaatatttaagaacatcaaatcgaacttaaatgcagattacaaatcacttatttccaaaattctcatagaaatacccttaacgcactatgaggtttcagaaaaaatctgcaaagggctgtccccatatattggtaaagaaggtaatgaagcagccttgactctaatgcttaacgctttttttgttcattattttagtctgggcaaacctattgaagacttggataaaattatatcagctggttttgcagataaaaaacctgctttgaaaaaatgctggtttgccgcatttttgaacaattccaatgctgcctctgaagaggtgattttaaactttatagacggttgtttggaatttgtgaaagactccatcatacattatcagactcacgggcatgcatgtattctagcatcaattgaatttacaaacaaaattttggcattggacaatactgagctaaatgatcgtgttatgcagctcatagaaacccttcctgaaaattcttcgataggtgatgctatcttaactgctgcattatcaacagagctatccatcgaaaaccgtattcatgctgttaatttactacaagaattgttctacaagaaacccgaatttattgggtttagcgtgattgatgcaattgaaaggagaatgcgtgtccaagaattaatacctcaacaaaatacatcctttaaatatgtcacttctgtactactggccattacgtctgagttacctgacaaggaagcctcgataaaggtattaatcaatgctctggtcatagcgcaatggaatattttcaacattaagaatggctgggctggtttagttttacgtgcaaggcttgatccagctgaagttgtcaaagaacatgctagcgttatcatggagaagattcttgaaatcacaggtagttgtgaatggatagatacaatttatggtgcatgcggtttgcaagcagctgcctatgcagcatttattcagcctaatgagttcacaccgatcctttgtaagactatcgaagcagatttaaccgcggatgatttctcacgtttatctgaagaggacttcgaaatttttgcaggagaggaaggtgttctggtggttgacgtcctggaagaaagcatgaataagaaactttccaataaaaattctaaagagtacgaaactctaatgtgggaacaaaaaataaggaaggagcaagccaaaaagaatgtgaaaaaactttcaaaagaggaacaagagctcgttaatgaacagttagcgaaagaatctgcagttagatcacacgtttcggaaatttccactcgtttaaagcgtggtattagattggtatctgaactttccaaagctgcttgcttagtccaaaatggcatcgctacttggttccccttggcagtcacaaagcttttgtacctatgctcggaaccaaatatttcaaagctaacagaggatgtaaataatgtgttcttgcagctttctcaaaatgtctccgagagattaggtaatatcagacttttcttaggtttggcgactttgcgtgtgcacaatgctaatggcatctcgcaagattatttacaagaaccactggttgaattacttacaagagttctttttaggatcaagttcgtctccaaccaagcagcaatagattccatcagtttgacatatattttaccattgttgattaatgttttagaaaagggtaaggcgattgcattaaagaatgcggacaagcctgttgttaaggctgagtttgttgaagaagatgaagaagaagaacatctgttactggccatggaaattatttctgtacacgctgaagcttttgaggatccttccattccgagaatttccattgttgaagtgttactatctcttctatctttaccctcaaaagcgaagattgctaaagattgtttcaacgctctgtgccaaagcatatctgttgcaccaaatcaagaagaccttgatatgatactatcaaatttactatcaccaaatcaatttgtccgttcaacaatattagaaactcttgataacgaattcgaattagaaccttttatgaaatattcacctgaagttttcatttgcagatttgattcggatccttccaaccgcgagattgcagatttcatttgggagttcaacaaatttgtagtcaacgatgaattactaaaaagcttattcccactattcaatcaggatgatagtggcttgagattatttgcggcaaacgcgtacgcatttggtgcggtaagtctgtttacctctgaagagaactcctcgaaagattacttaaatgatttgctgaacttttataaagaaaaggcaaagccattggagccaattcttgatcaatttggcttggttcttgtttctgcgagtgaacaaaaagatccatggcaaggaagaagtaccgttgctattacattaaaaatcatggctaaggctttttctgcagaggatgatactgtcgttaacattataaaatttttggtcgatgatggaggtctagtagacagagagcctattgttcgtcaagaaatgaaagaagctggtgttgaattaattacgttacatggctcacaaaactcgaaggatttaattcctatatttgaagaagcattaagctccagtacggacagtgccttaaaagagaacgttattattttgtatggtacattagcaagacatttacagcaaagtgatgcaaggattcacacgatcattgaaagattgctttcaactttggatactccttctgcggatattcaacaggctgtgtcggcttgtatagcaccactagttttccagttcaaacaaaaagttggtgattacttgggtatcctaatggagaaactgctgaatccaactgttgcttcttctatgcggaaaggtgccgcttggggtatcgctggtttagtgaaaggttacggtatctcggctctctcggagtttgacattattcgcaacctcatcgaagctgcagaagataaaaaggagccaaaaagacgtgaatctgttggcttctgctttcaatatttgtctgaatctctaggaaagttttttgaaccatatgtgatagaaattcttccaaatattttaaagaatttaggggatgctgttcctgaagttagagatgcaaccgctcgtgccactaaggctataatggcgcatactacaggttacggtgttaaaaagttaattccagttgctgtttctaatttggatgaaattgcttggagaactaagaggggctctgttcaattgttgggtaatatggcttatttagatcctactcaattgtcagcttctttgtccaccattgtcccagaaattgttggtgtattgaacgactctcacaaagaggtgcgtaaggccgctgatgaatccttgaaaagattcggtgaagttatcagaaatccggaaattcagaaattggtgcccgtacttttgcaagctatcggtgatccaacaaaatacactgaagaggccttggattcgttaattcaaacacaatttgtccattatattgatggtccttcactagcactaattattcatattattcatcgtggtatgcatgatagatctgccaacattaagaggaaagcatgtaagatcgtgggcaatatggccattttggttgataccaaagatctcatcccatatttacaacagctgatagatgaagtggagattgctatggtggatccagttccaaatactagagccacagcagcacgtgctttgggtgctttggtagaaaggttaggtgaagagcaattcccagatttgattcctcgtctactagataccttaagtgacgaatcaaaatctggtgatcgtctcggttctgctcaagctctagctgaagttattagtggcttgggcttgaccaagttggatgagatgttaccaaccattttagctggtgtaaccaattttcgtgcttatatcagggaaggattcatgcctttgctgcttttccttcctgtttgttttggatcacaatttgctccatacattaatcagattattcagcctattctttccggattggccgataatgatgaaaatattcgcgatactgctttgaaggctggtaaattaattgtcaaaaactacgctacaaaggccgttgatttgttgttgcctgaattagaaaggggtatgttcgatgaaaatgacagaattcgcttatcttctgttcaattaaccggagaactattgttccaagttactggtatttcctccaggaacgaattttctgaggaagatggtgatcataatggtgaattctctggtaaattggtcgatgtacttggccaagaccgtcgtgatagaattttagccgcattatttgtatgcaggaacgacacttctggtatcgtacgtgctacgacggttgacatttggaaggcattggttccaaatactccaagagctgtgaaagagatccttccaacattgactggtatgatagtcactcacttggcttcatcatccaatgtattacgcaacattgctgctcagaccttaggtgatcttgtccgtcgtgtaggtggtaatgctttgtcccaactgttaccaagtttggaggaatctttgatagaaacatcaaactcagattcgagacaaggtgtttgtattgctctttatgagttaattgaatcggcttctacggaaacgatatcacagttccaatctaccatcgttaacattattcgtacggcattaattgatgagtcggctactgtcagagaagcggctgcattatcttttgatgtattccaagatgttgtaggaaaaactgctgttgatgaagttttaccatatttgttgcatatgcttgaatcttctgataattctgactttgctttgttaggtttacaagaaattatgtcgaagaagtccgacgtaatcttcccaattttaattccaaccctattagcccctccaatagacgccttcagggcttctgctttaggttctttggcggaagttgctggctcagccttatacaagcgtttatcaattataatcaacgcactagtggatgcaatcataggtacttctgaagatgaatcgaccaagggtgcattagaacttgcattagacagggtattcttatctgtgaatgatgacgaaggtcttcacccattacttcaacagattatgtcactactaaagagtgataatatagagaaacgcatagctgttttagaacgtttgccaaatttcttcgataagactgttcttgattttgatgtctatattccgaactttgtctctcacgcaattttatcattagatgatgaagatcaaagggttgttaatggtaacttcaatgctttgtctactttgttgaagaaggttgataagcccaccttagaaaaattagttaagcctgctaaacagtcattggcattaacaggcaggcaaggtcaagatgtcgctgcatttaagcttccaagaggccctaactgtgttttgcctattttcttgcatggtttgatgtatggttcgaatgatgaaagggaagaatctgcattagccattgctgacgttgtttcgaagacccctgccgctaacttgaagccatttgtgagcgtaattactggtccattaattcgtgtcgtgggtgaaagatttagtagtgatatcaaagcagcaattttatttgcacttaatgtgctattcattaagattccaatgttcttgaggccttttatccctcaattacaaagaacatttgttaaatccttgtctgacgctaccaatgaaacgttacgtctccgcgccgcaaaggctcttggtgccctgattgaacatcagcctcgtgttgaccctctagtcattgaactggtgacaggtgccaagcaagccacagatgaaggtgtcaagactgcgatgcttaaagctttactggaagttattatgaaggctggttccaaattaaacgaaaattctaagacaaacattgtcaatttagttgaggaagaaatgttgggtagcaatgacaaattggcagttgcttacgctaaattaatcggatcgttatcagagattttgtcgaacgacgaagcccacaagatattgcaagacaaggttttgaatgcagatctagatggagaaaccggtaagtttgctattctgactttgaattcctttttgaaagatgcaccaacacatatattcaatacgggcttgatagacgaatttgtaagttacattttgaatgcaatccgttcccctgatgtttacttcggagaaaatggtaccattgctgctggtaaattacttttattagaaggagaaaagaggtctccatttgttaaaaaggatgctgcagaaccattcaaaattggcgatgaaaacatcaatctgttaattaatgagttgagcaaagctgtcttacaaccagccagtaattctacggatgtaagaaggttggccttggtggttataagaacactagccagattcaaatttgacgagtgcattaagcaatacttcgatgtagtaggaccatctgtattttcttgcttgcgtgatcctgttatcccaattaagctcgcagcagaaaaagcatatttagctttgttcaaattggttgaagaagatgacatgcatactttcaacgagtggtttgctaaaatttcagatcgcggtaacagcatcgaaactgtcacaggtactacaattcaattacggtctgttggggactataccaagagggttggtaaaaggttagcaaatgtcgaaagagaaaggattgctgccggaggagacgcggaaacaatgtttagtgacagatttgaagatgaaagagaaatatgggctgtcggaggtgttgaattaaccactgatatttga

SEQ ID NO: 3786 - DNA, 8019 bp, Artificial Sequence
  Description of Artificial Sequence: Synthetic polynucleotide
atgacagctatcttaaactgggaagatatatcccctgttttagagaaaggcacccgcgaatctcacgtgtctaaaagagttccctttttgcaagatatatctcaattagttcgtcaagaaacattggaaaaacctcaattatctgaaattgctttcgttttattgaataccttcacgatttacgaagacaataggtctaaaagtttggtaacttccatattgcttgacatcttaaatttggagccatgtctcttggaaaactttatcagattcatttccgacgtggtcatcagtaatccggctaccaaagcagtcgctgattaccttaatttgttagattggattaattctttcttgatttttgtgtctcataattctaatttatttgaagagtacattccaaaattgttggtcgcccattcttatgcaacgttcggtgtggaaactattcttgacaatcaagaagaaggcaagaaatcccaagataagcagaaccagcatagaaagagaattcgttattgcattttccaaacaacggtcaaagcattccttaagtgcttgaaggataatgacgacagtatttccttcatgaagatttccattaaaactgtattggagagctactctaagttgaagataaccagtgttggagtagttatgataatgggtgcattgactcaggctgcacttcagttattatctaggcaaccagctttacactccgttttaaaggaaaattctgcagagaaatattgcgaatatttgggcaaagaagtgtttttaggcaaaaacccaccatcttccttttgcttagagattggtttgaagccatttttaaaagaatttgtttctcaagagttattcattaagtttttcatccctaatattgaaaaagcagttttaagatctcctgaggttggtttttctattttatctgagttatatgctggtgtttctcctgaaaaagtaaatctcttaaatgcctttgcttcctctaaattgattaatcaatacttctcttcttttaaaagcagtaaagaggtagttagatccgtctcccttcagtctatgataatcttattgagaaaaatttccaatactgacactaccttggaagatttgaccaagcttattgacgaaatatttaagaacatcaaaagtaacttaaatgcagattacaaatctcttatttccaaaattctcatagaaatacccttaacgcactatgaggtttctgaaaaaatctgcaaagggttatccccatatattggtaaagaaggtaatgaagcagccttgactttaatgcttaacgctttttttgttcattattttagtttgggcaaacctattgaagacttggataaaattatatctgctggttttgcagataaaaaacctgctttgaaaaaatgctggtttgccgcatttttgaacaattccaatgctgcctctgaagaggtgattttaaactttatagacggttgtttggaatttgtgaaagactccatcatacattatcagactcacgggcatgcatgtattttggcatctattgaatttacaaacaaaattttggcattggacaatactgagttgaatgatcgtgttatgcagctcatagaaacccttcctgaaaattcttctataggtgatgctatcttaactgctgcattatctacagagctttccatcgaaaaccgtattcatgctgttaatttattacaagaattgttctacaagaaacccgaatttattgggtttagcgtgattgatgcaattgaaaggagaatgcgtgtccaagaattaatacctcaacaaaatacatcctttaaatatgtcacttctgtattgttagccattacgtctgagttacctgacaaggaagcctctataaaggtattaatcaatgctttggtcatagcgcaatggaatattttcaacattaagaatggctgggctggtttagttttacgtgcaaggcttgatccagctgaagttgtcaaagaacatgctagcgttatcatggagaagattcttgaaatcacaggtagttgtgaatggatagatacaatttatggtgcatgcggtttgcaagcagctgcctatgcagcatttattcagcctaatgagttcacaccgatcctttgtaagactatcgaagcagatttaaccgcggatgatttctctcgtttatctgaagaggacttcgaaatttttgcaggagaggaaggtgttttggtggttgacgtcttggaagaaagcatgaataagaaactttccaataaaaattctaaagagtacgaaactttaatgtgggaacaaaaaataaggaaggagcaagccaaaaagaatgtgaaaaaactttctaaagaggaacaagagctcgttaatgaacagttagcgaaagaatctgcagttagaagtcacgtttctgaaatttccactcgtttaaagcgtggtattagattggtatctgaactttccaaagctgcttgcttagtccaaaatggcatcgctacttggttccccttggcagtcacaaagcttttgtacttgtgcagtgaaccaaatatttccaagttaacagaggatgtaaataatgtgttcttgcagctttctcaaaatgtctccgagagattaggtaatatcagacttttcttaggtttggcgactttgcgtgtgcacaatgctaatggcatctctcaagattatttacaagaaccattagttgaattacttacaagagttctttttaggatcaagttcgtctccaaccaagcagcaatagattccatcagtttgacatatattttaccattgttgattaatgttttagaaaagggtaaggcgattgcattaaagaatgcggacaagcctgttgttaaggctgagtttgttgaagaagatgaagaagaagaacatcttttattagccatggaaattatttctgtacacgctgaagcttttgaggatccttccattccgagaatttccattgttgaagtgttattatctcttttatctttaccctctaaagcgaagattgctaaagattgtttcaacgctctttgccaaagcatatctgttgcaccaaatcaagaagaccttgatatgatattatccaatttattatctccaaatcaatttgtccgttccacaatattagaaactcttgataacgaattcgaattagaaccttttatgaaatattctcctgaagttttcatttgcagatttgattctgatccttccaaccgcgagattgcagatttcatttgggagttcaacaaatttgtagtcaacgatgaattattgaaaagcttattcccattattcaatcaggatgatagtggcttgagattatttgcggcaaacgcgtacgcatttggtgcggtaagtttatttacctctgaagagaactcctctaaagattacttaaatgatttgttgaacttttataaagaaaaggcaaagccattggagccaattcttgatcaatttggcttggttcttgtttctgcgagtgaacaaaaagatccatggcaaggaagaagtaccgttgctattacattaaaaatcatggctaaggctttttctgcagaggatgatactgtcgttaacattataaaatttttggtcgatgatggaggtttagtagacagagagcctattgttcgtcaagaaatgaaagaagctggtgttgaattaattacgttacatggctctcaaaactccaaggatttaattcctatatttgaagaagcattaagctccagtacggacagtgccttaaaagagaacgttattattttgtatggtacattagcaagacatttacagcaaagtgatgcaaggattcacacgatcattgaaagattgctttctactttggatactccttctgcggatattcaacaggctgtgtctgcttgtatagcaccattagttttccagttcaaacaaaaagttggtgattacttgggtatcttgatggagaaattattgaatccaactgttgcttcttctatgagaaaaggtgccgcttggggtatcgctggtttagtgaaaggttacggtatctctgctctcagtgagtttgacattattcgcaacctcatcgaagctgcagaagataaaaaggagccaaaaagacgtgaatctgttggcttctgctttcaatatttgtctgaatctttgggaaagttttttgaaccatatgtgatagaaattcttccaaatattttaaagaatttaggggatgctgttcctgaagttagagatgcaaccgctcgtgccactaaggctataatggcgcatactacaggttacggtgttaaaaagttaattccagttgctgtttctaatttggatgaaattgcttggagaactaagaggggctctgttcaattgttgggtaatatggcttatttagatcctactcaattgtctgcttctttgtccaccattgtcccagaaattgttggtgtattgaacgactctcacaaagaggtgcgtaaggccgctgatgaatccttgaaaagattcggtgaagttatcagaaatccggaaattcagaaattggtgcccgtacttttgcaagctatcggtgatccaacaaaatacactgaagaggccttggattctttaattcaaacacaatttgtccattatattgatggtccttctttggcattgattattcatattattcatcgtggtatgcatgatagatctgccaacattaagaggaaagcatgtaagatcgtgggcaatatggccattttggttgataccaaagatctcatcccatatttacaacagttgatagatgaagtggagattgctatggtggatccagttccaaatactagagccacagcagcacgtgctttgggtgctttggtagaaaggttaggtgaagagcaattcccagatttgattcctcgtttgttggataccttaagtgacgaaagtaaatctggtgatcgtctcggttctgctcaagctttggctgaagttattagtggcttgggcttgaccaagttggatgagatgttaccaaccattttagctggtgtaaccaattttcgtgcttatatcagggaaggattcatgcctttgttacttttccttcctgtttgttttggatctcaatttgctccatacattaatcagattattcagcctattctttccggattggccgataatgatgaaaatattcgcgatactgctttgaaggctggtaaattaattgtcaaaaactacgctacaaaggccgttgatttgttgttgcctgaattagaaaggggtatgttcgatgaaaatgacagaattcgcttatcttctgttcaattaaccggagaattattgttccaagttactggtatttcctccaggaacgaattttctgaggaagatggtgatcataatggtgaattctctggtaaattggtcgatgtacttggccaagaccgtcgtgatagaattttagccgcattatttgtatgcaggaacgacacttctggtatcgtacgtgctacgacggttgacatttggaaggcattggttccaaatactccaagagctgtgaaagagatccttccaacattgactggtatgatagtcactcacttggcttcttcttccaatgtattacgcaacattgctgctcagaccttaggtgatcttgtccgtcgtgtaggtggtaatgctttgtcccaattattaccaagtttggaggaatctttgatagaaacaagtaacagtgattccagacaaggtgtttgtattgctctttatgagttaattgaatctgcttctacggaaacgatatctcagttccaatctaccatcgttaacattattcgtacggcattaattgatgagtctgctactgtcagagaagcggctgcattatcttttgatgtattccaagatgttgtaggaaaaactgctgttgatgaagttttaccatatttgttgcatatgcttgaatcttctgataattctgactttgctttgttaggtttacaagaaattatgtccaagaagtccgacgtaatcttcccaattttaattccaaccttattagcccctccaatagacgccttcagggcttctgctttaggttctttggcggaagttgctggctctgccttatacaagcgtttatccattataatcaacgcattggtggatgcaatcataggtacttctgaagatgaaagtaccaagggtgcattagaacttgcattagacagggtattcttatctgtgaatgatgacgaaggtcttcacccattacttcaacagattatgtctttattgaagagtgataatatagagaaacgcatagctgttttagaacgtttgccaaatttcttcgataagactgttcttgattttgatgtctatattccgaactttgtctctcacgcaattttatctttagatgatgaagatcaaagggttgttaatggtaacttcaatgctttgtctactttgttgaagaaggttgataagcccaccttagaaaaattagttaagcctgctaaacagtctttggcattaacaggcaggcaaggtcaagatgtcgctgcatttaagcttccaagaggccctaactgtgttttgcctattttcttgcatggtttgatgtatggtagtaatgatgaaagggaagaatctgcattagccattgctgacgttgtttccaagacccctgccgctaacttgaagccatttgtgagcgtaattactggtccattaattcgtgtcgtgggtgaaagatttagtagtgatatcaaagcagcaattttatttgcacttaatgtgcttttcattaagattccaatgttcttgaggccttttatccctcaattacaaagaacatttgttaaatccttgtctgacgctaccaatgaaacgttacgtctccgcgccgcaaaggctcttggtgccttaattgaacatcagcctcgtgttgaccctttggtcattgaattagtgacaggtgccaagcaagccacagatgaaggtgtcaagactgcgatgcttaaagctttattggaagttattatgaaggctggttccaaattaaacgaaaattctaagacaaacattgtcaatttagttgaggaagaaatgttgggtagcaatgacaaattggcagttgcttacgctaaattaatcggatctttatctgagattttgtctaacgacgaagcccacaagatattgcaagacaaggttttgaatgcagatttggatggagaaaccggtaagtttgctattttgactttgaattcctttttgaaagatgcaccaacacatatattcaatacgggcttgatagacgaatttgtaagttacattttgaatgcaatccgttcccctgatgtttacttcggagaaaatggtaccattgctgctggtaaattacttttattagaaggagaaaagaggtctccatttgttaaaaaggatgctgcagaaccattcaaaattggcgatgaaaacatcaatttattaattaatgagttgagcaaagctgtcttacaaccagccagtaattctacggatgtaagaaggttggccttggtggttataagaacattggccagattcaaatttgacgagtgcattaagcaatacttcgatgtagtaggaccatctgtattttcttgcttgcgtgatcctgttatcccaattaagctcgcagcagaaaaagcatatttagctttgttcaaattggttgaagaagatgacatgcatactttcaacgagtggtttgctaaaatttctgatcgcggtaacagcatcgaaactgtcacaggtactacaattcaattaagatctgttggggactataccaagagggttggtaaaaggttagcaaatgtcgaaagagaaaggattgctgccggaggagacgcggaaacaatgtttagtgacagatttgaagatgaaagagaaatatgggctgtcggaggtgttgaattaaccactgatatttga

SEQ ID NO: 3787 - DNA, 243 bp, Saccharomyces cerevisiae
atgtctaataaagagataacttgtatcaaaccgtttaaaattattgctctaattttattgatagttctaataataaacctctcttataagttatttctgagacgctatttaaagtcgacagttatttggtgtttaggaatcgccaatacagatcgtaacgatatgatgtggtggcaagtctcgccactattagagcgctgggtttggcagttagttgacaattatgaatccgggtacgaataa

SEQ ID NO: 3788 - DNA, 243 bp, Artificial Sequence
  Description of Artificial Sequence: Synthetic polynucleotide
atgtctaataaagagataacttgtatcaaaccgtttaaaattattgctttgattttattgatagttttgataataaacctctcttataagttatttttaagacgctatttaaagagtacagttatttggtgtttaggaatcgccaatacagatcgtaacgatatgatgtggtggcaagtctctccattattagagcgctgggtttggcagttagttgacaattatgaatccgggtacgaatga

SEQ ID NO: 3789 - DNA, 1359 bp, Saccharomyces cerevisiae
atgtctggaacatttagttatgatgtgaaaacaaaggagaacgaaccattatttgagtttaattctgcttattctcccagggtatcgtatcattttaactccaaagtttcacattaccattatggtgttaagcatccaatgaagccgtttcggttaatgctaacggatcacctagtttcctcttatggattgcacaagattatggacctttatgaaacaagaagcgctaccagagacgaattactacaatttcactcggaagactacgtgaattttctctcgaaggtttcaccagaaaatgcaaacaaactgcccagaggcacacttgaaaattttaacattggagacgactgtcctatttttcaaaatttatatgattatacaacactatacactggtgcgagccttgacgccaccaggaaactaatcaacaatcaatcggacatagcgataaattggtctggtggtcttcatcatgcaaaaaagaatagtccatctgggttttgctatgtaaatgatattgtgctttctattttgaacttattacgatatcacccaagaatcctttatatcgatatcgacttacatcacggcgatggtgtccaggaggcattttacaccacagatagggtcttcacgttgtcttttcataaatataatggcgaatttttcccaggaactggtgatctgacagaaattggttgcgacaaaggaaaacatttcgcattaaatgtacccctagaagatggcatagatgacgactcatatataaaccttttcaagtcaattgtagatcctctaataatgactttcaaaccaacacttattgtccaacaatgcggtgcggattccttaggtcatgatcgcttaggatgcttcaatttaaatataaaggcacatggagaatgcgtaaaatttgtcaaatcatttggtctaccaatgctagtagtgggcggtggaggttatacacctagaaatgtatcacggctttggacctacgagacaggaattttaaatgatgtcttgctaccagaagacatccccgaagatatcccattccgggactcattcgggccggattattcactttatcctatgttagatgacttatacgaaaacaaaaacagtaaaaaactactggaagacattagaatacgatgtctagaaaatatcagatacttgcaaggagcaccaagtgtcagaatggatgctgaatgcataccgacacaagatataagtgccctgacagaagaagaggataaaatcattcaagaaatgaatgaagaaacagaagcagacagttcaaataggctagaagaaatggaaaaagaaaacagtggattgattgccttttcatag

SEQ ID NO: 3790 - DNA, 1359 bp, Artificial Sequence
  Description of Artificial Sequence: Synthetic polynucleotide
atgtctggaacatttagttatgatgtgaaaacaaaggagaacgaaccattatttgagtttaattctgcttattctcccagggtatcttatcattttaactccaaagtttctcattaccattatggtgttaagcatccaatgaagccgtttagattaatgcttacggatcacttggtttcctcttatggattgcacaagattatggacctttatgaaacaagaagcgctaccagagacgaattattacaatttcacagtgaagactacgtgaattttctctctaaggtttctccagaaaatgcaaacaaattgcccagaggcacacttgaaaattttaacattggagacgactgtcctatttttcaaaatttatatgattatacaacattgtacactggtgcgagccttgacgccaccaggaaattaatcaacaatcaatctgacatagcgataaattggtctggtggtcttcatcatgcaaaaaagaatagtccatctgggttttgctatgtaaatgatattgtgctttctattttgaacttattaagatatcacccaagaatcctttatatcgatatcgacttacatcacggcgatggtgtccaggaggcattttacaccacagatagggtcttcacgttgtcttttcataaatataatggcgaatttttcccaggaactggtgatttaacagaaattggttgcgacaaaggaaaacatttcgcattaaatgtacccttagaagatggcatagatgacgactcttatataaaccttttcaagtctattgtagatcctttgataatgactttcaaaccaacacttattgtccaacaatgcggtgcggattccttaggtcatgatcgcttaggatgcttcaatttaaatataaaggcacatggagaatgcgtaaaatttgtcaaaagttttggtttgccaatgttggtagtgggcggtggaggttatacacctagaaatgtatctaggctttggacctacgagacaggaattttaaatgatgtcttgttaccagaagacatccccgaagatatcccattcagggactctttcgggccggattattctctttatcctatgttagatgacttatacgaaaacaaaaacagtaaaaaattattggaagacattagaataagatgtttagaaaatatcagatacttgcaaggagcaccaagtgtcagaatggatgctgaatgcataccgacacaagatataagtgccttaacagaagaagaggataaaatcattcaagaaatgaatgaagaaacagaagcagacagtagtaataggttagaagaaatggaaaaagaaaacagtggattgattgccttttcttga

SEQ ID NO: 3791 - DNA, 312 bp, Saccharomyces cerevisiae
atgaattcaagtctgaatgccaattcttatttttttcgaaaacccccaatgctaacttatatggtccgttttctttactgttatccatctccctttcctatagctccagcggttaccgatcttccagaatgccggggagatctttctctttctttgtttataacaagtttcacaagcacgaaagaaagaacaatactgtacgccaaaagccgcctaaagacgcatattcccgtcaatttatgtgaccggtaccactatatacctaaggcacctctataccaatgtagaatgccctgtttatactctatatag

SEQ ID NO: 3792 - DNA, 312 bp, Artificial Sequence
  Description of Artificial Sequence: Synthetic polynucleotide
atgaatagtagtttgaatgccaattcttatttttttagaaaacccccaatgttgacttatatggtccgttttctttactgttatccatctccctttcctatagctccagcggttaccgatcttccagaatgcagaggagatctttctctttctttgtttataacaagtttcacaagcacgaaagaaagaacaatattatacgccaaaagccgcttgaagacgcatattcccgtcaatttatgtgacagataccactatatacctaaggcacctttgtaccaatgtagaatgccctgtttatactctatatga

SEQ ID NO: 3793 - DNA, 1803 bp, Saccharomyces cerevisiae
atgattaacgataaactagtacattttctgatccagaattatgatgacatcctaagagcaccgctttctggacagctcaaagatgtgtattcactgtacatcagtggcggatacgatgatgagatgcagaagttgagaaacgataaagacgaggtcttacagtttgaacagttttggaatgatcttcaggatattatatttgcaacgccgcagtccattcaatttgaccagaatctattagtggcagataggccagaaaaaattgtttacctggacgttttttccttgaaaattctctataacaagttccatgccttctactatacattaaaatcgtccagttcttcatgtgaagaaaaagtgtcgagtttaacaacaaaaccggaagctgattcggaaaaagaccaactgctgggtagactgcttggagtcctgaactgggacgttaacgtcagcaaccaggggttaccacgtgaacaactgagcaatcgcttacaaaatttattgagggaaaaaccatcatcttttcagcttgctaaagaaagagccaaatacacgaccgaggtcattgaatacatcccgatatgtagtgactattcgcatgcatctctattgtccacctcggtgtacattgtcaataacaaaatcgtttctttacaatggtccaaaatatccgcatgtcaggaaaatcacccaggattaattgagtgcattcaatcaaaaattcactttatccctaatatcaaaccacaaactgatatttcgttaggagattgttcctatttggatacctgtcataaattaaatacgtgtcgatacattcattacctgcaatatattccgtcatgcttgcaagagcgagctgatcgtgaaactgcgagtgaaaataaaagaatacggtcaaacgtttccattccattttatactctgggcaattgctccgcacattgtatcaaaaaggctttacctgcacagtggatccgttgcgatgtgcggaaatttgattttagggttcttggaaagttttcggtagttattgcagatcctgcatggaatatccatatgaacctaccatacggtacttgcaacgatattgaactattaggtttgcctttgcacgaactacaagatgaaggtattatttttctttgggtgacgggtagagctatagaattgggtaaagagtctttgaataactggggttacaacgtgataaatgaagtttcatggataaagacaaaccaactgggtagaacaattgttacaggtcgtacgggtcattggttaaatcattctaaggagcatttattggtgggcttaaagggtaatccaaagtggatcaacaaacatattgacgtcgatttgatcgtatcaatgaccagagagactagtagaaagcctgatgaactgtatggtatagcagaacggttggcaggcacccatgccagaaaactagagatattcggaagggatcacaatacgcggcctggctggtttaccatcggaaaccagttgacaggaaattgcatttacgaaatggatgtcgagaggaagtaccaggagtttatgaagagcaaaactggaaccagccacactggtactaaaaaaatcgacaaaaagcaaccttcaaaattacagcagcagcatcagcagcagtattggaataatatggatatggggagtggtaagtattatgctgaggccaagcagaatcctatgaatcaaaaacatactccctttgaatccaaacagcaacaaaaacaacaattccaaacactaaataacctatattttgctcagtaa

SEQ ID NO: 3794 - DNA, 1803 bp, Artificial Sequence
  Description of Artificial Sequence: Synthetic polynucleotide
atgattaacgataaattagtacattttttgatccagaattatgatgacatcttaagagcaccgctttctggacagctcaaagatgtgtattctttgtacatcagtggcggatacgatgatgagatgcagaagttgagaaacgataaagacgaggtcttacagtttgaacagttttggaatgatcttcaggatattatatttgcaacgccgcagtccattcaatttgaccagaatttattagtggcagataggccagaaaaaattgtttacttggacgttttttccttgaaaattctctataacaagttccatgccttctactatacattaaaatcttccagttcttcttgtgaagaaaaagtgtccagtttaacaacaaaaccggaagctgattctgaaaaagaccaattattgggtagattacttggagtcttgaactgggacgttaacgtcagcaaccaggggttaccacgtgaacaattgagcaatcgcttacaaaatttattgagggaaaaaccatcttcttttcagcttgctaaagaaagagccaaatacacgaccgaggtcattgaatacatcccgatatgtagtgactattctcatgcatctttgttgtccacctctgtgtacattgtcaataacaaaatcgtttctttacaatggtccaaaatatccgcatgtcaggaaaatcacccaggattaattgagtgcattcaaagtaaaattcactttatccctaatatcaaaccacaaactgatatttctttaggagattgttcctatttggatacctgtcataaattaaatacgtgtcgttacattcattacttacaatatattccgtcttgcttgcaagagagagctgatcgtgaaactgcgagtgaaaataaaagaataagatctaacgtttccattccattttatactttgggcaattgctccgcacattgtatcaaaaaggctttacctgcacagtggatccgttgcgatgtgagaaaatttgattttagggttcttggaaagtttagcgtagttattgcagatcctgcatggaatatccatatgaacttaccatacggtacttgcaacgatattgaattattaggtttgcctttgcacgaattacaagatgaaggtattatttttctttgggtgacgggtagagctatagaattgggtaaagagtctttgaataactggggttacaacgtgataaatgaagtttcctggataaagacaaaccaattgggtagaacaattgttacaggtcgtacgggtcattggttaaatcattctaaggagcatttattggtgggcttaaagggtaatccaaagtggatcaacaaacatattgacgtcgatttgatcgtatctatgaccagagagactagtagaaagcctgatgaattgtatggtatagcagaaagattggcaggcacccatgccagaaaattagagatattcggaagggatcacaatacgagacctggctggtttaccatcggaaaccagttgacaggaaattgcatttacgaaatggatgtcgagaggaagtaccaggagtttatgaagagcaaaactggaaccagccacactggtactaaaaaaatcgacaaaaagcaaccttccaaattacagcagcagcatcagcagcagtattggaataatatggatatggggagtggtaagtattatgctgaggccaagcagaatcctatgaatcaaaaacatactccctttgaatccaaacagcaacaaaaacaacaattccaaacattaaataacttatattttgctcagtga

SEQ ID NO: 3795 - DNA, 390 bp, Saccharomyces cerevisiae
atgtttagacagtgtgctaagagatatgcatcttcattacccccaaatgctttgaaacctgcatttggcccaccagataaagtggcagctcaaaaatttaaagaatcattaatggccactgaaaagcatgcgaaggacacatctaatatgtgggttaaaatctcagtttgggtcgccctaccagcaattgctttaacagctgtgaacacatactttgttgaaaaggagcatgctgagcatcgtgaacatttgaaacatgtgccagactccgaatggccaagggattacgagtttatgaatatcaggtctaagccttttttctggggtgacggtgataagacattattctggaatcctgttgtcaacaggcacatcgagcacgacgattaa

SEQ ID NO: 3796 - DNA, 390 bp, Artificial Sequence
  Description of Artificial Sequence: Synthetic polynucleotide
atgtttagacagtgtgctaagagatatgcatcttctttacccccaaatgctttgaaacctgcatttggcccaccagataaagtggcagctcaaaaatttaaagaatctttaatggccactgaaaagcatgcgaaggacacatctaatatgtgggttaaaatctccgtttgggtcgccttaccagcaattgctttaacagctgtgaacacatactttgttgaaaaggagcatgctgagcatcgtgaacatttgaaacatgtgccagactccgaatggccaagggattacgagtttatgaatatcaggtctaagccttttttctggggtgacggtgataagacattattctggaatcctgttgtcaacaggcacatcgagcacgacgattga

SEQ ID NO: 3797 - DNA, 1581 bp, Saccharomyces cerevisiae
atggcacaaaacaattttgattttaaattcagccaatgttttggtgataaagcagatattgtggtgacagaggcggatctaattacagctgtagaatttgactatactggaaattatctggccactggtgataaaggtggccgtgtggtactttttgaaagaagtaatagtagacattgcgaatataagtttttaacagagtttcaaagtcatgacgcagaatttgattatttaaaatccttagaaattgaagagaagataaatgaaatcaaatggttacgaccaactcaaagatcacactttcttttgagcacaaatgataaaactataaaactttggaaagtttatgagaaaaatataaaattggtaagccagaacaacttaacagaaggggttacgtttgcgaaaaaaggcaagcccgataaccataacagtagaggaggctccgtgagggctgtattatctttacaatcgctgaaactgcctcaattatcacagcatgacaaaatcattgctgccaccccaaagcgtatatatagtaatgcacatacctatcacattaattcgatatcgttgaattctgatcaggaaacatttttaagtgctgacgacttgagaatcaatttatggaatctggacataccagatcagagcttcaacatcgtagatatcaagccaaccaatatggaagaacttaccgaagtgatcacaagcgctgaatttcatccgcaagaatgtaatttattcatgtactcttcttccaaaggtacaataaagttgtgtgatatgagacaaaattccctatgtgacaataaaaccaaaacatttgaagaatatttggatccaatcaatcataatttttttacagaaatcacgtcgtcaatttccgacataaaatttagtccaaatggtaggtatattgcatccagagattatttaactgtcaaaatttgggacgtaaatatggataataagcctttgaaaaccataaacatacatgagcaattgaaggaaagattgagtgatacctatgaaaacgatgcgattttcgataaatttgaagttaattttagtggtgatagttcaagtgtaatgactggttcttacaataacaatttcatgatctatcctaatgtagtaacttctggtgataatgataatggcatagtcaaaacttttgatgaacacaacgcacctaatagcaacagcaataaaaatatccacaacagcatacaaaataaagattctagtagtagtggcaacagccacaagcgtaggagtaacggacgcaacacaggcatggtgggaagtagtaatagctctagaagcagtatagcgggaggagaaggagcaaattcggaggactcgggaaccgaaatgaatgaaatcgtgttacaagctgacaaaacagcgttcaggaacaaaagatacggttcgctagcgcaaaggtctgcaagaaataaggattggggtgacgatattgatttcaagaagaatattttacatttctcatggcatccaagagaaaatagtattgctgttgcagcaactaataatttattcattttttccgcattataa

SEQ ID NO: 3798 - DNA, 1581 bp, Artificial Sequence
  Description of Artificial Sequence: Synthetic polynucleotide
atggcacaaaacaattttgattttaaattcagccaatgttttggtgataaagcagatattgtggtgacagaggcggatttgattacagctgtagaatttgactatactggaaattatttggccactggtgataaaggtggccgtgtggtactttttgaaagaagtaatagtagacattgcgaatataagtttttaacagagtttcaaagtcatgacgcagaatttgattatttaaaatccttagaaattgaagagaagataaatgaaatcaaatggttaagaccaactcaaagaagtcactttcttttgagcacaaatgataaaactataaaactttggaaagtttatgagaaaaatataaaattggtaagccagaacaacttaacagaaggggttacgtttgcgaaaaaaggcaagcccgataaccataacagtagaggaggctccgtgagggctgtattatctttacaaagtttgaaattacctcaattatctcagcatgacaaaatcattgctgccaccccaaagcgtatatatagtaatgcacatacctatcacattaattctatatctttgaattctgatcaggaaacatttttaagtgctgacgacttgagaatcaatttatggaatttggacataccagatcagagcttcaacatcgtagatatcaagccaaccaatatggaagaacttaccgaagtgatcacaagcgctgaatttcatccgcaagaatgtaatttattcatgtactcttcttccaaaggtacaataaagttgtgtgatatgagacaaaattccttatgtgacaataaaaccaaaacatttgaagaatatttggatccaatcaatcataatttttttacagaaatcacgtcttccatttccgacataaaatttagtccaaatggtaggtatattgcatccagagattatttaactgtcaaaatttgggacgtaaatatggataataagcctttgaaaaccataaacatacatgagcaattgaaggaaagattgagtgatacctatgaaaacgatgcgattttcgataaatttgaagttaattttagtggtgatagtagtagtgtaatgactggttcttacaataacaatttcatgatctatcctaatgtagtaacttctggtgataatgataatggcatagtcaaaacttttgatgaacacaacgcacctaatagcaacagcaataaaaatatccacaacagcatacaaaataaagattctagtagtagtggcaacagccacaagcgtaggagtaacggacgcaacacaggcatggtgggaagtagtaatagctctagaagcagtatagcgggaggagaaggagcaaattctgaggactctggaaccgaaatgaatgaaatcgtgttacaagctgacaaaacagcgttcaggaacaaaagatacggttctttagcgcaaaggtctgcaagaaataaggattggggtgacgatattgatttcaagaagaatattttacatttcagttggcatccaagagaaaatagtattgctgttgcagcaactaataatttattcattttttccgcattatga

SEQ ID NO: 3799 - DNA, 360 bp, Saccharomyces cerevisiae
atgccaaagaagagagcttccaacggtagaaacaagaaaggtagaggtcacgtcaaaccagtcagatgtgtcaactgttccaagtctattccaaaggataaggctatcaagagaatggctatcagaaacattgttgaagccgctgccgtcagagatttgtccgaagcttctgtctaccctgaatacgctttgccaaagacttacaacaagttacactactgtgtttcttgtgctattcacgccagaattgtcagagtcagatccagagaagacagaaagaacagagctccacctcaaagaccaagattcaacagagaaaacaaggtttcccctgctgatgccgccaagaaggctttataa

SEQ ID NO: 3800 - DNA, 360 bp, Artificial Sequence
  Description of Artificial Sequence: Synthetic polynucleotide
atgccaaagaagagagcttccaacggtagaaacaagaaaggtagaggtcacgtcaaaccagtcagatgtgtcaactgttccaagtctattccaaaggataaggctatcaagagaatggctatcagaaacattgttgaagccgctgccgtcagagatttgtccgaagcttctgtctaccctgaatacgctttgccaaagacttacaacaagttacactactgtgtttcttgtgctattcacgccagaattgtcagagtcagatccagagaagacagaaagaacagagctccacctcaaagaccaagattcaacagagaaaacaaggtttcccctgctgatgccgccaagaaggctttatga

SEQ ID NO: 3801 - DNA, 141 bp, Saccharomyces cerevisiae
atgttaacgacacaaaagtgtgaaagtagagaagggaagaacgatgagatctttgaattgggagaaagtaatagtgacaagatattattaaaacatggcaaatgtaacttgttttctgaaaggaaaccagttaatcactag

SEQ ID NO: 3802 - DNA, 141 bp, Artificial Sequence
  Description of Artificial Sequence: Synthetic polynucleotide
atgttaacgacacaaaagtgtgaaagtagagaagggaagaacgatgagatctttgaattgggagaaagtaatagtgacaagatattattaaaacatggcaaatgtaacttgttttctgaaaggaaaccagttaatcactga

SEQ ID NO: 3803 - DNA, 468 bp, Saccharomyces cerevisiae
atgctttcactacgtcaatctataagatttttcaagccagccacaagaactttgtgtagctctagatatctgcttcagcaaaaacccgtggtgaaaactgcccaaaacttagcagaagttaatggtccagaaactttgattggtcctggtgctaaagagggtaccgttccaacagacctagatcaagaaactggtttagctaggttagaattattgggtaaattagagggtatcgatgttttcgacaccaaaccattagattcgtccaggaagggtaccatgaaagatccgatcatcattgaatcttatgatgattatcgttatgtcggttgtacgggttctcccgctggttcacatactattatgtggttaaaaccaactgttaacgaagtcgccagatgctgggaatgtggttctgtttacaaactaaaccctgttggtgttccaaatgatgaccaccatcactaa

SEQ ID NO: 3804 - DNA, 468 bp, Artificial Sequence
  Description of Artificial Sequence: Synthetic polynucleotide
atgctttctttacgtcaatctataagatttttcaagccagccacaagaactttgtgtagctctagatatttacttcagcaaaaacccgtggtgaaaactgcccaaaacttagcagaagttaatggtccagaaactttgattggtcctggtgctaaagagggtaccgttccaacagacttggatcaagaaactggtttagctaggttagaattattgggtaaattagagggtatcgatgttttcgacaccaaaccattagattcttccaggaagggtaccatgaaagatccgatcatcattgaatcttatgatgattatcgttatgtcggttgtacgggttctcccgctggttctcatactattatgtggttaaaaccaactgttaacgaagtcgccagatgctgggaatgtggttctgtttacaaattgaaccctgttggtgttccaaatgatgaccaccatcactga

SEQ ID NO: 3805 - DNA, 1740 bp, Saccharomyces cerevisiae
atgaatagggacaacatggacacaacaaagcgcaaagaagatcatacaaagcatactactgatgtaatagaattttacgaagaaggaaccgcagcttcttctttaaacatagccacagaaaaggccaactcaagtccgtccattttgagaagaattatcaacagggcggcatggctttctaagaaagtggacgcaatgggagtagagtctaccggtattcagaggatatctccctatgaacgaggaacatcaaagaaacaatttttgcatgtcgcggggctatggttgagtgccacaggtggtttgtcttccatgtcgtcgtttttattaggccctctgcttttcggtttaagctttagagaatccgtagcctccagtttaatatcggtaacaattggttgcttaattgctgcctattgctcgatcatgggaccgcagtccggttgcagacagatggtaacagctagatacctgttcggatggtggtttgttaaattagttgcattagcttccattatcggtgtcatgggttggtctgtggttaattccgtggttgggggtgaaatgttagctgctatttctaatgataaagtacccctatgggtagggattgtcatagtgaccgtatgctcctttttagttgccattttcggtatcaaacaagtcattaaagtggaaacttacttatccgtacccgtcctgacagcatttttactactgtacatttcatcaagtgataaatacagcttcgtcaatgcatacgtttcaaagggaaatttggactcttccacccgaaagggcaactggatgagttttttttcattatgctatagtattacggctacttgggggtctattacagcagactattatatattgttcccagaagatacaccatatattcaaattttttgcctaacgttttttggaacatttttgcctacctgtttcgtcggaatcttaggtctcttactagcttctgttgccatgtcgtataagccttggtcagtcgagtacgattcccatggaatgggtggtctactttgggcaggttttcagcgttggaacggcttcggaaagttctgcgtggtagtactggtattcagtttggtatccaacaacatcatcaatacgtattcggcagcattctccatccaactttctagtgtgttttgtgcaaaaatccctcgctggttctggtctattgtttgtactataatttgtttggtatgcgcattaataggtcgtaatcattttagtactattttgggaaatttcctaccaatgataggctactggattagcatgtactttatcttattattcgaagagaatttagtattcagaaggtttttcttacatttgtacaccaaagagtttcctacagttacaggagaaataaatggaccggaacttgttggatcttcaaaagaagtggagaaagatgcagttactaatatccatttgttaaaaagaaaacataaggtgactaaacatcgttacaattgggacaaatgggaagattatgaggttttaacgcacggttatgcagcaacatttgcgtttattgtaggagttgctggtgtggtagttggtatggcgcaagcctattggattggcccaattgctgccaaatttggtgaatatggtggtgatgtcgcaatgtggttaagtatggcgttctcaggtgttgtataccctccttgtagatacttagagctacgtaaatttggtcgttaa

SEQ ID NO: 3806 - DNA, 1740 bp, Artificial Sequence
  Description of Artificial Sequence: Synthetic polynucleotide
atgaatagggacaacatggacacaacaaagcgcaaagaagatcatacaaagcatactactgatgtaatagaattttacgaagaaggaaccgcagcttcttctttaaacatagccacagaaaaggccaacagtagtccgtccattttgagaagaattatcaacagggcggcatggctttctaagaaagtggacgcaatgggagtagagtctaccggtattcagaggatatctccctatgaaagaggaacatccaagaaacaatttttgcatgtcgcggggttgtggttgagtgccacaggtggtttgtcttccatgtcttcttttttattaggccctttacttttcggtttaagctttagagaatccgtagcctccagtttaatatctgtaacaattggttgcttaattgctgcctattgctccatcatgggaccgcagtccggttgcagacagatggtaacagctagataccttttcggatggtggtttgttaaattagttgcattagcttccattatcggtgtcatgggttggtctgtggttaattccgtggttgggggtgaaatgttagctgctatttctaatgataaagtacccctttgggtagggattgtcatagtgaccgtatgctcctttttagttgccattttcggtatcaaacaagtcattaaagtggaaacttacttatccgtacccgtcttaacagcatttttattattgtacatttcttccagtgataaatacagcttcgtcaatgcatacgtttccaagggaaatttggactcttccaccagaaagggcaactggatgagttttttttctttatgctatagtattacggctacttgggggtctattacagcagactattatatattgttcccagaagatacaccatatattcaaattttttgcttaacgttttttggaacatttttgcctacctgtttcgtcggaatcttaggtctcttattagcttctgttgccatgtcttataagccttggtctgtcgagtacgattcccatggaatgggtggtttactttgggcaggttttcagcgttggaacggcttcggaaagttctgcgtggtagtattggtattcagtttggtatccaacaacatcatcaatacgtattctgcagcattctccatccaactttctagtgtgttttgtgcaaaaatccctcgctggttctggtctattgtttgtactataatttgtttggtatgcgcattaataggtcgtaatcattttagtactattttgggaaatttcttaccaatgataggctactggattagcatgtactttatcttattattcgaagagaatttagtattcagaaggtttttcttacatttgtacaccaaagagtttcctacagttacaggagaaataaatggaccggaacttgttggatcttctaaagaagtggagaaagatgcagttactaatatccatttgttaaaaagaaaacataaggtgactaaacatcgttacaattgggacaaatgggaagattatgaggttttaacgcacggttatgcagcaacatttgcgtttattgtaggagttgctggtgtggtagttggtatggcgcaagcctattggattggcccaattgctgccaaatttggtgaatatggtggtgatgtcgcaatgtggttaagtatggcgttctctggtgttgtataccctccttgtagatacttagagttgcgtaaatttggtcgttga

SEQ ID NO: 3807 - DNA, 1140 bp, Saccharomyces cerevisiae
atgtgcgattctcctgcaacgactggaaagcctactattcttttcatcgcagatccgtgcgaaacatcagccacacttaattccaaggcattcaaagagaagttcaggatcttgcgctatcagctggacaccaaagaagcatttcttaactttttagaaaggcatgaacaagacaaaatatgtgccatttatgctgggtttccggcattcaaaaaaatcggtgggatgactcgaagtatcatcgaacacaagtcatttccaaggaaaaatttaaaatgtatcgtgctttgctcaagaggttacgacggatgggatctggatacattacgcaagcatgaaattcgattatacaactaccaagacgatgaaaatgaaaaattgatagacgatttaaagcttcatcaagtcggtaatgatgtggcagattgtgccttgtggcacattctggagggctttagaaagttctcctattaccaaaaacttagtagagaaactggaaatacattaactgcaagggcgaaagctgcagaaaagagcggatttgcttttggccatgaactggggaatatgtttgctgaatcaccaagaggaaagaaatgcttaattcttggtttaggaagtattggaaagcaagtagcctacaagttgcaatacgggctaggaatggaaatacattattgcaaaagaagcgaagattgcacaatgagtcaaaacgaaagctggaaatttcatttgctagatgaaacaatatatgcaaaactataccagtttcatgcaatcgtggtcacattgccgggaactccacaaacagaacatttaatcaacaggaaatttttggaacactgcaatccaggcctaattttagtcaacttgggaagaggtaaaattttggacttgcgggctgtttctgacgccttggtaacgggacgaatcaaccatctcggtttagacgtctttaataaagaaccagaaatagatgaaaaaatcagatcttctgatagacttacttcaattactccgcatttgggtagtgcgacaaaggatgtttttgagcaaagttgtgaactggcattgacaagaatcttacgggtagtgtctggggaagccgcaagcgatgagcatttctcccgtgtagtttga

SEQ ID NO: 3808 - DNA, 1140 bp, Artificial Sequence
  Description of Artificial Sequence: Synthetic polynucleotide
atgtgcgattctcctgcaacgactggaaagcctactattcttttcatcgcagatccgtgcgaaacatctgccacacttaattccaaggcattcaaagagaagttcaggatcttgcgctatcagttagacaccaaagaagcatttcttaactttttagaaaggcatgaacaagacaaaatatgtgccatttatgctgggtttccggcattcaaaaaaatcggtgggatgactagaagtatcatcgaacacaagagctttccaaggaaaaatttaaaatgtatcgtgctttgctctagaggttacgacggatgggatttggatacattacgcaagcatgaaattagattatacaactaccaagacgatgaaaatgaaaaattgatagacgatttaaagcttcatcaagtcggtaatgatgtggcagattgtgccttgtggcacattttagagggctttagaaagttctcctattaccaaaaacttagtagagaaactggaaatacattaactgcaagggcgaaagctgcagaaaagagcggatttgcttttggccatgaattggggaatatgtttgctgaatctccaagaggaaagaaatgcttaattcttggtttaggaagtattggaaagcaagtagcctacaagttgcaatacgggttgggaatggaaatacattattgcaaaagaagcgaagattgcacaatgagtcaaaacgaaagctggaaatttcatttgttggatgaaacaatatatgcaaaactttaccagtttcatgcaatcgtggtcacattgccgggaactccacaaacagaacatttaatcaacaggaaatttttggaacactgcaatccaggcttaattttagtcaacttgggaagaggtaaaattttggacttgagagctgtttctgacgccttggtaacgggaagaatcaaccatctcggtttagacgtctttaataaagaaccagaaatagatgaaaaaatcagatcttctgatagacttacttctattactccgcatttgggtagtgcgacaaaggatgtttttgagcaaagttgtgaattggcattgacaagaatcttaagagtagtgtctggggaagccgcaagcgatgagcatttctcccgtgtagtttga

SEQ ID NO: 3809 - DNA, 1398 bp, Saccharomyces cerevisiae
atgccgatcaagagattagatacagttgtggtaaataccggctctcaaaatgaccaacattcagcctccgtgccaccggtgtatttgtcgactaccttcaaagtggacttgaataatgaagatgcacagaactacgattattccagatcgggaaacccgaccagaagtgtccttcaacaccagattggtaagctttatcgtgtcccacaggaaaacgtattagctgtgagcagtggtatgacggcgctagacgtcatcctgcgtgggctcgtcttacttaacggcactgacaaccatacgccaacaataatagccggcgatgatctttatggaggcacccaaaggctgctgaattttttcaagcaacagagtcatgcagtctctgttcatgtggacacttccgattttgaaaagttcaaaaccgttttccagtctttagataaagttgattgtgttcttctagagtctccgaccaatccgctttgcaaggttgtagatatccctagaatattacgttttgtgaaatgcatatctcccgacactacagttgtcgttgataatactatgatgagtggactcaattgtaatcctcttcaactgaatccaggctgcgatgtcgtatacgaatctgctaccaagtacttgaatggtcatcacgatttgatggggggtgttattatcagcaaaacaccagaaatagcctcgaagctttactttgtcattaattctacaggagctggattatccccaatggattcttggctacttgtgaggggcctaaaaactctaggagttagattatatcaacagcagagaaatgctatgatattggctcattggctagaaaattcatgcggattcaaacctaccagaacaaacaaggctacgaaaactagatttgttggattacgctccaacccggatttcaagctgcataaatcgttcaataatggcccaggtgccgtgttatccttcgaaacggggtccttcgaacattcaaagagactggtcagttccaaaaaactgagtatatgggctgtgacggtatctttcgggtgtgtaaattcgcttctatctatgccttgcaaaatgtcccatgcttccattgatcccgaattaaggaaagagagagattttcctgaagatttggttcgtctttgctgcggtatcgaaaatatagtagatttgaagaaagatttattagcggcgatggttgacgctgatattatagaagtaagagaaaatggcaaatatcttttcaacaaattgaataagaacctagctgtgaacactaccatcgatgacctgcataagcctttaagtatttacgaagaattttacaatcaagatctcatcagaaaggactcagaattgaatattaagagttcgaaattgtaa

SEQ ID NO: 3810 - DNA, 1398 bp, Artificial Sequence
  Description of Artificial Sequence: Synthetic polynucleotide
atgccgatcaagagattagatacagttgtggtaaataccggctctcaaaatgaccaacattctgcctccgtgccaccggtgtatttgtctactaccttcaaagtggacttgaataatgaagatgcacagaactacgattattccagatctggaaacccgaccagaagtgtccttcaacaccagattggtaagctttatcgtgtcccacaggaaaacgtattagctgtgagcagtggtatgacggcgttggacgtcatcttacgtgggctcgtcttacttaacggcactgacaaccatacgccaacaataatagccggcgatgatctttatggaggcacccaaaggttattgaattttttcaagcaacagagtcatgcagtctctgttcatgtggacacttccgattttgaaaagttcaaaaccgttttccagtctttagataaagttgattgtgttcttttggagtctccgaccaatccgctttgcaaggttgtagatatccctagaatattacgttttgtgaaatgcatatctcccgacactacagttgtcgttgataatactatgatgagtggactcaattgtaatcctcttcaattgaatccaggctgcgatgtcgtatacgaatctgctaccaagtacttgaatggtcatcacgatttgatggggggtgttattatcagcaaaacaccagaaatagcctccaagctttactttgtcattaattctacaggagctggattatccccaatggattcttggttacttgtgaggggcttgaaaactttgggagttagattatatcaacagcagagaaatgctatgatattggctcattggttagaaaattcttgcggattcaaacctaccagaacaaacaaggctacgaaaactagatttgttggattacgctccaacccggatttcaagttgcataaatctttcaataatggcccaggtgccgtgttatccttcgaaacggggtccttcgaacattctaagagattggtcagttccaaaaaattaagtatatgggctgtgacggtatctttcgggtgtgtaaattctcttttatctatgccttgcaaaatgtcccatgcttccattgatcccgaattaaggaaagagagagattttcctgaagatttggttcgtctttgctgcggtatcgaaaatatagtagatttgaagaaagatttattagcggcgatggttgacgctgatattatagaagtaagagaaaatggcaaatatcttttcaacaaattgaataagaacttggctgtgaacactaccatcgatgacttgcataagcctttaagtatttacgaagaattttacaatcaagatctcatcagaaaggactctgaattgaatattaagagttctaaattgtga

SEQ ID NO: 3811 - DNA, 660 bp, Saccharomyces cerevisiae
atggggccaaagagacagacagtatcactccaagagaaaaagaaccggattctgaacttttttcaagagacgtacacattctacaacatcaaggaattagagaaaagcatacctaaaaaatgcggaatctcacccatgatcgttaaagatttagtgcaacaaatgattgatgaagacggcgtcatttcggtggaaaaatgtggtaatattaacatctactggtgctttaaaaatcagacactgcaaaaattgtatgattcaagcgagttgataaaaaaaaagatacaggaagtaaagtgtgatattgccacttataaacaagaactagacaaaacgctagcaactggaaggcgtaaaaaatttacggtaggccaaaaatcatacaatagggaggctctactggaaaagagaaaaaaaattcaggatgaaattaagaaaaagagtaatagtctccaaaaaatagaaagcattagatgggatgcagcaaaaatacaagagaataaacaacagatccgcctaaaaaaagtgcatctggagaaaactactgataacattgagattctcattgattatttatacaagaaattctttttgaagccagaacagataagaaaagaatttggaattccagaagagttcaaggaatttacggaggtttaa

SEQ ID NO: 3812 - DNA, 660 bp, Artificial Sequence
  Description of Artificial Sequence: Synthetic polynucleotide
atggggccaaagagacagacagtatctctccaagagaaaaagaacagaattttgaacttttttcaagagacgtacacattctacaacatcaaggaattagagaaaagcatacctaaaaaatgcggaatctcccccatgatcgttaaagatttagtgcaacaaatgattgatgaagacggcgtcatttctgtggaaaaatgtggtaatattaacatctactggtgctttaaaaatcagacattacaaaaattgtatgattctagcgagttgataaaaaaaaagatacaggaagtaaagtgtgatattgccacttataaacaagaattagacaaaacgttggcaactggaaggcgtaaaaaatttacggtaggccaaaaatcttacaatagggaggctttattggaaaagagaaaaaaaattcaggatgaaattaagaaaaagagtaatagtctccaaaaaatagaaagcattagatgggatgcagcaaaaatacaagagaataaacaacagatccgcttaaaaaaagtgcatttagagaaaactactgataacattgagattctcattgattatttatacaagaaattctttttgaagccagaacagataagaaaagaatttggaattccagaagagttcaaggaatttacggaggtttga

SEQ ID NO: 3813 - DNA, 1191 bp, Saccharomyces cerevisiae
atgaggtttaggagttcttcccatagcttaaaacatgttgacagagaattaaaggagttgattaattcgtccgagaatgccaataaatgcggtgaatgtggtaatttctacccaacttggtgctcagttaatttgggggttttcctttgtggtaggtgtgcctctgttcatagaaaagttttcggtagcagagacgacgatgccttttctaacgttaaatcactatcaatggatagatggacaagagaggatatcgatgaattagtgagtcttggaggcaataaggggaatgctcggttctggaatcctaaaaatgtcccttttccttttgatggagatgatgacaaagccatcgtggagcattacattagagacaagtatattttgggtaaattcaggtatgatgaaataaagcctgaagactttggatccagaatggatgattttgatggggaatcggacaggtttgatgaaagaaatagaagtaggagcaggagcagatctcattctttctataaagggggccataataggtctgactacggcggttccagggactcattccaaagcagtggaagcagatattctaggcaactggcagaactcaaggacatgggtttcggtgatacaaacaaaaatttagatgcattatcgtccgctcacggaaatatcaatagagcaatcgattatctagaaaaaagttcaagttcaagaaatagtgtatcggcagcagcgacaacatcaactccgcccctgcccaggagacgtgcgacaacaagtggcccacagccagctatttttgatggtacaaatgtaatcacgccagattttacttcaaattcagcatcttttgtacaagcaaagccagcagttttcgatggtacccttcaacagtattacgatcctgctaccggaatgatatatgtagatcagcagcaatacgccatggctatgcaacagcagcaacagcaacagcaacagcttgctgtcgcacaggctcaggctcaggcacaggcacaggcacaggctcaagttcaggctcaggctcaggctcaggcccaggctcaggctcaagcacagcagatccagatgcaacagcttcagatgcagcaacagcaacaggcgccattatcttttcagcaaatgtcgcaaggaggaaacctgccacaaggttatttctacacacaataa

SEQ ID NO: 3814 - DNA, 1191 bp, Artificial Sequence
  Description of Artificial Sequence: Synthetic polynucleotide
atgaggtttaggagttcttcccatagcttaaaacatgttgacagagaattaaaggagttgattaattcttccgagaatgccaataaatgcggtgaatgtggtaatttctacccaacttggtgctctgttaatttgggggttttcctttgtggtaggtgtgcctctgttcatagaaaagttttcggtagcagagacgacgatgccttttctaacgttaaatctttatctatggatagatggacaagagaggatatcgatgaattagtgagtcttggaggcaataaggggaatgctagattctggaatcctaaaaatgtcccttttccttttgatggagatgatgacaaagccatcgtggagcattacattagagacaagtatattttgggtaaattcaggtatgatgaaataaagcctgaagactttggatccagaatggatgattttgatggggaaagtgacaggtttgatgaaagaaatagaagtaggagcaggagcagatctcattctttctataaagggggccataataggtctgactacggcggttccagggactctttccaaagcagtggaagcagatattctaggcaattggcagaactcaaggacatgggtttcggtgatacaaacaaaaatttagatgcattatcttccgctcacggaaatatcaatagagcaatcgattatttggaaaaaagtagtagtagtagaaatagtgtatctgcagcagcgacaacatctactccgcccttgcccaggagacgtgcgacaacaagtggcccacagccagctatttttgatggtacaaatgtaatcacgccagattttacttccaattctgcatcttttgtacaagcaaagccagcagttttcgatggtacccttcaacagtattacgatcctgctaccggaatgatatatgtagatcagcagcaatacgccatggctatgcaacagcagcaacagcaacagcaacagcttgctgtcgcacaggctcaggctcaggcacaggcacaggcacaggctcaagttcaggctcaggctcaggctcaggcccaggctcaggctcaagcacagcagatccagatgcaacagcttcagatgcagcaacagcaacaggcgccattatcttttcagcaaatgtctcaaggaggaaacttaccacaaggttatttctacacacaatga

SEQ ID NO: 3815 - DNA, 2694 bp, Saccharomyces cerevisiae
atgggagacattaaaaataaagatcacacaacctctgtgaaccataatctaatggcaagtgcaggaaattacaccgctgagaaagaaatcggaaagggttcgtttgccactgtatatagagggcatctgacatccgacaaatctcagcatgtagccataaaggaagtatcaagggcgaaattaaaaaataagaaattactagagaatttggaaatagaaatcgctatcttgaagaaaatcaagcatcctcatatcgtcggacttattgactgtgaacgaacatcaacagatttttatttgatcatggagtactgtgctcttggggacctaacatttctgttgaaaaggcgtaaagaattgatggagaatcatcctctactaaggaccgtatttgaaaaataccctccaccgagtgagaaccataacggcctgcatagagcgtttgtcttgagttatttacagcagttagcgtccgctttgaaatttttgaggtctaaaaacttggttcatagagacatcaagcctcaaaacttactattatctacacccctaattggatatcatgattcaaaaagcttccatgaacttggatttgttgggatctacaacttacccattttaaagatagcagatttcgggtttgcaagatttttgccaaacacgtcattagcagaaactctttgtggctcaccattatatatggcaccagaaattttgaattatcaaaaatataacgctaaagcagatctgtggtctgtcggtacagtggtattcgaaatgtgctgtggcaccccaccgtttagagcttccaatcatttggagttattcaagaaaattaaaagagcaaacgatgtcataacgtttccttcatattgcaatattgaaccagagttaaaagagttgatatgtagtttattgacatttgatccagcccaaagaataggatttgaggagttttttgctaacaaggtagtcaacgaagacttgtcttcttatgaattggaagatgatttacctgagttagaatccaaatcaaaaggtattgtagaaagtaatatgttcgtttctgagtatttatctaaacagccaaagagtccgaacagtaatcttgcaggtcatcaatcaatggcagataatcccgcggagctcagtgatgccctcaagaacagcaatatattaactgccccagccgttaaaacagaccatacacaagccgtagataaaaaggcttcaaataataaataccataatagcctagtttcagatagaagctttgaaagagaatatgtggtggtagagaagaaatcggttgaagttaattcattggcagacgaggttgctcaagcaggattcaatccaaatcctattaagcacccaacttcaactcaaaatcagaacgtcttattgaatgagcaattctctccaaacaatcaacagtattttcaaaatcaaggagaaaatccgaggttactgagggccacatcatcttccagtggaggtagtgatgggtctaggcgaccatctttggtggatagacgcttgtctatatcctcgctgaatccatctaatgcattatcaagagccctcggtattgcatcaacgagattgtttggtggtgcaaatcaacagcagcaacagcaacaaatcacatcttccccaccgtacagtcaaactttgttgaattcccaactttttcatgaacttactgagaatataatattaagaatagatcacctacagcatccagagacactgaaattagataatactaatatcgttagtattttggaatctctggccgcaaaggcatttgttgtttactcttatgcagaagtgaaattttctcaaattgttccattatcaacaacattaaaaggcatggctaactttgagaacaggcgcagtatggatagtaatgctattgcagaagaacaagactcagacgatgcagaagaagaggatgaaacgttgaaaaagtacaaggaagattgcttatccacgaaaacttttggaaagggtagaactttatctgccacatctcagttgagtgcaactttcaataaactaccacgttcggaaatgatccttctatgtaatgaggccattgtcttatatatgaaggcattatccattttatcaaaatctatgcaggtaacgtccaactggtggtatgaatctcaagaaaaatcatgttctctaagagttaacgtgttggtacagtggctaagggaaaaatttaatgaatgtttagaaaaagctgatttcctgagattaaaaattaacgacttgagattcaagcatgcttctgaggtagctgaaaatcaaactttggaagaaaaaggtagttcggaagagccagtatatttagaaaagctattatatgatcgtgcattagaaatatctaagatggccgcacatatggaattaaaaggagaaaatttgtacaactgtgaattagcttatgcaacttcactttggatgttagaaacttctctggacgatgatgattttacgaatgcctatggtgactacccttttaaaactaacatacatctaaaaagtaacgacgttgaagataaagagaagtatcatagtgtgttggatgaaaatgacagaataatcataagaaagtatattgatagtattgcaaacaggttgaaaatattgaggcagaagatgaaccaccaaaattaa

SEQ ID NO: 3816 - DNA, 2694 bp, Artificial Sequence
  Description of Artificial Sequence: Synthetic polynucleotide
atgggagacattaaaaataaagatcacacaacctctgtgaaccataatttaatggcaagtgcaggaaattacaccgctgagaaagaaatcggaaagggttcttttgccactgtatatagagggcatttaacatccgacaaatctcagcatgtagccataaaggaagtaagtagggcgaaattaaaaaataagaaattattggagaatttggaaatagaaatcgctatcttgaagaaaatcaagcatcctcatatcgtcggacttattgactgtgaaagaacatctacagatttttatttgatcatggagtactgtgctcttggggacttgacatttttattgaaaaggcgtaaagaattgatggagaatcatcctttattgaggaccgtatttgaaaaataccctccaccgagtgagaaccataacggcttgcatagagcgtttgtcttgagttatttacagcagttagcgtccgctttgaaatttttgaggtctaaaaacttggttcatagagacatcaagcctcaaaacttattattatctacacccttaattggatatcatgattctaaaagcttccatgaacttggatttgttgggatctacaacttacccattttaaagatagcagatttcgggtttgcaagatttttgccaaacacgtctttagcagaaactctttgtggctctccattatatatggcaccagaaattttgaattatcaaaaatataacgctaaagcagatttatggtctgtcggtacagtggtattcgaaatgtgctgtggcaccccaccgtttagagcttccaatcatttggagttattcaagaaaattaaaagagcaaacgatgtcataacgtttccttcttattgcaatattgaaccagagttaaaagagttgatatgtagtttattgacatttgatccagcccaaagaataggatttgaggagttttttgctaacaaggtagtcaacgaagacttgtcttcttatgaattggaagatgatttacctgagttagaatccaaatctaaaggtattgtagaaagtaatatgttcgtttctgagtatttatctaaacagccaaagagtccgaacagtaatcttgcaggtcatcaatctatggcagataatcccgcggagctcagtgatgccctcaagaacagcaatatattaactgccccagccgttaaaacagaccatacacaagccgtagataaaaaggcttctaataataaataccataatagcttagtttctgatagaagctttgaaagagaatatgtggtggtagagaagaaatctgttgaagttaattctttggcagacgaggttgctcaagcaggattcaatccaaatcctattaagcacccaacttctactcaaaatcagaacgtcttattgaatgagcaattctctccaaacaatcaacagtattttcaaaatcaaggagaaaatccgaggttattgagggccacatcttcttccagtggaggtagtgatgggtctaggagaccatctttggtggatagacgcttgtctatatcctctttgaatccatctaatgcattatctagagccctcggtattgcaagcacgagattgtttggtggtgcaaatcaacagcagcaacagcaacaaatcacatcttccccaccgtacagtcaaactttgttgaattcccaactttttcatgaacttactgagaatataatattaagaatagatcacttgcagcatccagagacattaaaattagataatactaatatcgttagtattttggaatctttggccgcaaaggcatttgttgtttactcttatgcagaagtgaaattttctcaaattgttccattatctacaacattaaaaggcatggctaactttgagaacaggcgcagtatggatagtaatgctattgcagaagaacaagacagtgacgatgcagaagaagaggatgaaacgttgaaaaagtacaaggaagattgcttatccacgaaaacttttggaaagggtagaactttatctgccacatctcagttgagtgcaactttcaataaattaccacgttctgaaatgatccttttatgtaatgaggccattgtcttatatatgaaggcattatccattttatccaaatctatgcaggtaacgtccaactggtggtatgaatctcaagaaaaaagttgttctttgagagttaacgtgttggtacagtggttaagggaaaaatttaatgaatgtttagaaaaagctgatttcttaagattaaaaattaacgacttgagattcaagcatgcttctgaggtagctgaaaatcaaactttggaagaaaaaggtagttctgaagagccagtatatttagaaaagcttttatatgatcgtgcattagaaatatctaagatggccgcacatatggaattaaaaggagaaaatttgtacaactgtgaattagcttatgcaacttctctttggatgttagaaacttctttggacgatgatgattttacgaatgcctatggtgactacccttttaaaactaacatacatttgaaaagtaacgacgttgaagataaagagaagtatcatagtgtgttggatgaaaatgacagaataatcataagaaagtatattgatagtattgcaaacaggttgaaaatattgaggcagaagatgaaccaccaaaattga

SEQ ID NO: 3817 - DNA, 1683 bp, Saccharomyces cerevisiae
atggtactacttaaagaacctgttcagccgctgcctcgatcatctctgttatataataatgcgagcaatagtagtagtcgtataaaagagacaagaaaagtcaaactattatataatcccttaactaagagacaaatccttaacaactttgaaattttagccactttgggtaatggacagtacggcaaagtgaaattagcaagagatctcgggacaggtgcgttggttgcaataaaaattcttaatagattcgaaaaaagaagcgggtattctcttcaattgaaagtagaaaatccaagggttaatcaagaaattgaagtaatgaaaagatgtcatcatgaaaacgttgtggaattgtatgaaattttgaatgaccctgagagcacaaaggtttatcttgtattagaatattgctcaaggggacccgttaaatggtgtccagaaaacaaaatggagataaaagcagtgggaccatcaatactcactttccaacagtcgaggaaggtagtgttggatgtagtatcgggtctggagtatttacattcccaagggataacgcatcgagatatcaaaccatcgaacctgttaatttcatcaaacggaacggtgaaaatatccgattttggcgttgctatgtcaactgccaccggaagtactaatatacaatcatcgcatgaacaacttttaaaatctagagccttagggacccctgctttttttgcacctgagctttgctccactgaaaaagagtattcctgctcatctgccatcgatatctggtcattgggggtcactatatactgcttgttgtttggaaagttgcctttcaacgccaattcaggattagaacttttcgacagtattatcaataaacccttagaatttccatcttatgaggaaatgttgaatggtgccacttcgggaatcacaatggaagaatacactgatgccaaagatttattgaagaagctgttacaaaaagatcctgacaaacggataaaactagcagacatcaaggtacatccgtttatgtgccattatggtaaaagcgatgcagcatccgtattgaccaatttggagacgtttcatgagttgaaagtttcaccgccctcttcatgcaaaagggtagaattggtcagcctaccagtgaattcatcattcgcctctttagatagcgtttatatggaaaattttgaccacaataaccttaggactggtgctgacagaaattcaacatattctccatcaatatacgacgcaaataccttatcaccctcagcatatcacaacatcggttctagagagtcatcctattcgtccttttcctctttcacatcatccaccgcttttgcatctcagatcagtattcaggatgccccagcaatcggtgatcaacaatgcttgataggtgagagtggaagttcattaagagtgaattcttgtgagtttccacaatatacaactatgtctcctgtaggagaatatccctttgagagtacggaagcaagtttgagctctactcttacgcctgtcggtaatgtacctcaacgtataaaagcccacctggtagaagggaaatctaacagcaaggatgaccttagaatagaagcagacgcatcacttgtatttgaggctagcgacgcccagcgcacgagaagaagaatgtctctttataagctttag

SEQ ID NO: 3818 - DNA, 1683 bp, Artificial Sequence
  Description of Artificial Sequence: Synthetic polynucleotide
atggtattgcttaaagaacctgttcagccgttgcctagatcttctttattatataataatgcgagcaatagtagtagtcgtataaaagagacaagaaaagtcaaattattatataatcccttaactaagagacaaatccttaacaactttgaaattttagccactttgggtaatggacagtacggcaaagtgaaattagcaagagatctcgggacaggtgcgttggttgcaataaaaattcttaatagattcgaaaaaagaagcgggtattctcttcaattgaaagtagaaaatccaagggttaatcaagaaattgaagtaatgaaaagatgtcatcatgaaaacgttgtggaattgtatgaaattttgaatgaccctgagagcacaaaggtttatcttgtattagaatattgctctaggggacccgttaaatggtgtccagaaaacaaaatggagataaaagcagtgggaccaagtatactcactttccaacagtctaggaaggtagtgttggatgtagtatctggtttagagtatttacattcccaagggataacgcatagagatatcaaaccatctaacttattaatttcttccaacggaacggtgaaaatatccgattttggcgttgctatgtctactgccaccggaagtactaatatacaatcttctcatgaacaacttttaaaatctagagccttagggacccctgctttttttgcacctgagctttgctccactgaaaaagagtattcctgctcttctgccatcgatatctggtctttgggggtcactatatactgcttgttgtttggaaagttgcctttcaacgccaattctggattagaacttttcgacagtattatcaataaacccttagaatttccatcttatgaggaaatgttgaatggtgccacttctggaatcacaatggaagaatacactgatgccaaagatttattgaagaagcttttacaaaaagatcctgacaaaagaataaaattggcagacatcaaggtacatccgtttatgtgccattatggtaaaagcgatgcagcatccgtattgaccaatttggagacgtttcatgagttgaaagtttctccgccctctagttgcaaaagggtagaattggtcagcttgccagtgaattcttctttcgcctctttagatagcgtttatatggaaaattttgaccacaataaccttaggactggtgctgacagaaattctacatattctccaagtatatacgacgcaaataccttatctccctctgcatatcacaacatcggttctagagagtcttcctattcttccttttcctctttcacatcttccaccgcttttgcatctcagatcagtattcaggatgccccagcaatcggtgatcaacaatgcttgataggtgagagtggaagttctttaagagtgaattcttgtgagtttccacaatatacaactatgtctcctgtaggagaatatccctttgagagtacggaagcaagtttgagctctactcttacgcctgtcggtaatgtacctcaacgtataaaagcccacttggtagaagggaaatctaacagcaaggatgaccttagaatagaagcagacgcatctcttgtatttgaggctagcgacgcccagcgcacgagaagaagaatgtctctttataagctttga

SEQ ID NO: 3819 - DNA, 2580 bp, Saccharomyces cerevisiae
atgatcaataacgaaccatttccatctgccgactcagcatcgattttaactacgtctacatcaaataactccttaatgtcttacaatcatcagcctcaactatctattaactccgtccaatcactcttggagcccgtgacccctccgcctttgggccagatgaataacaaaagaaaccatcaaaaggctcattcgcttgatctctctggttttaatcagttcatatcatcgacacaatctcccttggctttgatgaataatacatcaacatcgaattctgctaactctttttccccgaatcctaatgctgctagcaactccactgggctttcagcctcaatggcaaatcctccagccattctaccattaatcaatgagtttgatctggaaatggatggtcccaggagaaaatcaagccacgatttcacggttgttgctccttcgaactctggtgtcaatacctccagtttaattatggaaacaccatcctcttcagtgactcctgctgcatctctcagaaattttagcaatagtaataatgctgcttccaaatgtggagtggataattcgtcatttggtttgagtagctcaacgtcttcatctatggtcgaaatcagcgcactaccccttagagatctggattatatcaaacttgccactgaccagtttggctgccgttttcttcaaaaaaaattagaaacccccagtgaatccaatatggtgagagacttgatgtatgaacaaattaagccatttttcttggaccttattttggatccgttcggtaactatttggttcaaaaactatgcgattatttaactgccgagcaaaagacattattaatacaaacaatatatccaaatgttttccaaatatcaatcaatcagtacggaactcgttccttacagaaaattatagacactgtcgataacgaagttcaaatcgatctcattattaagggattttcccaagaatttacttcgattgagcaagtggttactttgataaacgatcttaatggtaaccatgtgattcaaaagtgtattttcaaattctcgccatcaaaatttggtttcatcatagatgctattgtagaacaaaataatatcattaccatttctacccataaacatggttgttgcgtactacaaaaattactaagcgtttgtactctacaacaaattttcaaaatttctgtgaaaattgtgcagttccttcctggattaatcaacgatcagttcggtaattatatcatccaatttctgttagatatcaaagaattggacttttacttattggctgagttatttaaccgtttatccaatgaattatgtcaactatcttgtttgaagttctcctcaaatgttgtggaaaaattcattaaaaaattatttagaatcattactggatttattgttaataacaatgggggtgcctcccaaaggactgcagttgcttctgatgacgtgattaatgcttctatgaacattcttttgactaccattgatatattcacagtcaatttaaatgtgctaatcagggataattttggtaattatgcgttacaaacgctattagacgttaagaattattctcctctgcttgcttacaacaaaaatagtaacgcaattgggcaaaacagctctagtacattgaattacggtaacttttgtaacgatttttcattgaaaattggtaacttgattgtccttacaaaagaattacttccaagtattaaaactacatcctatgcaaagaaaattaagttgaaagttaaagcttatgcagaagccacaggtataccattcactgacatatctcctcaagtcactgcaatgagtcataacaatcttcaaacgattaacaacgaaaataagaacccccataacaaaaatagtcataatcataatcataatcataatcataaccatgctcacaataataataacaataataatcaaaagagtcatacccgtcatttttctttaccagctaatgcttaccatagaagaagtaacagctctgtaaccaataatttctcaaaccaatatgcacaagatcagaaaattcactctccgcaacaaattatgaacttcaaccaaaacgcatatccctcgatgggagcaccttctttcaattctcaaactaacccaccattggtaagccataactcgttacaaaacttcgacaaccgccagtttgcaaatttaatggcacatcctaattctgctgcaccaatccattcgttctcatcatctaacattaccaatgtgaatcctaatgtttcaaggggatttaagcagcctggatttatgatgaatgaaaccgacaaaattaatgctaatcacttctcgccatactctaatgcaaatagtcaaaacttcaatgaatcttttgtgcctcgtatgcaatatcaaacggaaggtgcaaactgggattcaagtttgtcaatgaagtcgcagcatattggtcaaggcccatataatcaagttaatatgagccgcaacgctagtatttccaatatgcctgccatgaataccgctagaacatctgatgaacttcaattcactttgccataa

SEQ ID NO: 3820 - DNA, 2580 bp, Artificial Sequence
  Description of Artificial Sequence: Synthetic polynucleotide
atgatcaataacgaaccatttccatctgccgactctgcatctattttaactacgtctacaagtaataactccttaatgtcttacaatcatcagcctcaattatctattaactccgtccaatctctcttggagcccgtgacccctccgcctttgggccagatgaataacaaaagaaaccatcaaaaggctcattctcttgatctctctggttttaatcagttcatatcttctacacaatctcccttggctttgatgaataatacatctacaagtaattctgctaactctttttccccgaatcctaatgctgctagcaactccactgggctttctgcctctatggcaaatcctccagccattttaccattaatcaatgagtttgatttggaaatggatggtcccaggagaaaaagtagccacgatttcacggttgttgctccttccaactctggtgtcaatacctccagtttaattatggaaacaccatcctcttctgtgactcctgctgcatctctcagaaattttagcaatagtaataatgctgcttccaaatgtggagtggataattcttcttttggtttgagtagctctacgtcttcttctatggtcgaaatcagcgcattgccccttagagatttggattatatcaaacttgccactgaccagtttggctgccgttttcttcaaaaaaaattagaaacccccagtgaatccaatatggtgagagacttgatgtatgaacaaattaagccatttttcttggaccttattttggatccgttcggtaactatttggttcaaaaattatgcgattatttaactgccgagcaaaagacattattaatacaaacaatatatccaaatgttttccaaatatccatcaatcagtacggaactcgttccttacagaaaattatagacactgtcgataacgaagttcaaatcgatctcattattaagggattttcccaagaatttacttctattgagcaagtggttactttgataaacgatcttaatggtaaccatgtgattcaaaagtgtattttcaaattctctccatctaaatttggtttcatcatagatgctattgtagaacaaaataatatcattaccatttctacccataaacatggttgttgcgtattacaaaaattattaagcgtttgtactttacaacaaattttcaaaatttctgtgaaaattgtgcagttccttcctggattaatcaacgatcagttcggtaattatatcatccaatttttattagatatcaaagaattggacttttacttattggctgagttatttaaccgtttatccaatgaattatgtcaattatcttgtttgaagttctcctctaatgttgtggaaaaattcattaaaaaattatttagaatcattactggatttattgttaataacaatgggggtgcctcccaaaggactgcagttgcttctgatgacgtgattaatgcttctatgaacattcttttgactaccattgatatattcacagtcaatttaaatgtgttaatcagggataattttggtaattatgcgttacaaacgttattagacgttaagaattattctcctttacttgcttacaacaaaaatagtaacgcaattgggcaaaacagctctagtacattgaattacggtaacttttgtaacgatttttctttgaaaattggtaacttgattgtccttacaaaagaattacttccaagtattaaaactacatcctatgcaaagaaaattaagttgaaagttaaagcttatgcagaagccacaggtataccattcactgacatatctcctcaagtcactgcaatgagtcataacaatcttcaaacgattaacaacgaaaataagaacccccataacaaaaatagtcataatcataatcataatcataatcataaccatgctcacaataataataacaataataatcaaaagagtcatacccgtcatttttctttaccagctaatgcttaccatagaagaagtaacagctctgtaaccaataatttcagtaaccaatatgcacaagatcagaaaattcactctccgcaacaaattatgaacttcaaccaaaacgcatatccctctatgggagcaccttctttcaattctcaaactaacccaccattggtaagccataactctttacaaaacttcgacaaccgccagtttgcaaatttaatggcacatcctaattctgctgcaccaatccattctttctcttcttctaacattaccaatgtgaatcctaatgtttccaggggatttaagcagcctggatttatgatgaatgaaaccgacaaaattaatgctaatcacttctctccatactctaatgcaaatagtcaaaacttcaatgaatcttttgtgcctcgtatgcaatatcaaacggaaggtgcaaactgggattctagtttgtccatgaagtctcagcatattggtcaaggcccatataatcaagttaatatgagccgcaacgctagtatttccaatatgcctgccatgaataccgctagaacatctgatgaacttcaattcactttgccatga

SEQ ID NO: 3821 - DNA, 1665 bp, Saccharomyces cerevisiae
atgacacctaacttaccagggttttattatgatagagaacgtcgacgttattttcgcatatctgaaaatcaaagcatttctaccacgggaacgacgaaccagtacagaaaagataatataaagcgacaatgtgttgaggaaaattacgataaaaaattttctatgattaaaaaaaaacgtcagcaaacattacaaaagtacaagcttagtcttctgaatccgttggaaagggcttttcgccctttatcatatgaaaagtacatgattggtttaaatatgcagtatgcatcgcattctctcactgaaggtcatcactcacatagttctgctaacgtaaaatcactcaattttccacacaggatacagataggagtattagcaaattgtattttattggtaactcaagaaggatgttttcatagtaaattagtatttgcaacaaacaagggctatgtcgcaggattttcatccctggataatttttctgaagaaaatttctttacggggttttccatggctgaattaaatcctatgttgaaatataagtccgagccaactgatgtgttcaaaacaatgaaacttgagagaacagttgccatcaaggaagggccgagccattatttttatcacaacgttaataccagatctaacgtgcatacttttgccatctttttacaagacttttcttccttaaaactgctcaaaattcgtcaggtcaaactcaaagaaaattgccaagtccatgattctcttgttgttggagacacgttgattattaccgtaaattatcgttgtcatttttatgatttgattccagaaacctttccaaatccctatatcttttctcctgccaaaagctcaagaaaacacaaaagtaggagtgacattacttccctatcattttgtctacaagaagatgctttatcacctttaaaaaaaacgaacaccggtgtgttttatttaggttacagaaatggtgattcaatggcaatagtcttcactaatattacaaacatgacattacagtactccaagaccaacggtatgacatcagaaagtcgaaatcaacctatcagaaattccctaaaatctgttgtttccataaaagcattgaataataaaggcctaatacttatatctggaatggcagacaaagagaatgtgcaacaactggttatagcagatacgttcctggaggacattctgaccgaaatcccggttgtatcttttaaaactaagttcttaaacgtgactaaggatacagaaatactcgagatatcggatgacgggcgctacttcatttatggttcaactagcgctagggacggaaagggtgattttgaagtattttgtaccactttatctggaaatcttgactacgaaaaatccgaaggtggaaatatcaccctctatccaataggaggtatgaagaactactgtaggttagaaaacttccagtttgaatctatccacctacattcggctttcatacccccaaggtacgtaaatccgtttgatgctgtggaacctctaggtgaagagagcagtacttcaccttacgatatacctgaagaagcactttctcaaaaaatatgcatcttaattcggagagaagatgatccctacaatggggccaatatcttcataacatctgctttgacctag

SEQ ID NO: 3822 - DNA, 1665 bp, Artificial Sequence
  Description of Artificial Sequence: Synthetic polynucleotide
atgacacctaacttaccagggttttattatgatagagaacgtcgtcgttattttcgcatatctgaaaatcaaagcatttctaccacgggaacgacgaaccagtacagaaaagataatataaagagacaatgtgttgaggaaaattacgataaaaaattttctatgattaaaaaaaaacgtcagcaaacattacaaaagtacaagcttagtcttttgaatccgttggaaagggcttttcgccctttatcttatgaaaagtacatgattggtttaaatatgcagtatgcatctcattctctcactgaaggtcatcactctcatagttctgctaacgtaaaatctctcaattttccacacaggatacagataggagtattagcaaattgtattttattggtaactcaagaaggatgttttcatagtaaattagtatttgcaacaaacaagggctatgtcgcaggattttcttccttggataatttttctgaagaaaatttctttacggggttttccatggctgaattaaatcctatgttgaaatataagtccgagccaactgatgtgttcaaaacaatgaaacttgagagaacagttgccatcaaggaagggccgagccattatttttatcacaacgttaataccagatctaacgtgcatacttttgccatctttttacaagacttttcttccttaaaattactcaaaattcgtcaggtcaaactcaaagaaaattgccaagtccatgattctcttgttgttggagacacgttgattattaccgtaaattatcgttgtcatttttatgatttgattccagaaacctttccaaatccctatatcttttctcctgccaaaagcagcagaaaacacaaaagtaggagtgacattacttccttatctttttgtttgcaagaagatgctttatctcctttaaaaaaaacgaacaccggtgtgttttatttaggttacagaaatggtgattctatggcaatagtcttcactaatattacaaacatgacattacagtactccaagaccaacggtatgacaagtgaaagtagaaatcaacctatcagaaattccttgaaatctgttgtttccataaaagcattgaataataaaggcttgatacttatatctggaatggcagacaaagagaatgtgcaacaattggttatagcagatacgttcttggaggacattttgaccgaaatcccggttgtatcttttaaaactaagttcttaaacgtgactaaggatacagaaatactcgagatatctgatgacgggcgctacttcatttatggttctactagcgctagggacggaaagggtgattttgaagtattttgtaccactttatctggaaatcttgactacgaaaaatccgaaggtggaaatatcaccctctatccaataggaggtatgaagaactactgtaggttagaaaacttccagtttgaatctatccacttgcattctgctttcatacccccaaggtacgtaaatccgtttgatgctgtggaacctttaggtgaagagagcagtacttctccttacgatatacctgaagaagcactttctcaaaaaatatgcatcttaattagaagagaagatgatccctacaatggggccaatatcttcataacatctgctttgacctga

SEQ ID NO: 3823 - DNA, 1038 bp, Saccharomyces cerevisiae
atggtgactggtgaagaaaatgtgtatctaaagtcaagcttatccattctcaaggagctcagtctcgatgaactactaaatgtgcagtatgacgtgactaccttaatcgcgaaacgtgttcaagcactgcaaaatcggaataaatgtgttctcgaagaacctaacagtaaactggctgaaattctatgtcacgaaaaaaatgctcctcaacaatcctctcagacgtctgcggggccaggtgagcaagattctgaagatttcatccttactcagtttgatgaggacataaagaaagaatcagcagaggttcactatcgtaatgaaaataaacacactgtgcagttaccgctggttactatgccacctaataggcataaacggaaaatttcggagtttagttcgcctttaaatggcctcaacaacttaagcgatttggaagattgctctgatactgtaatccacgaaaaagataatgataaagagaacaaaacaagaaaactattgggaatagagctcgagaaccctgaatctacatcgccaaatttatacaaaaatgttaaggataatttcctgtttgacttcaatacgaaccctttaacaaagcgagcctggattctcgaagactttagaccaaatgaagatatcgccccggttaagagaggaagaagaaaattggagcgattttatgcccaagttggaaagccagaggattctaaacacagatcattgtcagtagttatagaatcgcaaaattcggactacgaatttgcgtttgataacttgaggaatagatcaaaatcccccccaggttttggaagactggattttccctccactcaggaagggaacgaggacaaaaagaaatcccaggaaatcatcagaagaaagacaaaatataggtttttaatggcaagcaataacaagatcccaccgtacgagagagaatatgtattcaaaagagaacaattaaatcaaattgttgacgatggatgtttcttctggagtgataaattattgcagatatatgctagatgttaa

SEQ ID NO: 3824 - DNA, 1038 bp, Artificial Sequence
  Description of Artificial Sequence: Synthetic polynucleotide
atggtgactggtgaagaaaatgtgtatttgaagagcagcttatccattctcaaggagctcagtctcgatgaattattgaatgtgcagtatgacgtgactaccttaatcgcgaaacgtgttcaagcattacaaaatagaaataaatgtgttctcgaagaacctaacagtaaattggctgaaattctttgtcacgaaaaaaatgctcctcaacaatcctctcagacgtctgcggggccaggtgagcaagattctgaagatttcatccttactcagtttgatgaggacataaagaaagaaagtgcagaggttcactatcgtaatgaaaataaacacactgtgcagttaccgttggttactatgccacctaataggcataaaagaaaaatttctgagtttagtagccctttaaatggcctcaacaacttaagcgatttggaagattgctctgatactgtaatccacgaaaaagataatgataaagagaacaaaacaagaaaacttttgggaatagagctcgagaaccctgaatctacatctccaaatttatacaaaaatgttaaggataatttcttatttgacttcaatacgaaccctttaacaaagagagcctggattctcgaagactttagaccaaatgaagatatcgccccggttaagagaggaagaagaaaattggagagattttatgcccaagttggaaagccagaggattctaaacacagaagtttgagtgtagttatagaatctcaaaatagtgactacgaatttgcgtttgataacttgaggaatagaagtaaatcccccccaggttttggaagattagattttccctccactcaggaagggaacgaggacaaaaagaaatcccaggaaatcatcagaagaaagacaaaatataggtttttaatggcaagcaataacaagatcccaccgtacgagagagaatatgtattcaaaagagaacaattaaatcaaattgttgacgatggatgtttcttctggagtgataaattattgcagatatatgctagatgttga

SEQ ID NO: 3825 - DNA, 801 bp, Saccharomyces cerevisiae
atggcattgcatcagtatttatcagagacttatgggcccacgaaacccaaaaataagacgaaaaagaagaagaaagagtcaaaatcagacgctaactcagacaaaacttctttgatagtaaaagaacggctaagtacactgcaacaagaacaggagaagtcaggagttgcttcattcagcaagtttgacaaacaaaaaagcaagaatatatggaagaacctggaaacaaacgagctttcccatgcaataacacatccttccgcatcgtcaattactggcaacgaaagcaagaacgatctaaaggaaatcagggctcaagagccacttgtcacagtagcagacaaatcgaaaacacgaaaaaccatatacagagacgctcaaggtcacaagattcaggaagattccaagatagacgattctagttttagtcgatctaaatatgaagatgagaaagccgcggaaagagagcaatacctgaaaaatttgaatatgggagacgtgcaaaagcttggaataaatgtagatgcacatgataagaagaaaaatcaaactgcctcgagtctgacgatagaagaccctgcaataacatttacacatgacaaagaaagaactgtaaaaacatctttactgggccgcaagctttatgataagccagcacctgagaacaggtttgccattatgcctgggtcaagatgggacggtgtccacagatcaaatggctttgaagaaaaatggtttgctaagcaaaatgagatcaatgagaagaaagtgcaaagctacaccctacaggaggattattga

SEQ ID NO: 3826 - DNA, 801 bp, Artificial Sequence
  Description of Artificial Sequence: Synthetic polynucleotide
atggcattgcatcagtatttatctgagacttatgggcccacgaaacccaaaaataagacgaaaaagaagaagaaagagagtaaaagtgacgctaacagcgacaaaacttctttgatagtaaaagaaagattaagtacattacaacaagaacaggagaagagtggagttgcttctttcagcaagtttgacaaacaaaaaagcaagaatatatggaagaacttggaaacaaacgagctttcccatgcaataacacatccttccgcatcttccattactggcaacgaaagcaagaacgatttgaaggaaatcagggctcaagagccacttgtcacagtagcagacaaatctaaaacaagaaaaaccatatacagagacgctcaaggtcacaagattcaggaagattccaagatagacgattctagttttagtagatctaaatatgaagatgagaaagccgcggaaagagagcaatacttgaaaaatttgaatatgggagacgtgcaaaagcttggaataaatgtagatgcacatgataagaagaaaaatcaaactgcctccagtttaacgatagaagaccctgcaataacatttacacatgacaaagaaagaactgtaaaaacatctttattaggccgcaagctttatgataagccagcacctgagaacaggtttgccattatgcctgggtccagatgggacggtgtccacagatctaatggctttgaagaaaaatggtttgctaagcaaaatgagatcaatgagaagaaagtgcaaagctacaccttgcaggaggattattga

SEQ ID NO: 3827 - DNA, 4587 bp, Saccharomyces cerevisiae
atgggtattccaaaatttttcaggtacatctcagaaagatggcccatgattttacagcttattgagggaacacagattcctgagtttgataacttatacctggatatgaattcgattttacataattgtacgcatggtaacgacgatgatgtaaccaagcgattaactgaagaagaggtttttgcaaaaatctgtacgtatatcgatcacctttttcaaacaatcaagcccaagaagattttctacatggctattgatggtgtggcccctcgtgccaagatgaatcaacaaagagctcgtagattcagaaccgctatggatgcagaaaaagccttgaagaaggctattgagaatggtgacgagattcctaagggtgagccatttgattcgaattctattactccaggtacggagtttatggccaaattgaccaaaaacttacaatattttattcacgacaagatttctaacgattccaaatggagggaagtgcaaatcatattttctggccatgaagttccaggtgaaggtgaacacaagatcatgaactttataaggcatttaaaatcccaaaaggatttcaaccagaatacgagacattgtatttacggtcttgacgcagatttgattatgctgggtttgtctactcatgggccacattttgcgttattgagagaagaagtgacatttggtagaagaaatagtgaaaaaaaatcgcttgaacatcaaaatttctacttattacatctttctttattaagagaatacatggagttggaattcaaagaaattgccgatgaaatgcaatttgaatacaattttgaacgtattttggatgattttattcttgtcatgttcgtcattggtaatgatttcttgcccaatttgccagatttgcaccttaacaaaggagcatttcccgttttgttacaaacgttcaaagaagctcttttacatactgatggctacattaatgaacatggtaaaataaatttaaagagattaggtgtctggttaaattatctgtctcaatttgagttattaaatttcgaaaaggatgatatagacgttgagtggttcaacaagcaattagagaatatttctttggagggtgaaaggaaaagacagagggttggtaaaaaattactggtaaaacaacagaagaaattaattggaagtataaaaccatggttgatggagcaattacaggaaaaattatcgcctgatttaccagatgaagaaattccaactttagagttacctaaggacttagacatgaaagatcatttagaatttttaaaagaattcgcttttgatttgggtctttttataacgcattccaaatccaaaggtagttattcgctaaaaatggatcttgattctattaatcctgatgaaacagaagaagaatttcaaaatcgtgttaattctatcaggaaaacaataaaaaaatatcaaaatgctatcatcgtggaggacaaagaagaattggaaactgaaaaaacgatttataatgaaaggtttgaacgttggaagcatgagtattatcacgacaagttaaaatttacgacagacagtgaagaaaaagtgagagatcttgctaaagactacgttgaaggtttacaatgggttctatattattattatagaggatgtccatcttggtcgtggtactatccgcaccattatgcaccaagaatctccgacttagccaagggtttagatcaagacattgaatttgatttgagcaaaccatttactccattccagcaactaatggcagttttaccggaaaggtccaaaaatctgatacctcccgcctttaggccattaatgtacgatgaacagtcgccaatccacgatttctatcccgctgaggttcaacttgataaaaacggcaagacagctgattgggaagctgtggttttgatatcgtttgtagatgaaaaaaggttgattgaggctatgcaaccttatttgcgcaagttatcacctgaagaaaaaacgagaaatcaatttggcaaggacttgatatattcctttaatcctcaagttgataacctttataagagtccgttgggcggcattttttctgatattgaacacaatcattgtgtcgaaaaagagtacatcaccatcccattggacagctccgagattcggtatggtttattacctaatgctaaactcggtgccgaaatgctggcgggtttccccacgttattgtctttaccatttactagttcactggagtacaatgagacaatggttttccaacaaccttctaaacaacaatcaatggtcttacaaataactgacatatacaaaacgaataatgttactttggaggacttttccaagaggcatttaaacaaagtgatttatacaagatggccatatttaagagaatccaaattggtctctttaacggatggtaagactatctatgaatatcaggagtccaatgataagaaaaagttcggattcataacgaagcctgcggaaacccaggacaaaaaacttttcaatagtttgaagaattcaatgctaaggatgtatgctaaacagaaagctgttaaaataggacctatggaagccattgctaccgtctttccagtgactggtttggtgagagactctgatggtggttatattaagacctttagccctaccccagattactatccattgcaactggttgttgaatctgttgtcaacgaggatgaaagatataaagaaagaggacccattcctattgaagaggaatttccattgaattcaaaagttattttcttaggtgattatgcctatggtggtgaaactactattgacggttacagcagtgaccgcagactaaaaattactgtagaaaagaagtttttggatagtgagcccaccatcggcaaagaaaggttacaaatggatcatcaagccgttaaatattatccgtcttatattgtgtccaagaacatgcacttacaccccttgtttttgtctaagattacttccaagttcatgattactgacgctactgggaagcatatcaatgttggtatcccggttaagttcgaagctagacaccaaaaggttttaggttacgcgaggaggaaccctaggggctgggaatactcaaatttaactctaaatttactgaaagagtatagacaaactttcccagatttttttttcaggttgtccaaggtaggtaatgatatcccagttttggaagatcttttccccgatacttccactaaggatgccatgaatttattagatggtatcaaacaatggctaaagtatgtctcatcgaagtttatcgcggtatctttggagtctgactccttaactaagacatcgattgctgccgtggaagatcatatcatgaaatacgcagctaacatcgaaggtcatgaaagaaaacagttagccaaagttcctcgtgaggctgttttgaatccaagatcatcatttgcactcttacgtagtcaaaagttcgatttgggtgaccgtgttgtttatatccaagattctggtaaggtaccaattttctcaaagggtacagttgttggctatactactctcagttcatcattatcaattcaggtcttatttgatcatgaaatcgtggccggtaataattttggcggcaggttgcgcacgaatagaggcttagggcttgatgcctctttcttattgaatattactaacaggcagttcatttatcactccaaggcttccaaaaaggctttggaaaagaaaaagcaatctaacaataggaacaataataccaaaactgctcacaagactccttcaaagcaacaatctgaagaaaaactgagaaaagaaagggcacatgatttattgaattttatcaaaaaggataccaatgaaaagaattctgaaagtgtagacaacaagagcatgggatcgcaaaaagattccaaacccgcaaagaaagttttgttaaaaagaccagctcagaaaagcagtgaaaacgtgcaagttgatttggccaattttgaaaaagcaccgcttgataatccaactgttgctggatctattttcaatgccgttgcaaatcaatattctgatggtataggcagtaatttgaatatcccaactccacctcacccaatgaatgtggttgggggtcctattcctggagcgaatgatgttgcagatgttggtttgccgtacaatattcccccaggttttatgacgcatcctaatggtcttcacccattacaccctcaccagatgccttaccctaatatgaatggaatgtctattccgccaccagcaccacatgggtttggacaaccgatttccttcccacctccacctcctatgacaaatgtttcagatcaaggaagtcgtattgttgtcaatgaaaaggaaagccaagatttgaaaaaattcattaatggtaaacagcacagcaatggttcaactattgggggagaaacaaagaacagtaggaaaggcgagattaaaccttcttctggcacaaactctactgaatgtcaatcgccaaagtcacaaagcaatgctgctgaccgtgataataaaaaagacgaatctacttag

SEQ ID NO: 3828 - DNA, 4587 bp, Artificial Sequence
  Description of Artificial Sequence: Synthetic polynucleotide
atgggtattccaaaatttttcaggtacatcagtgaaagatggcccatgattttacagcttattgagggaacacagattcctgagtttgataacttatacttggatatgaattctattttacataattgtacgcatggtaacgacgatgatgtaaccaagagattaactgaagaagaggtttttgcaaaaatctgtacgtatatcgatcacctttttcaaacaatcaagcccaagaagattttctacatggctattgatggtgtggcccctcgtgccaagatgaatcaacaaagagctcgtagattcagaaccgctatggatgcagaaaaagccttgaagaaggctattgagaatggtgacgagattcctaagggtgagccatttgattctaattctattactccaggtacggagtttatggccaaattgaccaaaaacttacaatattttattcacgacaagatttctaacgattccaaatggagggaagtgcaaatcatattttctggccatgaagttccaggtgaaggtgaacacaagatcatgaactttataaggcatttaaaatcccaaaaggatttcaaccagaatacgagacattgtatttacggtcttgacgcagatttgattatgttgggtttgtctactcatgggccacattttgcgttattgagagaagaagtgacatttggtagaagaaatagtgaaaaaaaatctcttgaacatcaaaatttctacttattacatctttctttattaagagaatacatggagttggaattcaaagaaattgccgatgaaatgcaatttgaatacaattttgaacgtattttggatgattttattcttgtcatgttcgtcattggtaatgatttcttgcccaatttgccagatttgcaccttaacaaaggagcatttcccgttttgttacaaacgttcaaagaagctcttttacatactgatggctacattaatgaacatggtaaaataaatttaaagagattaggtgtctggttaaattatttatctcaatttgagttattaaatttcgaaaaggatgatatagacgttgagtggttcaacaagcaattagagaatatttctttggagggtgaaaggaaaagacagagggttggtaaaaaattattggtaaaacaacagaagaaattaattggaagtataaaaccatggttgatggagcaattacaggaaaaattatctcctgatttaccagatgaagaaattccaactttagagttacctaaggacttagacatgaaagatcatttagaatttttaaaagaattcgcttttgatttgggtctttttataacgcattccaaatccaaaggtagttattctttgaaaatggatcttgattctattaatcctgatgaaacagaagaagaatttcaaaatcgtgttaattctatcaggaaaacaataaaaaaatatcaaaatgctatcatcgtggaggacaaagaagaattggaaactgaaaaaacgatttataatgaaaggtttgaacgttggaagcatgagtattatcacgacaagttaaaatttacgacagacagtgaagaaaaagtgagagatcttgctaaagactacgttgaaggtttacaatgggttttatattattattatagaggatgtccatcttggtcctggtactatccgcaccattatgcaccaagaatctccgacttagccaagggtttagatcaagacattgaatttgatttgagcaaaccatttactccattccagcaattgatggcagttttaccggaaaggtccaaaaatttgatacctcccgcctttaggccattaatgtacgatgaacagtctccaatccacgatttctatcccgctgaggttcaacttgataaaaacggcaagacagctgattgggaagctgtggttttgatatcctttgtagatgaaaaaaggttgattgaggctatgcaaccttatttgcgcaagttatctcctgaagaaaaaacgagaaatcaatttggcaaggacttgatatattcctttaatcctcaagttgataacctttataagagtccgttgggcggcattttttctgatattgaacacaatcattgtgtcgaaaaagagtacatcaccatcccattggacagctccgagattcgttatggtttattacctaatgctaaactcggtgccgaaatgttggcgggtttccccacgttattgtctttaccatttactagttctttggagtacaatgagacaatggttttccaacaaccttctaaacaacaatctatggtcttacaaataactgacatatacaaaacgaataatgttactttggaggacttttccaagaggcatttaaacaaagtgatttatacaagatggccatatttaagagaatccaaattggtctctttaacggatggtaagactatctatgaatatcaggagtccaatgataagaaaaagttcggattcataacgaagcctgcggaaacccaggacaaaaaacttttcaatagtttgaagaattctatgttaaggatgtatgctaaacagaaagctgttaaaataggacctatggaagccattgctaccgtctttccagtgactggtttggtgagagactctgatggtggttatattaagacctttagccctaccccagattactatccattgcaattggttgttgaatctgttgtcaacgaggatgaaagatataaagaaagaggacccattcctattgaagaggaatttccattgaattctaaagttattttcttaggtgattatgcctatggtggtgaaactactattgacggttacagcagtgaccgcagattgaaaattactgtagaaaagaagtttttggatagtgagcccaccatcggcaaagaaaggttacaaatggatcatcaagccgttaaatattatccgtcttatattgtgtccaagaacatgcacttacaccccttgtttttgtctaagattacttccaagttcatgattactgacgctactgggaagcatatcaatgttggtatcccggttaagttcgaagctagacaccaaaaggttttaggttacgcgaggaggaaccctaggggctgggaatactctaatttaactttgaatttattgaaagagtatagacaaactttcccagatttttttttcaggttgtccaaggtaggtaatgatatcccagttttggaagatcttttccccgatacttccactaaggatgccatgaatttattagatggtatcaaacaatggttaaagtatgtctcttccaagtttatcgcggtatctttggagtctgactccttaactaagacatccattgctgccgtggaagatcatatcatgaaatacgcagctaacatcgaaggtcatgaaagaaaacagttagccaaagttcctcgtgaggctgttttgaatccaagaagttcttttgcactcttacgtagtcaaaagttcgatttgggtgaccgtgttgtttatatccaagattctggtaaggtaccaattttctccaagggtacagttgttggctatactactctcagttcttctttatccattcaggtcttatttgatcatgaaatcgtggccggtaataattttggcggcaggttgcgcacgaatagaggcttagggcttgatgcctctttcttattgaatattactaacaggcagttcatttatcactccaaggcttccaaaaaggctttggaaaagaaaaagcaatctaacaataggaacaataataccaaaactgctcacaagactccttctaagcaacaatctgaagaaaaattgagaaaagaaagggcacatgatttattgaattttatcaaaaaggataccaatgaaaagaattctgaaagtgtagacaacaagagcatgggatctcaaaaagattccaaacccgcaaagaaagttttgttaaaaagaccagctcagaaaagcagtgaaaacgtgcaagttgatttggccaattttgaaaaagcaccgcttgataatccaactgttgctggatctattttcaatgccgttgcaaatcaatattctgatggtataggcagtaatttgaatatcccaactccacctcacccaatgaatgtggttgggggtcctattcctggagcgaatgatgttgcagatgttggtttgccgtacaatattcccccaggttttatgacgcatcctaatggtcttcacccattacaccctcaccagatgccttaccctaatatgaatggaatgtctattccgccaccagcaccacatgggtttggacaaccgatttccttcccacctccacctcctatgacaaatgtttctgatcaaggaagtcgtattgttgtcaatgaaaaggaaagccaagatttgaaaaaattcattaatggtaaacagcacagcaatggttctactattgggggagaaacaaagaacagtaggaaaggcgagattaaaccttcttctggcacaaactctactgaatgtcaatctccaaagtctcaaagcaatgctgctgaccgtgataataaaaaagacgaatctacttga

SEQ ID NO: 3829 - DNA, 1419 bp, Saccharomyces cerevisiae
atgtttggattaaataaagcatcttcgacacctgcaggtgggctctttggtcaggccagcggagctagcactggaaacgcgaatactgggttttcgtttggtgggactcaaactggacaaaacaccggcccaagtacaggtggactatttggcgctaaaccagccggatctacaggaggattaggtgcatcatttggtcagcagcaacaacaatctcagacaaatgcatttggaggaagcgccaccaccggagggggccttttcggtaacaaacctaacaatacggcgaacactgggggcgggttatttggcgctaattcgaacagtaattctggcagtttgtttggttccaacaatgcacagacgagtcgtggtttgtttggtaataataacactaataatatcaataatagtagtagtggcatgaataatgcaagcgctggactatttggctctaaacctgcaggaggcacttctttgttcggtaatacaagcacctcttcggcccctgcgcagaaccagggcatgtttggtgcaaaaccagctggtacatctctattcggcaataatgcaggtaatacgaccactggtggagggttatttggctccaaaccgacaggagcaacgtctttgtttggttcatcaaataacaacaacaataacaataatagtaacaacatcatgagtgcgtcaggcgggctatttggtaatcagcagcagcaactgcagcaacaaccacaaatgcagtgcgcattgcaaaatctatctcagctccctattaccccaatgacacggatttccgaattaccacctcaaatacgtcaagaaattgaacaactagatcaatatattcaaaaacaagtgcagatctcgcaccatttgaaggccgatacaatcgatcatgatgaattgatagattccattcctcgtgatgttgcatacctactgaagtcagaatctgcaacaagtcaatatttaaagcaagatttgaagaaaatatcctcatttaaatcgctaatcgatgaggaccttctagacacgcaaactttttcggtgctcttacagcaactattaactccgggaagcaaaatttcttctaatgacttagacaaattctttcaaaagaaaattcatctctacgagaagaagttagaggattactgccgtattctctctgatatagaaactgcggtaaatggcattgatacagatttatttggcgccccaaataaccctaattctacagctatcacagcagatctaggttcatccgaagcagagaacctactgcagttgaagacaggcttagctgccatagtctctactgtcattgaggaattcacactgtttatggatatcgctgagagaatcgccgtgttacatcaaaaaacgaaaacactggcatcattgagcatatga

SEQ ID NO: 3830 - DNA, 1419 bp, Artificial Sequence
  Description of Artificial Sequence: Synthetic polynucleotide
atgtttggattaaataaagcatcttctacacctgcaggtgggctctttggtcaggccagcggagctagcactggaaacgcgaatactgggttttcttttggtgggactcaaactggacaaaacaccggcccaagtacaggtggattatttggcgctaaaccagccggatctacaggaggattaggtgcaagttttggtcagcagcaacaacaatctcagacaaatgcatttggaggaagcgccaccaccggagggggccttttcggtaacaaacctaacaatacggcgaacactgggggcgggttatttggcgctaatagcaacagtaattctggcagtttgtttggttccaacaatgcacagacgagtcgtggtttgtttggtaataataacactaataatatcaataatagtagtagtggcatgaataatgcaagcgctggattatttggctctaaacctgcaggaggcacttctttgttcggtaatacaagcacctcttctgcccctgcgcagaaccagggcatgtttggtgcaaaaccagctggtacatctttattcggcaataatgcaggtaatacgaccactggtggagggttatttggctccaaaccgacaggagcaacgtctttgtttggttcttccaataacaacaacaataacaataatagtaacaacatcatgagtgcgtctggcgggttgtttggtaatcagcagcagcaattgcagcaacaaccacaaatgcagtgcgcattgcaaaatttatctcagctccctattaccccaatgacaagaatttccgaattaccacctcaaatacgtcaagaaattgaacaattggatcaatatattcaaaaacaagtgcagatcagccaccatttgaaggccgatacaatcgatcatgatgaattgatagattccattcctcgtgatgttgcatacttgttgaagtctgaatctgcaacaagtcaatatttaaagcaagatttgaagaaaatatcctcttttaaatctttgatcgatgaggaccttttggacacgcaaactttttctgtgctcttacagcaattattaactccgggaagcaaaatttcttctaatgacttagacaaattctttcaaaagaaaattcatctctacgagaagaagttagaggattactgccgtattctctctgatatagaaactgcggtaaatggcattgatacagatttatttggcgccccaaataaccctaattctacagctatcacagcagatttaggttcttccgaagcagagaacttattgcagttgaagacaggcttagctgccatagtctctactgtcattgaggaattcacattatttatggatatcgctgagagaatcgccgtgttacatcaaaaaacgaaaacattagcaagtttgagcatatga

SEQ ID NO: 3831 - DNA, 1695 bp, Saccharomyces cerevisiae
atggatatttttagagtattaactagaggagcttccgtgaagaaagagtcaggcccaaaggctaaggcagcagattacagcgttataaatggaaatgatgagaatcataaggaagataataatgaaagccagatcgtgaaagaacttgatttctttcgaaacaagagaatcattagcaaggtagaggatgatagagagaagacaaccgaaaacgattctccaaacaaagaggagaagagcggcaatgatgatggtctgataaaaccagtgattaccaataccgttgaggcatccgcgttgagaaaatcatataagggaaacgtgtcgggtatagatataccacttccaataggttcgtttgaagatttaatttcaaggttttcattcgataagcgtttactgaataacttgattgaaaacgggtttactgagcctaccccaattcaatgtgaatgtattcctgttgctttgaataatagagacgttttggcatgtggtcccacagggtctggtaagacgttagcattcttaattccgctggttcagcagattattgatgacaagcaaactgcagggttgaaagggttaatcatttcgcctacaaaggaattagcgaaccaaatttttattgaatgttttaagctatcttacaagatatttttggagaaaaaaaggcctctgcaagttgcactcttatctaaatctttaggcgctaaattgaaaaacaaggtagttagtgataagaaatatgatataatcatttctaccccattaagactaatcgatgttgtgaaaaacgaagctctcgatctctccaaagttaagcatttgatatttgatgaagctgataaattgtttgacaaaacattcgttgaacagagtgacgatattttgagcgcctgtagagagccatcgttgcgtaaagcgatgttttctgcgaccattccatccaatgtagaagagattgcacaaagtataatgatggatcctgttagagttattattggccacaaggaagcagcaaatacaaatattgaacaaaaattaatattttgtggtaatgaagagggtaaactaattgctattagacaactcgttcaagagggtgagttcaagccaccgatcataatatttttagagtctattacaagagcaaaagcgttatatcatgaattgatgtacgataggattaacgtagatgtgattcatgcagaaagaacagccttacaaagagacaggattattgaacgatttaaaactggtgaattatggtgtttgatctgtaccgacgttttagctcgtggtattgacttcaaaggtgtcaatctggtcatcaattatgacgttccaggatcgtctcaggcttatgttcacagaattggtagaacaggtagaggtgggcggtcaggtaaagctatcacattctatactaaacaagactcagtagctattaaaccaataataaatgtcatgaaacaaagtggttgtgaagtatctgagtggatggataaaatggctaaaatgaccagaaaggagaaagaaagtataaaaaacggtaaagcgcataaagaaagaaagcagattactactgtgcctaagatggataaggccaaaagaagacgtcaacaagaaatgattgcagcatccaaaagaagaaaaaatgaagaactttcaaaaaaacatttctcgaaataa

SEQ ID NO: 3832 - DNA, 1695 bp, Artificial Sequence
  Description of Artificial Sequence: Synthetic polynucleotide
atggatatttttagagtattaactagaggagcttccgtgaagaaagagagtggcccaaaggctaaggcagcagattacagcgttataaatggaaatgatgagaatcataaggaagataataatgaaagccagatcgtgaaagaacttgatttctttagaaacaagagaatcattagcaaggtagaggatgatagagagaagacaaccgaaaacgattctccaaacaaagaggagaagagcggcaatgatgatggtttgataaaaccagtgattaccaataccgttgaggcatccgcgttgagaaaaagttataagggaaacgtgagtggtatagatataccacttccaataggttcttttgaagatttaatttctaggttttctttcgataagcgtttattgaataacttgattgaaaacgggtttactgagcctaccccaattcaatgtgaatgtattcctgttgctttgaataatagagacgttttggcatgtggtcccacagggtctggtaagacgttagcattcttaattccgttggttcagcagattattgatgacaagcaaactgcagggttgaaagggttaatcatttctcctacaaaggaattagcgaaccaaatttttattgaatgttttaagttatcttacaagatatttttggagaaaaaaaggcctttacaagttgcactcttatctaaatctttaggcgctaaattgaaaaacaaggtagttagtgataagaaatatgatataatcatttctaccccattaagattgatcgatgttgtgaaaaacgaagctctcgatctctccaaagttaagcatttgatatttgatgaagctgataaattgtttgacaaaacattcgttgaacagagtgacgatattttgagcgcctgtagagagccatctttgcgtaaagcgatgttttctgcgaccattccatccaatgtagaagagattgcacaaagtataatgatggatcctgttagagttattattggccacaaggaagcagcaaatacaaatattgaacaaaaattaatattttgtggtaatgaagagggtaaattgattgctattagacaactcgttcaagagggtgagttcaagccaccgatcataatatttttagagtctattacaagagcaaaagcgttatatcatgaattgatgtacgataggattaacgtagatgtgattcatgcagaaagaacagccttacaaagagacaggattattgaaagatttaaaactggtgaattatggtgtttgatctgtaccgacgttttagctcgtggtattgacttcaaaggtgtcaatttggtcatcaattatgacgttccaggatcttctcaggcttatgttcacagaattggtagaacaggtagaggtgggaggtctggtaaagctatcacattctatactaaacaagactctgtagctattaaaccaataataaatgtcatgaaacaaagtggttgtgaagtatctgagtggatggataaaatggctaaaatgaccagaaaggagaaagaaagtataaaaaacggtaaagcgcataaagaaagaaagcagattactactgtgcctaagatggataaggccaaaagaagacgtcaacaagaaatgattgcagcatccaaaagaagaaaaaatgaagaactttctaaaaaacatttctccaaatga

SEQ ID NO: 3833 - DNA, 1242 bp, Saccharomyces cerevisiae
atgggagctggcactcttttaaatggattagaaaaggaaaactttccaaataacatccattcagatttgcctgcgtatcctaacatggattctcaagaagatggcaatactagtaaggaaagtaaaagaaatagtccagtaaaacagaagtcccaaaaagatgaagaaaagtcatctaaaatggggactgcaagcaacatattccatgaaaataaagatatacacgaaagatctgaacacacggacgattttaatgatggcttaaaactggctccggactctagtccaagcttgaaagagtgtcaatttaaaaattgggaaagtttttggtgtaatacagaaggttacaaaactaaacacatgcagccctttcattttacaagcggattagaagaaataaaggaaccggtcatggaattgaatatttccacttcaccatacaagggacagaggccaaattcagctccaaccgagtattcagctgccacaacagcgtttaccaaaacacaattagaggtgagttttctaaaaaccaacttgcttacatacattaaaaaagagattgacatttgcttgtcaagtgttccattttttgacgacgcagttcaaatgcaaaagaaattcttggaatacagagatattgacttggatgaagaatatgagctcaaaattttgggggaacttttgaatgatttaaacttctttcatatgcaagaaaactctttgctaaatagagagctagcagttcgtagattctccaatcaacctgaaagtcaaaatttaccttccattagggattttagaaatccacttttgccaatagataaccgcccttctcccccattaggattgaaaagaaacggaaagtctttcgaggaaacctatgatttcacgtccaatacatcaaatttttggggagaaaaagcagaactacaaaactccataactggtggaacaccctattttttccaccctaacaatatacatcaaacaaaaccttttatgtcatttgaaaatcaaaatgaacttctattccagagaaaaaattcagattacaagcagcattttaactctggaagaaatatacataatggagtggaatcgaaatcttacagaggtgtggggttaaacgatagttatcaaaagggttatgcagcaatgacaaagtcgtttggaaatatcgatttaaatagaatgcccagaagaagtaatgaagaaatgtatagctggtcacgtaattga

SEQ ID NO: 3834 - DNA, 1242 bp, Artificial Sequence
  Description of Artificial Sequence: Synthetic polynucleotide
atgggagctggcactcttttaaatggattagaaaaggaaaactttccaaataacatccattctgatttgcctgcgtatcctaacatggattctcaagaagatggcaatactagtaaggaaagtaaaagaaatagtccagtaaaacagaagtcccaaaaagatgaagaaaagtcttctaaaatggggactgcaagcaacatattccatgaaaataaagatatacacgaaagatctgaacacacggacgattttaatgatggcttaaaattggctccggactctagtccaagcttgaaagagtgtcaatttaaaaattgggaaagtttttggtgtaatacagaaggttacaaaactaaacacatgcagccctttcattttacaagcggattagaagaaataaaggaaccggtcatggaattgaatatttccacttctccatacaagggacagaggccaaattctgctccaaccgagtattctgctgccacaacagcgtttaccaaaacacaattagaggtgagttttttgaaaaccaacttgcttacatacattaaaaaagagattgacatttgcttgagcagtgttccattttttgacgacgcagttcaaatgcaaaagaaattcttggaatacagagatattgacttggatgaagaatatgagctcaaaattttgggggaacttttgaatgatttaaacttctttcatatgcaagaaaactctttgttgaatagagagttggcagttcgtagattctccaatcaacctgaaagtcaaaatttaccttccattagggattttagaaatccacttttgccaatagataaccgcccttctcccccattaggattgaaaagaaacggaaagtctttcgaggaaacctatgatttcacgtccaatacaagtaatttttggggagaaaaagcagaattacaaaactccataactggtggaacaccctattttttccaccctaacaatatacatcaaacaaaaccttttatgagttttgaaaatcaaaatgaacttttattccagagaaaaaattctgattacaagcagcattttaactctggaagaaatatacataatggagtggaaagtaaatcttacagaggtgtggggttaaacgatagttatcaaaagggttatgcagcaatgacaaagagctttggaaatatcgatttaaatagaatgcccagaagaagtaatgaagaaatgtatagctggtctcgtaattga

SEQ ID NO: 3835 - DNA, 1281 bp, Saccharomyces cerevisiae
atgtaccttggacgacattttttggcaatgacatcgaaagcactgtttgataccaagatcttaaaagttaacccgctatcaatcattttctcccctgatgcgcatatagatggttccttaccaacgataacagatcctgaaacggaagcagcgctagttgaagcggcgaggataataagagatacagatgagactgtggcttttccaaccgaaactgtttatggtcttggaggttctgctttaaatgataattcagtgcttagtatatacagggccaaaaataggcctagtgacaatcctttgattacacatgtttcatccattgatcaacttaacagaaaggtctttaatcaaccgcatctatcaggtacatccttgtttgataacataccctcaatctatcgcccattaatttcaagcctttggcctggcccattaacaattcttttgccagttccatcttcagagcatagtgcattatcaaagttaacgaccgcagatcagcctacgtttgcggtacgcatacccgctaatccagtggctagagcactgattgccctgagcgatacaccaatagctgctccttcagcgaatgcgtctactaggccatctcctactttagcgtctcatgtttatcatgatctaaaggataaaattcccataattcttgatggcggagcgtgcaaggttggtgtagaaagtactgttgttgatgggttatgtaatcctcctacgctactgcgacctggcggttttacatatgaagaaattgttaaattgggtggtgaagcttggtctctttgtaaagttgagaataagaaaacagttgaaaagggcgaaaaggtaagaacgcctggtatgaagtatagacactattccccttcagctaaagttgttttactagttcctcattgcgaaggcgatggcattcttaagggcgttgataggatggaaagattaaagaggttaatcgaaacggaattaaaagccaacagtaatataaaaaaaattgcgattttaacttccctaaaattacgtgattccgacttacaatctaagatctttaatgaacccgatttttcttcgaaaactttcatcatcgaaagacttggccaatctggtgaagaaatacagactaacttgtttgcagctttaagaaaagtggatgaaaatgataaagtagacctaatatttgtcgaaggtataaatgaggaaggagaaggattagctgttatgaacagattgcgaaaggcggctgcaaataattgtatacagttttaa

SEQ ID NO: 3836 - DNA, 1281 bp, Artificial Sequence
  Description of Artificial Sequence: Synthetic polynucleotide
atgtaccttggaagacattttttggcaatgacaagtaaagcattatttgataccaagatcttaaaagttaacccgttatctatcattttctcccctgatgcgcatatagatggttccttaccaacgataacagatcctgaaacggaagcagcgttggttgaagcggcgaggataataagagatacagatgagactgtggcttttccaaccgaaactgtttatggtcttggaggttctgctttaaatgataattctgtgcttagtatatacagggccaaaaataggcctagtgacaatcctttgattacacatgtttcttccattgatcaacttaacagaaaggtctttaatcaaccgcatttatctggtacatccttgtttgataacataccctccatctatcgcccattaatttctagcctttggcctggcccattaacaattcttttgccagttccatcttctgagcatagtgcattatccaagttaacgaccgcagatcagcctacgtttgcggtacgcatacccgctaatccagtggctagagcattgattgccttgagcgatacaccaatagctgctccttctgcgaatgcgtctactaggccatctcctactttagcgtctcatgtttatcatgatttgaaggataaaattcccataattcttgatggcggagcgtgcaaggttggtgtagaaagtactgttgttgatgggttatgtaatcctcctacgttacttagacctggcggttttacatatgaagaaattgttaaattgggtggtgaagcttggtctctttgtaaagttgagaataagaaaacagttgaaaagggcgaaaaggtaagaacgcctggtatgaagtatagacactattccccttctgctaaagttgttttattggttcctcattgcgaaggcgatggcattcttaagggcgttgataggatggaaagattaaagaggttaatcgaaacggaattaaaagccaacagtaatataaaaaaaattgcgattttaacttccttgaaattacgtgattccgacttacaatctaagatctttaatgaacccgatttttcttctaaaactttcatcatcgaaagacttggccaatctggtgaagaaatacagactaacttgtttgcagctttaagaaaagtggatgaaaatgataaagtagacttgatatttgtcgaaggtataaatgaggaaggagaaggattagctgttatgaacagattgagaaaggcggctgcaaataattgtatacagttttga

SEQ ID NO: 3837 - DNA, 333 bp, Saccharomyces cerevisiae
atgtttatcttagtatccgttgtaaatatatgtacatatatacatctacatatgttcccattaattagtacatttacctcaatagggttgggcgtcctcatgaaagataaagggaaggaaggaaaaacgataaaagcacaaaatgtgacatatcaaacatttgagaaatacgttgagtcttcttcattctttttcctcgtccacaattttctcaattcatcaacgatgaaaacgctactgctgatgagcaataacaatagtatatcagagataccaagtttctcagttttaaagatactttggaaaaatggtatatatatagcgcacatttga

SEQ ID NO: 3838 - DNA, 333 bp, Artificial Sequence
  Description of Artificial Sequence: Synthetic polynucleotide
atgtttatcttagtatccgttgtaaatatatgtacatatatacatttgcatatgttcccattaattagtacatttaccagtatagggttgggcgtcctcatgaaagataaagggaaggaaggaaaaacgataaaagcacaaaatgtgacatatcaaacatttgagaaatacgttgagtcttcttctttctttttcctcgtccacaattttctcaattcttctacgatgaaaacgttattattgatgagcaataacaatagtatatctgagataccaagtttctctgttttaaagatactttggaaaaatggtatatatatagcgcacatttga

SEQ ID NO: 3839 - DNA, 2853 bp, Saccharomyces cerevisiae
atgagtgacaatccatttaatgcgagtcttcttgacgaggactcaaaccgtgagagagaaatactagatgccacagcagaggccctttcgaaaccaagcccttctttagagtattgtactttatccgtggacgaagctctagaaaaactggacactgacaaaaacggtggtttacgatcatctaacgaggccaacaataggagatcactttatggccccaatgaaataaccgtagaagatgatgaaagtcttttcaagaagttcttgtcaaatttcattgaggatcgaatgattctacttttaataggatccgcagtggtctctctttttatgggtaacattgatgatgctgttagtatcacactggccattttcatagttgtcactgtcggttttgtccaagaatataggtctgaaaaatctctagaagcgttgaataaattggttcctgctgaatgtcacttaatgagatgtggtcaagagagtcatgtactggcttccaccttggttcctggtgatttagtgcacttcagaataggtgacagaatccccgcagacattagaattattgaagcaatcgatttatccatcgatgaaagtaatttaactggtgaaaatgaaccggtacataaaacctcacaaacgatcgaaaaatcttcctttaacgatcagcctaattcaattgtaccgatttctgagagatcttgtatagcttatatgggtacattagtcaaggaaggtcatggtaagggtatcgtcgtaggaacaggtacaaacacatcctttggtgccgtttttgaaatgatgaataatattgaaaaaccgaagactccattgcagttaacaatggacaaattgggaaaggacttgtcactggttagcttcatagttattggtatgatttgtttagttggtatcatacaaggtagatcttggttagaaatgttccaaatatcggtatccttagcggttgctgctattccagaagggttaccaattattgtcactgttactttggcattgggtgttctgagaatggccaagcgtaaagccatcgtgagaaggttaccaagtgtcgaaactttaggctctgtcaacgttatctgctccgacaaaacaggtacactaacctcaaaccacatgaccgtatctaaactttggtgcttggacagtatgtccaataagctaaacgtcctctcattagacaaaaataagaagactaaaaattctaatggaaatttgaaaaactatttgactgaagacgttagggaaactctaactatcggtaatctctgtaataatgcatctttctctcaagaacatgccatatttctgggaaatcctactgatgtagctcttttagagcaattggcaaactttgaaatgcctgatatcagaaacaccgttcaaaaagttcaggaacttccatttaactcgaaaagaaaattaatggcaaccaagattctcaaccctgtcgacaataagtgtacagtttatgttaaaggtgcatttgaaagaattcttgagtactccacaagttatttgaaatcaaagggtaaaaaaactgaaaagttgactgaagcccaaaaagctacgataaatgagtgcgcaaattctatggcatctgaaggtttgcgtgtctttggatttgctaaactaactttgtctgattcatcaactcctctaaccgaagacctaatcaaagatttaacctttactggtttaatcggtatgaatgacccaccaagaccgaacgttaaatttgccatcgaacaattactacaaggtggtgtccatattattatgatcactggtgattctgagaataccgcagtaaacattgcaaaacaaattggtattccagttattgatccaaagctttccgttttatccggtgataaattagatgaaatgtcagatgatcaactggccaatgtcatcgaccacgttaatatttttgctcgtgctacgcctgagcataagttaaacattgttcgtgcattaagaaagaggggtgatgtggtagcaatgactggtgatggtgttaacgacgctcctgcgttgaaactttcagatattggtgtttctatgggtagaattggtacagatgtagccaaagaagcctcagatatggtcttaactgatgatgacttcagtactattttaactgccattgaagagggtaaaggtatctttaataatattcagaatttcctgacttttcaattgtctacttctgttgccgcactatcattagttgcactatctacagcgtttaaactacccaatccactgaacgcaatgcaaattctttggataaatattttaatggatgggccaccagctcaatccttaggtgtggaacctgttgatcatgaagttatgaaaaaacctccaagaaaacgtaccgataaaattttgacccatgatgtaatgaaacgtttactaaccaccgcggcctgtatcatcgttgggacagtttacatttttgttaaagagatggccgaagatggtaaagtaactgctagagatactactatgacatttacttgttttgttttttttgatatgtttaatgctttggcctgcagacataacacaaagtcaatcttcgaaatcggctttttcacgaacaaaatgttcaactacgccgttggactgtctctgttaggtcaaatgtgcgctatatatataccatttttccaaagtatctttaaaactgagaaacttggtatctctgatatactattgttattgctcatcagcagtagcgttttcatcgttgatgaattgagaaaattgtggacgaggaaaaagaatgaagaagactcaacgtatttctcaaatgtttga

SEQ ID NO: 3840 - DNA, 2853 bp, Artificial Sequence
  Description of Artificial Sequence: Synthetic polynucleotide
atgagtgacaatccatttaatgcgagtcttcttgacgaggactccaaccgtgagagagaaatattggatgccacagcagaggccctttctaaaccaagcccttctttagagtattgtactttatccgtggacgaagctttggaaaaattagacactgacaaaaacggtggtttaagatcttctaacgaggccaacaataggagatctctttatggccccaatgaaataaccgtagaagatgatgaaagtcttttcaagaagttcttgagcaatttcattgaggatagaatgattttacttttaataggatccgcagtggtctctctttttatgggtaacattgatgatgctgttagtatcacattggccattttcatagttgtcactgtcggttttgtccaagaatataggtctgaaaaatctttggaagcgttgaataaattggttcctgctgaatgtcacttaatgagatgtggtcaagagagtcatgtattggcttccaccttggttcctggtgatttagtgcacttcagaataggtgacagaatccccgcagacattagaattattgaagcaatcgatttatccatcgatgaaagtaatttaactggtgaaaatgaaccggtacataaaacctctcaaacgatcgaaaaatcttcctttaacgatcagcctaattctattgtaccgatttctgagagatcttgtatagcttatatgggtacattagtcaaggaaggtcatggtaagggtatcgtcgtaggaacaggtacaaacacatcctttggtgccgtttttgaaatgatgaataatattgaaaaaccgaagactccattgcagttaacaatggacaaattgggaaaggacttgtctttggttagcttcatagttattggtatgatttgtttagttggtatcatacaaggtagatcttggttagaaatgttccaaatatctgtatccttagcggttgctgctattccagaagggttaccaattattgtcactgttactttggcattgggtgttttgagaatggccaagcgtaaagccatcgtgagaaggttaccaagtgtcgaaactttaggctctgtcaacgttatctgctccgacaaaacaggtacattaaccagtaaccacatgaccgtatctaaactttggtgcttggacagtatgtccaataagttgaacgtcctctctttagacaaaaataagaagactaaaaattctaatggaaatttgaaaaactatttgactgaagacgttagggaaactttaactatcggtaatctctgtaataatgcatctttctctcaagaacatgccatatttttgggaaatcctactgatgtagctcttttagagcaattggcaaactttgaaatgcctgatatcagaaacaccgttcaaaaagttcaggaacttccatttaactccaaaagaaaattaatggcaaccaagattctcaaccctgtcgacaataagtgtacagtttatgttaaaggtgcatttgaaagaattcttgagtactccacaagttatttgaaatccaagggtaaaaaaactgaaaagttgactgaagcccaaaaagctacgataaatgagtgcgcaaattctatggcatctgaaggtttgcgtgtctttggatttgctaaattaactttgtctgattcttctactcctttgaccgaagacttgatcaaagatttaacctttactggtttaatcggtatgaatgacccaccaagaccgaacgttaaatttgccatcgaacaattattacaaggtggtgtccatattattatgatcactggtgattctgagaataccgcagtaaacattgcaaaacaaattggtattccagttattgatccaaagctttccgttttatccggtgataaattagatgaaatgagtgatgatcaattggccaatgtcatcgaccacgttaatatttttgctcgtgctacgcctgagcataagttaaacattgttcgtgcattaagaaagaggggtgatgtggtagcaatgactggtgatggtgttaacgacgctcctgcgttgaaactttctgatattggtgtttctatgggtagaattggtacagatgtagccaaagaagcctctgatatggtcttaactgatgatgacttcagtactattttaactgccattgaagagggtaaaggtatctttaataatattcagaatttcttgacttttcaattgtctacttctgttgccgcattatctttagttgcattatctacagcgtttaaattgcccaatccattgaacgcaatgcaaattctttggataaatattttaatggatgggccaccagctcaatccttaggtgtggaacctgttgatcatgaagttatgaaaaaacctccaagaaaacgtaccgataaaattttgacccatgatgtaatgaaacgtttattaaccaccgcggcctgtatcatcgttgggacagtttacatttttgttaaagagatggccgaagatggtaaagtaactgctagagatactactatgacatttacttgttttgttttttttgatatgtttaatgctttggcctgcagacataacacaaagtctatcttcgaaatcggctttttcacgaacaaaatgttcaactacgccgttggattatctttattaggtcaaatgtgcgctatatatataccatttttccaaagtatctttaaaactgagaaacttggtatctctgatatattattgttattgctcatcagcagtagcgttttcatcgttgatgaattgagaaaattgtggacgaggaaaaagaatgaagaagacagtacgtatttcagtaatgtttga

SEQ ID NO: 3841 - DNA, 678 bp, Saccharomyces cerevisiae
atggtcgtaattaacggggtcaaatatgcctgtgaaacgtgtatcaggggtcacagggcggcgcagtgtactcacactgatggtccgctacagatgatcagacgcaagggaagaccatcgaccacatgtggccattgtaaagagctgagaagaaccaagaacttcaacccatccggtgggtgcatgtgtgcctctgcacgacggccagctgttggcagcaaggaagatgaaacacgatgtcgttgtgatgagggtgaaccttgtaaatgtcataccaagaggaaaagcagccggaaatcaaagggagggtcatgccacagaagggcaaatgatgaagcagcgcatgtcaatggtctcggtattgcagatctggacgttcttttgggcctaaatggtcgctcgtcggatgtagacatgacaaccacattgccgagtttgaagccacctctgcaaaacggagaaattaaggccgacagcattgacaatcttgatttggcttccctcgatccgcttgagcaaagccctagtatatctatggaacctgttagtatcaatgaaacaggaagcgcatatacaactacgaacacagcactaaacgatattgacattccattctccatcaatgagttgaacgagctatacaaacaagtatcttcgcataactcacattcacaataa

SEQ ID NO: 3842 - DNA, 678 bp, Artificial Sequence
  Description of Artificial Sequence: Synthetic polynucleotide
atggtcgtaattaacggggtcaaatatgcctgtgaaacgtgtatcaggggtcacagggcggcgcagtgtactcacactgatggtccgttgcagatgatcagacgcaagggaagaccatctaccacatgtggccattgtaaagagttaagaagaaccaagaacttcaacccatccggtgggtgcatgtgtgcctctgcaagaagaccagctgttggcagcaaggaagatgaaacaagatgtcgttgtgatgagggtgaaccttgtaaatgtcataccaagaggaaaagcagcagaaaatccaagggagggtcttgccacagaagggcaaatgatgaagcagcgcatgtcaatggtctcggtattgcagatttggacgttcttttgggcttgaatggtcgcagcagtgatgtagacatgacaaccacattgccgagtttgaagccacctttacaaaacggagaaattaaggccgacagcattgacaatcttgatttggcttccctcgatccgcttgagcaaagccctagtatatctatggaacctgttagtatcaatgaaacaggaagcgcatatacaactacgaacacagcattgaacgatattgacattccattctccatcaatgagttgaacgagttatacaaacaagtatcttctcataactctcattctcaatga

SEQ ID NO: 3843 - DNA, 1323 bp, Saccharomyces cerevisiae
atggatgaaattcttgccaaagcaggttcacaagccgttacatttgctataaaatccggaatatcgatagcatccacatatgcgctaaagacaataacgaactttgtcgtccagattcctaaggatgatgctagaagaatagatcaactgaaatttaaactggaaagccgcatggctattgtatccagtgcaattgacctaataaagctggtagcggcgaggggaaacacgaatttgcaaatcactctgaggttaaccaaggatttaaaagaagagattgataggtttgatgagaagatcaacgaaatgacgcagaaagttgagggttccaggagcgcaaaaacacagaatgaagctattaaagcggtagaaaactatataaaggacttgctattgaggatcgaagaaatcactccattcattaatctttctttaaccacttctggtgccaacttgaacagcgcactcccatatcaactttctcctggtttattattaaaagcctccgatttcgttagcgagaacaatagaaagtatgaaaaggcaatgaagagtaatgagaaaggaacaggtgacaaggagattctaaaagttcaagtggggcctacatttgaggttacactattctctattttctataacctaacttcagaaaacaatgggcaatcaggaattgtttggaaagaggatatgaaacgtgcaaaagcaaggatatatagattgaactctacaggcagaaagtatgattattttatgaaaatagaacaagacttcaatgacggtagatatcatgaggatgatgacaaagaagacacaccacaggaacttgccatagatctgaaccatattaagaagctgtttttcagtgtttccggtaagcttctccgattagaagaacaggattctccagtgttggtattgaagattgaccggagcgatgacaaagaaaatgagagcagtgaaggagacaagggattactcgatgacattacttggtatgcggtaagcggatatgaagcgatagaggaagatgaagaggaagatgaagaggaggacgaagaggaaggaaaagacggagaagaacgaaaggaagaagaagaagaagaaaataaattggaggacaaggattcgtcgatcacactactggagtacatcattcggctgacgtccttacaaagtaacgatcagaaaagtatattggaagtgagtgatgaaaggttatctatatatttgaacgatgaaaatacgaactccagaaaggatagaataagcaattcgacaattgaagagacagaaaaaaagttaaaaaacctaaaactttag

SEQ ID NO: 3844 - DNA, 1323 bp, Artificial Sequence
  Description of Artificial Sequence: Synthetic polynucleotide
atggatgaaattcttgccaaagcaggttctcaagccgttacatttgctataaaatccggaatatccatagcatccacatatgcgttaaagacaataacgaactttgtcgtccagattcctaaggatgatgctagaagaatagatcaattgaaatttaaattagaaagccgcatggctattgtatccagtgcaattgacttgataaagttggtagcggcgaggggaaacacgaatttgcaaatcactttgaggttaaccaaggatttaaaagaagagattgataggtttgatgagaagatcaacgaaatgacgcagaaagttgagggttccaggagcgcaaaaacacagaatgaagctattaaagcggtagaaaactatataaaggacttgttgttgaggatcgaagaaatcactccattcattaatctttctttaaccacttctggtgccaacttgaacagcgcactcccatatcaactttctcctggtttattattaaaagcctccgatttcgttagcgagaacaatagaaagtatgaaaaggcaatgaagagtaatgagaaaggaacaggtgacaaggagattttgaaagttcaagtggggcctacatttgaggttacattgttctctattttctataacttgacttctgaaaacaatgggcaaagtggaattgtttggaaagaggatatgaaacgtgcaaaagcaaggatatatagattgaactctacaggcagaaagtatgattattttatgaaaatagaacaagacttcaatgacggtagatatcatgaggatgatgacaaagaagacacaccacaggaacttgccatagatttgaaccatattaagaagttatttttcagtgtttccggtaagcttctcagattagaagaacaggattctccagtgttggtattgaagattgacagaagcgatgacaaagaaaatgagagcagtgaaggagacaagggattactcgatgacattacttggtatgcggtaagcggatatgaagcgatagaggaagatgaagaggaagatgaagaggaggacgaagaggaaggaaaagacggagaagaaagaaaggaagaagaagaagaagaaaataaattggaggacaaggattcttctatcacattattggagtacatcattagattgacgtccttacaaagtaacgatcagaaaagtatattggaagtgagtgatgaaaggttatctatatatttgaacgatgaaaatacgaactccagaaaggatagaataagcaattctacaattgaagagacagaaaaaaagttaaaaaacttgaaactttga

SEQ ID NO: 3845 - DNA, 2697 bp, Saccharomyces cerevisiae
atggcaagacgcagattaccagacagaccaccaaatggaataggagccggtgaacggccgagactggtacctaggcctattaacgtacaagactcggtgaaccgactaacgaaaccgttcagggtcccgtacaagaacacgcacatcccgcccgctgctggtagaatcgccaccgggtctgataatatcgtaggaggaaggagcttgaggaaaagatcagcgactgtatgttattccggcttggatataaatgcggacgaagcagagtacaacagccaagacataagtttttctcagttgactaaacgacggaaggatgctcttagtgctcaaaggttggccaaggatccgacaagactgagtcatatccagtacactttgagaagatctttcactgtgccaatcaagggatatgtacaaagacacagtctgccattaacgttaggaatgaaaaaaaaaattactccagaacctcgacctctacatgaccctacagacgaatttgccatagtgctttatgacccgtccgttgacggtgaaatgattgtccatgacacatctatggataacaaggaagaagaatcaaagaaaatgatcaaaagcacacaggaaaaggataatattaacaaggaaaagaatagccaggaagaaagacccacacaaagaataggacgccatccagctttgatgacaaatggtgtgagaaacaaaccgttacgtgagctactcggtgattcggaaaactctgcggaaaacaagaagaaatttgctagtgtccctgtggttattgatccaaaactggccaagattttaagaccccatcaagtcgaaggggtgagattcttataccgttgtgtcacagggcttgtcatgaaagattacttagaagctgaggcgttcaacacttcaagcgaagatcccttaaagagcgacgagaaggcacttactgaatctcaaaagactgaacaaaacaatagaggggcctacggctgcatcatggccgatgaaatggggctgggtaagacattgcagtgtatagcacttatgtggacattattaagacagggcccgcagggtaaaagacttatcgacaaatgtatcattgtttgtccatcttctttagtcaacaactgggctaatgaattgataaaatggttgggtcccaatactctaactccgttagcggttgatgggaaaaaatcttcaatgggtggtggtaatacaacagtttcgcaagctattcatgcctgggctcaggcacagggaagaaatattgttaagcccgttttaatcatatcgtatgaaacattacgtcgaaatgttgatcaattgaaaaactgcaatgtgggtttaatgctggcagatgaagggcaccgtttgaaaaacggtgactctttaacattcacagctttggatagcatcagttgtcctagaagagttatattatctggtacacccattcaaaacgatctttccgaatattttgctctactgagtttttcgaatcctggcttattaggttccagagcagaatttaggaaaaattttgagaatccaattttgcgagggcgtgatgctgatgctactgataaagaaatcacaaagggcgaggcgcaattacagaagctatctaccattgtctccaaatttattatccgtcgtactaacgatattttggccaaatatttgccttgcaagtatgagcacgttattttcgtaaacttgaagccgttgcagaacgagctctacaataaattaattaagtcaagagaagtgaaaaaagtagtaaaaggtgttggtgggtctcagcccctgagggctattggtattttaaagaagctatgtaatcaccctaatctcttgaattttgaagatgaatttgacgatgaagatgatttggaactacctgacgattataatatgccgggttcaaaagccagggacgtacaaacaaaatattcagctaaattttccattttggaaagatttctccataagataaagaccgaatccgatgataagattgttttgatctccaactatacccaaaccttggacctcattgaaaaaatgtgtagatataagcactacagtgctgtacggttggatggtacaatgtcaattaacaaaagacaaaaattggtggataggttcaacgatcctgaaggccaagagttcatcttcctcttaagttctaaagcaggtgggtgtggtatcaatttgattggtgcaaatcgattaattttgatggatccggattggaatcctgctgctgatcaacaagctttggcacgtgtttggagagacggtcaaaaaaaggattgtttcatttacagattcatatcgactggtaccatagaggaaaaaatctttcaaagacaatctatgaaaatgagtttgagttcatgcgtggtcgatgcgaaagaagacgttgaaaggttgtttagttctgacaatttaagacagttgtttcaaaaaaatgagaatacgatatgtgaaacacacgaaacataccattgtaaacgttgtaatgctcagggtaaacaattaaagagagcccctgcaatgttatatggtgatgcgacaacttggaatcatttgaaccatgacgcattggaaaaaacaaatgatcatctactaaaaaacgagcatcattacaatgatatcagttttgcatttcaatatatttcacattga

SEQ ID NO: 3846 - DNA, 2697 bp, Artificial Sequence
  Description of Artificial Sequence: Synthetic polynucleotide
atggcaagacgcagattaccagacagaccaccaaatggaataggagccggtgaaaggccgagattggtacctaggcctattaacgtacaagactctgtgaacagattgacgaaaccgttcagggtcccgtacaagaacacgcacatcccgcccgctgctggtagaatcgccaccgggtctgataatatcgtaggaggaaggagcttgaggaaaagatctgcgactgtatgttattccggcttggatataaatgcggacgaagcagagtacaacagccaagacataagtttttctcagttgactaaaaggcgtaaggatgctcttagtgctcaaaggttggccaaggatccgacaagattaagtcatatccagtacactttgagaagatctttcactgtgccaatcaagggatatgtacaaagacacagtttaccattaacgttaggaatgaaaaaaaaaattactccagaacctagacctttgcatgaccctacagacgaatttgccatagtgctttatgacccgtccgttgacggtgaaatgattgtccatgacacatctatggataacaaggaagaagaatccaagaaaatgatcaaaagcacacaggaaaaggataatattaacaaggaaaagaatagccaggaagaaagacccacacaaagaataggacgccatccagctttgatgacaaatggtgtgagaaacaaaccgttacgtgagttactcggtgattctgaaaactctgcggaaaacaagaagaaatttgctagtgtccctgtggttattgatccaaaattggccaagattttaagaccccatcaagtcgaaggggtgagattcttataccgttgtgtcacagggcttgtcatgaaagattacttagaagctgaggcgttcaacacttccagcgaagatcccttaaagagcgacgagaaggcacttactgaatctcaaaagactgaacaaaacaatagaggggcctacggctgcatcatggccgatgaaatggggttaggtaagacattgcagtgtatagcacttatgtggacattattaagacagggcccgcagggtaaaagacttatcgacaaatgtatcattgtttgtccatcttctttagtcaacaactgggctaatgaattgataaaatggttgggtcccaatactttaactccgttagcggttgatgggaaaaaatcttctatgggtggtggtaatacaacagtttctcaagctattcatgcctgggctcaggcacagggaagaaatattgttaagcccgttttaatcatatcttatgaaacattacgtagaaatgttgatcaattgaaaaactgcaatgtgggtttaatgttagcagatgaagggcaccgtttgaaaaacggtgactctttaacattcacagctttggatagcatcagttgtcctagaagagttatattatctggtacacccattcaaaacgatctttccgaatattttgctttattaagtttttctaatcctggcttattaggttccagagcagaatttaggaaaaattttgagaatccaattttgagagggcgtgatgctgatgctactgataaagaaatcacaaagggcgaggcgcaattacagaagttatctaccattgtctccaaatttattatccgtcgtactaacgatattttggccaaatatttgccttgcaagtatgagcacgttattttcgtaaacttgaagccgttgcagaacgagctctacaataaattaattaagtctagagaagtgaaaaaagtagtaaaaggtgttggtgggtctcagcccttgagggctattggtattttaaagaagttatgtaatcaccctaatctcttgaattttgaagatgaatttgacgatgaagatgatttggaattacctgacgattataatatgccgggttccaaagccagggacgtacaaacaaaatattctgctaaattttccattttggaaagatttctccataagataaagaccgaatccgatgataagattgttttgatctccaactatacccaaaccttggacctcattgaaaaaatgtgtagatataagcactacagtgctgtaagattggatggtacaatgtctattaacaaaagacaaaaattggtggataggttcaacgatcctgaaggccaagagttcatcttcctcttaagttctaaagcaggtgggtgtggtatcaatttgattggtgcaaatagattaattttgatggatccggattggaatcctgctgctgatcaacaagctttggcacgtgtttggagagacggtcaaaaaaaggattgtttcatttacagattcatatctactggtaccatagaggaaaaaatctttcaaagacaatctatgaaaatgagtttgagttcctgcgtggtcgatgcgaaagaagacgttgaaaggttgtttagttctgacaatttaagacagttgtttcaaaaaaatgagaatacgatatgtgaaacacacgaaacataccattgtaaacgttgtaatgctcagggtaaacaattaaagagagcccctgcaatgttatatggtgatgcgacaacttggaatcatttgaaccatgacgcattggaaaaaacaaatgatcatttattgaaaaacgagcatcattacaatgatatcagttttgcatttcaatatatttctcattga

SEQ ID NO: 3847 - DNA, 900 bp, Saccharomyces cerevisiae
atgtccacaagcattacagtaagaaatagagatcgatcgctaccaccgctattgctccccaatgtttccctgctagaaaaagatatacggcgtaaaggcacccaaaatgtgggcatcaccgatccagaactcttgtcgaccacttggacgaggaagcgggcttttccgactgacgagcttttaggaggctataagagattaaagcctgctgccgctgacagtaatgagtgcgctattggtattgccacggtgacgccgccgccaacgctccccgtaagtgcgattgttccccctccacaaaattacactccaccattgtttgagtatcatcctcatgctcttgcttccatggtcaatgaagacgctaatgcgtcatgcactcaaatgtctataatttcgcgctcaacgagcaactcgacaacctcctctgccacatctactagttcaatttccaagagacaaagaagtggcccaagttgtgacaaatgtcgtttgaaaaaaataaaatgtaatgcgaaaattgagattttgcttcaagacgatactataatgccaatgatctcgaacaagttgcggtacgtcttgactcctgacgatattcggctatatcgaggcacgctgttgcggaatattgccataccggatgatgtcattgagggtacaggctcacgcaagttgattaagcatattgataagttggttttgctcacaccttgtttaccatgcattaagaaaaagcattcttcttcttccactaatttcccaaaaaatgataaatgtactttttcaaaaggctttaccagagctgacataaacatttcatccaaaatctccttaaaatttaaggataaaaccatttacgacataacctatgatgactataaaagcattgatttttag

SEQ ID NO: 3848 - DNA, 900 bp, Artificial Sequence
  Description of Artificial Sequence: Synthetic polynucleotide
atgtccacaagcattacagtaagaaatagagatagatccttgccaccgttattgctccccaatgtttccttattggaaaaagatatacgtcgtaaaggcacccaaaatgtgggcatcaccgatccagaactcttgtccaccacttggacgaggaagagagcttttccgactgacgagcttttaggaggctataagagattaaagcctgctgccgctgacagtaatgagtgcgctattggtattgccacggtgacgccgccgccaacgctccccgtaagtgcgattgttccccctccacaaaattacactccaccattgtttgagtatcatcctcatgctcttgcttccatggtcaatgaagacgctaatgcgtcttgcactcaaatgtctataatttctcgctccacgagcaactccacaacctcctctgccacatctactagttctatttccaagagacaaagaagtggcccaagttgtgacaaatgtcgtttgaaaaaaataaaatgtaatgcgaaaattgagattttgcttcaagacgatactataatgccaatgatctccaacaagttgagatacgtcttgactcctgacgatattagattatatagaggcacgttattgagaaatattgccataccggatgatgtcattgagggtacaggctctcgcaagttgattaagcatattgataagttggttttgctcacaccttgtttaccatgcattaagaaaaagcattcttcttcttccactaatttcccaaaaaatgataaatgtactttttccaaaggctttaccagagctgacataaacatttcttccaaaatctccttaaaatttaaggataaaaccatttacgacataacctatgatgactataaaagcattgatttttga

SEQ ID NO: 3849 - DNA, 933 bp, Saccharomyces cerevisiae
atgccgtccaataatagcagttttttagatattgacgatgatctcgagggtgtagatgattttggcaacgagcccaacccatttgatgatgccaccgtacctgatagcccaaacatgaataactcgactgctggaaagggtagcgaattttataacacaacgggcagtaaggcagaatccgcaccattacagggtcaaatggacccaccagcgtacgaccaagtgataggacagaatgacaacgacggtcttgggcgtaatggattgaggccaggattgataaactactattctaaatacttccagatcgatttgacgcagttcaaaaagagattgtccgcggtactgacgtttagaaacgatcataattccgaaagtaacgaagataacactgatttatacggtgctgtatggatcactgccacggtggtaatgatcaattttaccatgagtagggggttaaattttattatcagtgacgtaattgagggcgtcaagactggtgaggacatcgacagggccagtcagtttaagaagctactgcattctatttggctattttacgggtacacgttcggcgtaccatttattaccatgcaagtattgaatagagatgagcactcggagcgcaatagaagcttcaaaagtgttcctgaattgatttccgtttacgggtacgctaacttgatctggatacccgtttgtgttatattgaatatattggatatgtccaagcgcctgaggactgttcaagcaattcaatgggcaattgtggctcttgggtgggcacagtcgtcttatttcttgaattctcaaatatcgagtaataataatacggagacacaatcgaacgggaaattttcgctgtccatcatcgttgtcgttgcgctgcatactttattctgtctattgttcaggtttataatattttga

SEQ ID NO: 3850 - DNA, 933 bp, Artificial Sequence
  Description of Artificial Sequence: Synthetic polynucleotide
atgccgtccaataatagcagttttttagatattgacgatgatctcgagggtgtagatgattttggcaacgagcccaacccatttgatgatgccaccgtacctgatagcccaaacatgaataactctactgctggaaagggtagcgaattttataacacaacgggcagtaaggcagaatccgcaccattacagggtcaaatggacccaccagcgtacgaccaagtgataggacagaatgacaacgacggtcttgggcgtaatggattgaggccaggattgataaactactattctaaatacttccagatcgatttgacgcagttcaaaaagagattgtccgcggtattgacgtttagaaacgatcataattccgaaagtaacgaagataacactgatttatacggtgctgtatggatcactgccacggtggtaatgatcaattttaccatgagtagggggttaaattttattatcagtgacgtaattgagggcgtcaagactggtgaggacatcgacagggccagtcagtttaagaagttattacattctatttggttattttacgggtacacgttcggcgtaccatttattaccatgcaagtattgaatagagatgagcacagcgagcgcaatagaagcttcaaaagtgttcctgaattgatttccgtttacgggtacgctaacttgatctggatacccgtttgtgttatattgaatatattggatatgtccaagcgcttaaggactgttcaagcaattcaatgggcaattgtggctcttgggtgggcacagtcttcttatttcttgaattctcaaatatctagtaataataatacggagacacaaagtaacgggaaattttctttatccatcatcgttgtcgttgcgttgcatactttattctgtttgttgttcaggtttataatattttga
